United States Patent Application Publication US 2017/0114356 A1 - sequence listing, part 79

SEQ ID NO: 121023 - DNA, 2125 bp, Zea Mays
aaaaaacttttttaaaaaaaaatcactcccacgtcgcctcgcccgctgcgacagcgcatacgccaccctcccgttgcgtacaccgtatgtatctacggtgactcggggggcacgcagacgcagtggggactggggagagcgagagcgaccgaccgaccgagcaagggtttcgtctccggcggctgcagcggagacggatctgggagggatggggaaccggataggcgggaggcggaagccgggtgtggaggagcggttcacgcggccgcaggggctctacgagcacaaggatatcgaccagaagaagctgcgcaagctgatcctcgaggccaagctcgcgccctgctacccgggcgccgacgacgccgcggccggtggaggggacctcgaccttgaggagtgtcccatctgcttcctgggatattctaggggctgtgtttccacaaggtcgtctgaggaccagccgaggtttagtacatttccatcttttcaatggctcgactgtttttgcctgataccccagagttgccaacaagtagtacaaagtgcagtgaaggtggcatcattttttggttctgtatatatgtctgcgatgtactacccaagcctcaaccgttcaaagtgttgctcaaaggggatatgtacagagtgttttcttcaaatgaaaccgactcatactgctcggcctacacagtgcccattctgcaaaacggccaattatgctgtggagtatcgtggcgtcaaaacaaaggaggaaaggagcatagagcagtttgaagaacagaaagtcatagaagcacaattgaggatgcgccaaaaagaactccaagatgaagaggctaaaatgaaaagaaaacagagcaggtgttcttctagcagaacagtaaccccaacaacagaagttgagtatcgagatatttgcagcacatccttttcagtgccatcatatcaatgtactgaacaaggaaatgaatgctgttcatctgaaccttcatgctctagccaggctaacatgcggcctttccattctaggcacaaccgtgatgataatgttgacatgaatctggaggatatgatggttatggaagcaatttggcgttccattcaggaacaagggcatctagtaaatcctgtctgtggcagctactttcctgtaatcgagccaccatcacgtgagaggcaggcatttgttccggctgctcctctagaaatgcctcatccaggtggatattcgtgtgcagttgcggctttggctgagcaccaggcaccaagcatggatttctcttacatgagtggcagtagcacatacccagtctttgacatgatccgacggccatgcaacatgtccagtggaagcctgtgcggcgccgagaacagttcactggacacctggagcgggatagcgccaagttgcagcagggaagtggtaagagacgagggagagtgctcggccgaccactggtcggagggcgcggaggcaggaacaagctacgccggatcggacatcatggcggatgcaggggccatgcagccgctgcctttcgccgagaacttcgccatgggtccaagccacttccgcccggagagcgtcgaggagcagatgatgttttccatggccgtgtcactggcagaagctcatcacggtaggacgcaggcgcaagggctggcatggttgtaagttgtaacactaattttgacgcttcggtgcccccctgcccccttcctgttgcgctgccgttccacttgccccgccccgcttctctgttttttattatttttttggtgccaccttgtttggcattttgctcttttctttctttctctttttttttttgcatgtgttgcttcatggcttgatatagatcttgctatagccctccattgccattgcttatatgtatgtaaaatggaatatgtggaaataggaaagaaaatgggtcagagttcttttgccggtagaggatggggcagtgtgtttttttcgcatcgcagagcattcttaatatcttgcaagtttgcattgtaaccattctcttccgttgacgtgttcttgggtcctgtaaagatgcttgtctgtatggggaaaaaaatgttctagactcggccgatcgaggctgtttttcag

SEQ ID NO: 121024 - DNA, 1951 bp, Zea Mays
aaaaaacttttttaaaaaaaaatcactcccacgtcgcctcgcccgctgcgacagcgcatacgccaccctcccgttgcgtacaccgtatgtatctacggtgactcggggggcacgcagacgcagtggggactggggagagcgagagcgaccgaccgaccgagcaagggtttcgtctccggcggctgcagcggagacggatctgggagggatggggaaccggataggcgggaggcggaagccgggtgtggaggagcggttcacgcggccgcaggggctctacgagcacaaggatatcgaccagaagaagctgcgcaagctgatcctcgaggccaagctcgcgccctgctacccgggcgccgacgacgccgcggccggtggaggggacctcgaccttgaggagtgtcccatctgcttcctgtactacccaagcctcaaccgttcaaagtgttgctcaaaggggatatgtacagagtgttttcttcaaatgaaaccgactcatactgctcggcctacacagtgcccattctgcaaaacggccaattatgctgtggagtatcgtggcgtcaaaacaaaggaggaaaggagcatagagcagtttgaagaacagaaagtcatagaagcacaattgaggatgcgccaaaaagaactccaagatgaagaggctaaaatgaaaagaaaacagagcaggtgttcttctagcagaacagtaaccccaacaacagaagttgagtatcgagatatttgcagcacatccttttcagtgccatcatatcaatgtactgaacaaggaaatgaatgctgttcatctgaaccttcatgctctagccaggctaacatgcggcctttccattctaggcacaaccgtgatgataatgttgacatgaatctggaggatatgatggttatggaagcaatttggcgttccattcagcaggaacaagggcatctagtaaatcctgtctgtggcagctactttcctgtaatcgagccaccatcacgtgagaggcaggcatttgttccggctgctcctctagaaatgcctcatccaggtggatattcgtgtgcagttgcggctttggctgagcaccaggcaccaagcatggatttctcttacatgagtggcagtagcacatacccagtctttgacatgatccgacggccatgcaacatgtccagtggaagcctgtgcggcgccgagaacagttcactggacacctggagcgggatagcgccaagttgcagcagggaagtggtaagagacgagggagagtgctcggccgaccactggtcggagggcgcggaggcaggaacaagctacgccggatcggacatcatggcggatgcaggggccatgcagccgctgcctttcgccgagaacttcgccatgggtccaagccacttccgcccggagagcgtcgaggagcagatgatgttttccatggccgtgtcactggcagaagctcatcacggtaggacgcaggcgcaagggctggcatggttgtaagttgtaacactaattttgacgcttcggtgcccccctgcccccttcctgttgcgctgccgttccacttgccccgccccgcttctctgttttttattatttttttggtgccaccttgtttggcattttgctcttttctttctttctctttttttttttgcatgtgttgcttcatggcttgatatagatcttgctatagccctccattgccattgcttatatgtatgtaaaatggaatatgtggaaataggaaagaaaatgggtcagagttcttttgccggtagaggatggggcagtgtgtttttttcgcatcgcagagcattcttaatatcttgcaagtttgcattgtaaccattctcttccgttgacgtgttcttgggtcctgtaaagatgcttgtctgtatggggaaaaaaatgttctagactcggccgatcgaggctgtttttcag

SEQ ID NO: 121025 - DNA, 1948 bp, Zea Mays
aaaaaacttttttaaaaaaaaatcactcccacgtcgcctcgcccgctgcgacagcgcatacgccaccctcccgttgcgtacaccgtatgtatctacggtgactcggggggcacgcagacgcagtggggactggggagagcgagagcgaccgaccgaccgagcaagggtttcgtctccggcggctgcagcggagacggatctgggagggatggggaaccggataggcgggaggcggaagccgggtgtggaggagcggttcacgcggccgcaggggctctacgagcacaaggatatcgaccagaagaagctgcgcaagctgatcctcgaggccaagctcgcgccctgctacccgggcgccgacgacgccgcggccggtggaggggacctcgaccttgaggagtgtcccatctgcttcctgtactacccaagcctcaaccgttcaaagtgttgctcaaaggggatatgtacagagtgttttcttcaaatgaaaccgactcatactgctcggcctacacagtgcccattctgcaaaacggccaattatgctgtggagtatcgtggcgtcaaaacaaaggaggaaaggagcatagagcagtttgaagaacagaaagtcatagaagcacaattgaggatgcgccaaaaagaactccaagatgaagaggctaaaatgaaaagaaaacagagcaggtgttcttctagcagaacagtaaccccaacaacagaagttgagtatcgagatatttgcagcacatccttttcagtgccatcatatcaatgtactgaacaaggaaatgaatgctgttcatctgaaccttcatgctctagccaggctaacatgcggcctttccattctaggcacaaccgtgatgataatgttgacatgaatctggaggatatgatggttatggaagcaatttggcgttccattcaggaacaagggcatctagtaaatcctgtctgtggcagctactttcctgtaatcgagccaccatcacgtgagaggcaggcatttgttccggctgctcctctagaaatgcctcatccaggtggatattcgtgtgcagttgcggctttggctgagcaccaggcaccaagcatggatttctcttacatgagtggcagtagcacatacccagtctttgacatgatccgacggccatgcaacatgtccagtggaagcctgtgcggcgccgagaacagttcactggacacctggagcgggatagcgccaagttgcagcagggaagtggtaagagacgagggagagtgctcggccgaccactggtcggagggcgcggaggcaggaacaagctacgccggatcggacatcatggcggatgcaggggccatgcagccgctgcctttcgccgagaacttcgccatgggtccaagccacttccgcccggagagcgtcgaggagcagatgatgttttccatggccgtgtcactggcagaagctcatcacggtaggacgcaggcgcaagggctggcatggttgtaagttgtaacactaattttgacgcttcggtgcccccctgcccccttcctgttgcgctgccgttccacttgccccgccccgcttctctgttttttattatttttttggtgccaccttgtttggcattttgctcttttctttctttctctttttttttttgcatgtgttgcttcatggcttgatatagatcttgctatagccctccattgccattgcttatatgtatgtaaaatggaatatgtggaaataggaaagaaaatgggtcagagttcttttgccggtagaggatggggcagtgtgtttttttcgcatcgcagagcattcttaatatcttgcaagtttgcattgtaaccattctcttccgttgacgtgttcttgggtcctgtaaagatgcttgtctgtatggggaaaaaaatgttctagactcggccgatcgaggctgtttttcag

SEQ ID NO: 121026 - DNA, 2021 bp, Zea Mays
gttcttcaaaaaaatggtgccttatgtgtgaacttgagcaatatgcttcaactttacgtgaaagtggtgggcccttatctccaagtagaattctttctaatctgaggaatattggatgtcgcttgggtggtggaactcaggaagatgctcatgagtttttaaggcatcttgtgatgtctatgcaagcagcttgcttggatgggctgggtggtgagaagcatgttgagccaagtttgcaggaaacaacactgatacaacagatgtttggtggccgtcttaaatccaaggttaagtgcctcagatgttatcacgagtctgaacgatatgagaatataatggatcttactttggagattcacggctgggtagagtccttgcaggatgctttgacacagttcactgcccctgaagatttagatggtgataatatgtataaatgtggaagttgtgctgcctatgttaaagccaggaagcaactgagcgtgcatgaggtgccaaacatattaacagttgttcttaaaagatttcagtcaggaaaatatggcaagatcaacaaatgtgttactttccctgatatgttggacatggttccttttgtgactgggtctggtgacaatccccctctttatttcttgtatgccgtggttgtacatgtggatacagaaaatgcatcattctctgggcactatatatcatatgtcaaagatatgcagggtacatggttgagaattgatgattcagaggtccaggttgtatcagtgaatcaagttatgtcagaaggtgcatatatgcttttctacatgaggtctttcccccgaccaccaagaatatacatcgagaaggggccgactgttccatccgcgaagcgccacacatcaaagtattccaagggctctaaacacgagcgcgagcagacagagttactcctctcggcgaacgatccagcatacggtgtttatgactttagacctgatggcgagggctacacgcaagatcagcaagcagagttgagatccagggatttccatcgcgccgacgatgccttcgcagactcggtcagcgcggacttctcggaggccacgtcaagcgaatggtcgctgtttaccagctccgacgagtcctcattcaccaccgagagcacaagggactcgttcagcgttgtggactacggcgacaacgctggcctggacccaatctcctcgatatttgggccaagctatgctccggagcatcatcccggtccacctggcagtttcgccgcgtgcacgaggctctcgccttccaacccacagacaaggtacttctcggagagcacagggttcgtctcggactactcttccagcggcattgtacatagaggaagggatccaggtagggcatacacctgttcagcggaaccgctcgcttcggctgcggcggcgcaccagcaccagcggtacgcccttagcggccgagacggtttggtccagacatctgggttctgccaaatgtaaccggctttacgatttcgtagctatagctgtagctggtgctcgggcagctgcggtttagcactgccactgatgctgctgcctctatgttctttttatttcaggtgaggcgtattaaattttggctgcatgtcattcctaggctagctcgattcaatgtagcgagagagagaggaacaaatttagattgtgtctatatgcaggtgaaattttagagcgcggtggagctgctccggttgaagccatcccccgaggcccgaaccagtaaattacgccgaatccggcagtcgtatggccctgcacaccagtgctttgtgaaaagcttgcagattcatcaattgacgtgcacttgccttttatatggacgctgacgtatggaggtgcacactctccacctccgtatatctcgccacctactctgtttatattagaaggttgattgctgacacacaacacctgctcgtacttttttgtcgaaatcatgacggacaacaacgctaaacatatagtacaatcttcttgtcttgctga

SEQ ID NO: 121027 - DNA, 585 bp, Zea Mays
tttggggaaatttccatattgttgacttggatcagttatcacatggctcatgttctatgctcgagctgacagttttgtaccacttgaatgtttcttgatgaagaactaaatgaactttattttattatttcagtcaggaaaatatggcaagatcaacaaatgtgttactttccctgatatgttggacatggttccttttgtgactgggtctggtgacaatccccctctttatttcttgtatgccgtggttgtacatgtggatacagaaaatgcatcattctctgggcactatatatcatatgtcaaagatatgcagggtacatggttgagaattgatgattcagaggtacgttttacaacaaggcctactccagttaagtaggctaagaatgtcttaccttatcacctaatgtatgaattgcgagaaattactatggtttcgtgacattgtgtttctagatttaaactctagtgtaaggatagtgaacgttcccatgggcagttttgatcgtcaatgctgtcttccttgatgcagttttgttgtcaaacttctttggtgcacatatgtatgtgcttttccttgta

SEQ ID NO: 121028 - DNA, 2106 bp, Zea Mays
cctctcctccactccacgcctctgaccgattctctctcgccaactaccctctcaaaacggcttcactctcccctttttatttcccatcgtttcccttgccccccgccgtatctgcagttctcgacctctcctcctacctcctcttcactcccccccccccccccccccccccctccctccctcttgcatcactatcaccaccaacaacaaggctaacgcacaccaatccaacaaggagaacaaaaaacaattaatcgtgttttgagcttttgatatcatctcgttccagttaagtgcgtgaagaggcaataatggtggcagtggaggttgtgccggcgtccgcggagtccccgattccgatcgaggctaaggccgcggtgacgtcggaggcggaggcggaggccgagggcgaagtggaggcggagatgaagggtgatgcggcagctacggcgggagaaacggaggaggaggaggaggaggaggagaaggtgtacaagagcgacctgaagaagctggagaacctcatgtccaagcttaacccctgcgcgcaggagttcgtgccgtcgtcgcgccgcacggccccagccgccgtggcggcggcgaagccggcgggaggaagggtgctctcagccgacgcgcccgtgttcgtgtccgccgccgagtactacggcgctgccggcgggcacctggagataggcggcggcggcggcggcggcaaagtcgtcgttggcggcgggggcagggactccagcagcgacggatccagcaacggcggcggcggcggcagtcgccaccaaccgaatcgccggaggaggaacagcttcaaccacgggaggcggaggggggccggaggccggccccggcggggtgatagggaggacagcgtgcggcggaccgtctacgtgtccgacattgatcaacatgtgaccgagcagaagctcgctgaagtgttctccaactgcgggcgagtggtagattgccgtatctgtggcgacccccactctgtcctacgctttgcgttcatcgagttttctgacgatggtggcgcaagagcggcgctaacactcgcgggaaccatacttggctgctatcctgtcagagttttgccttctaaaacagcaattctacctgtcaacccgaaatttcttcctcagactgatgatgagaaagaaatggtatcaaggactgtatattgtactaacatagacaagaaggttacggaggaggatgtaaagggtttcttccagcaagcctgcgggaaggtttctcggctgaggctccttactgacatagtacactccacatgcattgcttttgttgagtttgctcaggctgaaagtgcaattatggcattaaactttagtggtatggtccttggctcacttcctatcagggtgagcccttccaaaactccagtccgtccacgttctcctcgtgtgatgtccaattgatcaggctgctaccaatagcaaatcatcctaggcagagcttattgtagctatgatcgccctagaacccacttcacggatcaatgacgtcgttgtcctgagagtgtccaagtcagtcataggaaaccaacttgttgccaaatgctaatgtttttctgtttgccagatccatgcaccatttcccttctttttttcattcccccttatgttaattatgaacataattgtttataatcgcctttctcaggcatcagaataagaatgaataactctggtatttttttgttgtacgggagatcgtatatttttattgtatttttgtttttttacctcattttgactgataggcatgtgcagtttatttgtgttggtctgcactctgcgtggatacataggacatgtgtttctgccgttgttttggctcaaaaaagtggcgagttttggcaatctgttcccaagtgcaagtgttgttgcctacgatttctgcatcgttgtccttccctgctggaggagtgtttctgttgttaatcatgcactggagtttgactgcacgacaacgtctgcacgattggttggtggaggcgacggatccagcaatgccggtggccacccactgaatcgtggggcggtatttgtttcctcttctgttcatctctga

SEQ ID NO: 121029 - DNA, 1224 bp, Zea Mays
aatgttgatgatctagtagctgctctgtctaggtggtgacaatgcagcttaattgtaacattatgtctactactgttgacctgtaggtggtagattgccgtatctgtggcgacccccactctgtcctacgctttgcgttcatcgagttttctgacgatggtggcgcaagagcggcgctaacactcgcgggaaccatacttggctgctatcctgtcagagttttgccttctaaaacagcaattctacctgtcaacccgaaatttcttcctcagactgatgatgagaaagaaatggtatcaaggactgtatattgtactaacatagacaagaaggttacggaggaggatgtaaagggtttcttccagcaagcctgcgggaaggtttctcggctgaggctccttactgacatagtacactccacatgcattgcttttgttgagtttgctcaggctgaaagtgcaattatggcattaaactttagtggtatggtccttggctcacttcctatcagggtgagcccttccaaaactccagtccgtccacgttctcctcgtgtgatgtccaattgatcaggctgctaccaatagcaaatcatcctaggcagagcttattgtagctatgatcgccctagaacccacttcacggatcaatgacgtcgttgtcctgagagtgtccaagtcagtcataggaaaccaacttgttgccaaatgctaatgtttttctgtttgccagatccatgcaccatttcccttctttttttcattcccccttatgttaattatgaacataattgtttataatcgcctttctcaggcatcagaataagaatgaataactctggtatttttttgttgtacgggagatcgtatatttttattgtatttttgtttttttacctcattttgactgataggcatgtgcagtttatttgtgttggtctgcactctgcgtggatacataggacatgtgtttctgccgttgttttggctcaaaaaagtggcgagttttggcaatctgttcccaagtgcaagtgttgttgcctacgatttctgcatcgttgtccttccctgctggaggagtgtttctgttgttaatcatgcactggagtttgactgcacgacaacgtctgcacgattggttggtggaggcgacggatccagcaatgccggtggccacccactgaatcgtggggcggtatttgtttcctcttctgttcatctctga

SEQ ID NO: 121030 - DNA, 276 bp, Zea Mays
atggcatctacatcaagcacacgagagaaaggctctgacataaaaattcctccgcaacacgccgacgaactgtctgcttacaggctacacatatcgcctaccatctcatgggagacgggttattcgcaaaccgagtatgtatcttggcctagccggtgttctgcatgccggcagcgatgcccttcatggtcaggatcagcgtgtcctccaggcccggggcgtactcgctctgctcgttcagctgcaccagctccgccggctgactctcgtcggtga

SEQ ID NO: 121031 - DNA, 1223 bp, Zea Mays
ttgcactggtgcaaagtgttatgcttgtaagaatactggatacagttgaaacctaccgatctgaagtattcaacgaagcgtggctcttgaaagacaattgatcgatattctttagttgctacaacagccatttcatccatcagagcacgccattctggcttgggggaaattggaggatgcatgccatgctcaagagtagctgcagtgtagcgttgtaaagttctaaagcacaagtgctcctctccaaaggagtgctcaataacttcgccttgaactgttacacgaagcgatccatgtatcgtgtctggtggctgagataatatagccagatgggttggaccaccacctctgccaactgttccacctcttccatgaaacattgtcagcttcactccataatgctttgccaccttgatgagctcttcttgtgctttatacatttgccatgctgcagagagacgccctgcatctttgccagaatctgaatatccgatcatgacctcctgcttaccattaatcctattcatgtaccagtcaattgaaaagagtcgtgctacagctgctggagctgcttcaaggtctgcaagtttctcgaagagtggaacaactctcagtggttgctttacatggcactctcgctgcaaaagctccaccgcaagcacatcagatggggcagttgccatcgagatgatatatgcaccaaagcaatctgctggaagctctgcaaggacatgaaatgtgcctaaaacatcagcagtctcttcagtctgaggaagatcagaaccaaacaatggacgtttgcccctcagttcagacaacaaccaatcctggcgtttctcctcagaccattcagcataggagccaattccaagatgtgtcgttatcgaatcaaggacatctgtgtgtcgatcagattcctgcctgatgtcaagcttcacaagggcaagcccaaaagttgatacttgacgcaagaaatcaagaagacttccgtcagctataggtttgtcaccacaagcacataatgatctataacatagctcaagaggttccagaaactgcaatgtagaagtaaaagttgcctcctctggaatctcagaaattccagatgtcaatagatgacgagaacgttcacgtgtgtagtacaatttatccctgacatcaccaagtatgacacgatatggttcatttggaggaacttgcttccagaattctgcgagtgttga

SEQ ID NO: 121032 - DNA, 2246 bp, Zea Mays
cacggcgctgtaacctgcctgggcgatccatccatggcgtcgttagccaccagcacgcccgccgccgccgccgggccacgcccacgcccagaccggccgcacgtcgtgcttgtgcccagccccggcgtaggccacctcatgccgatggccgagctggcgcgacgcctcgtgtcgcaccacgccctcgcggccacgcttgtcaccttcaacctctccggggaccctgacgcgaagtccgctgccgttctgtcctccctccgcgcagcaaacgtttccaccgccacgctccctgcagtccccctcgacgacctccccgacgatgccagcatcgagaccgtgctcttcgaggtgatcggccgctccatcccacaccttcgcgcttttctccgcgacgttggcagcaccgccggcgccccgctagccgcgctggtgcctgacttcttcgccaccgcggcgctgcccctcgcctccgagctcggcgtcccggcgtacatcttcttcccctccaacctcagcgcgctctccgtcatgcgaagcgccgtggagctccacgacggcgccggcgccggcgagtatcgcgacctcccagaccctctcccgcttcccgggggcgtgtcgctacgccgcgaggacttgccgagtgggttccgagacagcaaggaatcgacctacgcgcaactcatcgacgcgggccgtcagtaccgaaccgctgccggcatcttggcgaacgctttctacgagatggatccggcgaccgtggaggagtttaagaaggcggctgagcaaggtaggttcccgccggcttatccggtgggcccgttcgtccggtcaagctccgatgaaggctccgtatcgtcgccgtgtatagagtggctggatctgcagccgacgggatccgtggtgtacgtttccttcgggagcgcaggcacgctgtccgtggagcagacggccgagctcgccgccgggctggagaacagcgggcacaggtttctctggatcgtgcgcatgtcaagcctgaacggcgagcactccgacgacatgggccggaattactgtgacggtggcgacgagaacgatcccttggcatggcttccggaggggttcttggagaggacccgcgggcgtggcctcgccgtgtcgtcgtgggcgccgcaggtacgcgtgctgtcccacccggcgacggccgccttcgtgtcccactgcggctggaactcgacgctggagagcatctcgtccggcgtgccgatggtggcgtggccgctgttcgcggagcagcgggtaaacgccgtggacctgtcggagaaagtgggtgtggcgctgcggctgggcgtccgcccggacgacgggctggtcgggcgcgaggagatcgcggcggtggtaagggagctgatggagggggaggacgggcgcgccgtgcggcgccggacgggggacctgcagcaggcggctgacctggcgtgggcgtccgatggctcgtcgcgccgggcgttggaggaggtcgtcagcagatggaaagcgggggctattcgcagagcggcggtataacctggtggatttgcttgcttttctcttggattttgttaagaaaataataacacttctgctatatttcagctgatgatatcaggcagcacacttgtctaataattatatgatttatctttacatcatactaacatatttaatatttttctctaacaatatgaaccttgtaaattgttaatggtcaacaagtttaaaataatttaacccaaacgatttttttcataaaggataaagaaaaactacgtcgtccgaagaaatctatttatggattaaaataagcgtcgagacagggttatatcaagtttataagacaattagcaactttagatctaaggaagctgttccgaagcgcttctttttgcagtggctgcaacaactctattgttgggatcatgcttcgtcgccgaaggtcctatggaaagaaacagcttcggctgaagctgcttgtacgtgatgccgaaggtaccattcatgaagcttcggtattacaacatattcgaagataaagggtcgaaccgacttaaagatagaatgaccttttagtccataagggtctgagtcaacgttgtaaactttttatgaggggcatgattataattcctcacagactgtgtcctgtgcctataaatagtgaacagtattcctttactgttcacgcattcctgtaattgcaaacgcatcactcgggaatttttacttgt

SEQ ID NO: 121033 - DNA, 1724 bp, Zea Mays
gtatatacttggcagttggcaccaaccatacgtgtgggcatatttcaccaaggctccgacgaccaccggtgaaagtgaaacgtcggtgtccggcgacgaccgagttcccatcgccggaaatcatggagaagcttccgtcacagcagcaggttgtgctgttggcgagtcctggcgcgggccacctcatcccgatggtggagctcgcgcagcggctcgccgctgaccacggcttcgcggtcacgttggtcaccatccccggcatgtccaacccggcaacggaggccgtcgtgctgtcctcgctgccgtcctacgtcctgaccgcggtgcttcctgctgttcctcttgacgacctcccgtcggacatcggcttcggtgccctcgtgttcgagttcgtccgccgatcgctcccaaacctccgcgcgctcatggaggacgccagccgcggctcggtgaccgcgctcgtatgtgacttcttcggaacctcggcgctgccgctcgccgcggagctcggcgttcaggggtacgtcttcttgccgaacagcttcgccatgatctccatcatgcgccacctcgcggggctccatggcgacgccgctgcccccggcgaataccgtgacctcccggacctgctcccgctcccagctggaggcctggttcttcaccacgccgacctccccgaagggttccaggaccggaaagacccggtgtacgcctatcacgttgaggaggcccggagatacggccgcgccaacggcttcttggtgaacagcttcgaggagctggaggtcgtcatggtggaaacgttcaagcgggacgccgaggacggcgcgttccctccggtgtaccctgtgggaccctttgtcaggtcaagctccagcgaagaagccgatgaatcgggctgccttgagtggctggatcgccaaccggagaactcggtggtatacctctccttcggcaccgggggctcgctatccgtggagcagacggccgagctcgccgccgggctggagatgagcggccacaggtttctttgggtcgtgcgcatgccgagcctcgacggcaacccctgtgcctatgggtcgatgcccggcgacaaggacgacccactggcgtggctccccgagggattcttggagaggacgagcggccggggcctcgccgtcgtggcgtgggcgccgcaggtgcgcgtgctgtctcactcggcgacggcgtgcttcgtgtcgcactgcgggtggaactcgacgctggagagcgtggcagccggcgtgccgatggtcgcatggccactgtacgcggagcaaaagatgaacgcagccatcctgaccgaggtgaccggcgtggcgctgcggccggcggcgcgcggcaacggccacggcttggtcacgcgcgaagagatcgcggcttcagtgaaggagctaatggagggggagaaaggaagcgcggtgcgcggccggacgagagagctgcgtgaggcttcgaagcgtgcgtggtcgtcggaagggtcttcccggcgggcgctcggggaagtcgccggcaagctgaaggctgcacttgtcaacgggaacggatcggctccatgattcgttttcttcccgtgaatcggatgagataaaaaaaactattttttactgcaattcattgggtgtggtaattatggcatatgtatttatggactagctgtatctattcaaagttttttttgcttgcgtacatgtttcatttct

SEQ ID NO: 121034 - DNA, 817 bp, Zea Mays
atggattaaaagttaaacgaaccttggaaatggcgtgttttagttgtgcggtagatcgggtgcccacttcggtctcttattctctctcatctctacgtaggatttaatgacatagacaagcttacatcccatctgcttgctctcagggagagagaaagaaagagatccaatcaaaaacgtttgggtcgggtcctggaagaatcgttgggttcggcagttagtcaaacaaaggttaaaaaaatcacatatagatttatttggaaagtgaaatctcattatttcagaaagcgactaagatatagataaagggaaaacgtacagaactcgaacaaggctttttttttgcgaaaacttttcttggattttggggcaatagcattaaagaggtttagaaaaagtttgcttattaatacatggtaatttacaccctcaatgatgtatgtgaaatggaaaattaagtgatgtatatataagccagaccgtctgatgcccctataaccgctatacagactagaagcaaagcctcagcacaaggtatactcgcaatcaagaaggcgggtcaggatctcctggcagcatggacgcctctccggttctgcccagcaatctgttaaacagggatgagcatgtttttagggtaggtcaacagtaaatgcttgaatagagttaagaaaaattctcttttttaagaatacgacggtgacctaaatttcagaagtgagtttttggtggacatcgatagtcttttcacatggaaatgtaacaataaaaagtttactagcttatggaagtacttctcatgaaaattacaaagata

SEQ ID NO: 121035 - DNA, 99 bp, Zea Mays
gattgtacagatttattaaaaacagaacagttatttcacaaaggaatataggaacagaaccagaaacatgctctgcaaaggatcagacttcacgcgtgc

SEQ ID NO: 121036 - DNA, 2808 bp, Zea Mays
ttcgactattccaccccaccacatccacatccattcaatcaagaccagcacactgccgcgctccgcaggtcttctctcctacaaaacaaaaaaaccagagagaaagacaacacggccatcacgcgcaaagcgagactacctggagctatgccactccgcttggcggcctgccgcgtcttcctgctcctcgccgcggccgcggccgccgccacctctccgtctccggtggcaacggccacgtccaacggctccgcgaactgcaccctccgcgacggagaaatcgtccgcgcggcgttcaggcaggtcgccaacttccccttgccgctgcccggccgccgccgcgcgtgccgccacgtcaggcggctccgcttcccgtcgcgcaacctcacgggcgccgtggactgggacgagctaggcaacctgagcggcctcctcaccgtcgacctctccggcaactcgctccacggccgcgtcggcagctcgttctggcgcgcgccgtcgctccgggccgtggacgtctcctgcaaccgcctcgaaggcgccctccggttcggcggccacccaggcacgcgcctagccacgctcaacgtgtccggcaaccggttcacctccgtcgagaacgtggccgggctctccggcttggtcggcctcgacgtgtccaggaacgccatcggagcggtgccggaggggctgcggggcctgacgctggtgcgccagctcaacctgtcgtggaacaacatggccgggacgttccccaccgacttgccgcctctcgccggcctccaggtcctggacatctcgcacaacgacttctccggcgcggttgacgccgacaccatccgtaagttcggcagttcctccttcgtccaagccggcgacgcgttgcgggtggtcgaggacctcgcgccggcgccggcgccggcgtctagtggcggcagacacaaacgcagacgtgcggtcaccatggcgctggtctcagtcggcgcagcggtgacgctggtgttcttggccgcgtgcgtggcgtgcgccatgacgcgtcggtggaataagaagaagaaggacaaggacaaggaccggaagacagcggcgtgggaggacgacgaggtggccgtgggggcgttgaagctggccgccgccgcgccggtggtggtgctcgagcggccgctgatggagctgactctggcggacctggccgcggccacgtccgggttcgggcgcgagtcgcagctcgcggacacgggcggccgcagcggggccgcgtaccgcgccgtgctccccggggaccttcacgtcgtcgtgcgcgtcgtggagggcgccgtggccggagttggggaggacgccgacgccgccgccaccgaggctgccttccgggagcttgcccggctcagacatccaaacattctcccgctccttggttactgcatcgcaggggaccaaaagcttgtgctctacgagtacatggagaagggcgacctgcaccggtggctgcacgagctgccagtgggcagcatggacacggaggacatatgcatcgacgcaatggaagccatgacggaagacagcagaaagcccgcgggcgactggcccacgcgctaccgcatcatcctaggcgtcgcgcgagggctggcgttcctgcaccagggatgggccggggccgggggcgggcggcggccgatcgtgcacgggcgcctggtcccgaccaacgtcctgctcggcgacgacatggagccgcggatctcggacttcctcccgcaccccggcggcggcggcggcgccgagacggcggagggcgacgtgtaccgcttcggcgcgctggtgttcgaggtggtgacggggcaggcgcggtggggcgacgcggcgaccacaagctgggcgcgcggcgtggtccgcaaccgcaagggcctcaacctcgtggacgagcggctgcgtgacgagacggcggggacgggcgcggagagggagctgctcgagtgcctgcaggtggggttcctctgcacggccgccgcgccggagaagcggcccaccatgcagcaggtggtcgggctgctcaaggacgtccgaccggccgccaccgctggaggtggcgtgccgccgccgccgctcaggtcgctggccgaatgatgcggtcgtgagctatagcgcacgcgcgccaggacgtggtggcggtagctggagagagaggacagaggagagtagcgaggcacggtgctcgcatcgcagcacgggcacggcaggctgctgcttttcgcacggtagctcccaaatccaagaagattcgtagtgatttctggcctggggcagcccgaaatacgcctccgtgctctgcttttttggtggtcccgcttttggtttggtgtgcagtggtgttccttcctgtctagttttcgtagaaggtaggatggcatttttattggttggtacgctacgtactactccatcagctttgcacatttgtcattggacacgaggtgcctggagtgagagttcgttttgattgcaccaacgttctatacttttgccttgaccgggatggagagcgcccagtgtcacctacgttagggcattattgttccaaggtgcgtacgcaacatataacatggatctttcaccccaattcggattgccctcatgtcagtgactggtacagtggcactgtacgcagtactgcactgaattcaatctattttcatccacagcagattccctcttttttttgtattattattagtggcatgttataaacatgtaattatatgagatatatgtagtatgtggttgttcaacaccaaaacagatagtacaaacggt

SEQ ID NO: 121037 - DNA, 1974 bp, Zea Mays
atgccactccgcttggcggcctgccgcgtcttcctgctcctcgccgcggccgcggccgccgccacctctccgtctccggtggcaacggccacgtccaacggctccgcgaactgcaccctccgcgacggagaaatcgtccgcgcggcgttcaggcaggtcgccaacttccccttgccgctgcccggccgccgccgcgcgtgccgccacgtcaggcggctccgcttcccgtcgcgcaacctcacgggcgccgtggactgggacgagctaggcaacctgagcggcctcctcaccgtcgacctctccggcaactcgctccacggccgcgtcggcagctcgttctggcgcgcgccgtcgctccgggccgtggacgtctcctgcaaccgcctcgaaggcgccctccggttcggcggccacccaggcacgcgcctagccacgctcaacgtgtccggcaaccggttcacctccgtcgagaacgtggccgggctctccggcttggtcggcctcgacgtgtccaggaacgccatcggagcggtgccggaggggctgcggggcctgacgctggtgcgccagctcaacctgtcgtggaacaacatggccgggacgttccccaccgacttgccgcctctcgccggcctccaggtcctggacatctcgcacaacgacttctccggcgcggttgacgccgacaccatccgtaagttcggcagttcctccttcgtccaagccggcgacgcgttgcgggtggtcgaggacctcgcgccggcgccggcgccggcgtctagtggcggcagacacaaacgcagacgtgcggtcaccatggcgctggtctcagtcggcgcagcggtgacgctggtgttcttggccgcgtgcgtggcgtgcgccatgacgcgtcggtggaataagaagaagaaggacaaggacaaggaccggaagacagcggcgtgggaggacgacgaggtggccgtgggggcgttgaagctggccgccgccgcgccggtggtggtgctcgagcggccgctgatggagctgactctggcggacctggccgcggccacgtccgggttcgggcgcgagtcgcagctcgcggacacgggcggccgcagcggggccgcgtaccgcgccgtgctccccggggaccttcacgtcgtcgtgcgcgtcgtggagggcgccgtggccggagttggggaggacgccgacgccgccgccaccgaggctgccttccgggagcttgcccggctcagacatccaaacattctcccgctccttggttactgcatcgcaggggaccaaaagcttgtgctctacgagtacatggagaagggcgacctgcaccggtggctgcacgagctgccagtgggcagcatggacacggaggacatatgcatcgacgcaatggaagccatgacggaagacagcagaaagcccgcgggcgactggcccacgcgctaccgcatcatcctaggcgtcgcgcgagggctggcgttcctgcaccagggatgggccggggccgggggcgggcggcggccgatcgtgcacgggcgcctggtcccgaccaacgtcctgctcggcgacgacatggagccgcggatctcggacttcctcccgcaccccggcggcggcggcggcgccgagacggcggagggcgacgtgtaccgcttcggcgcgctggtgttcgaggtggtgacggggcaggcgcggtggggcgacgcggcgaccacaagctgggcgcgcggcgtggtccgcaaccgcaagggcctcaacctcgtggacgagcggctgcgtgacgagacggcggggacgggcgcggagagggagctgctcgagtgcctgcaggtggggttcctctgcacggccgccgcgccggagaagcggcccaccatgcagcaggtggtcgggctgctcaaggacgtccgaccggccgccaccgctggaggtggcgtgccgccgccgccgctcaggtcgctggccgaatga

SEQ ID NO: 121038 - DNA, 316 bp, Zea Mays
tgtaccttgaatggatgaacagtaaagaacatgtttatatatacatcaactcaactggaacggctcgcgatgatggtgaaccggtcgggatggagagcgaaggttttgcaatctatgatgcaatgatgcgtatgaaaactgagatccacacactttgtataggagctacagcaggccatgcatgtcttgtgcttgcagctggaaaaaaaaggcaaacgttatatgttccctcatgccaaagctatgatttagcaaccacgtattccttcttatgggatgatgcaagcatcagatgttgttattcgtgcaaaggagg

SEQ ID NO: 121039 - DNA, 1452 bp, Zea Mays
aagcctagaatcccagatttgcacacttttattgctttctaaaagaaaaatagtacaggtacaacaataatgggtgtaatcagcacatttttcatgcttcccaaaatttgcactaacaaagtaacaagtagtgaatagagatacaaacataccagaaactatgagtggaagttgtaaactataagctgtgggcagaagtcttacacaaggtcttgctctaacttttctgctattgtagatcatggtcaaaagtggatcttcaaacaatcagaagattactcggttcactgtggtatgcaagctagttgggcatcagtcctaatgattcatatgggactcaaaccattggaagacttcagtattcttcaggctggtgaactcatggtacgcataggcaacattgagctcctcggtgacatgcctctccagaccgaaccgctcaggcagcaccttggcctcctcagccgcctccttccacggcgttctcctcccgtccttcttcagcatccccttctcatccacgaatcccttccgccgaagcatgtccaccagcgcgttggcgaaggcccaggtcagccccggcaccctctccgccaggaactccgcgctcacggcgaagtcatcgcactggatctcccgcacgtcgacgtgcttctccctgagtttgtccatgctttccgcaaccaaccgcgccctttcggtgtccttgggcatatgcacaaacagcgccggcggatacccggtggggatctcggccatggtcccgtacatgccctccgcgatcatgacggtcacgctgctgaacttaaccctggccgcgagcgcggagaggaagtacccgcccgaggacgcgccgatgccgaagagtgggaggcccgcgagctgagggtacttctctgtggtccaccacttgatgatggactggacggcggcgagctcgctgccgtcctccccgccgccggcgtcgtcgagggaccagcacttggcgcggctggagacggcgaggacggcgtacccgcggctgagcgcggcgcgggtgaaacggcgctcctcgggaagccccgtgcagcgcgggcagcccggggaggcgtcgaagaagtcggtggcgcggatggtgcacccgggcgccgcgaacaacgcggctcgcagtggggacgacgggggcggtagctgccacagcacctcgttgccgttccttcgggtgacgctagcgtccaagcggacggcgtccgcgtcggtgacagtggtcagcgccgccgccggcgccgccggaggagcgcgcggaaggagtagcgcggtggcgaggaggagcagcgcgcacgtcgaggcgatcagcaccgcgggccggagggactgcggaatcccagcgaggatggcgtgcatttcgcgtgtcatggaaggggatcgggcaactggagatcccaatcccagagagatttgggcatcagaggg

SEQ ID NO: 121040 - DNA, 1491 bp, Zea Mays
ctcgtcttgtgtttgttgcaagtcgcaaaggtttgcgccgcctgccgggcgtcgtcggctcatcgccgtcggcggtaggcttctgcctcccccgtctcgatacctctccttcggcgaagactcgcagggaggtccccacttcatcacctccgtttcctaccggaaaaggcaacttctgtcggccatctcagtactttttttggaagatggatccagaagactctagtgactttgaagaggaggacgacgaagaagaagatgatgacttaatgatattcatattgccagcgctatatctagcatctactggaattggaactctggatcaaacatctatggttagtgatggtactgcgattgaaactccaagtcaagtatcaaagtttaacgatgcagaaaggatttgtaaagtgcttgaagatgacagaggccaaggctatgataaacttcgtgtggagccccatgttctcctcgaactttcacgctatctgaggtcaaatgatcttttgaaaaataccagaggtgtttctgtagaagagaaaattggcatgtttatttacatgctatcccgaaatgctagttttcagaaactaagtgacagattcaagtacagtacagaaactattcacaggcatatcaaagcatgctttgatgcagtcacaccaatgactggtgaattcgtcaggccaccttcaattcaagcccaccggaaaatatcatctgatacacgttatgggccttactttgagaactgtattggagcaattgatggaatccatgtccctatgacaatatcggacagtgaagcagctccataccgaaatagacaagaatccctttcccaaaacgtgatgcttgcttgtgattttgatttgaattttgtccatgtttcttgtagccgagaagggtctgcatctgacgcagcagtcttatactctgctatagaatatggatttgaagtcccaagaggaaagttctacctggttgatgggggttatgcgaacacgccatcttttcttgctccttttagtgaagtttcttaccatgctgaagagcaagatgagagcaatttccaaccaatagactatagggagcttttcaatcttcgccatgcacagctgtacagacatatcaagcgtgctgtaggcctactgaagatgcggtttccaattctaaatgtcgcaacatcataccgaaaagacactcaactgaaaattccttcagcggcagttgttatgcataacataattcagagacaaggaggtagtgaagagttgttatgtgagcaaacaattccatttgcgtcccgtaaaacagtgaatcttcctagtggtgatgacacgtatggttatgatgtttcagctttcaacagtgaatgcgacatgggtaatgctttgagagatggtattgcactgaggatgtgggcagattatgaaagtagtatgtatgtctgatttcagaatagaacaggctggccttaaagaatattga

SEQ ID NO: 121041 - DNA, 257 bp, Zea Mays
atacgtactagaagccactacatccaggtctggatagataatcgacatctggccttatctgcggcaatctgaaacctaaatgacgccaacagatccataccctctgccagacagaggccttgcgcgcctccgcgacgcgctcctcgatctcgtcttcggtgtagccgtgctcctcgagcgcgtccctgagcacgagcagcttgagctcgacttggcgcttgcggtcgtgctcgaggatctccttgttgggcttgcgc

SEQ ID NO: 121042 - DNA, 101 bp, Zea Mays
attaccttctcaatatctgtacgtcttttcacctactaaatatatactccctccagtgcagtaaatgtagtcgtttagaacattattgtgcataccaagga

SEQ ID NO: 121043 - DNA, 340 bp, Zea Mays
acggccgcgatgtacaacggcatcgggctgcagaccgcgcgggggtcgggcaccaacggttacgcgcagagcaacacgttcttcgtcaagccccgctccaccacatcaaaaagagggtccgggcgggccccacaggccgctgccccccgacgccgccggcgcggatggcggcggaatgcgaaagcccaacaaggagatcctcgagcacgaccgcaagcgccaagtcgagctcaagctgctcgtgctcagggacgcgctcgaggagcacggctacaccgaagacgagatggaggagcgcgtcgcggaggcgcgcaaggccgcggaggcagaggcggcctag

SEQ ID NO: 121044 - DNA, 889 bp, Zea Mays
ttttatacacataatcacatagatatacaaatttaattagtattgcacaatgatagatccacatcacataaaccatcaacaagcaccacaacaaaatcattcacaaaacctacacatgttattatgttttgcacatatttgcaaacactttacaaaatcattcacaaaagtactaacgcttcaagtgattcgcaaaagccttcataaaagcactccaacttcttgtatcctcttgttttaaggcacaagcttgtaggggttgtgatgtcgccacttacttgatgctaacaagacatttctttcaccaaagccatcttcaacacttcgcctataaaaagatctatctctttttcaattgcatgtctgcaagacaagtgataattgcaataagtaacatgatatgttaaccagaaggtatgctagcaccagaaacgaccaaagaagatggtatgctaggaaagatattttgggaatagcttccatttatcctagggaatccctttggcaaatttaaggtcaatcggagatggtttgagtctttttttacttttgaaagcattttttgcggggttctgaatctacatgtacaactgggcaacaagtggaactagtagaaataaaaatagtgtataaataaatggactaatttagagagctggttggcaatgctccgtataaacatagtcttggggtgttgatgcgtttctgtttttacacgcaaaagttctttcgcagtttatttttactagcaagtgccgtgtgtagagtagctcaagtttggcaatgcaaatttgctcaaacgaaccatgcaacccctaggccagggtactgctagatctgtcacaggaactacttgagcatgttgtgtatatatgtacgtctgtctagc

SEQ ID NO: 121045 - DNA, 496 bp, Zea Mays
attcgaatatgggattgctctttaagtactagaagactcccatactaatatagaagccactacatctaggtcttgctagacaatcgacatctggccttatctgcggcaatctgaacctaaatgacgccaacagatccataccctctgccggacagaggccttgcgcgcctccgcgacgcgatcctcgatctcgtcttcggtgtagccgtgctcctcgagcgcgtccctgagcacgagcagcttgagctcgacttggcgcttgcggtcgtgctcgaggatctccttgttgggcttgcgcatcccgccgccaaccgcgccggcggcgtcggggcgcagcggcttgtggagcccgcccggacccccgccggatgtggtggagcggggcttgacgaagaacttgttgctctgcgcgtacccgttggtgcccgacccccgcgcggtctgcagcccgatgccgttgtacatcgcggccggcgggcggggagaggccggatgg

SEQ ID NO: 121046 - DNA, 896 bp, Zea Mays
ttttttgtttataagagatgagtagatgacaaagtcaggaaaaactagttgtaggttcatggaataactgtcttccacaaccatccactcgatcaacatgcagtaaaatagaccgaaagtaaagcactatagatagccatacttccaatatgtgcaaagcttgggactgataaatgattttacgatccaaaagatagacaaatggacgaacatataaacagaacctacaattctaatatgggattcctctttaagacgtctatgtcttatcatccgtgtgatttcactggagaagtctcccatactaatgtacgtactagaagccactatatccaggtctggatagagataatcgacatcttggcttatctgcggcaatctgaaaactaaatgacgccaacagatccataccctctcccgggctgcagaggcggtcacccggcgccacgaccgctccctgcctcctccgctgccgcggccgcctctgcctccgcggccttgcgcgccaccgcgacgcgctcctcgatctcgtcttcggtgtagccgtgctcctcgagcgcgtccctgagcacgagcagcttgagctcgacttggcgcttgcggtcgtgctcgaggatctccttgttgggcttgcgcgtcccgccgccatccgcgccggcggcgtcggagcgcagcggcctgtggggcccgcccggaccaccgccggatgtggagcggggcttgacgaagaacttgttgctctgcgcgtacccgttggtgcccgacccccgcgcggtctgcagcccgatgccgttgtacatcgcggccgtcgggcggggagaagccggttggatcggcggcggcgcaatctagggcaagggaagcctggctaggacgaggtgactggtgagatgaga

SEQ ID NO: 121047 - DNA, 1979 bp, Zea Mays
tctccacatccatcccctccaacgccaatcaactccgtcctaaactacacaatccgcggcaacagaaaaaggcgacaccagaaacagaagcaagattccctccgcttgatcgccctgtgaatcgacccgactgagtggctccatcgcccgatggacccgccgcggcccgcggccggccgctccggcggggtcggcactggtgactcgccggtgagttgggacgacgacgacgatgactgcagcggcggcggcggccgcgtcgaaggcttggcgggactccacatatttgaccaagaggcagacgagccaccagccaaaaacagcatggccaacagacttgatactaactgcattccagttgctaacggatgcaacactggaacctccgtagagaaggaacctgtaaacggcattgacccacctcatgagcatactggcatctgggtccctgtttctgtcccgccaatgacagcgcaagaccgcgaggagtggcacagggggtttagttgcaatggcaggaacttcccagaagaagagttcagctgggagctggatgaagagaacaatgagatgacaatgtgggatgtgtttgctgatatggttgttgcggcaaaagataaggtggtatcttctgcaacatatgattttgggagatatgggatgtcggtggtgtccaacttttttctccaagaggcttggaacgatatggcacaaacacttgcggatgcaaacactggtattgtgaacgagcttcttgacacagagccaactaagtggttgcctgacagtgctgctacctcttgcatgctctgcggcgtgcgatttcatccaataatgtgctctcgccatcattgtcgtttctgtggtggagtattctgtaatggttgttcaaagggtagaagcttgatgcctccaaaatttaggactgcagaacctcagagggtttgtgatgtctgcggagtacgtctagagagtatccaacctcaactgatgaatcagatcagtcgggccacacaacttcctactcgagatgtcacagacctgagtaccttgaggtcatggctgaacttcccttgggcacacacaatggaatatgaaatatacaaggccacgaattctttacgtaattactataaggtgggaagactgaaaccagagaaggctatccctgatactattcttagacaagcaaaaggtcttgctattgttactgtggtgaaggttgggatgatggttacatacaaacttggcactgggctagttattgctcgaagggtggatgactcctggtcaccaccttcagcaatctccacctgcggtattggatatggagctcaggctggaggtgagatagctgattttatcattgttctgaggaacacggatgccatcagaacattcagtgggaaggcacatctgtctgttggtgctggtgttagtgcttctgctggccatgttggacgtgcagctgaggctgacttccgtgctggtgacggtggttatgctgcatgttatacatacagctgtagcaaaggtgccttcgtgggctgtgcgttgaatggcagcatagtatcaactcgagatactgagaacgctcgattttacggaggtcctgtcaaggcatctgatatccttctaggatcaatggcgaagccgcccgcagcctctcctctgtacaaagctctgtcagaattgttcgacaagattgggaaataatcctctttcttgcataccttgcctcaccttgtaaatacattcgaatttgcgtagtgaattggttggaagcaattgcataactgtacagtaaggccattcttcgacacatgagaaggctccctgccttcaccagtgtttagtggataccagcaacaaaaccactttgtacatactctacattggattgacagtcgtatcaagatgtgaaaaaaggtctgacgaatatgattattgattcgaattacatgggtagtacagtaatt

SEQ ID NO: 121048 - DNA, 377 bp, Zea Mays
ctgccgcatccccctcacccccacccgccgctaatttcgcagaactccatgcacgtcgctgatttcgccttcctcaagcccccaagatgcgcgcgttgccccccaaccccacctcccaccccatcgagcatgcaatgacagggaggtctgcgcctgctgtcgcaccgccgccacccccattcacaaagccctagcgacatcgatttctcaccgacatggttgttggcccgtactctctcagccaccacagccggtgatggccgatgcagttccagtgcgcgctcacggcggcgccacccacgccgatccccgtcaagaagttgtcctgtaagaagagcacccgcatccgacggcctccgccgacgcctccacctcgc

SEQ ID NO: 121049 - DNA, 2899 bp, Zea Mays
cccccgccccgcctcctcttcctcctctgcctctttcccggccggccgtttcttcccaagtggcgccggtcccggtcccggccccagtccccgcaggctccaccgcgcaacccgacgcgggcactgggtacgcctgcgcgagcgcgaccatttccgcgccgtcgccgtcctcccacctaacctaacgcgcccccacccaatcgatcgcctacccgcctcgcctcgtcaggcgggggaggggtcggtcaaaggaactgggggattccgttcctcccggccactgaggaacggcggcctctgcgctcctcttcgccatggccgcgcaggcctcgtcgccgatcgagttcctgctccgccggccgctgccgcgccagcggaggaggctgcctctggccggcgcgttcttcgcgcccacggggctgtccggcgcgccgctgctccgcgcgctggcgtcgctcgcggcggacttgctggggaccccgcccccgccgtcgcagcgacggaacctcgacgcgctcatgcggaggctcgcgctgctctccgcgctcctcgactcgctcctgctcctcctcgccgacgaaggcgaggccgccttctccgacgccgccaacctctgcttccgcgagctctacgtcgtgctcttccgcgccgacctgctcgtctcctacgtcgcctccgccgcccgcgcctgggcgctgctacgggcgccccagctcgccgcctcgttccgggacctcgacgcggagctcgccgtcgtcctcgacgtcctccccgccgcctcgctccgcctctcgttggacgccgcccagtacctcgacttactccgcgcgcgctgccgccggcgggcgccggcccactaccacgaccccgcggaggccgctctcggagacctcctcctcgccgccctgcgccacttcgaggtcggccagccgccagacccctcgatgctccgatccctcctcctccaaatcggaatctccgacgccgcttcttgccgctccgaaatcgagtacctggaggagcaaatcctgagccaagaggaggacgccgacctccccctcattggcggcgtcgtcgccttgctccggtactgcctcttctcccttttcgaccccagcaacacaaagacgttgcgtgtttggctgtcggcggggaacaggcagcggctgctctcctggagctgcagcgacgacagctccttctcggtgcccaaggagttctcctgcccgatttctttggatttgatgcgcgatcccgtggtggtatccacaggacagacctatgaccggacttcgatcatacagtggatcgaggaggggcattccacctgccccaactccggccaggccctcgctgacaaccggctcgtaccaaaccgggcgctgcgcagcttgatttcacagtggtgtggggtgcatggctttcagtttgattcgccggagagcaacgaagggatgattgaatgtgttgctgcatcttgctgcagcaaggcggcaattgaggcgaacaaagccacagcaaggattttgttcaggatgctgatggagggatccgatagtgcaaaaccgattgcagctagggaaatccggttgctggcaaagactgggaagcaaaacagggcattcattgccgagttgggtgcgataccattgctatgtaagttgctgctgtcgtcagattggatggcgcaggagaacacagtgacggcgctgctcaatctatcgatctatgagccgaacaaggcccggatcatggaacaagcggactgcctgcatcttatcgtcagtgtgttgaagaatggtcggacgacagaggccaaggagaatgctgcagctacgctcttcagtttatctgtggtccatgactacaagaaaaagataatgaatgagccaggggctgtggaggagcttgcctctatgctgaccaaagggacaccaaggggaaagaaagacgcggtgatggcgttgttcaacctctcaacacacccagaaagctcaggacggatgcttgagtcatctgcggttctagctttaattgagtcactgaggaatgacaccgtgtcggaggaagctgctggtgctctggctctgctgatgaagcagcctaccatcgtgcatctcgttgggagctctgaaacagtgatcactagcctcgtcgggctaatgaggcggggaactccaaagtgcaaggagaacgcagtgtcagctttatatgagatatgccgtagaggcggatcgacattggcacagcgcgtggcaaggatacccgggctgaacacggtgatacagaacgtcacgctcacgggaacgaagcgtgccaagaagaaggcaagcctgatcgtcaagatgtgccagagaagccagatgccgtcggcgttggcggcggcgccgctaggaagcaccttgacagtggttgatcattcgttggtagggaacggcacgttgaggcgcgccgcaagctttggcagcgaggagttatcgaaccctgtgtcgatctcagtgcccgtgccctaggtggtgaaccctgtatccatcccagagcccacatgattctcgcatttggtgagtttttgtccctgatattctttcattccatcctcaaatgaaggtatacagatttaatcccgaagaatcaaatatatcagatgtgctcgtgtgtacgtgactgctggatagctgtgcagatataggtttacagatagaattccttggcaagcttggaaattatttatttgattttgttcagttaaaaaaaagccgaatatgcatgctatacttgctgtaaactgttcccatgatttggaaacggggatgatacatcatttcgccaatggacttgtaatagtagaactgatgatgaattgtcatcttcgacgtatgcgtgccttgctttttgatcc

SEQ ID NO: 121050 - DNA, 2118 bp, Zea Mays
agcagaccgcaggaatttgtgtggtccgcgcctcacttccacgacgctccagcggcatccgccacttcgtcgtcgtcgtcgcacggattggcattggctgccccccggccctgttcctcgtcctcctcatcaattcccgtctctcagtcctcccaataatggtggcgtggtgagaaatccttccgtccggccgtcgtcttagaagatgaactgttcctcttgctgcgccgctgccactccatcttctccggcgcttctcgccaggccgcgggggggtttagctgctagctgctccacgacgacagcaaatcagaaggtgcttttcctgggctcaaaacagtttccacggatcacgtatagccgtgcgtcgtcacggttgtcgcggagagaggtaatagcttttgccgggcaacaaccttgggacatcggcagatttgtcaagacgctgtatttcttcaacgggcctccaaaccttctcaagattgtagaatctatcatcagcagtttcactggacctgcttctagtgaagtgccaaagaaaatggaaacgtcggatgtggtgctggttactggagccaccggtggtgttgggcgacgggtggtggacgtcctgcagaagaagggagtacctgttcgagtattgttcaggctagaaatgtagacaaggcaaggagcatgttggggccggatgtacctctgatcataggagatgttacgaaggaagatacacttgatcctaagctattcaaagggataaaaaaagtagtcaatgcagtctctgtcatagtggggccaaaggaaggtgatacgccagacaggcagaagtacaaacaaggcatcaaatttttcgaacctgagatcaagggaccttcacctgaaatggttgagtacatcggaatgcaaaacttgattaatgccataaagagtagtgttggactgagtgaagggaaactgctatttggtttcaaaggcaacttatctggagagattgtgtggggagctcttgatgacgttgtgatgggtggtgttagtgaaagtacattccaaatcttgccaacaggaagtgaaagtagtggaccaactgggttgttcaaagggactgtatctacttcaaataatggtgggtttactagtataaggacaaagaattttactgtgccagaggacctgtcagcatatgatggtattgagttacgagttaatggtgatgggcgacggtataaactcattatacggactagctatgaatgggatactgttggctatacagcaagttttaacacaactaaggggggatggcaaagtgttaaagtacctttctcttctctgaaacctgtattccgtgctcgtactgtgactgatgctccacccttcgatgcaagcaacattacttcactacaactcatgtttagcaaatttgaatacgatggaatactcaacccaacatttactgaaggtccgtttgagcttcctttttcgagtattagagcatacatcaatgagccgatcactccaaggttcgttcatgtgagttctgcgggagttacaagacctgaaagaccggggttagatttaagcaagcagccacctgctgttcgattgaacaaagagcttggctccattttaacttttaagttgaagggagaggatttaattcgggaaagcggtattccgtacactattgtaaggccatgtgcattaactgaggaaccagctggagccgatctcatgtttgaccagggggacaacatcacaggaaagatatcaagggaagaagttgcccgtatttgtgtagcagctctggcaagcccagatgctgtgggcaaaactttcgaggtcaagagcactgttccattcagcgaaccgtatgtgattgaccctgcaaatcctcctcctgaaaaggactatgaagtatatttcaaagaactcaaagaaggcatcacgggtaaagaggcgttagaggcaacacctgctcaagtttgaagatgtcgttgaattaagaatttcgtctgttttcttaaattctgacacagtaacccccactctgaatgtctaaagtcatctagaaacatagatgacactaatgctaaattttgtagctgaagatcagaccaataa

SEQ ID NO: 121051 - DNA, 2286 bp, Zea Mays
agcagaccgcaggaatttgtgtggtccgcgcctcacttccacgacgctccagcggcatccgccacttcgtcgtcgtcgtcgcacggattggcattggctgccccccggccctgttcctcgtcctcctcatcaattcccgtctctcagtcctcccaataatggtggcgtggtgagaaatccttccgtccggccgtcgtcttagaagatgaactgttcctcttgctgcgccgctgccactccatcttctccggcgcttctcgccaggccgcgggggggtttagctgctagctgctccacgacgacagcaaatcagaaggtgcttttcctgggctcaaaacagtttccacggatcacgtatagccgtgcgtcgtcacggttgtcgcggagagaggtaatagcttttgccgggcaacaaccttgggacatcggcagatttgtcaagacgctgtatttcttcaacgggcctccaaaccttctcaagattgtagaatctatcatcagcagtttcactggacctgcttctagtgaagtgccaaagaaaatggaaacgtcggatgtggtgctggttactggagccaccggtggtgttgggcgacgggtggtggacgtcctgcagaagaagggagtacctgttcgagtattggctagaaatgtagacaaggcaaggagcatgttggggccggatgtacctctgatcataggagatgttacgaaggaagatacacttgatcctaagctattcaaagggataaaaaaagtagtcaatgcagtctctgtcatagtggggccaaaggaaggtgatacgccagacaggcagaagtacaaacaaggcatcaaatttttcgaacctgagatcaagggaccttcacctgaaatggttgagtacatcggaatgcaaaacttgattaatgccataaagagtagtgttggactgagtgaagggaaactgctatttggtttcaaaggcaacttatctggagagattgtgtggggagctcttgatgacgttgtgatgggtggtgttagtgaaagtacattccaaatcttgccaacaggaagtgaaagtagtggaccaactgggttgttcaaagggactgtatctacttcaaataatggtgggtttactagtataaggacaaagaattttactgtgccagaggacctgtcagcatatgatggtattgagttacgagttaatggtgatgggcgacggtataaactcattatacggactagctatgaatgggatactgttggctatacagcaagttttaacacaactaaggggggatggcaaagtgttaaagtacctttctcttctctgaaacctgtattccgtgctcgtactgtgactgatgctccacccttcgatgcaagcaacattacttcactacaactcatgtttagcaaatttgaatacgatggaatactcaacccaacatttactgaaggtccgtttgagcttcctttttcgagtattagagcatacatcaatgagccgatcactccaaggtttgtctatctgctagttttcaggttcgttcatgtgagttctgcgggagttacaagacctgaaagaccggggttagatttaagcaagcagccacctgctgttcgattgaacaaagagcttggctccattttaacttttaagttgaagggagaggatttaattcgggaaagcggtattccgtacactattgtaaggccatgtgcattaactgaggaaccagctggagccgatctcatgtttgaccagggggacaacatcacaggaaagatatcaagggaagaagttgcccgtatttgtgtagcagctctggcaagcccagatgctgtgggcaaaactttcgaggtcaagagcactgttccattcagcgaaccgtatgtgattgaccctgcaaatcctcctcctgaaaaggactatgaagtatatttcaaagaactcaaagaaggcatcacgggtaaagaggcgttagaggcaacacctgctcaagtttgaagatgtcgttgaattaagaatttcgtctgttttcttaaattctgacacagtaacccccactctgaatgtctaaagtcatctagaaacatagatgacactaatgctaaattttgtagctgaagatcagaccaataaatattcccaagaacacattactgttaggttgggggatcattaaactcgagctaagacacaaatatgtagatgaaattagtgctgctgttcatgccttcgttggagttagccattacaggacacaagaatttagtaagaggtttggtaaa

SEQ ID NO: 121052 - DNA, 2262 bp, Zea Mays
agcagaccgcaggaatttgtgtggtccgcgcctcacttccacgacgctccagcggcatccgccacttcgtcgtcgtcgtcgcacggattggcattggctgccccccggccctgttcctcgtcctcctcatcaattcccgtctctcagtcctcccaataatggtggcgtggtgagaaatccttccgtccggccgtcgtcttagaagatgaactgttcctcttgctgcgccgctgccactccatcttctccggcgcttctcgccaggccgcgggggggtttagctgctagctgctccacgacgacagcaaatcagaaggtgcttttcctgggctcaaaacagtttccacggatcacgtatagccgtgcgtcgtcacggttgtcgcggagagaggtaatagcttttgccgggcaacaaccttgggacatcggcagatttgtcaagacgctgtatttcttcaacgggcctccaaaccttctcaagattgtagaatctatcatcagcagtttcactggacctgcttctagtgaagtgccaaagaaaatggaaacgtcggatgtggtgctggttactggagccaccggtggtgttgggcgacgggtggtggacgtcctgcagaagaagggagtacctgttcgagtattggctagaaatgtagacaaggcaaggagcatgttggggccggatgtacctctgatcataggagatgttacgaaggaagatacacttgatcctaagctattcaaagggataaaaaaagtagtcaatgcagtctctgtcatagtggggccaaaggaaggtgatacgccagacaggcagaagtacaaacaaggcatcaaatttttcgaacctgagatcaagggaccttcacctgaaatggttgagtacatcggaatgcaaaacttgattaatgccataaagagtagtgttggactgagtgaagggaaactgctatttggtttcaaaggcaacttatctggagagattgtgtggggagctcttgatgacgttgtgatgggtggtgttagtgaaagtacattccaaatcttgccaacaggaagtgaaagtagtggaccaactgggttgttcaaagggactgtatctacttcaaataatggtgggtttactagtataaggacaaagaattttactgtgccagaggacctgtcagcatatgatggtattgagttacgagttaatggtgatgggcgacggtataaactcattatacggactagctatgaatgggatactgttggctatacagcaagttttaacacaactaaggggggatggcaaagtgttaaagtacctttctcttctctgaaacctgtattccgtgctcgtactgtgactgatgctccacccttcgatgcaagcaacattacttcactacaactcatgtttagcaaatttgaatacgatggaatactcaacccaacatttactgaaggtccgtttgagcttcctttttcgagtattagagcatacatcaatgagccgatcactccaaggttcgttcatgtgagttctgcgggagttacaagacctgaaagaccggggttagatttaagcaagcagccacctgctgttcgattgaacaaagagcttggctccattttaacttttaagttgaagggagaggatttaattcgggaaagcggtattccgtacactattgtaaggccatgtgcattaactgaggaaccagctggagccgatctcatgtttgaccagggggacaacatcacaggaaagatatcaagggaagaagttgcccgtatttgtgtagcagctctggcaagcccagatgctgtgggcaaaactttcgaggtcaagagcactgttccattcagcgaaccgtatgtgattgaccctgcaaatcctcctcctgaaaaggactatgaagtatatttcaaagaactcaaagaaggcatcacgggtaaagaggcgttagaggcaacacctgctcaagtttgaagatgtcgttgaattaagaatttcgtctgttttcttaaattctgacacagtaacccccactctgaatgtctaaagtcatctagaaacatagatgacactaatgctaaattttgtagctgaagatcagaccaataaatattcccaagaacacattactgttaggttgggggatcattaaactcgagctaagacacaaatatgtagatgaaattagtgctgctgttcatgccttcgttggagttagccattacaggacacaagaatttagtaagaggtttggtaaa

SEQ ID NO: 121053 - DNA, 2022 bp, Zea Mays
agcagaccgcaggaatttgtgtggtccgcgcctcacttccacgacgctccagcggcatccgccacttcgtcgtcgtcgtcgcacggattggcattggctgccccccggccctgttcctcgtcctcctcatcaattcccgtctctcagtcctcccaataatggtggcgtggtgagaaatccttccgtccggccgtcgtcttagaagatgaactgttcctcttgctgcgccgctgccactccatcttctccggcgcttctcgccaggccgcgggggggtttagctgctagctgctccacgacgacagcaaatcagaaggtgcttttcctgggctcaaaacagtttccacggatcacgtatagccgtgcgtcgtcacggttgtcgcggagagaggtaatagcttttgccgggcaacaaccttgggacatcggcagatttgtcaagacgctgtatttcttcaacgggcctccaaaccttctcaagattgtagaatctatcatcagcagtttcactggacctgcttctagtgaagtgccaaagaaaatggaaacgtcggatgtggtgctggttactggagccaccggtggtgttgggcgacgggtggtggacgtcctgcagaagaagggagtacctgttcgagtattggctagaaatgtagacaaggcaaggagcatgttggggccggatgtacctctgatcataggagatgttacgaaggaagatacacttgatcctaagctattcaaagggataaaaaaagtagtcaatgcagtctctgtcatagtggggccaaaggaaggtgatacgccagacaggcagaagtacaaacaaggcatcaaatttttcgaacctgagatcaagggaccttcacctgaaatggttgagtacatcggaatgcaaaacttgattaatgccataaagagtagtgttggactgagtgaagggaaactgctatttggtttcaaaggcaacttatctggagagattgtgtggggagctcttgatgacgttgtgatgggtggtgttagtgaaagtacattccaaatcttgccaacaggaagtgaaagtagtggaccaactgggttgttcaaagggactgtatctacttcaaataatggtgggtttactagtataaggacaaagaattttactgtgccagaggacctgtcagcatatgatggtattgagttacgagttaatggtgatgggcgacggtataaactcattatacggactagctatgaatgggatactgttggctatacagcaagttttaacacaactaaggggggatggcaaagtgttaaagtacctttctcttctctgaaacctgtattccgtgctcgtactgtgactgatgctccacccttcgatgcaagcaacattacttcactacaaggagaggatttaattcgggaaagcggtattccgtacactattgtaaggccatgtgcattaactgaggaaccagctggagccgatctcatgtttgaccagggggacaacatcacaggaaagatatcaagggaagaagttgcccgtatttgtgtagcagctctggcaagcccagatgctgtgggcaaaactttcgaggtcaagagcactgttccattcagcgaaccgtatgtgattgaccctgcaaatcctcctcctgaaaaggactatgaagtatatttcaaagaactcaaagaaggcatcacgggtaaagaggcgttagaggcaacacctgctcaagtttgaagatgtcgttgaattaagaatttcgtctgttttcttaaattctgacacagtaacccccactctgaatgtctaaagtcatctagaaacatagatgacactaatgctaaattttgtagctgaagatcagaccaataaatattcccaagaacacattactgttaggttgggggatcattaaactcgagctaagacacaaatatgtagatgaaattagtgctgctgttcatgccttcgttggagttagccattacaggacacaagaatttagtaagaggtttggtaaa

SEQ ID NO: 121054 - DNA, 2353 bp, Zea Mays
agcagaccgcaggaatttgtgtggtccgcgcctcacttccacgacgctccagcggcatccgccacttcgtcgtcgtcgtcgcacggattggcattggctgccccccggccctgttcctcgtcctcctcatcaattcccgtctctcagtcctcccaataatggtggcgtggtgagaaatccttccgtccggccgtcgtcttagaagatgaactgttcctcttgctgcgccgctgccactccatcttctccggcgcttctcgccaggccgcgggggggtttagctgctagctgctccacgacgacagcaaatcagaaggtgcttttcctgggctcaaaacagtttccacggatcacgtatagccgtgcgtcgtcacggttgtcgcggagagaggtaatagcttttgccgggcaacaaccttgggacatcggcagatttgtcaagacgctgtatttcttcaacgggcctccaaaccttctcaagattgtagaatctatcatcagcagtttcactggacctgcttctagtgaagtgccaaagaaaatggaaacgtcggatgtggtgctggttactggagccaccggtggtgttgggcgacgggtggtggacgtcctgcagaagaagggagtacctgttcgagtattggctagaaatgtagacaaggcaaggagcatgttggggccggatgtacctctgatcataggagatgttacgaaggaagatacacttgatcctaagctattcaaagggataaaaaaagtagtcaatgcagtctctgtcatagtggggccaaaggaaggtgatacgccagacaggcagaagtacaaacaaggcatcaaatttttcgaacctgagatcaagggaccttcacctgaaatggttgagtacatcggaatgcaaaacttgattaatgccataaagagtagtgttggactgagtgaagggaaactgctatttggtttcaaaggcaacttatctggagagattgtgtggggagctcttgatgacgttgtgatgggtggtgttagtgaaagtacattccaaatcttgccaacaggaagtgaaagtagtggaccaactgggttgttcaaagggactgtatctacttcaaataatggtgggtttactagtataaggacaaagaattttactgtgccagaggacctgtcagcatatgatggtattgagttacgagttaatggtgatgggcgacggtataaactcattatacggactagctatgaatgggatactgttggctatacagcaagttttaacacaactaaggggggatggcaaagtgttaaagtacctttctcttctctgaaacctgtattccgtgctcgtactgtgactgatgctccacccttcgatgcaagcaacattacttcactacaagtatcatttcttcctttctttccccttcatcagtaaacgtttgaagaattggtaaactctcatctaaaagttgatgtgacgatttttgtagctcatgtttagcaaatttgaatacgatggaatactcaacccaacatttactgaaggtccgtttgagcttcctttttcgagtattagagcatacatcaatgagccgatcactccaaggttcgttcatgtgagttctgcgggagttacaagacctgaaagaccggggttagatttaagcaagcagccacctgctgttcgattgaacaaagagcttggctccattttaacttttaagttgaagggagaggatttaattcgggaaagcggtattccgtacactattgtaaggccatgtgcattaactgaggaaccagctggagccgatctcatgtttgaccagggggacaacatcacaggaaagatatcaagggaagaagttgcccgtatttgtgtagcagctctggcaagcccagatgctgtgggcaaaactttcgaggtcaagagcactgttccattcagcgaaccgtatgtgattgaccctgcaaatcctcctcctgaaaaggactatgaagtatatttcaaagaactcaaagaaggcatcacgggtaaagaggcgttagaggcaacacctgctcaagtttgaagatgtcgttgaattaagaatttcgtctgttttcttaaattctgacacagtaacccccactctgaatgtctaaagtcatctagaaacatagatgacactaatgctaaattttgtagctgaagatcagaccaataaatattcccaagaacacattactgttaggttgggggatcattaaactcgagctaagacacaaatatgtagatgaaattagtgctgctgttcatgccttcgttggagttagccattacaggacacaagaatttagtaagaggtttggtaaa

SEQ ID NO: 121055 - DNA, 811 bp, Zea Mays
ctatcttaaactcggtcttttaattcttctgacataacaaatcacaattgtacattttttgtactgcaaataaaccatcgatatgcatctaagtactttaagatatagactgaacaatggtgctcctcattttgtcatgttggttatcttggaaccattatataatgtctgaggtggcctttcagggagaggatttaattcgggaaagcggtattccgtacactattgtaaggccatgtgcattaactgaggaaccagctggagccgatctcatgtttgaccagggggacaacatcacaggaaagatatcaagggaagaagttgcccgtatttgtgtagcagctctggcaagcccagatgctgtgggcaaaactttcgaggtcaagagcactgttccattcagcgaaccgtatgtgattgaccctgcaaatcctcctcctgaaaaggactatgaagtatatttcaaagaactcaaagaaggcatcacgggtaaagaggcgttagaggcaacacctgctcaagtttgaagatgtcgttgaattaagaatttcgtctgttttcttaaattctgacacagtaacccccactctgaatgtctaaagtcatctagaaacatagatgacactaatgctaaattttgtagctgaagatcagaccaataaatattcccaagaacacattactgttaggttgggggatcattaaactcgagctaagacacaaatatgtagatgaaattagtgctgctgttcatgccttcgttggagttagccattacaggacacaagaatttagtaagaggtttggtaaa

SEQ ID NO: 121056 - DNA, 1435 bp, Zea Mays
ccggctgactgaccggcccttgctttaccgccgcggcgaaagggcggcgcatgtcctgccggatatgccgtttccggcatggtataagtaggcgacgcccaccgttcctcctatcaccaccatcccccgatccgacccaaaacggcaggcatgcatacgtgcactaaagcaagtagtaacgatgtatctattccatccttgatcatgcatgtgtttgtggagtgtggaggtccattgcagggcaaccccccgttggcaggtgcgacggcgacgtacccctaccctgccaaaggggatttgcccggcgatgcgcctgcacacacagtggttctttctactctacctctccggctcaaggtaggagaagacgatgctccatccggctggccggttacatccggcctttcttcagcccatcggataggagcccaatatctgatcgactgatccgtcttggattggacaaaagccctaaagcccaccacaggatcctcaacagcctaaataggcccatgaaaagcctctcacagctccgagctagacccccacctccccgcctagacctagggttgcttccttccttttaacctcgcgccgccatccgacgcccatctgctccaccctccacccagccgccgccgccgccgcctaaggagaagagggtccggccgtctccttgccccgatggcgtccgagaagaagcagtccaacccgatgcgggagatcaaggtgcagaagctggtcctcaacatatccgtaggggagagcggcgaccgcctcacccgcgccgccaaggtgctggagcagctcagcggccagacccccgtcttctccaaggcgaggtacacggtgcgctcgttcggcatccggcgtaacgagaagatcgcctgctacgtcacggtcaggggcgacaaggccatgcagctgcttgagagcggcctcaaggtcaaggagtacgagctgctcaggaggaacttcagcgacaccggctgcttcgggttcggcatccaggagcacatcgaccttggtatcaagtacggctccgtcttatatactttacgtgaataatagatatgagtaagaccctttccatgtgcattcttgtttcgttgccgttgtagctaaaacttagagagctacggaatttttggtcccccgaggcgatgcccgtgttttcagcgataatacgatgctattaaatcattagcttcttttctactccctttgcccattagcgcacacacagtaaccgtttctgaatattatagatgcttaatccactgaagctacattggcatgttttcctttcattagaacttggtattaggtatttgttgttaaagcctaggtaatagcctactttattaacagagcatccataactcaacccattctgcagttattgacttaattgtacagttaattgtcttacaac

SEQ ID NO: 121057 - DNA, 1590 bp, Zea Mays
ccggctgactgaccggcccttgctttaccgccgcggcgaaagggcggcgcatgtcctgccggatatgccgtttccggcatggtataagtaggcgacgcccaccgttcctcctatcaccaccatcccccgatccgacccaaaacggcaggcatgcatacgtgcactaaagcaagtagtaacgatgtatctattccatccttgatcatgcatgtgtttgtggagtgtggaggtccattgcagggcaaccccccgttggcaggtgcgacggcgacgtacccctaccctgccaaaggggatttgcccggcgatgcgcctgcacacacagtggttctttctactctacctctccggctcaaggtaggagaagacgatgctccatccggctggccggttacatccggcctttcttcagcccatcggataggagcccaatatctgatcgactgatccgtcttggattggacaaaagccctaaagcccaccacaggatcctcaacagcctaaataggcccatgaaaagcctctcacagctccgagctagacccccacctccccgcctagacctagggttgcttccttccttttaacctcgcgccgccatccgacgcccatctgctccaccctccacccagccgccgccgccgccgcctaaggagaagagggtccggccgtctccttgccccgatggtacactcccgcttccgtccccgtgttcccattcccatcttctcgtcctcctcttcctctccatcctccttcctgtgacatgtggcgcgtcccgcaggcgtccgagaagaagcagtccaacccgatgcgggagatcaaggtgcagaagctggtcctcaacatatccgtaggggagagcggcgaccgcctcacccgcgccgccaaggtgctggagcagctcagcggccagacccccgtcttctccaaggcgaggtacacggtgcgctcgttcggcatccggcgtaacgagaagatcgcctgctacgtcacggtcaggggcgacaaggccatgcagctgcttgagagcggcctcaaggtcaaggagtacgagctgctcaggaggaacttcagcgacaccggctgcttcgggttcggcatccaggagcacatcgaccttggtatcaagtatgatccatcaacaggcatctatgggatggacttctacgtcgtgcttgagcgtgctggctatcgcgtcgcgcgccgcaggaggtgcaagtcccgtgttgggattcagcatagggtgaccaaggaggactccatgaagtggttccaggtcaagtatgaaggtgtcatcctcaacaaggctcaggccagcacgatttaaacctcacctgtggggcaaaacagctctcgcttcatctccatgtgaacgcaagatcaccttccaaggtttttgtttgagttgtatcctctggcctgactttttagtctactagcagagctataatcactatatgaattattttttgtgcccttaccatactctgctgttgcttgagaatatgttattagtctgtcctagctcttctttggttacatgctttgtttaccgcatctgcgtttaagtttttgttgactagttac

SEQ ID NO: 121058 - DNA, 1493 bp, Zea Mays
ccggctgactgaccggcccttgctttaccgccgcggcgaaagggcggcgcatgtcctgccggatatgccgtttccggcatggtataagtaggcgacgcccaccgttcctcctatcaccaccatcccccgatccgacccaaaacggcaggcatgcatacgtgcactaaagcaagtagtaacgatgtatctattccatccttgatcatgcatgtgtttgtggagtgtggaggtccattgcagggcaaccccccgttggcaggtgcgacggcgacgtacccctaccctgccaaaggggatttgcccggcgatgcgcctgcacacacagtggttctttctactctacctctccggctcaaggtaggagaagacgatgctccatccggctggccggttacatccggcctttcttcagcccatcggataggagcccaatatctgatcgactgatccgtcttggattggacaaaagccctaaagcccaccacaggatcctcaacagcctaaataggcccatgaaaagcctctcacagctccgagctagacccccacctccccgcctagacctagggttgcttccttccttttaacctcgcgccgccatccgacgcccatctgctccaccctccacccagccgccgccgccgccgcctaaggagaagagggtccggccgtctccttgccccgatggcgtccgagaagaagcagtccaacccgatgcgggagatcaaggtgcagaagctggtcctcaacatatccgtaggggagagcggcgaccgcctcacccgcgccgccaaggtgctggagcagctcagcggccagacccccgtcttctccaaggcgaggtacacggtgcgctcgttcggcatccggcgtaacgagaagatcgcctgctacgtcacggtcaggggcgacaaggccatgcagctgcttgagagcggcctcaaggtcaaggagtacgagctgctcaggaggaacttcagcgacaccggctgcttcgggttcggcatccaggagcacatcgaccttggtatcaagtatgatccatcaacaggcatctatgggatggacttctacgtcgtgcttgagcgtgctggctatcgcgtcgcgcgccgcaggaggtgcaagtcccgtgttgggattcagcatagggtgaccaaggaggactccatgaagtggttccaggtcaagtatgaaggtgtcatcctcaacaaggctcaggccagcacgatttaaacctcacctgtggggcaaaacagctctcgcttcatctccatgtgaacgcaagatcaccttccaaggtttttgtttgagttgtatcctctggcctgactttttagtctactagcagagctataatcactatatgaattattttttgtgcccttaccatactctgctgttgcttgagaatatgttattagtctgtcctagctcttctttggttacatgctttgtttaccgcatctgcgtttaagtttttgttgactagttac

SEQ ID NO: 121059 - DNA, 1320 bp, Zea Mays
tgcaactctacaaataggcagctcgcgtccactcgccaccagcagcaagctaccagtacactgatgactggtcgagagagccagctgatcgatcgagttacccttagttattagacagacatggcttcgttccggaccagctggcattgcttgctcgccgcctgcctgttcctgctcgcttcggcggcgcacgggcagcagctctcgtcgtccttctacgcggcgacatgcccgacgctggagctcatcgtgcggaccaccatgctcacggcgctcctcgccgagcgtcggatgggcgcgtccctcgtcaggctcttcttccacgactgctttgtccaaggctgcgacggctccattcttctggacgacgtcggcagcttcgtcggcgagaagggcgccggccccaacgtcaactctctccgcggcttcgacgtgatcgaccagatcaaggccaacgtcgagctcatctgccccggcgttgtctcctgcgccgacattgtcgccctcgccgcgcgagacggcaccttcttgctcggaggaccaagctgggcggtgccgctgggccggcgcgactcgaccacggcgagcctggccctggccaacagcgacctgccgtcgccggtctccggcctcgccgctctcctcgcagcgttcggcaacaagggcctggggcccggggacctgacggcgctctcgggcgcgcacaccatcggcttctcgcagtgccagaacttccgcgcccacatctacaacgacaccgacatcgacccggcgttcgccagcctgcgccagcgcacctgccccgccgcgccgggcaccggggacagcagcctggcgccgctcgacgtgcagacgcagctcgtcttcgacaacgcctactaccgcaacctgctggccaagcgcggcctgctgcgctccgaccaggcgctcttcaacggcggctcccaggacgcgctggtgcgccagtacagtgccaacccggccctcttcgcctcagacttcgccaacgccatgataaagatgggcaacatcagcccgctcaccggaaccgcgggccagatcagggcaaactgtagggtggtcaacagcagctgaaacgtgacatatagcaccatcagtattgagtgcgaacgtactactggggggtgtataaatatgtaacaagcacatccaaagatactgtttgctacttcggttgttccagggattacattttcgttttgcaattttgggaaaccgttttgttgaccaaattttgatttttatacttgtttgggagcaagtttgagagcaagtgtaatggaggaaattgaggaggtc

SEQ ID NO: 121060 - DNA, 1294 bp, Zea Mays
atcaccttcaacccggcaatagcctcccaggacgtgagcggcgcgacggcgtcatcgtcgaggaggttctggcggaatgagagcttgcggagatgggggagttggccgatgcgaggatcaacagaagagaggcggttggcggtgaggtcgacctcctccagcgtgggtgggatctccacctcgcttagatcgtgcagctggtagctcgtcaggtcgaggtacagcaccggctcctccgtctccatcttggcctccgcctccaccttggcctccccctctatcttggccactgcctcgccgccagccgcctcgtacagctgatcaactacaccttcgccggaggccatggggaccgctgggtgagggtggattcaggtctcgacaggattctggaagaacggggaagcgaaggaaggaccgcaggagaagaaaatgcgcaatttgtttcacctggggaaagaagaaaggcaattttagtaggctggacatgaatagtatgtgggccaattaaatgggctggcaatactaccattaaggcccatctatgtcttttttcccaaatggcaaggttcaaaaccctaaaaacccgcacggcctcaccgcccctccggcctccgccgcgtgctcgtcccaaccctgtcgccggcaagccatggcgtcgcgcttccgctccttcactcgcccggccgccgccgccttcctccggtccactgccagccgaagcccctccgcttcccttccccgcaccctcgctcctgtccctagggcttcggccatggggcggcgcatggctctggcgcggtctctgcaaccgctgcacagcgccgtctcggcggcccggctgacgtcgcggctgggggcggaggtggaccgggccgtgtcgcagggtacgctctgcagttcctacccgggagtctgagtctgatacagtgtactaatctttgcaacgctacagtgagttgtggcttcccggttgcttgcttgtctattatcgtccatgtgttgactgtcttggtttaggatgattttggtgggatccgtttcacttgaatccttttggcttgtcatcgtgggcgtgggacatgcgtggggttaatatgtttgcatgccctcaagagcaaatttcatatgatcacaaatgagtttgagtgtggtgctgtaatgcaaattttagcatttgtttgtctcagtataacgtttacatatgtgtgtcttgatgctatatcaccttctttgcagaaaaatgttgtactgctgtatatgtgactatacattgtcaaaaaaattaataaca

SEQ ID NO: 121061 - DNA, 1371 bp, Zea Mays
atcaccttcaacccggcaatagcctcccaggacgtgagcggcgcgacggcgtcatcgtcgaggaggttctggcggaatgagagcttgcggagatgggggagttggccgatgcgaggatcaacagaagagaggcggttggcggtgaggtcgacctcctccagcgtgggtgggatctccacctcgcttagatcgtgcagctggtagctcgtcaggtcgaggtacagcaccggctcctccgtctccatcttggcctccgcctccaccttggcctccccctctatcttggccactgcctcgccgccagccgcctcgtacagctgatcaactacaccttcgccggaggccatggggaccgctgggtgagggtggattcaggtctcgacaggattctggaagaacggggaagcgaaggaaggaccgcaggagaagaaaatgcgcaatttgtttcacctggggaaagaagaaaggcaattttagtaggctggacatgaatagtatgtgggccaattaaatgggctggcaatactaccattaaggcccatctatgtcttttttcccaaatggcaaggttcaaaaccctaaaaacccgcacggcctcaccgcccctccggcctccgccgcgtgctcgtcccaaccctgtcgccggcaagccatggcgtcgcgcttccgctccttcactcgcccggccgccgccgccttcctccggtccactgccagccgaagcccctccgcttcccttccccgcaccctcgctcctgtccctagggcttcggccatggggcggcgcatggctctggcgcggtctctgcaaccgctgcacagcgccgtctcggcggcccggctgacgtcgcggctgggggcggaggtggaccgggccgtgtcgcagggtacgctctgcagttcctacccgggagtctgagtctgatacagtgtactaatctttgcaacgctacaagacaggtctcagtgtccctcgataatgaaaggaactgctccagatggcagcaacatcagcagcagatagttgtaagacttggtcatcataataatcattcttgttcaatggttacgttgtttatttagtggcactttttgctatgcgcttaccataatacattcctggtaacggcttttcttttgaattctatgtgtggtcaaggttttaaagagcatagtcatgttcatgtacgcctgtctccatttatatatgtggagatatgggcatcagttcaaagctgggatcaaatttctgggtagcatcccggcaaaatgtgacattttgttgcaaatgttgtttcattacgtttaaagtgtttttttctcttgaaatatagcgaagattgaattgaagttgatgttgggacattcaaa

SEQ ID NO: 121062 - DNA, 1304 bp, Zea Mays
atcaccttcaacccggcaatagcctcccaggacgtgagcggcgcgacggcgtcatcgtcgaggaggttctggcggaatgagagcttgcggagatgggggagttggccgatgcgaggatcaacagaagagaggcggttggcggtgaggtcgacctcctccagcgtgggtgggatctccacctcgcttagatcgtgcagctggtagctcgtcaggtcgaggtacagcaccggctcctccgtctccatcttggcctccgcctccaccttggcctccccctctatcttggccactgcctcgccgccagccgcctcgtacagctgatcaactacaccttcgccggaggccatggggaccgctgggtgagggtggattcaggtctcgacaggattctggaagaacggggaagcgaaggaaggaccgcaggagaagaaaatgcgcaatttgtttcacctggggaaagaagaaaggcaattttagtaggctggacatgaatagtatgtgggccaattaaatgggctggcaatactaccattaaggcccatctatgtcttttttcccaaatggcaaggttcaaaaccctaaaaacccgcacggcctcaccgcccctccggcctccgccgcgtgctcgtcccaaccctgtcgccggcaagccatggcgtcgcgcttccgctccttcactcgcccggccgccgccgccttcctccggtccactgccagccgaagcccctccgcttcccttccccgcaccctcgctcctgtccctagggcttcggccatggggcggcgcatggctctggcgcggtctctgcaaccgctgcacagcgccgtctcggcggcccggctgacgtcgcggctgggggcggaggtggaccgggccgtgtcgcaggagacaggtctcagtgtccctcgataatgaaaggaactgctccagatggcagcaacatcagcagcagatagttgtaagacttggtcatcataataatcattcttgttcaatggttacgttgtttatttagtggcactttttgctatgcgcttaccataatacattcctggtaacggcttttcttttgaattctatgtgtggtcaaggttttaaagagcatagtcatgttcatgtacgcctgtctccatttatatatgtggagatatgggcatcagttcaaagctgggatcaaatttctgggtagcatcccggcaaaatgtgacattttgttgcaaatgttgtttcattacgtttaaagtgtttttttctcttgaaatatagcgaagattgaattgaagttgatgttgggacattcaaa

SEQ ID NO: 121063 - DNA, 736 bp, Zea Mays
cccggcaatagcctcccaggacgtgagcggcgcgacggcgtcatcgtcgaggaggttctggcggaatgagagcttgcggagatgggggagttggccgatgcgaggatcaacagaagagaggcggttggcggtgaggtcgacctcctccagcgtgggtgggatctccacctcgcttagatcgtgcagctggtagctcgtcaggtcgagggcttcggccatggggcggcgcatggctctggcgcggtctctgcaaccgctgcacagcgccgtctcggcggcccggctgacgtcgcggctgggggcggaggtggaccgggccgtgtcgcagggtacgctctgcagttcctacccgggagtctgagtctgatacagtgtactaatctttgcaacgctacagtgagttgtggcttcccggttgcttgcttgtctattatcgtccatgtgttgactgtcttggtttaggatgattttggtgggatccgtttcacttgaatccttttggcttgtcatcgtgggcgtgggacatgcgtggggttaatatgtttgcatgccctcaagagcaaatttcatatgatcacaaatgagtttgagtgtggtgctgtaatgcaaattttagcatttgtttgtctcagtataacgtttacatatgtgtgtcttgatgctatatcaccttctttgcagaaaaatgttgtactgctgtatatgtgactatacattgtcaaaaaaattaataaca

SEQ ID NO: 121064 - DNA, 746 bp, Zea Mays
cccggcaatagcctcccaggacgtgagcggcgcgacggcgtcatcgtcgaggaggttctggcggaatgagagcttgcggagatgggggagttggccgatgcgaggatcaacagaagagaggcggttggcggtgaggtcgacctcctccagcgtgggtgggatctccacctcgcttagatcgtgcagctggtagctcgtcaggtcgagggcttcggccatggggcggcgcatggctctggcgcggtctctgcaaccgctgcacagcgccgtctcggcggcccggctgacgtcgcggctgggggcggaggtggaccgggccgtgtcgcaggagacaggtctcagtgtccctcgataatgaaaggaactgctccagatggcagcaacatcagcagcagatagttgtaagacttggtcatcataataatcattcttgttcaatggttacgttgtttatttagtggcactttttgctatgcgcttaccataatacattcctggtaacggcttttcttttgaattctatgtgtggtcaaggttttaaagagcatagtcatgttcatgtacgcctgtctccatttatatatgtggagatatgggcatcagttcaaagctgggatcaaatttctgggtagcatcccggcaaaatgtgacattttgttgcaaatgttgtttcattacgtttaaagtgtttttttctcttgaaatatagcgaagattgaattgaagttgatgttgggacattcaaa

SEQ ID NO: 121065 - DNA, 195 bp, Zea Mays
gttaccgtcctagtgaatgagcataaatgtgcttcaagcagccagataagttatgagaatgttgcgccaagtgttccagatactccatcatgccatccaagtattgtagaagcaagtggacgaggtggacctggcactggtcctagaatgcttaaaaagaagctcacaccaaaaaaggaaggcatgggtacctga

SEQ ID NO: 121066 - DNA, 3017 bp, Zea Mays
ttggctgggtgagagggcaggctcgatttgaacccgcctctgcccttttcgtggaagttttgggtcttattaggcgcggattactggggtctagggatgtggtagttactagctgcttgggttaggcggcgcgccgaggtgcttccgtgcttggctgactagtgtcaatggcgggatctgtcggcaaggccagggcggcgctgcggtcgtccccgaagcggtacagcggcacggacccaccgttgtctctggcggggccgacgttggcggatctgcagaggacggccgagctggagaagttcttggttgaagcgggcctctatgagggtaaagaggagtccgcgaagcgggaagatgtgctatccgagattggtctgatagtcaaggaatgggtgaagcagttgactcgtaagaaaggatatgctgagcaattggttgaacaagcaaatgcaatcctttttacttttgggtcttacagattgggggttcatggacctggagctgatattgataccctttgtgttggaccttcatatgtgaaccgagaggaggatttctttgtcacactgcatggcatattagctgagaaggaagaagttgctgagttgcaacctgtacctgatgctcatgtacctgtattgaaatttaagttccgtgggatatcaattgaccttctctatgctagcatctctctttcagtgataccagcggatttcgatatttctcaaggatctgtactttgtgatgttgacgaagcaactgtgcgaagtcttaatggttgcagagtggcggatcagattcttcggcttgttccaaatgttgagaatttccggacaacactcagatgcttgaagtactgggcaaagagaaggggtgtttattctaacattactggtttccttgggggtgtgaactgggctctgctggttgctcgtgtatgccaactctatcctaatgctgtgccaagtatgctggtttctaggttcttcagagtttttactcagtggcaatggccaaatccagtgatgctatgtgcgattgagaataatgatcttggtttttctatatgggatccacgcaaaaatccacgtgacagaaaccatctcatgcccatcatcactccagcctacccatgcatgaactctagttacaatgtttcaaccagcacactgagggttataatggagcaatttcaatttggcaacaaagtttgtcaggaaattgaacttaataaggccaattggaatgccttatttgagcctttccatttttttgaggcatacagaaagtttctagtggttgacatagttgcagaggatgacgatgatcttcgtctttggaagggatggatcgagtctcgtttgagacaacttactttaaagattgagcgggatactaaaggaattttgcagtgccatccgtacccatgcgagtattcagatcccacaatagagtgtgcacattgtgccttctacatgggcttatcaaggaaagaggggttgaaaaaacgtggtcaacagtttgatatccgtgggacagtagatgaatttatgcgtgaaattggcatgtattcattgtggaagcctgggatggatctggctgtcacccatgttcatagggagcaggtcccatcttatgtatttgagcaaggatacaagaaaccctgccctacaatgcatgcaaaccaacaagagcagtctgatggagatggaacatttagcccatatctggagagtcagcttaagagaaagtacatttccgatggagatggtcatgtggatctttgcaaatctgtaaaaagggcttcagtaagcccacctggtgtgggaaccccacctcatcttggaaatagtgtcagtaacgttgtttgtgacagtccagtcaaattcgtttcaagtgtcgtttgcagcggagcgcatgcttcctcatcacatgatgatataaatatagaacaagcacaattaactacttcaccatatggatctgaggatacctcagcatcaggtacaagctgtgcagcagtgggagcagttattttggctgatgaatccagcaagctcggtaacttgacatcagatcttgaagttgatacaattcagacaatgccactgcacacatctttagaatgcgtcgctcaaaagggtgaaacaaagcttgaggaaatcagaaggttggcgagcaacaattgtgctgagtttctagagagctaagttcttgctgacaaggtacacttagacttaggtgggcatgaagtgaattgaaacatcattccagacaaggtttttcttcctatacttcttgtcaaattaagattgtagtttgatatgatctgaactctatgcctgcctttctattcttttcattgattaactgtttggatccattaaaagtcaatgaaacatgtggttcgaagcggtttcgaaaggtgatgcaggggtgaagtttgcatagcatcgataggccggaaatcggatttgaggacccaatgatatgccgctgcatggaaagtttcatcatttcatgcctgtggtcggtttgctcgtgaagattgcttttgttcgctgtggaagcgggtgcaagtattacacagcagcaatatcgggactgttgtgaaggatgaagttgagagtcaacatctgagaaccatggagctcaccatacgccacaaaggaactaagctgctggtttaggcatggttaagagagtcagtgctggtcctttaggttaaataaaaactttgcggggctgcacggtgtgcagaaaaggttgagtctagggcactaggctgatggtctatgtatgtgatgtacgcagataggcagatacctatgcgttcaaagtagcgcatcaaattttggccccattattttcactgcagtatcatgatgtgatgttgatagtagagatagagcaagtatgatactccctccgtccaaaagtttgtcgttcttgctttttaaggagtcaaacatcttgaactttgaccatatttatataaaaatattattatttatagt

SEQ ID NO: 121067 - DNA, 441 bp, Zea Mays
atgagtacagaggaggctgcgaagaagacaggaattgatggtagtggttcaggagggatcacaaagagtgagatgatgagtgaaatgagaagtatgatccaagagctcatggggttagggttgattggtgctaaggccaatacaggcacatctgagttgaagttggaacttgtgcctaatgatgtgaagttagaaggcagtaagaattatctaagctggtccagaagagtgcgtgtactcctaggaggcaagggagtggagtattatttggaggagacatgtgttgagccgattgataagctcggcgcagaatggagaatctggcatgcgacaaactctgtgatagttgcatggttgttggcatctatgtctcccactgtttgcctttgggtggaagccatgcgtactgcatcacagatctggaagaacgaatcaagctga

SEQ ID NO: 121068 - DNA, 897 bp, Zea Mays
attctagtaataataaagtgtggcggctaagggggcctgtgccgtcgtttagtcctcatgacatgagctgtacaggttcgttccgatccgtgtccgaccttgccactcgctcaccggccaccgtcaccatcacaaggagaaacaaattcttctattttagctctagctcgctcgccatcccctgcccggctgctgcccccaacggaacgacggccagaggaagctagcagagtcgagagagagagagagagagagagagagagagagagagagagagagcatggctggcaggagtttcctgattcggtcccccaaggaggaggagtccgacgccgccgtcagagaagctgtactgctgggagcaaagaacgccgcaatagctggtactgtggttgcagttcccacgttggttggctgccgtgtccttccttgggctaaggcgaatctcaactacactgcacaagcactcattatatctgcagcctgtattgctggcttcttcatcactgctgacaaaaccattctacggaacgcacgacaaaacaccatcgggaagcttgacaagtcaacctgatgcagagatgtagctgaagctgaaaaggttctctggttgccgcggcggttgatagggtgtcttttgccccatatgcagtggcaccatttctcttcgtggacaagtaatttttgggtgtttggctattcaaaccagaggttgttctgtaatgacttgtctaactgatggacccaactattgtatccagtttactccgaatttgaatcagaataaaaggtggttctatatgttcgtagacatggcttagacccttgttctgaacattcacttgacctggaatttgtgatgctaaagaacggggattagcgatgtgatttctttct

SEQ ID NO: 121069 - DNA, 2684 bp, Zea Mays
cacgccggcccaaaatgccccgccgcctagctacgacctacgccggccgcatcgccgccgcgacgccgtccccctcgggcccttccatcaccgtcaccgtctcgccgacaccggcccccacccctcttgacacgcgcggatattccctaccgcgccgccacctcatctgcgccgttgcccgaatcctccgctccccggtgtcacacaccccgctgcttgacctcgatgactacctccgctctctccgcctcactctcaccaccgcggaggcttctgaggtcatgaaggcgctcgcccccgacacctctctcgcgctcagcttcttccgcttcgccgccacctccctccccggcttccggcacgatgccttctcctataaccgcatcctggtcctcctcttcagcaaccgcgccgatcccgccgaggccatgcggctcatcgcggagatggagcgcgacggcgtgcccggcaacatctccaccgtgaatttgctggtcgggatgggcgtggaggtggggaggtgcctggacctggcaagtaagtgggggctcaggctgaacgggtacacctacaagtgccttgtgcaggcgcatctgaggagtcgggaggtgtggaaggggttcgaggtatatgagaagatgcggaggaagggctacaagctggacatatttgcatataacatgctgcttaatgcgcttgccaaggctggaatggttgaccaagcttaccaagtctttgaagatatgaaacaaaactactgtgatccagatgcatacacatacactatactaattagaatgtctggaaaggctgggaagaccactaaatttgtctcattgttggaggaaatggtgtccgaaggatgtgttcttaatctgattgcttataatactgttattgaggctcttggtaagaacaagatggttgacgaggcgatttttatgctttctaaaatgattgagagtgactgtcggcccaatcaattcacatatagcattatgctggatgttttatcaacagggggacaactccacaggttgaatgagattctagatatttgtagtggatgtctgaataggccagtttattcttatttgatcaaggcactctgcaaatctggtcatgcaagtgaggctcatagtgtattctgccgtatgtggaattcccatgaaaaaggagaccggtatgcttttgtatcaatgcttgaggcactatgcaatgcagaaaagacaacagaggctattgatctactgcatatgatgcctgaaaaggggattactacagatgttggaatgtataatatgatattttctgctcttgggaagctgaagcaggtgtctttcatgagcagcctctatgatacgatgagagccaatggtgttgttcctgatgttttcacgtacaatattatgatttcaagttttggtagggttggcttagttgataaggcatctgaactttttgaggaaatggaggatggcagttgcaagcctgatgtcgtcacctataattctatgataaattgtcttgggaaaaatggagatctcgatgaagcccacatgcttttcaaagatatgcaagagaaaggatatgatcctgatgtcttcacttacagcatattgattgagtgctttgggaaatccaataaggttgatatggcatgcagcttgtttgatgagatggttgcacaggggtgcattcctaatattgtaacctataacattttactagactgtttagagagacgagggaagacaacagaagctcataaattttatgaaactctgaagcaacagggattgactccagactcgataacttactcaatacttgagagattggaaagtagatctcaacgaacagtaagaatacgtaaaccaagccggaatacaggctgggttataagtccagtgtgataacctaccctggatctttcagttgcatacctccggtgtagtggggctgaggacaaatagtctgtatgcattatgcaaacttgcaagtatattgctggtcaataatgtcagcaagtgactactcaattaccgtgaaaacaatatagtagtcctgactcatcagaattatatgtatataatagtattgcatggctgctgatatttgatatcttggttctgaacaattcgtggaagatggacatcttgagaacaggtaaaaacatctctactttgtcatcgtattagaggaatgatttcaagatgtgaggatctatctttggaagctcagagttagtacctagattcatatttgttaaaaccagatcaggccagcagtttagctcggaaaagatggaaccagagaaccagttagttctggctgcagttttggtctttggatcattttttatgcatctaaaaaactaaggctggtgtgggtcatagatggaaggttgtgtacttatgtgcaccgcggaagggaattatgaagaagacacgttccattttctctttgtgcaacatcgctgtagccttggcagttcctttacttatgtgaatgtgaatgtatgtgagaactgttcctgttcagatgaaacataaccttctccttaatctgccaacaagctttagcatagcaaagtactcttttattaaatcttttgatgtatacaattgtacattagcctaggaaaaagttctccttgaatagtggaaaggagttgtgcgatc

SEQ ID NO: 121070 - DNA, 2359 bp, Zea Mays
atgaaatagtgttttggtatcgatacggtaaacacggcgcccccgctcgcacgctccttcccactcagcagcagcacgcgctctgctccccacgccagcacgcccgagccccgaatcgagtcccctaccccatcgatccccgccgcccgcctttccccgccgcccgcctttcccctacccagctctcggggaccttctctcccagcccgagatccctccccaccgagatcccgcgccgccatggtgtcgtgacggcggcggaggcggcgtcatggagcgggagcccaagtcccccgacgaccgccctgagcccgctgcggcggcggcgcagccgcagccgcagccgctggagtggcggtttgcgcaggtcttcggcgagcgcgccgcgggagaagatgtgcaagatgtggacataatatctgcaattgagtttgacaaatctgggaatcatcttgctactggagatagaggtggacgtgtggttttgttcgaaagaacagacattgctgataatgcttgtcgaggagaacttgagaggcaagaatatcttgtttctaggcatcctgagttccgttacaagaccgaatttcagagtcatgaacctgagtttgactacctaaaaagtttggaaatagaagagaagattaacaagatcaagtggtgccaaacaaccaacaatgcactctttctcttgtctacaaatgacaaaacaatcaagtattggaaggttcaagagaaaaaggtgaaacgcgtttcagtgatgaatttggacacctcccaaagttcagacaatggttcaacttcaagtccgggtaccagtagttgcagagctcttcttccaaatggtggatgcacaggaaaaatgtacagtccaaacaacaatatgtcatttcctccaggaggatgcacatcgctgcgtttgcctgtggtggttacaggccaagaatttactcatgttgcgagaagcagacgtgtatatgcccatgcccatgactaccatattaattccatttcaaataatagcgatggagaaacgttcatatcagcagatgatctgcgaataaacctttggaatttagaaattagcaatcagagctttaacattgttgatgtgaaacctgcaaacatggaggatctaactgaggtgatcacttgtgcggagttccatccaactcactgtaatacactagcatatagtagctcaaagggtactattcggcttattgatctgcgacagtcagcactgtgtgacaaccatgctaaactatttgaggagcatgaagcacctggatcaagatccttttttacagagataatagcatcagtttcagatataaaatttgcaagggatggaagacacattcttagtcgtgattatatgacactcaagttgtgggatctaaacatggattcaggcccagttgcaacttttcaggttcatgaatacttacgtcctaagctttgtgatttatacgagaacgattcaatttttgacaaatttgagtgctgcctcagcggcgatggactccatgttgcaactggttcttatagtaatttgtttcgtgtttttggttgttctcctgaaagcgtggaggcatcaacgttggaagccagcagaaatcccatgaggcgacaggttgctgatccagcaaggcctgcacggactctgaccggtgctgtgaggagaggtggagagaacacaagcgttgacgccagcggaaactcttgcgacctctcaacaaagctgctccatcttgcgtggcacccaactgagaactccatcgcgtgcgctgccgcaaacagcttgtacatgtactacgcataggggaacgtgctagagagaactggtacagtagtgctttttttttgcttgtttgcttgcttgaagtgaaaggcgtggtctttcacacgttcaaggatccaggcgcaggaaactgttgtcggttcgatggctggggagcccccgaaaagcggcagtcggtgattccacaagatcagtcctggcacaagctgacttcctcctcgggattttccttggtggatgtgaagctgaagcatgtgttactggtttattattaccgaagctttttggcacccaaggtatgacgacggctgtagctgcctgccttgtagcgaaattggctgcggaaggataaaaggaagcggtaagaagacagacagacaggtcacaggaatacctgctcacgtatcacaaaggctgtaagatttttccccccttctcttttacgacgtgtaatgcaacctagtcagagctaaccatcagttgtcgtgaactctgatagtttctgtcatagatactgtagattttatctatgcagctgctgttgtattcattaga

SEQ ID NO: 121071 - DNA, 2371 bp, Zea Mays
atgaaatagtgttttggtatcgatacggtaaacacggcgcccccgctcgcacgctccttcccactcagcagcagcacgcgctctgctccccacgccagcacgcccgagccccgaatcgagtcccctaccccatcgatccccgccgcccgcctttccccgccgcccgcctttcccctacccagctctcggggaccttctctcccagcccgagatccctccccaccgagatcccgcgccgccatggtgtcgtgacggcggcggaggcggcgtcatggagcgggagcccaagtcccccgacgaccgccctgagcccgctgcggcggcggcgcagccgcagccgcagccgctggagtggcggtttgcgcaggtcttcggcgagcgcgccgcgggagaagatgtgcaagatgtggacataatatctgcaattgagtttgacaaatctgggaatcatcttgctactggagatagaggtggacgtgtggttttgttcgaaagaacagacattgctgataatgcttgtcgaggagaacttgagaggcaagaatatcttgtttctaggcatcctgagttccgttacaagaccgaatttcagagtcatgaacctgagtttgactacctaaaaagtttggaaatagaagagaagattaacaagatcaagtggtgccaaacaaccaacaatgcactctttctcttgtctacaaatgacaaaacaatcaagtattggaaggttcaagagaaaaaggtgaaacgcgtttcagtgatgaatttggacacctcccaaagttcagacaatggttcaacttcaagtccgggtaccagtagttgcagagctcttcttccaaatggtggatgcacaggaaaaatgtacagtccaaacaacaatatgtcatttcctccaggaggatgcacatcgctgcgtttgcctgtggtggttacaggccaagaatttactcatgttgcgagaagcagacgtgtatatgcccatgcccatgactaccatattaattccatttcaaataatagcgatggagaaacgttcatatcagcagatgatctgcgaataaacctttggaatttagaaattagcaatcagagctttaacattgttgatgtgaaacctgcaaacatggaggatctaactgaggtgatcacttgtgcggagttccatccaactcactgtaatacactagcatatagtagctcaaagggtactattcggcttattgatctgcgacagtcagcactgtgtgacaaccatgctaaactatttgaggagcatgaagcacctggatcaagatccttttttacagagataatagcatcagtttcagatataaaatttgcaagggatggaagacacattcttagtcgtgattatatgacactcaagttgtgggatctaaacatggattcaggcccagttgcaacttttcaggttcatgaatacttacgtcctaagctttgtgatttatacgagaacgattcaatttttgacaaatttgagtgctgcctcagcggcgatggactccatgttgcaactggttcttatagtaatttgtttcgtgtttttggttgttctcctgaaagcgtggaggcatcaacgttggaagccagcagaaatcccatgaggcgacaggttgctgatccagcaaggcctgcacggactctgaccggtgctgtgaggagaggtggagagaacacaagcgttgacgccagcggaaactcttgcgacctctcaacaaagctgctccatcttgcgtggcacccaactgagaactccatcgcgtgcgctgccgcaaacagcttgtacatgtactacgcataggggaacgtgctagagagaactggcgcaggaaactgttgtcggttcgatggctggggagcccccgaaaagcggcagtcggtgattccacaagatcagtcctggcacaagctgacttcctcctcgggattttccttggtggatgtgaagctgaagcatgtgttactggtttattattaccgaagctttttggcacccaaggtatgacgacggctgtagctgcctgccttgtagcgaaattggctgcggaaggataaaaggaagcggtaagaagacagacagacaggtcacaggaatacctgctcacgtatcacaaaggctgtaagatttttccccccttctcttttacgacgtgtaatgcaacctagtcagagctaaccatcagttgtcgtgaactctgatagtttctgtcatagatactgtagattttatctatgcagctgctgttgtattcattagattgttcggataagtgtaccagtgggctgtgatttgctggttgtggccgtgatgtggctacgcggaggaattcgaccgaagttaaatctc

SEQ ID NO: 121072 - DNA, 1552 bp, Zea Mays
tacttgagcggagctggtaacaaggctccgcttcacgtggtaacctctttcatgtccccacagagtacagatggcgttcccgccagcgatttgcgtcctccgacgccatgtcatgcatggtcagctgatcactgataactatgagtagtcaaatctgagaaattaccccgcctttttttctctcctcatctccttgttccaaaaaaacaccagatcttcttaattaacactatgttacagcacttaattacactcccggtacactaacaaccgccgttgcggcacatcagtagagcaagagcgacggacggcagggcgcgacgagggctacgccggcgggcttgtcgccggatcaagctccgtccgccgtctggcactagcacagtagcactagcggctagcggccgccttcgccttgggcgcggcggcgacgctggtggcccagtcctggtcccgcaggaagaggcaggcggcggagcagtcgtcgacgcgggacgccgggtacctggtccgccagcgctgcgccgcggcctgggcgacggccttggaggcgtgctgcttccttggcgtggcgcagacgatggacaccacctcctggttgctgagcacgtcccacacgccgtccgtggccaggacgaggaacaggtcccccggcgcgacgcggcggtgcgccacctccggctccgacaccacgccgtgccgcttgaggcggtggtcgcccagcgaccgcgccatggccaggcccgggcagtcctcgtcgggcagccacacgcgaggcaccgacgcctcgtccttgagcgcgaacacgcgcccgttgcagcgcttgatgcgctcagcctcctctgcgacaccgacacacacacggtacgattcaatcatccattcatccgtccactaggatatcatacgatccgatccaacgatggattacgaggactcacgaggcacgttgggcttctggtcggtggtgagctgcacggccttcaggtagcccgtctccgacacggtcgccagcacggccctggagtcgccgaggttggcgacgacgaggtcctccccctgcttgatggcgcacacggccgtggtgccgctgaagtcgcagtccaccttagcctggaccccgagctccctgtccatggcctcgaacgcgttggcgcaggcctcccgccactcctccagcatctgcgccggcgccggcgacgaccgctcgctgcggctgccgtccgtggacgacgacgccgcgggcgatgcgtcgctgaaggccgggccgtcgccgtcgtcgtcggagcccaggagcagcgcgttccgctggctcaggatcatgaaggggaggtggtccctcgccagcttgctgaccagctgcccgcagcggccgtgcccgtcgaacacgccgcagaacacaccgtcctccatgccgaatccctcactgaagtacggtgaattggttgtggttgctgtgcatttatccgaccgtacggtgaattggtggtgggtggctgctgtgatttttttcgtactggtaattggtaggacagttcctggaattttttga

SEQ ID NO: 121073 - DNA, 1786 bp, Zea Mays
tacttgagcggagctggtaacaaggctccgcttcacgtggtaacctctttcatgtccccacagagtacagatggcgttcccgccagcgatttgcgtcctccgacgccatgtcatgcatggtcagctgatcactgataactatgagtagtcaaatctgagaaattaccccgcctttttttctctcctcatctccttgttccaaaaaaacaccagatcttcttaattaacactatgttacagcacttaattacactcccggtacactaacaaccgccgttgcggcacatcagtagagcaagagcgacggacggcagggcgcgacgagggctacgccggcgggcttgtcgccggatcaagctccgtccgccgtctggcactagcacagtagcactagcggctagcggccgccttcgccttgggcgcggcggcgacgctggtggcccagtcctggtcccgcaggaagaggcaggcggcggagcagtcgtcgacgcgggacgccgggtacctggtccgccagcgctgcgccgcggcctgggcgacggccttggaggcgtgctgcttccttggcgtggcgcagacgatggacaccacctcctggttgctgagcacgtcccacacgccgtccgtggccaggacgaggaacaggtcccccggcgcgacgcggcggtgcgccacctccggctccgacaccacgccgtgccgcttgaggcggtggtcgcccagcgaccgcgccatggccaggcccgggcagtcctcgtcgggcagccacacgcgaggcaccgacgcctcgtccttgagcgcgaacacgcgcccgttgcagcgcttgatgcgctcagcctcctctgcgacaccgacacacacacggtacgattcaatcatccattcatccgtccactaggatatcatacgatccgatccaacgatggattacgaggactcacgaggcacgttgggcttctggtcggtggtgagctgcacggccttcaggtagcccgtctccgacacggtcgccagcacggccctggagtcgccgaggttggcgacgacgaggtcctccccctgcttgatggcgcacacggccgtggtgccgctgaagtcgcagtccaccttagcctggaccccgagctccctgtccatggcctcgaacgcgttggcgcaggcctcccgccactcctccagcatctgcgccggcgccggcgacgaccgctcgctgcggctgccgtccgtggacgacgacgccgcgggcgatgcgtcgctgaaggccgggccgtcgccgtcgtcgtcggagcccaggagcagcgcgttccgctggctcaggatcatgaaggggaggtggtccctcgccagcttgctgaccagctgcccgcagcggccgtgcccgtcgaacacgccgcagaacacaccgtcctccatgccgaatccctggcagaggatgacggcgtcctggttgggccccttcttgcccttctgcgagaagagggaggcggccaccgtccgctcccacgccgcgccacggccgtcccctccccatccccctccaccgccgccgccctgcccgtccatcaccacgtacaccacgttctcgtccgagtcctcctcctcctgctccacgcgcttggacgacgcgcagatccccatagcaaagcaaccgagagcagacgccccgccactggctggctggctggctcaactcaggcaaccgtctccccttcgccttcttggcgggagaacagagctaagcaacggaagcggtggcggcagacgcgctcgagcttgctcacaatga

SEQ ID NO: 121074 - DNA, 854 bp, Zea Mays
tgcacggtacaatgaagcacagtcggtggagtaaatattttctgttgttgaaaggattaaatattttttgaacccaaacaaacaaatctctgtaccagcagagaaattcagaggattgttgagacaacatcgagagcacccccctcaatcaagaagcagcagcagttcgttgacacagattcggttcggaaactattcccacaaatagtgggtgaagcgaagaaaataaagcaatccgcagaaggaacgacaaaaaaccatcttttttttttgctccggaaataatggtcgctaatgatttgatgaagtgaaaggtcgaagtgaatcatgcgaaactggaacagggtgagaacaagcaagtagcatcagccatggggcagtacggcagctggaacgaacagggcgagacggagcaaccgaggcatggcggaagagagagagactggaggagcgcgaacctggcagaggatgacggcgtcctggttgggccccttcttgcccttctgcgagaagagggaggcggccaccgtccgctcccacgccgcgccacggccgtcccctccccatccccctccaccgccgccgccctgcccgtccatcaccacgtacaccacgttctcgtccgagtcctcctcctcctgctccacgcgcttggacgacgcgcagatccccatagcaaagcaaccgagagcagacgccccgccactggctggctggctggctcaactcaggcaaccgtctccccttcgccttcttggcgggagaacagagctaagcaacggaagcggtggcggcagacgcgctcgagcttgctcacaatgatggcggcgaatcgcacaggggtggtttggtgg

SEQ ID NO: 121075 - DNA, 113 bp, Zea Mays
ttctttttatgtcttcttttgaggtgttgcatcctgattgccttagtccaatcctctttgtattttgattctttcactcatatatcttgttttgcccaatactaactccaaaa

SEQ ID NO: 121076 - DNA, 1928 bp, Zea Mays
aaaattggcacgagaagcatcggttgggcaccgcaccggcaccaccaagactctaggcgcagcagctcctccacgcttcgctgccgggtcaagctcctctcatggagatcacggccagctgcgacgacggcgcggtcacagctggcgccgtttctggtctgctgctcgcgtctgttctgtctctgttcggcgcgtttctggtatacttctacgcgccgttctggagcgtgaggagagtcccggggcctccagccaggttcccaatcggccacctccatcttcttgccaggaacgggccagacgtcttccgtgcgattgcgaaagagtatggcccaatcttcaggtttcacatgggaaggcaaccactggtgatcgtggccaatgccgagctgtgcaaggaggtcggcatcaagaagttcaaggacatccccaaccggagcaccccgccgccgtcgatcggttccctgcaccaggacgccctcttcctcaccagggactcgacgtggtcggcgatgaggagcacggtggttccgctctaccagccagcgcggcttgccgggctcattccggtgatgcagtcgtacgtcgacacactggcggcgaacatcgccgcctgcccggaccaggactgcgtccccttctgccagctctcgctccggatggccatcgacatcatcggcaggacggccttcggcatcgagttcggcctgtccaagaacgccgcaggcacaggcagcagcagcagcgagtccccaggcggcggcgagggcgagggcgacgtcagggaattcctcagggagtacaagcggtccatggagttcgtcaagatggacctgacgagctctctgtccaccatcctcggcctcttcctcccgtgcgtccagacgccgtgcaagcgcctgctgcggcgggtgcccggcacggcggactacaagatggaccagaacgagcgccgcctctgctcccgcatcgacgccatcatagccggccgccggcgggaccgggccacgcgccggcgttgcggccccggcgccgcccccgcccccgccccgctggacttcatcgcggcgctgctggatgcgatggagagcgggcggcggcggcggcggcggtgcaggtgccaacaaggacttcgcgctggcggacaggcacgtgcgcgcgctggcgtacgagcacctcatcgccggcaccaagaccacggcgttcacgctgtcgtcggtggtgtacctggtctcgtgccacccgctcgtggaggccaagctgctgcgggagttggacggcttcgcgccgcgccgcgggcgcgggcgcgcgccggacgccgacgagctccagagcgggttcccctacctcgaccaggtcatcaaggaggccatgcggttttacgtcgtctcgccgctcatcgccaggcagacctccgagcgcgtggagatcgggggctacgttctccccaagggcgcgtacgtttggctggcgccgggtgtgctggcccgggacgcggcgcagttcccggacccggaggagttccggccggagcggttcgcgccggaggcggaggaggagcgggcgcgccacccgtacgcgcacatccccttcggcgtcgggcccagggcgtgcatcgggcacaagttcgcgctgcaacaggtgaagcttgccgtggtggagctctaccgccggtacgtgttccgacactcgccgtccatggagtcgcccatccagttcgactttgacctcgtccttgccttccgccacggcgtcaagctcagggccatcaggaggggctgaggctgcctagcttggggtcacgtgtgtgtggaactgcatccgtgacgtgatggtgccacagcgtgtcttcttgtgtgtaatatagcactaataagcatatattgagtatgtatatatagaaatagatggtgaagaagattgcacgt

SEQ ID NO: 121077 - DNA, 244 bp, Zea Mays
atggcgtgtcgataccgtgtagggcaccccggcctcgagtcacgtgcgcgcaagccaccagggatgcatgttgccgcggcgtcgcggctgatcagatcagctgagcggcgagggcgaggagcctcgcgaaacgcagcgcgctcgatcgaagaatcgattactacccgcaatcaatccgagacctgtggcactgttcaccggatcaccggctacgcatctcgaccgaccgtgcccacggctgcat

SEQ ID NO: 121078 - DNA, 1842 bp, Zea Mays
tcgaaccgaacctcgccgccgccgactcctcttccgtctctctctctcatctagtccctgtctccttccctctaaacccgcacccgcagcagcgccgctagggtttgctcaggccccgaaccccacccttggattgctctgattccgtgtttgcagtatggcggggtacccggaggacaaccagcacgagttgaacgggtacgacgaggaggtcgacgaagaggagggacaccccgggaggcgggtaggccgggatgggggctctgggtacgctgttgctgtcggagaggatgggaggggggcgggtggcgactcgttgggaaagatttttgtcggaggcgttgcttgggagactactgaagaatcattctccaagcattttgagaagtatggggcaataactgattctgtaattatgaaggacaagcatactaagatgcctcgtggatttggatttgttacattttctgatccatctgttatagacaaggttttggaggatgatcacgttatagatggcagaacggttgaagttaagaggactgtcccgagggaagagatgatcaccaaagacggccctaagacaagaaagatcttcatcggtgggctaccgccatctcttactgaagatgaattgaaggatcacttttcatcatatggtaatgtggttgaacatcagataatgcttgatcatagcactgggcgttctagagggtttggttttatcacatttgaaagtgaagattctgttgaaagggtcatatcagaggggagaatgcgtgatcttggtgggaagcaggttgaaataaagaaggctgaaccaaagaaacatggatctgaccacagcagtaatgggagatcaaaccacggaggtggagcttaccgcaattcttaccgtagtggtggtggagctggtagtggcagcagtggaggcggcggtggttatgggtatggtggtgcttatcgatctgctgcagcaggttatggatatgatggtggcgcaggagcaggatatggctatggtagagggtatggctatggaggcaatgctggctttgggtctagttttggtggtggttatggtggatccatgtatggaggtgctgcctatggtgcatatggtgcctatggtggtggcgcctatggaggaggtgcctacggaggcggtgcctatggaggtggtgctgcctatggtggcgccccaggtggttatggcactggcggatacggcagttatggcggagcaggcagtactggtggtgggagcacaggtgctcggggttctagcaggtatcatccatacggaaaataagcgacgagtttaaactatttttctgggtctcaggtgttcctcttctcctagaagttcagatttcatggcatgtccatctaaacagtgggcattggaacgtagttgggtctaattaagtcaccgtgagaactgtgtaattgctgcagctgagcctccctgcctgccttgtttgcagtacaagctacacataaaacctgtgttgtattctttagtttggtatatgcagagtttagaaccctgagatcgagcattttatggtaggaacagtatttggtgcggtagaactatattccgtgctctaacattgccattgcaagattaactgttgccacatgtggtgattacaactagggacccattagaggatttggttacattttatgacttgatttacattctacaaatggaaatgaactcagggatgcgacctgggctatggcgtaaatattagagtgttgagatgtctgcattcatatttgcagttttgtgcatgagaatttgtactctgctaacttcaacgattactgctt

SEQ ID NO: 121079 - DNA, 1781 bp, Zea Mays
tcgaaccgaacctcgccgccgccgactcctcttccgtctctctctctcatctagtccctgtctccttccctctaaacccgcacccgcagcagcgccgctagggtttgctcaggccccgaaccccacccttggattgctctgattccgtgtatggcggggtacccggaggacaaccagcacgagttgaacgggtacgacgaggaggtcgacgaagaggagggacaccccgggaggcgggtaggccgggatgggggctctggaaagatttttgtcggaggcgttgcttgggagactactgaagaatcattctccaagcattttgagaagtatggggcaataactgattctgtaattatgaaggacaagcatactaagatgcctcgtggatttggatttgttacattttctgatccatctgttatagacaaggttttggaggatgatcacgttatagatggcagaacggttgaagttaagaggactgtcccgagggaagagatgatcaccaaagacggccctaagacaagaaagatcttcatcggtgggctaccgccatctcttactgaagatgaattgaaggatcacttttcatcatatggtaatgtggttgaacatcagataatgcttgatcatagcactgggcgttctagagggtttggttttatcacatttgaaagtgaagattctgttgaaagggtcatatcagaggggagaatgcgtgatcttggtgggaagcaggttgaaataaagaaggctgaaccaaagaaacatggatctgaccacagcagtaatgggagatcaaaccacggaggtggagcttaccgcaattcttaccgtagtggtggtggagctggtagtggcagcagtggaggcggcggtggttatgggtatggtggtgcttatcgatctgctgcagcaggttatggatatgatggtggcgcaggagcaggatatggctatggtagagggtatggctatggaggcaatgctggctttgggtctagttttggtggtggttatggtggatccatgtatggaggtgctgcctatggtgcatatggtgcctatggtggtggcgcctatggaggaggtgcctacggaggcggtgcctatggaggtggtgctgcctatggtggcgccccaggtggttatggcactggcggatacggcagttatggcggagcaggcagtactggtggtgggagcacaggtgctcggggttctagcaggtatcatccatacggaaaataagcgacgagtttaaactatttttctgggtctcaggtgttcctcttctcctagaagttcagatttcatggcatgtccatctaaacagtgggcattggaacgtagttgggtctaattaagtcaccgtgagaactgtgtaattgctgcagctgagcctccctgcctgccttgtttgcagtacaagctacacataaaacctgtgttgtattctttagtttggtatatgcagagtttagaaccctgagatcgagcattttatggtaggaacagtatttggtgcggtagaactatattccgtgctctaacattgccattgcaagattaactgttgccacatgtggtgattacaactagggacccattagaggatttggttacattttatgacttgatttacattctacaaatggaaatgaactcagggatgcgacctgggctatggcgtaaatattagagtgttgagatgtctgcattcatatttgcagttttgtgcatgagaatttgtactctgctaacttcaacgattactgctt

SEQ ID NO: 121080 - DNA, 1957 bp, Zea Mays
tcgaaccgaacctcgccgccgccgactcctcttccgtctctctctctcatctagtccctgtctccttccctctaaacccgcacccgcagcagcgccgctagggtttgctcaggccccgaaccccacccttggattgctctgattccgtggcggctgtttcccgaagtttgcagtatggcggggtacccggaggacaaccagcacgagttgaacgggtacgacgaggaggtcgacgaagaggagggacaccccgggaggcgggtaggccgggatgggggctctgggtacgctgttgctgtcggagaggatgggaggggggcgggtggcgactcgttgggaaagatttttgtcggaggcgttgcttgggagactactgaagaatcattctccaagcattttgagaagtatggggcaataactgattctgtaattatgaaggacaagcatactaagatgcctcgtggatttggatttgttacattttctgatccatctgttatagacaaggttttggaggatgatcacgttatagatggcagaacggttgaagttaagaggactgtcccgagggaagagatgatcaccaaagacggccctaagacaagaaagatcttcatcggtgggctaccgccatctcttactgaagatgaattgaaggatcacttttcatcatatggtaatgtggttgaacatcagataatgcttgatcatagcactgggcgttctagagggtttggttttatcacatttgaaagtgaagattctgttgaaagggtcatatcagaggggagaatgcgtgatcttggtgggaagcaggttgaaataaagaaggctgaaccaaagaaacatggatctgaccacagcagtaatgggagatcaaaccacggaggtggagcttaccgcaattcttaccgtagtggtggtggagctggtagtggcagcagtggaggcggcggtggttatgggtatggtggtgcttatcgatctgctgcagcaggttatggatatgatggtggcgcaggagcaggatatggctatggtagagggtatggctatggaggcaatgctggctttgggtctagttttggtggtggttatggtggatccatgtatggaggtgctgcctatggtgcatatggtgcctatggtggtggcgcctatggaggaggtgcctacggaggcggtgcctatggaggtggtgctgcctatggtggcgccccaggtggttatggcactggcggatacggcagttatggcggagcaggcagtactggtggtgggagcacaggtgctcggggttctagcaggtatcatccatacggaaaataagcgacgagtttaaactatttttctgggtctcaggtgttcctcttctcctagaagttcagatttcatggcatgtccatctaaacagtgggcattggaacgtagttgggtctaattaagtcaccgtgagaactgtgtaattgctgcagctgagcctccctgcctgccttgtttgcagtacaagctacacataaaacctgtgttgtattctttagtttggtatatgcagagtttagaaccctgagatcgagcattttatggtaggaacagtatttggtgcggtagaactatattccgtgctctaacattgccattgcaagattaactgttgccacatgtggtgattacaactagggacccattagaggatttggttacattttatgacttgatttacattctacaaatggaaatgaactcagggatgcgacctgggctatggcgtaaatattagagtgttgagatgtctgcattcatatttgcagttttgtgcatgagaatttgtactctgctaacttcaacgattactgcttatattctctttttatcatcagtatattattcttgcttttcttttcgaagcaattttctcttatcctcgtttgttccttcctttactttagataaatac

SEQ ID NO: 121081 - DNA, 3310 bp, Zea Mays
gcatccacgacgacgcccccaacagaatacaaaaataataataaaaaaacccacaggtcacgaatggataggtagatcgctcgaagcgattgaaaaatctgcctccgacaattcctagcgcgattcagcagctgcctcggatcggatcggatcggattggaccggcgccggaagaggagaggaggcgtgggggggttcggggcctgcctcgctgccgcccatgtcccgcatgaaacacctgctacgcaagctccacctcgccgggggccccgccggggccggggccgggggcgcggcgcccgaccaccaccgctcgaggcaccgccgctcggggcatccgacgccgccgccgccgggggcggcggtagcggcccccgagccgccgcaaccggcggttactcctgccgcggctgtgtcgatcgcccccgcggtggaggagcctagaggcctcgaggcggaggcggccacgacgcggctggaagaggactaccaggtgcgcctcgcgctcgccatctccgcgtccgaccacgcggggctcgtcgacgcggactccgtccagatccgcgcggcagagctcatcagcctcggggccggcgcggggtccggacacgaccggagccccgcggaggccctctccgcgaggtactggaaccacagcgtagtcaactacgacgagcagctccccgatggcttctacgacgtctgtggcgcgcagctgcatcccggattccaggccaaattcccctcgctcgaatacctcagggctgtcccgcttgggcgtgatgccccgttcctggccattttggtggatcgggagcacgaccctgccctaaaacgactggaagatagggctgcacagattgctgcgcagactagggcaggacatggtggtgctgcttcagctgagcttgcgcagaagattgtgggtctcattgttaatgcgatgggcggtctggttgaggatgctgatggtatgaacagggagtggagcatcaagagccacgagctctctctccagctaaacagtgtcgttcttccacttggctcgcttcgggttgggctgtcgcggcacagatcactgctatttaaggtacttgctgaccgagttaacctaccatgtaagcttctgaaaggaatatgttataccgggacagatgaaggagctgttaacttggtcaaagttgattttgacagcatggaatatattattgatttgatgggagctccaggcaccttaatcccttcagacatttctgggagtcagtttcaggactccaacaatagccaattgagcagtgatgccattgaagagagtgtagcagaattgtgcttagcccttgagcagattaatggtggatatgagaacaaaaatactattggaggatgctcatctggtcacagttctattttagcgctcacgagttcacacctgggagatttatctcagacagaacttaaacaaaatgttgtttctgagaaaaaaaatgatggggatatttctgagcatgttaaggtcgatgatgtttccaagtatattgtgcctgaagtagtggacccacagtttgcacaaaatttgcatgacttacttttggagagtggtgcattgctaccctcggatttattatctgatcaaaataatcatgacattcacgagaaagagagtacaggatggttattagttgctcaaacaacacaaaatttgccaaatgcttttgtagctaaagattcgtcatcgcctgatgaagatgaacaaccccgtgcagaaaatacagaagcagccatcagagatttggatttgcatggtcatactgctagtgttatttccaatgaggatcaaatggttgctggttctttggtgaacatgtcaggaagtagcaatggaaatttggacacgttgagttggtctagtgtaaaaacgatcagctctgttatagatgatatcgctgaatacgaaataccatgggaagatcttgatattggagaacgtattggtttaggatcatttggggaagtttatcgtgcagactggaatggcacggttttgtgtgagtacctctctacagtgttaggcatacacttctctattatgacaaagccaaatgaggttgcagtgaagaaatttcttgaccaggatttatcaggtgtttcactagagcaatttaaatgtgaagtgagaatcatgtcaaggctaaggcatcccaatgttgttcttttcttgggatatgtgacacaatcgcctaatctctctatattaactgagtacctcccaagggggagcctatatcgtctgttgcataggccaaatagtcgaattgatgaagtacggaggctaaaaatggcattcgatgtggcaaaagggatgaactacctgcactctagccatcctaccattgttcaccgtgacctgaaatcccccaatcttttagtggataaaaattgggttgttaaggtgtctgactttggcatgtccaggttgaaacatcatacttttctttcctctaagtcaactgctggaacaccagagtggatggcacctgaggtactacgaaatgaaccatctaatgagaagtgtgatgtctacagctttggagtaatcctgtgggaactagcaactatgcgtgtgccatggagtgggttgaatccaatgcaagttgtaggagcagttggattccagaacaggcgactagagatccccaaggatgtggatccacaggtggctagcataatatcttcatgttgggatagcgatccgagcaaaaggccgtcgttctcccagctcttgtcccctctaaagcaactacaacatttagttgttacagaaagctgctgacatgcgtttcctgggacaaatctcaggatacatatattcaagtatttaagctctgttacagggctaaaattttcttttttgaagctcgtggaggagtctctgcggtatagatgtgtttgggcgaaggttctgcacatcagtaatcatcaccttgtgaaaatgcgagtctctgaagccgtgcaaaggcgctgctggagaaagcgtagtgtgtagtctcaagtgaagaaaagtggtgcgacacaaagtgttctgtgccatggtaaataattgttcagttctggatttgaacgggtgataaattcaccacaaagataggatcttgaagttttttccccttgccttacaaaagatggaaagtgaagtgaaaaaaaattcacggtgtctgcaaaaagtcgcagcccgatgccacgtgaaaatgtatatgatgtaatacagttgctttggaaaggcaaacataaagttcacagttttgttcgataa

SEQ ID NO: 121082 - DNA, 1611 bp, Zea Mays
acaagcatggcaaggactcgtttcgtggccgtcgccgccctcctcacaagcttcctctccgtcgctgttgggcagccccggccactgcccgccgccgtcctcccgagcgatcttttcgggctgggcatcgcgtcgaggatccgcacggaccgcaactcgacggctaaggcggcgacggacttcggccagatggcgagggcagcgccggaggccgtgttccaccccgccacgccggccgacatcgccgcgctcgtccggttctccgcctcgtcggtcgctccgttccctgtggcgccgcgcgggcagggccactcctggcgcggccaggcgctcgccccgggcggcgtcgtcgtggacatgggctcgctggggcgcggcccccgcatcaacgtgtccgtcgcggagccgttcgtcgacgtcggcggggagcagctgtgggtcgacgtcctccgcgccacgctgcgacacggcctggcgccccgcgtgtggaccgactacctccggctcaccgtcggcggcacgctctccaacgctggcatcggcgggcaggcgttccggcacggcccgcagatcgccaacgtgcatgaactcgacgtcgtcacaggcacaggtgagatggtgacatgctccatggacgtgaactcggacctgttcatggcggctctaggtgggttaggccagttcggggtcataaccagggcacggatccggcttgagccggcgcccaggagggtgcgctgggttccacttgcctacaccgacgtcgctactttcaccaaggatcaggagtttctcatatcgaaccgggctagccaagtcgggttcgactacgtcgaaggccaggtccagctcagccggtccttggtcgaaggtcccaaatcaacacccttcttctccggcgccgatcttgctaggcttgctggactcgcgtcgaggaccggacctactgcgatatactacatcgaaggcgccatgtactacaccgaggacaccgcgatatctgtggataagaaaatgaaggcactcctggatcagctgagcttcgagccagggtttgcgttcaccaaggacgtgacgttcgtgcagttcctcgaccgggtgcgcgaggaggagagggtgctccggtcagccggcgcgtgggaggtgccgcacccatggctgaatctctttgtcccgcggtcgcgcatcctcgacttcgacgacggcgtgttcaaggctctactcaaggactccaacccagctgggatcatcctcatgtaccccatgaacaaggacaggtgggacgaccggatgacagcgatgaccccagccacgaacgacgacgacgtgttctatgccgtcagtttcctttggtcagcactgtctgcagacgacgtgccccagctcgagagatggaacaaggcagtgctggacttctgtgatcggtcggggatagaatgcaagcagtacctgccacactacacatctcaagacgggtggcgacggcatttcggcgcgaaatggagcaggatcgctgagctgaaggccagatatgaccctcgggcgttgttgtcgcccggccagaggattttcccggtgccagtagaggcatctggcattgcttctgcctga

SEQ ID NO: 121083 - DNA, 798 bp, Zea Mays
atggcagtccataaaagtagcgcagaaagaaatgagaacatgtaccgaaagaaaccaagagcatctggatctgaaaagataaggtcttgccatattgctagatcagtctgggggtatgtggcaaaatgtcttaataccagtactgttcctgggaatattgtgcaatgttggttctggctatccctaaatctaccatatgccaaagacatatcagttattggtgctccgtgcttctgccatttgttgggctttgtggaagagtttggtcgtcgccgtcaggataatgttgaggtgatattcccagaatcacaagttgtgggcagcggcaatccatcttctgttgcggataacacagttcttgcttcggcatcatcagcctcagccgctgcagattctgcagctctcgttgataaggctattgcaaagttgcctgctgatgttcgtgcacacgcaactgattcaaagagaaaggccaaatcacaagatcctggttggaagtttggatggtggccagatcctaccaagaaagtttgtgtgatactggaaggggtaggacatgcacacagaccttgcgggagcgacggagaagctgagtggcggacatggcgaccggaggcaatgggcgcgcgggtgggtctagggttcgagggaggtgatgcggcggagatcggaggggaggcggaacaggagagacgggagatgcggaggacactggccgaggagggggggagggggcgtgaccgcgcgagtggtcacccggtcaggcaaggcaaggttacgcttgcgtcggatgtttga

SEQ ID NO: 121084 - DNA, 3078 bp, Zea Mays
gccacctcacgcccttcccatccatcccatcgccactccactcgcactcggccaagaaagaagcggcaggtcactgcccactgctgctccaggagcgagaaaggccagccaaggagggagctttgctttcaggaggagaggagcggcgaggtgggcggcgggcgccatggccgcagcgccgcgtagtcttgtcacctgcagcggcgggggcagtagcagtagtcgcatcctgctcgccgtcttcctggcggccgccctcttggcgtccgcggccaatgcggccgtctcgtacgaccaccgctccctcgtcatcaacggccgccgccgcatcctcatctccggctctatccactacccgagaagcgcccccgagatgtggcccgggctgatccagaaggccaaggacggcggcctcgacgtcgtccagacctacgtcttctggaacgggcacgagccggcgcaggggcagtactacttcgccgaccgctacgacctcgtccgcttcgtcaagctcgtcaggcaggccggcctctacgtccacctccgcgtcggcccctacgtctgcgcggagtggaacttcggtggctttccagtttggctcaagtatgtgccgggcatcaggttcaggacagacaatggcccattcaaggcggcaatgcagaagttcgtggagaagatagtgtccatgatgaagtcggaggggctgttcgagtggcagggaggcccgatcatcatggctcaggtggagaacgagttcgggccaatggagtccgtcgtgggcagtggcggcaagccatacgctcactgggcggcccagatggctgtcgggaccaacgccggcgtgccgtgggtgatgtgcaagcaggatgacgccccggaccccgtgatcaacacttgcaatggcttctactgcgactacttcacgccaaacaacaagcacaagccgaccatgtggaccgaagcctggactggatggttcaccaagttcggcggcgcggcgcctcaccggccggtggaggacctggccttcgccgtggcacggttcgttcagaaaggaggctccttcgtgaactactacatgtaccatggaggaacgaactttgggcgcaccgccggtggccccttcatcgcgaccagctacgactacgatgcccccattgacgagtttggtatgcagtggttgttgccatctttgataaacttgaattcccatcggctgccaagagatatttgtcggaaaagttcacagtgtggtttttacctgtctgtcgtccacacctggaatttctgggggggtgggtgggtgtacattgcaggtctgctcaggcaaccgaaatggggtcacttgaggaacatgcacagagctatcaagcaggccgagcctgcgttggtttctggcgatccaacgatacgatctattggaaactacgaaaaggcatatgtcttcaagtcaaagaatggagcctgtgctgcgttcctgtcgaactaccacgttaaatctgctgtgaggatcaggtttgacgggcgtcactatgacctcccggcttggtccatcagcattctgcccgactgcaaaaccgcagtcttcaacaccgcgacggtgaaggagccgactctgctgccgaagatgagcccggtgatgcatcgcttcgcttggcagtcctacagcgaggacacgaactcgctggatgacagcgcgtttgcaagggatggcctgatcgagcagctcagcttgacatgggacaagtcggactacctgtggtacaccacccatgtcaacattggttccaacgaacgattcctcaagtctggccagtggcctcagctcagtgtgtactctgctggacactccatgcaggtgttcgtcaatgggaggtcatatggatctgtttacggcggctacgacaacccgaagctaacattcagtgggtatgtgaagatgtggcagggcagcaacaagatctccattctaagctcagcagtgggccttcctaacaacggtgaccatttcgagctgtggaacgtcggcgtcctcgggccagtgaccctctccggcctgaacgaggggaagagggacctgagccatcagagatggatataccaggtcggcctgaaaggcgagtcgctcggcctccacaccgtgaccggaagctccgccgtggaatgggccggccccggcggcggcacgcagccgctgacttggcacaaggttcttccatccatccgtcagcgatctgaagagatgcatggcaaggcagcgtggcagtgatatacatcctttttgtttggtgtgacgaattaagcaggccctgttcaacgcgccggcggggagcgatccggtggccctggacatgggcagcatgggcaagggccaggtgtgggtgaacgggcgccacgccgggcgctactggtcgtacagggctcactcccgcggctgcgggcggtgcagctacgccgggacgtaccgcgaggaccagtgcacgtccaactgcggcgacctctcccagagatggtaccacgtgccgcggtcgtggctgaagccgagcgggaacctgctggtggtgctggaggagtacggcggcgacctcgccggcgtcagtctcgcgacacggactacgtgaacaaggcaggcgaacgacacgcgttgcatctaactcgtacatgtatactatactccgacgtgcgagtatatacatcgattggtatttgtttagtgaggtgaggccatggcgaggaggagcaagcataccgaccatgccgtattcgcggaccgtatttatacacacgacaccgtacattacactcgcgtgatagcaatggttatactgcaaggggaaggtaaggatggcatttaagtgcagagcggagagggtgggtgcctgggtggtctccggccatcagtgcggcggcaggaccggcagctagctagctgcgccggcgcggcacacacttcgaggccaattcaattcaactgtttcaattcatgtaactggcactctggcagcgggtgtttgctgctgcttgctgtgtttttttgaagacgtgaacatgaaatacaaaactgagcttgttttgtcc

SEQ ID NO: 121085 - DNA, 2981 bp, Zea Mays
gccacctcacgcccttcccatccatcccatcgccactccactcgcactcggccaagaaagaagcggcaggtcactgcccactgctgctccaggagcgagaaaggccagccaaggagggagctttgctttcaggaggagaggagcggcgaggtgggcggcgggcgccatggccgcagcgccgcgtagtcttgtcacctgcagcggcgggggcagtagcagtagtcgcatcctgctcgccgtcttcctggcggccgccctcttggcgtccgcggccaatgcggccgtctcgtacgaccaccgctccctcgtcatcaacggccgccgccgcatcctcatctccggctctatccactacccgagaagcgcccccgagatgtggcccgggctgatccagaaggccaaggacggcggcctcgacgtcgtccagacctacgtcttctggaacgggcacgagccggcgcaggggcagtactacttcgccgaccgctacgacctcgtccgcttcgtcaagctcgtcaggcaggccggcctctacgtccacctccgcgtcggcccctacgtctgcgcggagtggaacttcggtggctttccagtttggctcaagtatgtgccgggcatcaggttcaggacagacaatggcccattcaaggcggcaatgcagaagttcgtggagaagatagtgtccatgatgaagtcggaggggctgttcgagtggcagggaggcccgatcatcatggctcaggtggagaacgagttcgggccaatggagtccgtcgtgggcagtggcggcaagccatacgctcactgggcggcccagatggctgtcgggaccaacgccggcgtgccgtgggtgatgtgcaagcaggatgacgccccggaccccgtgatcaacacttgcaatggcttctactgcgactacttcacgccaaacaacaagcacaagccgaccatgtggaccgaagcctggactggatggttcaccaagttcggcggcgcggcgcctcaccggccggtggaggacctggccttcgccgtggcacggttcgttcagaaaggaggctccttcgtgaactactacatgtaccatggaggaacgaactttgggcgcaccgccggtggccccttcatcgcgaccagctacgactacgatgcccccattgacgagtttggtatgcagtggttgttgccatctttgataaacttgaattcccatcggctgccaagagatatttgtcggaaaagttcacagtgtggtttttacctgtctgtcgtccacacctggaatttctgggggggtgggtgggtgtacattgcaggtctgctcaggcaaccgaaatggggtcacttgaggaacatgcacagagctatcaagcaggccgagcctgcgttggtttctggcgatccaacgatacgatctattggaaactacgaaaaggcatatgtcttcaagtcaaagaatggagcctgtgctgcgttcctgtcgaactaccacgttaaatctgctgtgaggatcaggtttgacgggcgtcactatgacctcccggcttggtccatcagcattctgcccgactgcaaaaccgcagtcttcaacaccgcgacggtgaaggagccgactctgctgccgaagatgagcccggtgatgcatcgcttcgcttggcagtcctacagcgaggacacgaactcgctggatgacagcgcgtttgcaagggatggcctgatcgagcagctcagcttgacatgggacaagtcggactacctgtggtacaccacccatgtcaacattggttccaacgaacgattcctcaagtctggccagtggcctcagctcagtgtgtactctgctggacactccatgcaggtgttcgtcaatgggaggtcatatggatctgtttacggcggctacgacaacccgaagctaacattcagtgggtatgtgaagatgtggcagggcagcaacaagatctccattctaagctcagcagtgggccttcctaacaacggtgaccatttcgagctgtggaacgtcggcgtcctcgggccagtgaccctctccggcctgaacgaggggaagagggacctgagccatcagagatggatataccaggtcggcctgaaaggcgagtcgctcggcctccacaccgtgaccggaagctccgccgtggaatgggccggccccggcggcggcacgcagccgctgacttggcacaaggccctgttcaacgcgccggcggggagcgatccggtggccctggacatgggcagcatgggcaagggccaggtgtgggtgaacgggcgccacgccgggcgctactggtcgtacagggctcactcccgcggctgcgggcggtgcagctacgccgggacgtaccgcgaggaccagtgcacgtccaactgcggcgacctctcccagagatggtaccacgtgccgcggtcgtggctgaagccgagcgggaacctgctggtggtgctggaggagtacggcggcgacctcgccggcgtcagtctcgcgacacggactacgtgaacaaggcaggcgaacgacacgcgttgcatctaactcgtacatgtatactatactccgacgtgcgagtatatacatcgattggtatttgtttagtgaggtgaggccatggcgaggaggagcaagcataccgaccatgccgtattcgcggaccgtatttatacacacgacaccgtacattacactcgcgtgatagcaatggttatactgcaaggggaaggtaaggatggcatttaagtgcagagcggagagggtgggtgcctgggtggtctccggccatcagtgcggcggcaggaccggcagctagctagctgcgccggcgcggcacacacttcgaggccaattcaattcaactgtttcaattcatgtaactggcactctggcagcgggtgtttgctgctgcttgctgtgtttttttgaagacgtgaacatgaaatacaaaactgagcttgttttgtcc

SEQ ID NO: 121086 - DNA, 1650 bp, Zea Mays
aaccatcaaaccacacacgaacctagatcgacctgctcgctctgcacacctggaacaacgtgttcctcgtcccgagaagagtcgaggaaaaatctcgcattcgcaaaccaagcaaatggaggcatgagctccgccgcctccccgtctctcgccgatctcccccaaaccctagcctcgacctgaccgccagcgggcccgcaggccggagaaggagtcggagtcgcccccacccacccaccctctgccgcgggcggggagcgggcggcggacgagatgccgtcgcacggggatctggaccggcagatcgcgcagctgcgcgactgcaagtacctgcccgaggcggaggtcaaggtgctctgcgagcaggccaaggccatcctcatggaggaatggaacgtgcagcccgtgcgctgccccgtcaccgtctgcggcgacatccacggccagttctatgacctcatcgagctcttccgcatcggcggcgactctcccgacaccaactacctcttcatgggcgactacgtcgatcgtggctattattcagttgaaacggtttctctgttagtggctttgaaagtccgttacagagatagaattacaatacttcgaggaaatcatgagagcagacaaatcactcaagtgtacggcttctatgatgaatgcttaagaaaatatggaaatgcaaatgtatggaagtattttacagacttgtttgattatttgcctctcacagctcttatagaaaatcaggtcttctgtcttcatggaggcctctctccgtcattggacacattggataacattcgttctcttgatcgcatacaggaggtacctcatgaaggacccatgtgtgatcttttgtggtctgacccagatgaccgatgtgggtggggaatttcacccagaggagcaggttacacatttgggcaagacattgcacagcagttcaaccatacaaatggtctctctctcatttcaagggcccatcaacttgtaatggaaggatttaattggtgccaggataagaatgtagtcacagtcttcagtgcgcctaattactgttaccgctgtggtaacatggctgctattcttgaaatcggggaaaacatggaccagaacttccttcaattcaaccccgcacctcggcaaattgagccagacacaactcgcaaaaccccagactactttctgtaattgtggtggtgaccttaactttctggtgtttgatgctcctctcttccgcagcatcaggacagggaatggaggacgcagtaggaacgcccctgctatgcttttgctcatcacatcatccgcgtggctgaataaattgcgtccagatgcgaaggttttggtttgcagcttccccatctgatgtgcctagtgctgtgtaatgttggttggcgccttgcagtttctacatgtgaatatgtgatggccaaaatggtttcatggtgattcttatatcacttatggcaaatcaagattattcaatatgtacagatgacgcataatcggcagttcaacagatcagctctattcatgcttacatgattttgctgttgtattgagacgcgtgatggaacatcttggcatgtgatgggatctagctggctagagggagtaaataatctatattttaaatgctgtaaa

SEQ ID NO: 121087 - DNA, 1847 bp, Zea Mays
acacacgaacctagatcgacctgctcgctctgcacacctggaacaacgtgttcctcgtcccgagaagagtcgaggaaaaatctcgcattcgcaaaccaagcaaatggaggcatgagctccgccgcctccccgtctctcgccgatctcccccaaaccctagcctcgacctgaccgccagcgggcccgcaggccggagaaggagtcggagtcgcccccacccacccaccctctgccgcgggcggggagcgggcggcggacgagatgccgtcgcacggggatctggaccggcagatcgcgcagctgcgcgactgcaagtacctgcccgaggcggaggtcaaggtgctctgcgagcaggccaaggccatcctcatggaggaatggaacgtgcagcccgtgcgctgccccgtcaccgtctgcggcgacatccacggccagttctatgacctcatcgagctcttccgcatcggcggcgactctcccgacaccaactacctcttcatgggcgactacgtcgatcgtggctattattcagttgaaacggtttctctgttagtggctttgaaagtccgttacagagatagaattacaatacttcgaggaaatcatgagagcagacaaatcactcaagtgtacggcttctatgatgaatgcttaagaaaatatggaaatgcaaatgtatggaagtattttacagacttgtttgattatttgcctctcacagctcttatagaaaatcaggtcttctgtcttcatggaggcctctctccgtcattggacacattggataacattcgttctcttgatcgcatacaggaggtacctcatgaaggacccatgtgtgatcttttgtggtctgacccagatgaccgatgtgggtggggaatttcacccagaggagcaggttacacatttgggcaagacattgcacagcagttcaaccatacaaatggtctctctctcatttcaagggcccatcaacttgtaatggaaggatttaattggtgccaggataagaatgtagtcacagtcttcagtgcgcctaattactgttaccgctgtggtaacatggctgctattcttgaaatcggggaaaacatggaccagaacttccttcaattcaaccccgcacctcggcaaattgagccagacacaactcgcaaaaccccagactactttctgtaattgtggtggtgaccttaactttctggtgtttgatgctcctctcttccgcagcatcagggtatgtagatcttgtccttagatatgggtcccatgtgcccggccttaacgtctccctattcttttgtttggagattttgtttctgcttctcgatcttgatacaagatgttagaagttgaatgccagtgtatttttttcttcctgctgtacgtcgactttgtattatttgtagacagggaatggaggacgcagtaggaacgcccctgctatgcttttgctcatcacatcatccgcgtggctgaataaattgcgtccagatgcgaaggttttggtttgcagcttccccatctgatgtgcctagtgctgtgtaatgttggttggcgccttgcagtttctacatgtgaatatgtgatggccaaaatggtttcatggtgattcttatatcacttatggcaaatcaagattattcaatatgtacagatgacgcataatcggcagttcaacagatcagctctattcatgcttacatgattttgctgttgtattgagacgcgtgatggaacatcttggcatgtgatgggatctagctggctagagggagtaaataatctatattttaaatgctgtaaagtaataaagcaagtgatgcaaaagaaatacttatact

SEQ ID NO: 121088 - DNA, 882 bp, Zea Mays
gccagctactcctttgctttgctgaataaccataccaaacacgcccatattaatacccgctcggcggtggttctgcaatcaaacgcaggccgcagtcgcgtgcggaactagagctccttcagagaagtgccgtgccagtgccaccgccggccgcatcatcgttccgcccccctggtacgagcacttcgcagagctgcaacctacatcccttttacataaatctattgtctcgtattgccgttgacgccggaatagtcttcgcatcccttttacataaatccgatgttttctttctccgattcctttgaggaatcatcacgggtcagggcaggtgttctgccgtttgcccttttctttatattctccttagaagaaatatttagttggaggctggacatagccggaggagctaactaatcgagcggtgtactggcaaaacaaaaggagcggagcaagaaaggggagaaaaaactagccactgccggagcgctattggccgtgttgggcctggaagcttgcatcaatacttccctcgccccgatttggttccaaaatcatacaagtcccaaagttgtcaagatattggaggtatgcaagcgacttggatctcaaaatagaagaaatttcggatctgagcacaaatctgagttgaaaaaactgcaactcaaaatcatcaaaaaaagaagaagaaagaaacgaatatattcgctcctcttctcagccgaacccaaaggaattgaatccaaaccctgggtaggcagacagtgagatatggaggagagcaggaggcgaacaagagaggctgcggccacgaatatctcacgaacaagcacatcatgggtccacggagcgggcagggtgacgggctcccgacggcgagct

SEQ ID NO: 121089 - DNA, 1460 bp, Zea Mays
gccagctactcctttgctttgctgaataaccataccaaacacgcccatattaatacccgctcggcggtggttctgcaatcaaacgcaggccgcagtcgcgtgcggaactagagctccttcagagaagtgccgtgccagtgccaccgccggccgcatcatcgttccgcccccctgagtgttcagtaacttcttccgatccatattatggcttcaaagcagcagcagaaacagttcctggatgaagccatgatcaagcagccgacaccggaggaggaccgtgagggcgcatggccctcagtgctgacgatcatcggctttggattcctaaccttcaactcattcatggctgtgtacaggtcaaatggagatgttggatctatctcctttgtggtcttctcttacctggtcctcgttctgctgttctactgcctgcgccgattcgagacaactccaccagagtcgcctagccgggagcacataaaaatggccgtgtgggtactcaccacgatgctcactgctgcgttctcatacaaggtggcagcaattatgccactcccggtgcaggtgctggtgtgggcaatggcaggagcaactgtgttcggtggtttttatgctttcttcatccaccaggaaaaaaccgcccagctggaacccccaaaaccataacgagggtgcccgtcctgctagccggtgtgcttgctgtgcgatcgtttggcatgtgcttgttgaggggttgctaggggattggagaggattgaagggattaaatctcctcctattcaattttgaataggaggggatttaatccccttcaatccccctcaaaccactagtaaccgaacgtggcctgagggggcgggcgagtctttatattgaatgaaactacataaaatagcatgccgtctctgtcactggcaatggacggtggtgcctagcgcaactcagcgcacaactgtgtgtcttgatttttcttctgtttatcacggcattagtgccatgccgttttatgttacagtgttgtgtgctcgcaagcatccgaaaatatgcgtctgagtttagggttgggtcaaacttgtcgaatttggggttctgttataatatgttgagcatgaataaagatggatgctggtgactctgtcgccatcgccgtccatcatgagtgtcctgtaattcaacttatatctatcatgtatgtatgtatgtatgtatgtatgtatgtatatgctgtctactatgcttctttgttttaactgaaatgtgtgttacagtgttacttctctggggtccatttaaaacggcatttcgtttacgataggaaccagccattataatctttaaccaataatttcgctaaccaatttcaactattgcaatgcgaacttaatattatcagatttataaccgaatgcgctatcaaataatcataaggttgtaatcataataatataatataaaataaa

SEQ ID NO: 121090 - DNA, 964 bp, Zea Mays
gccagctactcctttgctttgctgaataaccataccaaacacgcccatattaatacccgctcggcggtggttctgcaatcaaacgcaggccgcagtcgcgtgcggaactagagctccttcagagaagtgccgtgccagtgccaccgccggccgcatcatcgttccgcccccctgggtgcccgtcctgctagccggtgtgcttgctgtgcgatcgtttggcatgtgcttgttgaggggttgctaggggattggagaggattgaagggattaaatctcctcctattcaattttgaataggaggggatttaatccccttcaatccccctcaaaccactagtaaccgaacgtggcctgagggggcgggcgagtctttatattgaatgaaactacataaaatagcatgccgtctctgtcactggcaatggacggtggtgcctagcgcaactcagcgcacaactgtgtgtcttgatttttcttctgtttatcacggcattagtgccatgccgttttatgttacagtgttgtgtgctcgcaagcatccgaaaatatgcgtctgagtttagggttgggtcaaacttgtcgaatttggggttctgttataatatgttgagcatgaataaagatggatgctggtgactctgtcgccatcgccgtccatcatgagtgtcctgtaattcaacttatatctatcatgtatgtatgtatgtatgtatgtatgtatgtatatgctgtctactatgcttctttgttttaactgaaatgtgtgttacagtgttacttctctggggtccatttaaaacggcatttcgtttacgataggaaccagccattataatctttaaccaataatttcgctaaccaatttcaactattgcaatgcgaacttaatattatcagatttataaccgaatgcgctatcaaataatcataaggttgtaatcataataatataatataaaataaa

SEQ ID NO: 121091 - DNA, 1143 bp, Zea Mays
caaacacgcccatattaatacccgctcggcggtggttctgcaatcaaacgcaggccgcagtcgcgtgcggaactagagctccttcagagaagtgccgtgccagtgccaccgccggccgcatcatcgttccgcccccctgagtgttcagtaacttcttccgatccatattatggcttcaaagcagcagcagaaacagttcctggatgaagccatgatcaagcagccgacaccggaggaggaccgtgagggcgcatggccctcagtgctgacgatcatcggctttggattcctaaccttcaactcattcatggctgtgtacaggtcaaatggagatgttggatctatctcctttgtggtcttctcttacctggtcctcgttctgctgttctactgcctgcgccgattcgagacaactccaccagagtcgcctagccgggagcacataaaaatggccgtgtgggtactcaccacgatgctcactgctgcgttctcatacaaggtggcagcaattatgccactcccggtgcaggtgctggtgtgggcaatggcaggagcaactgtgttcggtggtttttatgctttcttcatccaccaggaaaaaaccgcccagctggaacccccaaaaccataacgaggtacaaatctcatctgtgccttgctctagtttcccaaatggaattaactatgcatgatttgtttggaaactcttattgcatccatccagataatgcatccaccataaggtaatatcttgatgacatctgtgcctgatggtgtaccaaatgtctctatctctgcattgagccacgagtaggaggatagcctaggggtgccttgactccaaagttgtattgaaaaagatggatgaagcaggcaaatgctgcctgaatccatgactcagggcacagattttccactcaaaggaagataagattgcattacttcatgatcttttgaactgcctctgcaagacgggactcggatagtggatgcaaagatctaatactggcctcaggcaacgagttgtttcactcgaaagtctagaaatgaccgggctcaaattttgcaccccaaggaaagtgagtttgcattacttcatgaccttttgaactgcctctgcaagactggactcagattacgctt

SEQ ID NO: 121092 - DNA, 1568 bp, Zea Mays
gaggaatcatcacgggtcagggcaggtgttctgccgtttgcccttttctttatattctccttagaagaaatatttagttggaggctggacatagccggaggagctaactaatcgagcggtgtactggcaaaacaaaaggagcggagcaagaaaggggagaaaaaactagccactgccggagcgctattggccgtgttgggcctggaagcttgcatcaatacttccctcgccccgatttggttccaaaatcatacaagtcccaaagttgtcaagatattggagagtgttcagtaacttcttccgatccatattatggcttcaaagcagcagcagaaacagttcctggatgaagccatgatcaagcagccgacaccggaggaggaccgtgagggcgcatggccctcagtgctgacgatcatcggctttggattcctaaccttcaactcattcatggctgtgtacaggtcaaatggagatgttggatctatctcctttgtggtcttctcttacctggtcctcgttctgctgttctactgcctgcgccgattcgagacaactccaccagagtcgcctagccgggagcacataaaaatggccgtgtgggtactcaccacgatgctcactgctgcgttctcatacaaggtggcagcaattatgccactcccggtgcaggtgctggtgtgggcaatggcaggagcaactgtgttcggtggtttttatgctttcttcatccaccaggaaaaaaccgcccagctggaacccccaaaaccataacgagggtgcccgtcctgctagccggtgtgcttgctgtgcgatcgtttggcatgtgcttgttgaggggttgctaggggattggagaggattgaagggattaaatctcctcctattcaattttgaataggaggggatttaatccccttcaatccccctcaaaccactagtaaccgaacgtggcctgagggggcgggcgagtctttatattgaatgaaactacataaaatagcatgccgtctctgtcactggcaatggacggtggtgcctagcgcaactcagcgcacaactgtgtgtcttgatttttcttctgtttatcacggcattagtgccatgccgttttatgttacagtgttgtgtgctcgcaagcatccgaaaatatgcgtctgagtttagggttgggtcaaacttgtcgaatttggggttctgttataatatgttgagcatgaataaagatggatgctggtgactctgtcgccatcgccgtccatcatgagtgtcctgtaattcaacttatatctatcatgtatgtatgtatgtatgtatgtatgtatgtatatgctgtctactatgcttctttgttttaactgaaatgtgtgttacagtgttacttctctggggtccatttaaaacggcatttcgtttacgataggaaccagccattataatctttaaccaataatttcgctaaccaatttcaactattgcaatgcgaacttaatattatcagatttataaccgaatgcgctatcaaataatcataaggttgtaatcataataatataatataaaataaa

SEQ ID NO: 121093 - DNA, 770 bp, Zea Mays
gaacaatcagtcacccaacattgaatttgaagttctgtttcctctttgttcagacgacactctccaaatgaatgccttatattttgtgttgctcctcttttctgcagagtgttcagtaacttcttccgatccatattatggcttcaaagcagcagcagaaacagttcctggatgaagccatgatcaagcagccgacaccggaggaggaccgtgagggcgcatggccctcagtgctgacgatcatcggctttggattcctaaccttcaactcattcatggctgtgtacaggtcaaatggagatgttggatctatctcctttgtggtcttctcttacctggtcctcgttctgctgttctactgcctgcgccgattcgagacaactccaccagagtcgcctagccgggagcacataaaaatggccgtgtgggtactcaccacgatgctcactgctgcgttctcatacaaggtggcagcaattatgccactcccggtgcaggtgctggtgtgggcaatggcaggagcaactgtgttcggtggtttttatgctttcttcatccaccaggaaaaaaccgcccagctggaacccccaaaaccataacgaggtacaaatctcatctgtgccttgctctagtttcccaaatggaattaactatgcatgatttgtttggaaactcttattgcatccatccagataatgcatccaccataaggtaatatcttgatgacatctgtgcctgatggtgtaccaaatgtctctatctctgcattg

SEQ ID NO: 121094 - DNA, 984 bp, Zea Mays
ctgtcttgtccacatctagcactatgagtctacagcgattatgtaagcattcattatgttgctatcttctatggcacgattgttaatccttttgttcttcatcgttgtctcgttgttcacggacacggtctacggagcaaaacaaatctgtaactggcgctcgccacccaaagaacagcagtgcatgcacggcactagcacgtatcatgagccatggcggtgcatgcccgcgccgctgaggctgggccgctatgccgaggctgccttgctgcggctggccgcgcgctgaggctggggccgcgtgcccacgctaccagagagccgcgctctggccgcctgcgccgccgggggactcgcccgcgtgcgcgtcggggcagcgcgcccgcgatgccaaggaggccgcgccatggacgcgcgcctgcaccgccgctggggccctgccgggtctgccccacggctggctgcctcgcccacaaccgccgggacgggagacgccggggccgaggccaccgcgcccgagtcgtctcgagcggatctgcctgtgcgcgccgccggggactgcgcaccgagccgttgaggctgggggccgccgcgcgctgccagggaagcgccccggcgccgccgtggccaaaccgcctgcaccgggacaggagccaccgggcccggggccgcgctcgtgtgtgtaggggctgcactcgcgcgtcgccggggcagcgcccaccggccaaggctgcgcgccgccgggatgccagcctttcccgagccgccagtgccccgatgcctgcgtcgcgcccatgcctgtgggttggcaccgccgccgccaggagatggaatggccggttagggttcaaccctaactgccagctccttgaggcttcgctaagatgggcctcataggccgtcttggcttggttgcacatcataggccatttggacctacaaaatttattatttaagtctgttattttctgcaattacaatcaa

SEQ ID NO: 121095 - DNA, 1813 bp, Zea Mays
atgcaaacaccagttttctaccctaaacacaagaacccagatgcataataaaaggtgaaagctagcagaagaggtacctaactctaccctactatagagaaaaagtcagcacattgcaagcaataataatggagacgacgacgaagctccggtggagccggcccggctccttcctcctcgtcgccgcggcgttcctggcgtccgccgccgcgtcgggcgtcaacgtcggccagttcgacgaccacttgcagaagcggaaggagctcgccgaggcgtcggcgagggaggcgtacaggcccgacccgtacaacgtcaccaacagcttcaacgccgccgtccacagagctgtcagcagcagtcggcgtgagatgcgggagaggccgaggaagcacaagaagaggggcccgtgccgggcgacgaaccctatcgacaagtgctggcgctgccgcagagactgggcgacggaccggcagcgcctggcccgttgcgccagaggcttcgggcacgcgaccaccggcggcctcggcggcaagatctacgtggtgaccgaccccaccgacctcgacgtggtgaacccgcgccccggcacgctgcgctggggcgtcatccagcccggcccgctgtggatcatcttcgcgcggtccatgatcatccagctctcgcaggagctgctcatgagcagcgacaagaccatcgacgggcgcggcgcgcaggtgcacatcgccaacggcgccgggatcacggtgcagctggcgcaaaacgtcatcatccacaacctgcacgtgcacgacgtcaagcacaccatgggcggcctcatgcgcgactcccccacgcacatcggctcccgcaccagggccgacggcgacggcatctccctcttctccgccaccaacgtctggatcgaccacatctccatgtccaactgcgaggacggcctcatcgacgtcgtgcagagctccacggggatcaccatctccaactgccacttcaccaaccacaacgacgtcatgctcttcggcgccagcgactcctggccgcaggaccagatcatgcagatcaccgtcgccttcaaccacttcggcaggggcctggtgcagcggatgccaaggtgccgctggggcttcttccacgttgtcaacaacgactacacgcactggctcatgtacgccattggcggcggcgacgcgccaaccatcatcagccagggcaaccgctacatagcaccaccaaacatcgccgccaaagtgatcaccaagcactacgcggaagaaggcgtgtggaagaactgggtgtggcacacggaggacgacctgttcatgaacggcgccatcttcaatccgtccggcggcgcccccaagcaggtcgacaccaacgagtgggtcaagcccaagccaggaacctacgttacaaggctcacccgcttctccggcacactgtcctgctgcacgggcaagccgtgctgaaggccggccggtgggcgtcagaggctgcttcttctagctcatggcctggccatgccaggtcgcgatggctgcgtttcatttcatggaagaaagcaaggatggatcacaggttgtcgttctgctaattaatctacgtttgccttcaagtactgtgttgtggcattgttacacatcacagtacagtttggtcattttttttcccacagaggaagtagggattgatttaatcccacacgcgtgtatctacgtatacagtttgtataacatgaaccacctctgtttgcgattggtctaaaaataaatataatacttatatattgaattgttttgcaagagttctgctgctttaa

SEQ ID NO: 121096 - DNA, 101 bp, Zea Mays
ttctaataagaaacatgccaagttgagcttctttcttggccctgagatcaatgttgcctgtttgtgcaaactacagagtggttaaaaacatagttcctcac

SEQ ID NO: 121097 - DNA, 780 bp, Zea Mays
atatatatgtgctcaactgttcatcgatataatcgtcggcgagatgattgccatgtcgtcgacgccgattctgctcaccatactcttggcatacctcgcgttctctgcaaactgtaatggaaacccttccgttgcaggcgaacgtggtaatgacgaggacacaccagctgcaggtggtcaccggcggtggcagccaaacggcgacaagacgatttccggaggcagcagcgacgacgaggcggcgacgtgcgtgagcagtgaatgcgagggcagcacctgttactgctgcccaacgatgcccactagcccttgcttcttggatctggatgcttgcttgagagtctgccatggtcgtcgtcgtcgtcgtcggccagccgcaccgctgccggaggtaacgtcgtcgtctgggcgcgggtccggaccaagcagattcccctgatcgagagtagctagctagctggggcggcctcgccgtcgacgacccctagctagctccatcggcgatcgatgtcctagcttgtgacaattgacaagacgagagaacatggatgttttcgccaccaccacggctcttcctcgaacaagtatcactccaaactgaagtttctacacgtatatatagttccaaaaacaaagtaaattgcatacatataatataggcttcatgctagtgcgactatggtgcctacgaaaaattatgcaacagattaatgtgtttatataatggatgtacacatgtacactggtaaaaggaagaagagatcatgcttgtctcttaca

SEQ ID NO: 121098 - DNA, 770 bp, Zea Mays
atatatatgtgctcaactgttcatcgatataatcgtcggcgagatgattgccatgtcgtcgacgccgattctgctcaccatactcttggcatacctcgcgttctctgcaaactgtaatggcgaacgtggtaatgacgaggacacaccagctgcaggtggtcaccggcggtggcagccaaacggcgacaagacgatttccggaggcagcagcgacgacgaggcggcgacgtgcgtgagcagtgaatgcgagggcagcacctgttactgctgcccaacgatgcccactagcccttgcttcttggatctggatgcttgcttgagagtctgccatggtcgtcgtcgtcgtcgtcggccagccgcaccgctgccggaggtaacgtcgtcgtctgggcgcgggtccggaccaagcagattcccctgatcgagagtagctagctagctggggcggcctcgccgtcgacgacccctagctagctccatcggcgatcgatgtcctagcttgtgacaattgacaagacgagagaacatggatgttttcgccaccaccacggctcttcctcgaacaagtatcactccaaactgaagtttctacacgtatatatagttccaaaaacaaagtaaattgcatacatataatataggcttcatgctagtgcgactatggtgcctacgaaaaattatgcaacagattaatgtgtttatataatggatgtacacatgtacactggtaaaaggaagaagagatcatgcttgtctcttacacgtacata

SEQ ID NO: 121099 - DNA, 484 bp, Zea Mays
atatatatgtgctcaactgttcatcgatataatcgtcggcgagatgattgccatgtcgtcgacgccgattctgctcaccatactcttggcatacctcgcgttctctgcaaactgtaatggcgaacgtggtaatgacgaggacacaccagctgcaggtggtcaccggcggtggcagccaaacggcgacaagacgatttccggaggcagcagcgacgacgaggcggcgacgtgcgtgagcagtgaatgcgagggcagcacctgttactgctgcccaacgatgcccactagcccttgcttcttggatctggatgcttgcttgagagtctgccatggtcgtcgtcgtcgtcgtcggccagccgcaccgctgccggaggatgaaactccagtaccctcaattgctgcggcagttaatcgacatagtcaggaggtttgtagtttaccagcggaccctcagccaagcgacactaacaactcgcagttgcac

SEQ ID NO: 121100 - DNA, 1024 bp, Zea Mays
atatatatgtgctcaactgttcatcgatataatcgtcggcgagatgattgccatgtcgtcgacgccgattctgctcaccatactcttggcatacctcgcgttctctgcaaactgtaatggcgaacgtggtaatgacgaggacacaccagctgcaggtggtcaccggcggtggcagccaaacggcgacaagacgatttccggaggcagcagcgacgacgaggcggcgacgtgcgtgagcagtgaatgcgagggcagcacctgttactgctgcccaacgatgcccactagcccttgcttcttggatctggatgcttgcttgagagtctgccatggtcgtcgtcgtcgtcgtcggccagccgcaccgctgccggaggtaacgtcgtcgtctgggcgcgggtccggaccaagcagattcccctgatcgagagtagctagctagctggggcggcctcgccgtcgacgacccctagctagctccatcggcgatcgatgtcctagcttgtgacaattgacaagacgagagaacatggatgttttcgccaccaccacggctcttcctcgaacaaattgcaaggctttttgcaagacctcttaccaagattcagatggaggagatcatggagctggccaatcatggaaaaggaaagaaaatcaacaacaagaaagggcgcaaggtggctcccttcttagcaccggtcgcccctttggccttggaaggctgagtgcggtagtcttgtctgtaatggtggagatggttttgctgatgttacagcagatggttcttttggtggtccttttggcggtgttgtcggcagtagagttgggtttagagtctggctgctggctcttgcttctagggcatccagggctgttatgtcttcctttgtactgcgtcttacttcaagtgcactcccttatgttgtcgtggttgagggctgtgccgttgcaccctgtgtatggcctcttggctgttatgatttcctcaagtagaggtggccggttgtattaatgtgttccatttgca

SEQ ID NO: 121101 - DNA, 1018 bp, Zea Mays
atatatatgtgctcaactgttcatcgatataatcgtcggcgagatgattgccatgtcgtcgacgccgattctgctcaccatactcttggcatacctcgcgttctctgcaaactgcgaacgtggtaatgacgaggacacaccagctgcaggtggtcaccggcggtggcagccaaacggcgacaagacgatttccggaggcagcagcgacgacgaggcggcgacgtgcgtgagcagtgaatgcgagggcagcacctgttactgctgcccaacgatgcccactagcccttgcttcttggatctggatgcttgcttgagagtctgccatggtcgtcgtcgtcgtcgtcggccagccgcaccgctgccggaggtaacgtcgtcgtctgggcgcgggtccggaccaagcagattcccctgatcgagagtagctagctagctggggcggcctcgccgtcgacgacccctagctagctccatcggcgatcgatgtcctagcttgtgacaattgacaagacgagagaacatggatgttttcgccaccaccacggctcttcctcgaacaaattgcaaggctttttgcaagacctcttaccaagattcagatggaggagatcatggagctggccaatcatggaaaaggaaagaaaatcaacaacaagaaagggcgcaaggtggctcccttcttagcaccggtcgcccctttggccttggaaggctgagtgcggtagtcttgtctgtaatggtggagatggttttgctgatgttacagcagatggttcttttggtggtccttttggcggtgttgtcggcagtagagttgggtttagagtctggctgctggctcttgcttctagggcatccagggctgttatgtcttcctttgtactgcgtcttacttcaagtgcactcccttatgttgtcgtggttgagggctgtgccgttgcaccctgtgtatggcctcttggctgttatgatttcctcaagtagaggtggccggttgtattaatgtgttccatttgca

SEQ ID NO: 121102 - DNA, 825 bp, Zea Mays
atatatatgtgctcaactgttcatcgatataatcgtcggcgagatgattgccatgtcgtcgacgccgattctgctcaccatactcttggcatacctcgcgttctctgcaaactgcgaacgtggtaatgacgaggacacaccagctgcaggtggtcaccggcggtggcagccaaacggcgacaagacgatttccggaggcagcagcgacgacgaggcggcgacgtgcgtgagcagtgaatgcgagggcagcacctgttactgctgcccaacgatgcccactagcccttgcttcttggatctggatgcttgcttgagagtctgccatggtcgtcgtcgtcgtcgtcggccagccgcaccgctgccggagattgcaaggctttttgcaagacctcttaccaagattcagatggaggagatcatggagctggccaatcatggaaaaggaaagaaaatcaacaacaagaaagggcgcaaggtggctcccttcttagcaccggtcgcccctttggccttggaaggctgagtgcggtagtcttgtctgtaatggtggagatggttttgctgatgttacagcagatggttcttttggtggtccttttggcggtgttgtcggcagtagagttgggtttagagtctggctgctggctcttgcttctagggcatccagggctgttatgtcttcctttgtactgcgtcttacttcaagtgcactcccttatgttgtcgtggttgagggctgtgccgttgcaccctgtgtatggcctcttggctgttatgatttcctcaagtagaggtggccggttgtattaatgtgttccatttgca

SEQ ID NO: 121103 - DNA, 875 bp, Zea Mays
atatatatgtgctcaactgttcatcgatataatcgtcggcgagatgattgccatgtcgtcgacgccgattctgctcaccatactcttggcatacctcgcgttctctgcaaactgtaatggcgaacgtggtaatgacgaggacacaccagctgcaggtggtcaccggcggtggcagccaaacggcgacaagacgatttccggaggcagcagcgacgacgaggcggcgacgtgcgtgagcagtgaatgcgagggcagcacctgttactgctgcccaacgatgcccactagcccttgcttcttggatctggatgcttgcttgagagtctgccatggtcgtcgtcgtcgtcgtcggccagccgcaccgctgccggagattgcaaggctttttgcaagacctcttaccaagattcagatggaggagatcatggagctggccaatcatggaaaaggaaagaaaatcaacaacaagaaagggcgcaaggtggctcccttcttagcaccggtcgcccctttggccttggaaggctgagtgcggtagtcttgtctgtaatggtggagatggttttgctgatgttacagcagatggttcttttggtggtccttttggcggtgttgtcggcagtagagttgggtttagagtctggctgctggctcttgcttctagggcatccagggctgttatgtcttcctttgtactgcgtcttacttcaagtgcactcccttatgttgtcgtggttgagggctgtgccgttgcaccctgtgtatggcctcttggctgttatgatttcctcaagtagaggtggccggttgtattaatgtgttccatttgcactgttttctcctggaatgttaggggcttaaataatcctgctaaa

SEQ ID NO: 121104 - DNA, 482 bp, Zea Mays
gttcacaactcttccgagcacgcggccgtctcctttgtcatcatcatcagctcagatctagcagcttcgccttctcagatctcgctcaccttgtagatctcgctcagattcgtttgttctcgccagacgcgcccacttcgcaaccgccgctgtgcctatgctaccgcatgggcctctgcgcctgggaggcttgcggctgccaggcttaagtcacggggcagcaggagttcagattttttttaggcctctgaaacaaggctagcgcatattagcatcgagagtcaggagagtacgaatgggaagtaccgtcataaaattatctttgctactagcaataggaagcaccgtcataaaattaactctggtaataaaatcgattggatatatattgtttctaggaaactaggaaggatcccgtgtagaaagtgtggatagctagcctttttcatcggatcatttggttttttcttgaaatatttctt

SEQ ID NO: 121105 - DNA, 261 bp, Zea Mays
gttcacaactcttccgagcacgcggccgtctcctttgtcatcatcatcagctcagatctagcagcttcgccttctcaggtataattggagtgctgtcataagtggagtgttgttagttacatgtgtgctgatcattctaatcacattgttcgtcgttaatcatgtgaagaaaatattcaaagttataacttgaatttttgttgaatctggcaattgtatggcctagaatttattgttcattagtcagaaagactacgttca

SEQ ID NO: 121106 - DNA, 1202 bp, Zea Mays
tacagctgatatccggaacgagcccgctcggccaaatcgaccggacctgagcgctctcgttctctctactcctccgttctctctcacgcgagcagtgcatccttgagccaccgccgccgtgaggagctccgcccgtccgccgtcatccgtcaaatcagggagcttcacagtgatggatctgaagagaagtgggaaatggcagaaaagacccggcagctaggtattgtgcacgtctctgtgtccgtccgtcgccggatctggtcgtagtggagacgtagtgtctgatcaggcagcaacagcagcgacgcgtcgatagatactagttgacgatagggttgctgtggcaggggcagctgcgtgttggacgacgacgcggtgcccatgccgttggcaagcgtcgcggccgtggcggcaccgcccaaggcgttggcggccaccacagacacggttggccttgtaggaaaacactaataattcttgtttattagtgttgtcttgtctcttggtttaataccatccaaagaagtactgtcctgtcaggaaaacactaataattcttgtttggacgaatcttcactccacttggatggtcaccatgctcagttgtgataacaagacaaatccaagctggttaccaacgcccgattgcacaaaagccattttattcgaatatatccaaatgcaatctgtaaaaagattactgcgaatcagtttaatcccagcaagaatctgggaattttctgttgttgctttgtgctcgcacgagcagcagagctagcactggcattcatggcactgttgtgaatgtgaattctacgcacgagcaacaagaatcatgttttgtttcttaaacttttaattcttcaattgttgtctcatgttactctctgcttggcggaattctatgcaacaagaaaccggtaactgtgctactatactctttccataacaatggcagtgagcatccttcttccgattttgtaaactattttattgatgaattgaacttggtatgtcatggtgatatgaactcatgtatcgtagttgtttgatgaactatggttatgtgttgtgattttgcttgtgtacttgaacatcgctggtgatgaactatggttatgagttatggttgggtgaactatggatatgaactcatgttttggtattattaaaatgtttcagagcatataactcatgttttc

SEQ ID NO: 121107 - DNA, 1617 bp, Zea Mays
tacagctgatatccggaacgagcccgctcggccaaatcgaccggacctgagcgctctcgttctctctactcctccgttctctctcacgcgagcagtgcatccttgagccaccgccgccgtgaggagctccgcccgtccgccgtcatccgtcaaatcaggtggccatttggtacaggcgtcggactcccaggaggatgaccggtggcaagaggttcggcggcgggcgggtgccgacggggaccccgtccctcgcgtggtcgtccgtcgtcatcgtcgcctccctcctcgttggcgcctccatcgtccacaacatctacaagcctgacatgaccattccacctgtggagggtgccgccggcggcggcggccaagaaagctgagctacgaatggctggacactgcatgcaagagaggaggctgggcatgggagtagtgagggaccggccatcagcacctttttttttttgttctagaacaaaaacgatattatgttgttcttttctgttttgctaccaaaagatgtgaggctgcatagtatttgcttcgttaggcgctactggtcacgcgtaaccatggtatatgtacgttgattttgttttttctaatgcctaataatcactacactcaaaatgtacgggcttgtggtggcactgcggcgggaggtggttggttggttccacttccatccaggctgctccgtggatgcgacggtgattcacgagcggatacgcaagtgtagctgtggcctgcacttggggccggattgtgacccattatcaggcttaggcctgcgtgcggggtcgtttgccgttgtgtacacatggaagaacggggcaccaagtcttgcttccattgccgccgccccttccgtgcacgcgcgcacggcgcacctatacatatgcaccgccccatgccccgcacgccctccctctcccagcgacaccagagagccgaatttacttcgttctcagcctccgttgcccctcgcgcgcgttacgctgtaccaccaggctcgatcggtcgatcctttgctgggcgtcagagaagcatggcagcagctggcaagtcgtcggccatggaggaggtggtggcggcggcggattgactggcaggccgttgacaggggcatcgcctacctgctcatggtggccacgtacgcgcttcactagagccgtcttggcttcggtctgctccggccggcggcagagatcacgggaaggaaggctttgtgagctctgcttcccggcctcagcgtgagagttcccccgcgccaaacttcattcgtttctcttccactcttcctcttgtatggagatggagatggagatatgcctgtgtctttaccactagaaaaaaatgttgttttttctattgtctttctgtgattattctgtgcaaaatggtcaattgttgccaaaacgatcaatgttaccatggtttcggcttgcgtctatcttctgttgtgattgggttcgacattcagagtttgcacaaggccatacatagcatacatatatggcagagtttgcagcgtgaggaaaactgtcatcgccgtgtattttagcattatacataacataccccatccgttcattccaataggcatataagctacca

SEQ ID NO: 121108 - DNA, 2655 bp, Zea Mays
gctcctcacactaccacccgccccctctacgcaaggcctagaagcgccgcctccacggctgcacctccgccagttgcgctcctcgcctcgccgctgcctccgtagccgtcgcgggcgccaccatgccgctccggttggatatcaagaggaagctcgcgcagaggtcggagagggtgaagtccgtggatctgcatccgacagagccatggattttgtcgagtctttactcaggaagcgtttgtgtatggaactaccagactcagacaatggtgaaatcatttgaagtcacggatttaccagttcgttcggctaaatttattgcacgtaagcaatgggttgttgctggtgccgacgatatgttcatccgtgtgtacaactataacacaatggacaaggtcaaggtttttgaagctcacactgattacattagatgtgtggctgttcatccaacccagccctttgtgatatcatcatccgatgacatgctgattaagctgtgggattgggataaaggctgggtgtgtactcaaatattcgaagggcattctcactatgtgatgcaagttacatttaacccaaaagataccaacacctttgctagtgcttccctggatcgcacaataaagatatggagtcttggttcccctgatccaaatttcacactagatggccattcgaaaggtgtgaactgtgttgattacttcactggtggtgaccgaccatacttaattactggctctgatgatcagactgcaaaggtttgggactaccaaacaaagagctgcgttcaaacacttgaaggacatgcacataatgtttctgctgtatgtttccacccagagctacctataataattactggttcagaggatgggacagttcgaatgtggcattctactacctacaggctcgagaacactcttaactatggccttgagcgagtttgggctttagggtatatgaaagggtcaagaagggttgtgattggatacgatgaagggacaataatgataaaaattggtcgtgaagttcctgttgctagcatggatagcagtggaaaaattatatgggcaaagcataatgaaatccaaactgttaatatcaagagtgttggtgcagacaatgagatcgcagatggtgatcggttaccgttggccgtgaaggagttgggaagctgtgacctttatccacaaagtttaaggcacaatccgaatgggagatttgtagttgtatgtggagatggagaatacataatatacacagccttagcatggagaaacagatcatttgggtctgcacttgaatttgtttggtcaactgatggagaatatgccatcagagaaagcacctcgaggataaagatatacagtaaaaatttccaggagaagaaaagtataaggccatccttttccgctgaacggatatttggtggagtgttacttgctatgtgtacaaatgacttcatttgcttctatgattgggcagaatgcagattgatacgtcgaatcgatgtcaatgtgaagaatctttactgggctgacagtggtgatttagtaacaattgcaagtgatacgtcattctacattttgaaatataatagggatgtagtttcatctcatttggatagagggggttcagctggtgaggaaggtgtggaagatgcctttgaactgcttcatgagatcaacgaacgtgtccggactgggctatgggttggcgattgtttcatctacaataattcttcatggcgtcttaattactgtgtaggaggacaggtcacaactttgtttcacttggatcggccaatgtatttattaggatatcttgcaaaccaaagccgtgtctatcttattgataagcaatttaatgttgtggggtatactttactccttagtttgatcgaatataaaacacttgtaatgcgtggggatttcgatcgcgcgaatgatgttttatcatctataccaaaggaacaatatgacagtgtggcgcgtttcttggaatcacggggaatgttggaggaagccctcgagatagcaactgacactaattacagatttgacctggctgtgcaacttggtcgacttgaaattgcgaaggcgattgctaccgaggtgcaaagtgagtccaagtggaagatattaggggagttagctatgtcaagtggaaagcttgagatggcagaggagtgtcttctacatgctatggacctcagtggtttgttgcttttgtattcttcccttggggatgctgaaggcattaacaaattggcatctgtagccaaagaacaaggaaagaacaatgttgctttcctttgtttcttcatgctaggaaagctggaagagtgtcttcaattgctaatagaaagcaatcgtattccggaagcagcattgatggcaagatcttatcttcccagcaaagtccctgagattgtagcattgtggaaaaaggatctccagaaggtaaactcaaaagcagcagagtcgctggctgatcctaatgagtacccaaacttatttgaagactggcagattgctctcaacgtagaagctgctgttgcctctaaaaggtttttttgttctttttgtcttcatctataactgtatccttttgtattgtctctgattacctcttgcatcagatgatggcgcttta

SEQ ID NO: 121109 - DNA, 3253 bp, Zea Mays
gctcctcacactaccacccgccccctctacgcaaggcctagaagcgccgcctccacggctgcacctccgccagttgcgctcctcgcctcgccgctgcctccgtagccgtcgcgggcgccaccatgccgctccggttggatatcaagaggaagctcgcgcagaggtcggagagggtgaagtccgtggatctgcatccgacagagccatggattttgtcgagtctttactcaggaagcgtttgtgtatggaactaccagactcagacaatggtgaaatcatttgaagtcacggatttaccagttcgttcggctaaatttattgcacgtaagcaatgggttgttgctggtgccgacgatatgttcatccgtgtgtacaactataacacaatggacaaggtcaaggtttttgaagctcacactgattacattagatgtgtggctgttcatccaacccagccctttgtgatatcatcatccgatgacatgctgattaagctgtgggattgggataaaggctgggtgtgtactcaaatattcgaagggcattctcactatgtgatgcaagttacatttaacccaaaagataccaacacctttgctagtgcttccctggatcgcacaataaagatatggagtcttggttcccctgatccaaatttcacactagatggccattcgaaaggtgtgaactgtgttgattacttcactggtggtgaccgaccatacttaattactggctctgatgatcagactgcaaaggtttgggactaccaaacaaagagctgcgttcaaacacttgaaggacatgcacataatgtttctgctgtatgtttccacccagagctacctataataattactggttcagaggatgggacagttcgaatgtggcattctactacctacaggctcgagaacactcttaactatggccttgagcgagtttgggctttagggtatatgaaagggtcaagaagggttgtgattggatacgatgaagggacaataatgataaaaattggtcgtgaagttcctgttgctagcatggatagcagtggaaaaattatatgggcaaagcataatgaaatccaaactgttaatatcaagagtgttggtgcagacaatgagatcgcagatggtgatcggttaccgttggccgtgaaggagttgggaagctgtgacctttatccacaaagtttaaggcacaatccgaatgggagatttgtagttgtatgtggagatggagaatacataatatacacagccttagcatggagaaacagatcatttgggtctgcacttgaatttgtttggtcaactgatggagaatatgccatcagagaaagcacctcgaggataaagatatacagtaaaaatttccaggagaagaaaagtataaggccatccttttccgctgaacggatatttggtggagtgttacttgctatgtgtacaaatgacttcatttgcttctatgattgggcagaatgcagattgatacgtcgaatcgatgtcaatgtgaagaatctttactgggctgacagtggtgatttagtaacaattgcaagtgatacgtcattctacattttgaaatataatagggatgtagtttcatctcatttggatagagggggttcagctggtgaggaaggtgtggaagatgcctttgaactgcttcatgagatcaacgaacgtgtccggactgggctatgggttggcgattgtttcatctacaataattcttcatggcgtcttaattactgtgtaggaggagaggtcacaactttgtttcacttggatcggccaatgtatttattaggatatcttgcaaaccaaagccgtgtctatcttattgataagcaatttaatgttgtggggtatactttactccttagtttgatcgaatataaaacacttgtaatgcgtggggatttcgatcgcgcgaatgatgttttatcatctataccaaaggaacaatatgacagtgtggcgcgtttcttggaatcacggggaatgttggaggaagccctcgagatagcaactgacactaattacagatttgacctggctgtgcaacttggtcgacttgaaattgcgaaggcgattgctaccgaggtgcaaagtgagtccaagtggaagatattaggggagttagctatgtcaagtggaaagcttgagatggcagaggagtgtcttctacatgctatggacctcagtggtttgttgcttttgtattcttcccttggggatgctgaaggcattaacaaattggcatctgtagccaaagaacaaggaaagaacaatgttgctttcctttgtttcttcatgctaggaaagctggaagagtgtcttcaattgctaatagaaagcaatcgtattccggaagcagcattgatggcaagatcttatcttcccagcaaagtccctgagattgtagcattgtggaaaaaggatctccagaaggtaaactcaaaagcagcagagtcgctggctgatcctaatgagtacccaaacttatttgaagactggcagattgctctcaacgtagaagctgctgttgcctctaaaaggagtatctatccatcggccgaggagtacatgattcatgctgaaaggtcaaatgagagtttagtggaagcttttaaaaatatgcatgtacatgaagagatggtaccagatgataatgaagatactgttcacgaggttattgaggatggtggagtagagagtcaagaagatgctgttgaggtcgatgcagaggatgacggagtagaagaaagtcaagatgaagctgttgaggttgaggctgagggttcaagtgatggtgctgtccttgtgaatggaaacagtagcgaggaacagtggggtacgaaaaatgaagaaccatcagcataaaagctgtagttgagcaagttgctgactgagcaatagtggattaacggatcagcaacttcgcttcagcggtgtagtttgtaaaggtgaaatgctattccaagtgaacaatgactcatacaccacctttgcagtcgtattaaagctataacacaagtaaccaaccctattgcaggttgctgactgctatagagtacatgatatccattttttccccaacggtattaatcaacacttccatctttgtgcccgataggaaattttgtgcttccctttctacatgtagatcaggccttaggcgtcgaagacattttatagcctaccatgaggtactcgtttcacggagatggtatatgatatag

SEQ ID NO: 121110 - DNA, 3141 bp, Zea Mays
gctcctcacactaccacccgccccctctacgcaaggcctagaagcgccgcctccacggctgcacctccgccagttgcgctcctcgcctcgccgctgcctccgtagccgtcgcgggcgccaccatgccgctccggttggatatcaagaggaagctcgcgcagaggtcggagagggtgaagtccgtggatctgcatccgacagagccatggattttgtcgagtctttactcaggaagcgtttgtgtatggaactaccagactcagacaatggtgaaatcatttgaagtcacggatttaccagttcgttcggctaaatttattgcacgtaagcaatgggttgttgctggtgccgacgatatgttcatccgtgtgtacaactataacacaatggacaaggtcaaggtttttgaagctcacactgattacattagatgtgtggctgttcatccaacccagccctttgtgatatcatcatccgatgacatgctgattaagctgtgggattgggataaaggctgggtgtgtactcaaatattcgaagggcattctcactatgtgatgcaagttacatttaacccaaaagataccaacacctttgctagtgcttccctggatcgcacaataaagatatggagtcttggttcccctgatccaaatttcacactagatggccattcgaaaggtgtgaactgtgttgattacttcactggtggtgaccgaccatacttaattactggctctgatgatcagactgcaaaggtttgggactaccaaacaaagagctgcgttcaaacacttgaaggacatgcacataatgtttctgctgtatgtttccacccagagctacctataataattactggttcagaggatgggacagttcgaatgtggcattctactacctacaggctcgagaacactcttaactatggccttgagcgagtttgggctttagggtatatgaaagggtcaagaagggttgtgattggatacgatgaagggacaataatgataaaaattggtcgtgaagttcctgttgctagcatggatagcagtggaaaaattatatgggcaaagcataatgaaatccaaactgttaatatcaagagtgttggtgcagacaatgagatcgcagatggtgatcggttaccgttggccgtgaaggagttgggaagctgtgacctttatccacaaagtttaaggcacaatccgaatgggagatttgtagttgtatgtggagatggagaatacataatatacacagccttagcatggagaaacagatcatttgggtctgcacttgaatttgtttggtcaactgatggagaatatgccatcagagaaagcacctcgaggataaagatatacagtaaaaatttccaggagaagaaaagtataaggccatccttttccgctgaacggatatttggtggagtgttacttgctatgtgtacaaatgacttcatttgcttctatgattgggcagaatgcagattgatacgtcgaatcgatgtcaatgtgaagaatctttactgggctgacagtggtgatttagtaacaattgcaagtgatacgtcattctacattttgaaatataatagggatgtagtttcatctcatttggatagagggggttcagctggtgaggaaggtgtggaagatgcctttgaactgcttcatgagatcaacgaacgtgtccggactgggctatgggttggcgattgtttcatctacaataattcttcatggcgtcttaattactgtgtaggaggagaggtcacaactttgtttcacttggatcggccaatgtatttattaggatatcttgcaaaccaaagccgtgtctatcttattgataagcaatttaatgttgtggggtatactttactccttagtttgatcgaatataaaacacttgtaatgcgtggggatttcgatcgcgcgaatgatgttttatcatctataccaaaggaacaatatgacagtgtggcgcgtttcttggaatcacggggaatgttggaggaagccctcgagatagcaactgacactaattacagatttgacctggctgtgcaacttggtcgacttgaaattgcgaaggcgattgctaccgaggtgcaaagtgagtccaagtggaagatattaggggagttagctatgtcaagtggaaagcttgagatggcagaggagtgtcttctacatgctatggacctcagtggtttgttgcttttgtattcttcccttggggatgctgaaggcattaacaaattggcatctgtagccaaagaacaaggaaagaacaatgttgctttcctttgtttcttcatgctaggaaagctggaagagtgtcttcaattgctaatagaaagcaatcgtattccggaagcagcattgatggcaagatcttatcttcccagcaaagtccctgagattgtagcattgtggaaaaaggatctccagaaggtaaactcaaaagcagcagagtcgctggctgatcctaatgagtacccaaacttatttgaagactggcagattgctctcaacgtagaagctgctgttgcctctaaaaggagtatctatccatcggccgaggagtacatgattcatgctgaaaggtcaaatgagagtttagtggaagcttttaaaaatatgcatgtacatgaagagatggtaccagatgataatgaagatactgttcacgaggttattgaggatggtggagtagagagtcaagaagatgctgttgaggtcgatgcagaggatgacggagtagaagaaagtcaagatgaagctgttgaggttgaggctgagggttcaagtgatggtgctgtccttgtgaatggaaacagtagcgaggaacagtggggtacgaaaaatgaagaaccatcagcataaaagctgtagttgagcaagttgctgactgagcaatagtggattaacggatcagcaacttcgcttcagcggtgtagtttgtaaaggaaattttgtgcttccctttctacatgtagatcaggccttaggcgtcgaagacattttatagcctaccatgaggtactcgtttcacggagatggtatatgatataggtgatcggagtgatattttacatggtgcatatagtagcttgtcgaactgagaatgttt

SEQ ID NO: 121111 - DNA, 3353 bp, Zea Mays
gctcctcacactaccacccgccccctctacgcaaggcctagaagcgccgcctccacggctgcacctccgccagttgcgctcctcgcctcgccgctgcctccgtagccgtcgcgggcgccaccatgccgctccggttggatatcaagaggaagctcgcgcagaggtcggagagggtgaagtccgtggatctgcatccgacagagccatggattttgtcgagtctttactcaggaagcgtttgtgtatggaactaccagactcagacaatggtgaaatcatttgaagtcacggatttaccagttcgttcggctaaatttattgcacgtaagcaatgggttgttgctggtgccgacgatatgttcatccgtgtgtacaactataacacaatggacaaggtcaaggtttttgaagctcacactgattacattagatgtgtggctgttcatccaacccagccctttgtgatatcatcatccgatgacatgctgattaagctgtgggattgggataaaggctgggtgtgtactcaaatattcgaagggcattctcactatgtgatgcaagttacatttaacccaaaagataccaacacctttgctagtgcttccctggatcgcacaataaagatatggagtcttggttcccctgatccaaatttcacactagatggccattcgaaaggtgtgaactgtgttgattacttcactggtggtgaccgaccatacttaattactggctctgatgatcagactgcaaaggtttgggactaccaaacaaagagctgcgttcaaacacttgaaggacatgcacataatgtttctgctgtatgtttccacccagagctacctataataattactggttcagaggatgggacagttcgaatgtggcattctactacctacaggctcgagaacactcttaactatggccttgagcgagtttgggctttagggtatatgaaagggtcaagaagggttgtgattggatacgatgaagggacaataatgataaaaattggtcgtgaagttcctgttgctagcatggatagcagtggaaaaattatatgggcaaagcataatgaaatccaaactgttaatatcaagagtgttggtgcagacaatgagatcgcagatggtgatcggttaccgttggccgtgaaggagttgggaagctgtgacctttatccacaaagtttaaggcacaatccgaatgggagatttgtagttgtatgtggagatggagaatacataatatacacagccttagcatggagaaacagatcatttgggtctgcacttgaatttgtttggtcaactgatggagaatatgccatcagagaaagcacctcgaggataaagatatacagtaaaaatttccaggagaagaaaagtataaggccatccttttccgctgaacggatatttggtggagtgttacttgctatgtgtacaaatgacttcatttgcttctatgattgggcagaatgcagattgatacgtcgaatcgatgtcaatgtgaagaatctttactgggctgacagtggtgatttagtaacaattgcaagtgatacgtcattctacattttgaaatataatagggatgtagtttcatctcatttggatagagggggttcagctggtgaggaaggtgtggaagatgcctttgaactgcttcatgagatcaacgaacgtgtccggactgggctatgggttggcgattgtttcatctacaataattcttcatggcgtcttaattactgtgtaggaggagaggtcacaactttgtttcacttggatcggccaatgtatttattaggatatcttgcaaaccaaagccgtgtctatcttattgataagcaatttaatgttgtggggtatactttactccttagtttgatcgaatataaaacacttgtaatgcgtggggatttcgatcgcgcgaatgatgttttatcatctataccaaaggaacaatatgacagtgtggcgcgtttcttggaatcacggggaatgttggaggaagccctcgagatagcaactgacactaattacagatttgacctggctgtgcaacttggtcgacttgaaattgcgaaggcgattgctaccgaggtgcaaagtgagtccaagtggaagatattaggggagttagctatgtcaagtggaaagcttgagatggcagaggagtgtcttctacatgctatggacctcagtggtttgttgcttttgtattcttcccttggggatgctgaaggcattaacaaattggcatctgtagccaaagaacaaggaaagaacaatgttgctttcctttgtttcttcatgctaggaaagctggaagagtgtcttcaattgctaatagaaagcaatcgtattccggaagcagcattgatggcaagatcttatcttcccagcaaagtccctgagattgtagcattgtggaaaaaggatctccagaaggtaaactcaaaagcagcagagtcgctggctgatcctaatgagtacccaaacttatttgaagactggcagattgctctcaacgtagaagctgctgttgcctctaaaaggagtatctatccatcggccgaggagtacatgattcatgctgaaaggtcaaatgagagtttagtggaagcttttaaaaatatgcatgtacatgaagagatggtaccagatgataatgaagatactgttcacgaggttattgaggatggtggagtagagagtcaagaagatgctgttgaggtcgatgcagaggatgacggagtagaagaaagtcaagatgaagctgttgaggttgaggctgagggttcaagtgatggtgctgtccttgtgaatggaaacagtagcgaggaacagtggggtacgaaaaatgaagaaccatcagcataaaagctgtagttgagcaagttgctgactgagcaatagtggattaacggatcagcaacttcgcttcagcggtgtagtttgtaaaggttgctgactgctatagagtacatgatatccattttttccccaacggtattaatcaacacttccatctttgtgcccgataggaaattttgtgcttccctttctacatgtagatcaggccttaggcgtcgaagacattttatagcctaccatgaggtactcgtttcacggagatggtatatgatataggtgatcggagtgatattttacatggtgcatatagtagcttgtcgaactgagaatgttttacctgtgatgtacatcggacttgggagctttgtatcattgtgttacaccttttcaatggtggcgaataaatttacagcagatgttttcaatagccttttagtaaatgtgtgaacgatttgcgttgtgcta

SEQ ID NO: 121112 - DNA, 3305 bp, Zea Mays
gctcctcacactaccacccgccccctctacgcaaggcctagaagcgccgcctccacggctgcacctccgccagttgcgctcctcgcctcgccgctgcctccgtagccgtcgcgggcgccaccatgccgctccggttggatatcaagaggaagctcgcgcagaggtcggagagggtgaagtccgtggatctgcatccgacagagccatggattttgtcgagtctttactcaggaagcgtttgtgtatggaactaccagactcagacaatggtgaaatcatttgaagtcacggatttaccagttcgttcggctaaatttattgcacgtaagcaatgggttgttgctggtgccgacgatatgttcatccgtgtgtacaactataacacaatggacaaggtcaaggtttttgaagctcacactgattacattagatgtgtggctgttcatccaacccagccctttgtgatatcatcatccgatgacatgctgattaagctgtgggattgggataaaggctgggtgtgtactcaaatattcgaagggcattctcactatgtgatgcaagttacatttaacccaaaagataccaacacctttgctagtgcttccctggatcgcacaataaagatatggagtcttggttcccctgatccaaatttcacactagatggccattcgaaaggtgtgaactgtgttgattacttcactggtggtgaccgaccatacttaattactggctctgatgatcagactgcaaaggtttgggactaccaaacaaagagctgcgttcaaacacttgaaggacatgcacataatgtttctgctgtatgtttccacccagagctacctataataattactggttcagaggatgggacagttcgaatgtggcattctactacctacaggctcgagaacactcttaactatggccttgagcgagtttgggctttagggtatatgaaagggtcaagaagggttgtgattggatacgatgaagggacaataatgataaaaattggtcgtgaagttcctgttgctagcatggatagcagtggaaaaattatatgggcaaagcataatgaaatccaaactgttaatatcaagagtgttggtgcagacaatgagatcgcagatggtgatcggttaccgttggccgtgaaggagttgggaagctgtgacctttatccacaaagtttaaggcacaatccgaatgggagatttgtagttgtatgtggagatggagaatacataatatacacagccttagcatggagaaacagatcatttgggtctgcacttgaatttgtttggtcaactgatggagaatatgccatcagagaaagcacctcgaggataaagatatacagtaaaaatttccaggagaagaaaagtataaggccatccttttccgctgaacggatatttggtggagtgttacttgctatgtgtacaaatgacttcatttgcttctatgattgggcagaatgcagattgatacgtcgaatcgatgtcaatgtgaagaatctttactgggctgacagtggtgatttagtaacaattgcaagtgatacgtcattctacattttgaaatataatagggatgtagtttcatctcatttggatagagggggttcagctggtgaggaaggtgtggaagatgcctttgaactgcttcatgagatcaacgaacgtgtccggactgggctatgggttggcgattgtttcatctacaataattcttcatggcgtcttaattactgtgtaggaggagaggtcacaactttgtttcacttggatcggccaatgtatttattaggatatcttgcaaaccaaagccgtgtctatcttattgataagcaatttaatgttgtggggtatactttactccttagtttgatcgaatataaaacacttgtaatgcgtggggatttcgatcgcgcgaatgatgttttatcatctataccaaaggaacaatatgacagtgtggcgcgtttcttggaatcacggggaatgttggaggaagccctcgagatagcaactgacactaattacagatttgacctggctgtgcaacttggtcgacttgaaattgcgaaggcgattgctaccgaggtgcaaagtgagtccaagtggaagatattaggggagttagctatgtcaagtggaaagcttgagatggcagaggagtgtcttctacatgctatggacctcagtggtttgttgcttttgtattcttcccttggggatgctgaaggcattaacaaattggcatctgtagccaaagaacaaggaaagaacaatgttgctttcctttgtttcttcatgctaggaaagctggaagagtgtcttcaattgctaatagaaagcaatcgtattccggaagcagcattgatggcaagatcttatcttcccagcaaagtccctgagattgtagcattgtggaaaaaggatctccagaaggtaaactcaaaagcagcagagtcgctggctgatcctaatgagtacccaaacttatttgaagactggcagattgctctcaacgtagaagctgctgttgcctctaaaaggagtatctatccatcggccgaggagtacatgattcatgctgaaaggtcaaatgagagtttagtggaagcttttaaaaatatgcatgtacatgaagagatggtaccagatgataatgaagatactgttcacgaggttattgaggatggtggagtagagagtcaagaagatgctgttgaggtcgatgcagaggatgacggagtagaagaaagtcaagatgaagctgttgaggttgaggctgagggttcaagtgatggtgctgtccttgtgaatggaaacagtagcgaggaacagtgggtgctgactgagcaatagtggattaacggatcagcaacttcgcttcagcggtgtagtttgtaaaggttgctgactgctatagagtacatgatatccattttttccccaacggtattaatcaacacttccatctttgtgcccgataggaaattttgtgcttccctttctacatgtagatcaggccttaggcgtcgaagacattttatagcctaccatgaggtactcgtttcacggagatggtatatgatataggtgatcggagtgatattttacatggtgcatatagtagcttgtcgaactgagaatgttttacctgtgatgtacatcggacttgggagctttgtatcattgtgttacaccttttcaatggtggcgaataaatttacagcagatgttttcaatagccttttagtaaatgtgtgaacgatttgcgttgtgcta

SEQ ID NO: 121113 - DNA, 183 bp, Zea Mays
atgtctaacaccgaaacatgtggagatgttgtcactggccaagattgggagcaagctactgattggcacactgtggagaacaaagatcttgaagagctaatggcaaacatatatcttgatgcacaagaggacgattatgtttgtggtagtggtggggatggacaagaagtaatgcaccattag

SEQ ID NO: 121114 - DNA, 4853 bp, Zea Mays
aaaggtataaatttaatggaaaaatcttacattgaagtattgaacccagctgtgcacagtctactacatacaatttacacagaagcccttttctgttcagtacaggccaaactggccggaatacaaaaaatgaagtcaaacttcctagaaataaacaaaggctaagtatacactctttctcgtcactttacattgctgcaggacctatatactgaagtgagctggaataacaccaaatcctttttggatgacgccctcccttatcttctctggaagttgaagactttgatggagaaggcaaagacgaaagcaaagagaacagtgaatccaacaacagcggtagctacataacccaagttgtcatgctcgaatccaaagaatctgttgacgaaatctttcactagttccccgtcatcttccagcctgatgtctgcgatgtctccaaattgtgaggcaacaagtccatatagtgtccaagccactgggcaagcccacgagtaccatctccaccatattggtatcctctgcaagccagtcacatgtatgattcagcatcaacagtacaacgaaaagtgaggtttagcatagtacaagagtttctcttgggcacttaccgggcgggggataaggaagccggcaaagatgttccatattgcgtagaatgcagttgagactatagccgcaatgtcgctgtttggtgtcatggcgactgccatcattccataaaatgtgaagtacatgaaggtgaagaacatgaagaacatataccagaagaactttgcaactgtccaatcaaagccaatcaggctgtagacaatgagaccatacacaactgtctgaaggaagatgtgtgggatctcaataagaacctgttcgaatgtaaaattgttagaattcaactctaggttgaaggaataaaagagcaattatttcctattatccagattttcagttacaaccaattacctgtgcaaaagcatagggtagagcagagtacatcccagctgccttttctcggtagaaaactgttcgctcgacatccacaattggctgcacagtttgaccattctgaattccaatgaaaagaactgctgcatacatggaccccaaagaattgaaaaggtcctgcctagtgccactgtacgaggaaagacagtacaagtaagtttctttgtcacaatatgccaacatatataccaggtctcaataagtgttgtaagcaatggtccttacattttctttcccaagtttaagaagatagttccgaagatgagagcaataactgttgtgaagaagatcctagttgcggtatatgatggatttctccagtaagacttgtgctgcttccacaggcaagccatgcattgtgtgaggaaggactgtgagtactgggttgggaagtacaagtccttggaccctggtggtggtgtgcttagttcactaatcaaatctttattcctcctgcaatgatgcaccccgattagtgacatgaacagaaagcagaaacacaattctgaggttgatccgatggaacataccggtataggtcagagtttctgtatacttcagcaaagttgatcccaaggatatcttcttgagctaaggtggtcacttccaacatccatgttgcagggttgtaaccatccttgattttctttactccttctattccctgcatttgaagcatgaagcaaagttaccaaggatgtttaagttgggagctgaatgttttgttcagtaggtgagtgctgaagttcacctcaaagtagttaattagatggcatgagttgcgtcccaaaggtccgacatatatttcttcccctccccgtttcatcagaaatagctgcggagttcaaaaatacatgtgagtgttacttccaaagttaaagaaataccattggaagcatcttgttttatagttgttgccacttacctcatcaaaagcttcaaagatatcaatgctaggctggtggattgtgcagacaaccgtccttccggtgtccaccgtgtttcggactgtcctcatcacaattgcagctgccctagcatctagtccagaagttggttcgtccatgaatatgatggatgggttggccacgagctcaacagcaatagtgagtctcttccgctgttctgtggataaaccatttactcctggcagtcctaccaatgctcccctcagtggtgtcaattccacgagttccatgacttcttccacaaacatctgcacccatgaagttatccgattagccaagcactataattatcagttgctatgaaaatgttactgtgttacttatgagctagcaggatgaagacaattttgacgcacctttcttgcttctgaatccacttcatggggcaaccggagccatgcggagtacaggagggattcataaacagtgacatgtggagaatgaatatcattttgctcacagtagccagcaatccgagcaaaggtctcttgtttctttgggtatccagagattgaaatatctccttcaatgtgaccaccagttttccttcccgccaatacatccatcagggtagttttacccgctccactgactcccatcagtgctgtaaggactcctggtctgaaggctccgcttacacccttcagcagcagtagccgatcttcagtaatacctttatctttcatttcctgtaaaacagtcatacaattactaattattatttagtattatcagtttgtattttggtgataagtcaggtcttccaacttctgcttacctgaggcatgtccaccgagtatttgatattgtcaaaggtgatggacaacggcgtaaatggaagtaccattcctctcttcctgctttcagctccagcaatttctcctcttcctgcatttttatggacttgttacaatgatgcaacaatgacatgtattatctgatgtatgctgcaaggaggtctgcttatgactgaccatctgaaggcggattctgggaagctgttccaagaggcagcaactcaacattttgaccacagagagagggtactcacggccaagccaatcaaggaacagaacgaagagtacgttgaagagcatgatatacccaagcaatgcaccaacaccaatccaataccagtttggatcgacaaaaatgccacgggcctttaggatttgaacaccgagtgtgtcgttgctatgtgtcctatcgacaacctgcacaaagattgccattgtttgttaactcagctgtctctctgaactttagagtggtcataggctcatatcttagattggtttagaagtcaccgcattaccatctgccagctatggccaaggaactcattcaccgctacggcattctgggcatacatcagaggggaggaccagtagccccagatccaccattttttaatgttatctgcagaaagaaaactcaattacatgctcctggaactatcaaagcaatgtgtgaatgaaggcttgtcttacctcttgctatcaagaagccaccaagaatcagaagaacaagctgcgcgaatgacccaaatgtgtctgcgacaaccatttctcttcctagtgcagcaagaagccggaaaagaccagatgccatctggctgactagtacaagcagaaggtaatggcgaaagaacctttcgatgcttggatcaaagccaatgacatagtaagtcatgccgatccacacagcacattccaagaatgatattggtatctttagcaaccatgtaggcgatgcatatgcccatgatggatagaagaggaggtccctctgcttataaaatatcggcagctttgcgatactcatggcgagctcagcaaaaccattgaacaaatgtgtgactagtccaaggaacatggcgcccagaaatatcaccccatcttcgacaccacgtcgatgcattgttgtgcgcaggaagaccgtcattgcaattgttccaagaattatgagctggtacaaatatggagcattcatcagaatttactacctgaatttggaagttgagaagattttaggaagcaagatggatacctggactactttgaagatataaacaaatgagttcctcttcatcagtagccactccctagagaagcatgctctgagaagttccatcttgctgataccatactttgacgttgtgagagctgcaggatggttcctggtgcgatcgaagggcaccttgagatctgatcccagcttacggccaacatggaatgctttgaatgcctctgaaaagtcgttaactgagatgtatctgtatggctcgtctcttctacaccagtactggtgctgatccttcctagatgtaacctgtgatcagagagagtaatgtcagatggggttccaagtctgaatgaacagtaaataggattctgcaggatcactcacttcttgcaagaagtctgcaacaccttttctctcaggacatttgaagcccatgacctcaaaaaattccaggacattctcccgaggaccctggtacacaatttggccctccgagaggagaacaatgtcatcgaagagctcgtatgtttcaggcgcaggctgaagcaatgcgataagtgcagttccaccaaggatgtggaccgactgccttagagagttgacgatctgatatgttgtggagctgtccaggccggtggagatttcatccatgaatagcgccttagctggaccaacaagcatctcgcctgtgaaaattcaacaagacatgaagtcagatttttttcgatcagggtcaaagggtttgatgcacaaatcttaatataactgcagattgcacataccggtagtgacacgcttcttttgtcctcctgagatacctctgatcatagagtctccaaccattgtatccgc

SEQ ID NO: 121115 - DNA, 327 bp, Zea Mays
ggagaaggcaagtgtttcccggaccgtcatttcgccgacgtgaacatcgtgctgcccgatgtacgccgatgtcctctgagggacaaattcatccatgtcatgaccattattggagtcaagtttccctgacaaagccagaagtagacttgttttcccggatccaggagggccaagcagcaaggacattctgaaagaagtgccagttagtaagtacaactacagaaaaactgaaaaccttgcactttaaaattctttggcttcttacctgccgggtcttatgaccccactgatatcgtgaaggatggagacaggcctcttcccgctaga

SEQ ID NO: 121116 - DNA, 1630 bp, Zea Mays
taaaaaaaagattgtccttaaatataggcgccgaaacgaagccgacctaaccgccagacccaagccaacaagcaagaccgaccgcttctgcttgtgacccgaaacctttcttcgaacgcaaaaagaaccccacccgacgtaccgcgagccggctatggcgacggtggcgatggacatctcgaagcccacgccggcagcgtccggtgacgaggcagcggcggcggcgaaggggaggagcggcggcgggggcgaggggctgcggcagtactacctgcagcacatccatgacctgcagctccagatccggcagaagacccataacctcaaccgcctcgaggcccagcgcaacgacctcaactcccgagttagaatgctcagggaagagttgcagttgcttcaagagcctggctcatatgttggtgaggtggtgaaggtcatggggaaatcaaaggttctggtgaaggtacatcccgaaggcaaatatgtggtggatatagataagagcattgatatcactaagatcacaccttcaacaagagttgctcttcggaatgacagctatatgctccatctgatcctaccaagcaaagttgatccattggtcaatctcatgaaagttgagaaggttccggattctacctatgatatgattggaggccttgaccagcaaattaaagagatcaaagaggtcattgagcttccaatcaaacatccggaactgtttgagagccttggaattgcgcaaccaaagggtgtccttctttatggacctccgggcacaggaaagacattgttggcacgtgcggttgctcatcacactgactgcaccttcatcagggtgtctggttctgagttggttcagaagtatattggtgagggctcccggatggttagggaactctttgttatggccagggaacatgcaccatccattatatttatggatgaaattgactctatcggatctgctagaatggagtctggaactggcaacggtgacagtgaagttcagcgtactatgcttgaacttctaaaccagctcgatggttttgaagcatcaaacaaaattaaggttttgatggcaacgaacagaatagacattttggatcaagcccttctgaggcctggccgcatagacaggaagattgaatttccaaatcctaacgaggattcacgtttcgatatcttgaagatccattcaagaaaaatgaacttgatgcgtggcattgatctgaaaaagatcgcggaaaagatgaatggggcctcaggagctgagctcaaggccgtctgcacagaggctggaatgtttgctcttcgtgagagaagggtgcacgttacccaggaggacttcgagatggcagtggccaaggtgatgaagaaagacacggagaagaacatgtccctgcgcaagctctggaatggcagtgccttcatatccatatcttttaccaaagcagtggaatggtgtaacggcatgctctggacaatgttatctcaagttgcgccgcgcatgcttatgtttaaaattttccttataacggctgtagtgtgttgttgcaaagttgattggatttatcagatcagctagattacggtactaatacattgctagctcgcgatgtggacactg

SEQ ID NO: 121117 - DNA, 1708 bp, Zea Mays
aagccgacctaaccgccagacccaagccaacaagcaagaccgaccgcttctgcttgtgacccgaaacctttcttcgaacgcaaaaagaaccccacccgacgtaccgcgagccggctatggcgacggtggcgatggacatctcgaagcccacgccggcagcgtccggtgacgaggcagcggcggcggcgaaggggaggagcggcggcgggggcgaggggctgcggcagtactacctgcagcacatccatgacctgcagctccagatccggcagaagacccataacctcaaccgcctcgaggcccagcgcaacgacctcaactcccgagttagaatgctcagggaagagttgcagttgcttcaagagcctggctcatatgttggtgaggtggtgaaggtcatggggaaatcaaaggttctggtgaaggtacatcccgaaggcaaatatgtggtggatatagataagagcattgatatcactaagatcacaccttcaacaagagttgctcttcggaatgacagctatatgctccatctgatcctaccaagcaaagttgatccattggtcaatctcatgaaagttgagaaggttccggattctacctatgatatgattggaggccttgaccagcaaattaaagagatcaaagaggtcattgagcttccaatcaaacatccggaactgtttgagagccttggaattgcgcaaccaaagggtgtccttctttatggacctccgggcacaggaaagacattgttggcacgtgcggttgctcatcacactgactgcaccttcatcagggtgtctggttctgagttggttcagaagtatattggtgagggctcccggatggttagggaactctttgttatggccagggaacatgcaccatccattatatttatggatgaaattgactctatcggatctgctagaatggagtctggaactggcaacggtgacagtgaagttcagcgtactatgcttgaacttctaaaccagctcgatggttttgaagcatcaaacaaaattaaggttttgatggcaacgaacagaatagacattttggatcaagcccttctgaggcctggccgcatagacaggaagattgaatttccaaatcctaacgaggattcacgtttcgatatcttgaagatccattcaagaaaaatgaacttgatgcgtggcattgatctgaaaaagatcgcggaaaagatgaatggggcctcaggagctgagctcaaggccgtctgcacagaggctggaatgtttgctcttcgtgagagaagggtgcacgttacccaggaggacttcgagatggcagtggccaaggtgatgaagaaagacacggagaagaacatgtccctgcgcaagctctggaagtgaggctcgtgcccacctttcacggcctccccgaagctagtggcagtgccttcatatccatatcttttaccaaagcagtggaatggtgtaacggcatgctctggacaatgttatctcaagttgcgccgcgcatgcttatgtttaaaattttccttataacggctgtagtgtgttgttgcaaagttgattggatttatcagatcagctagattacggtactaatacattgctagctcgcgatgtggacactgcataatggttacttgctcggattatccacattctcgtgtgtaacatgcattgcaatgtcgtggcccattcaatat

SEQ ID NO: 121118 - DNA, 1790 bp, Zea Mays
aagccgacctaaccgccagacccaagccaacaagcaagaccgaccgcttctgcttgtgacccgaaacctttcttcgaacgcaaaaagaaccccacccgacgtaccgcgagccggctatggcgacggtggcgatggacatctcgaagcccacgccggcagcgtccggtgacgaggcagcggcggcggcgaaggggaggagcggcggcgggggcgaggggctgcggcagtactacctgcagcacatccatgacctgcagctccagatccggcagaagacccataacctcaaccgcctcgaggcccagcgcaacgacctcaactcccgagttagaatgctcagggaagagttgcagttgcttcaagagcctggctcatatgttggtgaggtggtgaaggtcatggggaaatcaaaggttctggtgaaggtacatcccgaaggcaaatatgtggtggatatagataagagcattgatatcactaagatcacaccttcaacaagagttgctcttcggaatgacagctatatgctccatctgatcctaccaagcaaagttgatccattggtcaatctcatgaaagttgagaaggttccggattctacctatgatatgattggaggccttgaccagcaaattaaagagatcaaagaggtcattgagcttccaatcaaacatccggaactgtttgagagccttggaattgcgcaaccaaaggtttgttttcttttttgaagaccatcttaaccttttgaactttacatgtaggtggaaaagacggatcttgtttgtttttcagggtgtccttctttatggacctccgggcacaggaaagacattgttggcacgtgcggttgctcatcacactgactgcaccttcatcagggtgtctggttctgagttggttcagaagtatattggtgagggctcccggatggttagggaactctttgttatggccagggaacatgcaccatccattatatttatggatgaaattgactctatcggatctgctagaatggagtctggaactggcaacggtgacagtgaagttcagcgtactatgcttgaacttctaaaccagctcgatggttttgaagcatcaaacaaaattaaggttttgatggcaacgaacagaatagacattttggatcaagcccttctgaggcctggccgcatagacaggaagattgaatttccaaatcctaacgaggattcacgtttcgatatcttgaagatccattcaagaaaaatgaacttgatgcgtggcattgatctgaaaaagatcgcggaaaagatgaatggggcctcaggagctgagctcaaggccgtctgcacagaggctggaatgtttgctcttcgtgagagaagggtgcacgttacccaggaggacttcgagatggcagtggccaaggtgatgaagaaagacacggagaagaacatgtccctgcgcaagctctggaagtgaggctcgtgcccacctttcacggcctccccgaagctagtggcagtgccttcatatccatatcttttaccaaagcagtggaatggtgtaacggcatgctctggacaatgttatctcaagttgcgccgcgcatgcttatgtttaaaattttccttataacggctgtagtgtgttgttgcaaagttgattggatttatcagatcagctagattacggtactaatacattgctagctcgcgatgtggacactgcataatggttacttgctcggattatccacattctcgtgtgtaacatgcattgcaatgtcgtggcccattcaatat

SEQ ID NO: 121119 - DNA, 982 bp, Zea Mays
agctgagtaaatatctccacatttcttttcctgttgtacctgaagcattagttgtttgtgagttgaagcataattttgcatattcatattctgttattagctttttcattgtgggcttagtttgttatcgggttcacttattgcagggaacatgcaccatccattatatttatggatgaaattgactctatcggatctgctagaatggagtctggaactggcaacggtgacagtgaagttcagcgtactatgcttgaacttctaaaccagctcgatggttttgaagcatcaaacaaaattaaggttttgatggcaacgaacagaatagacattttggatcaagcccttctgaggcctggccgcatagacaggaagattgaatttccaaatcctaacgaggattcacgtttcgatatcttgaagatccattcaagaaaaatgaacttgatgcgtggcattgatctgaaaaagatcgcggaaaagatgaatggggcctcaggagctgagctcaaggccgtctgcacagaggctggaatgtttgctcttcgtgagagaagggtgcacgttacccaggaggacttcgagatggcagtggccaaggtgatgaagaaagacacggagaagaacatgtccctgcgcaagctctggaagtgaggctcgtgcccacctttcacggcctccccgaagctagtggcagtgccttcatatccatatcttttaccaaagcagtggaatggtgtaacggcatgctctggacaatgttatctcaagttgcgccgcgcatgcttatgtttaaaattttccttataacggctgtagtgtgttgttgcaaagttgattggatttatcagatcagctagattacggtactaatacattgctagctcgcgatgtggacactgcataatggttacttgctcggattatccacattctcgtgtgtaacatgcattgcaatgtcgtggcccattcaatatctcat

SEQ ID NO: 121120 - DNA, 1987 bp, Zea Mays
ctctcccttctttctccagactctctctatctcacttcagttgctgccatgccatgccccatgctgcctgctagctcttgtccttcccctgcccctgctcgccttgccttgcttgcccctctggctcttgcattcaatggagctgggctttggatcatgagcggagcacatgggagaaaaccagcgcagcacaagtccaaagaccgaacttcttgatctggttcgggccgacgccgcgcctgacggtggcggagccggagctggtgcgcgagatcttcctgacgcgcgcggaggcgttcgaccgctacgaggcgcacccggtggtgcgccagctcgagggcgacggcctcgtcagcctccacggcgacaagtgggcgctccaccgccgcgtcctcgccgacgccttctacccggacaacctcaaacggctggtgccccacgtcggccggtcggtggcggctctggcggagaagtggcgcgccatggcgtccgcctcctcgagcggcgaggtggaggtggacgtcgcggagtggttccaggcggtcacggaggaggccatcacgcgcgccaccttcggccgcagctacgacgacggccgcgtcgtgttcgccatgcagggccgcctgatggcctacgcctccgaggccttccgcaaggtcctggtccccggctaccggttcttgcccaccaagaagaactggcagtcgtggaagctggacagggagatacggcggagcctgacccgtctcatcgcccggcgcagcgacgaggccgaggccgaggaggaggagatgggcagccactccggcgggttccgcgaccttctcggcgccatgatcaatgccggcgagaggaagacgccgccggcgggggcgatcccggtggcggacatgctggaggaatgcaagacgttcttcttcgccgggaagcagacgacgacgaacctcctggcctgggccaccgtgctcctggccatgcacccggagtggcaggaacgcgcacgccgcgaggtcctcgacgtcttgggccccgacgagctcccctccaaggagcaccttccaaggctcaagacggtgggcatgatcataaacgagaccctgcggctgtacccgccggcggtggccaccatccggcgcgccaagacggacgtgcagctctccaacgggtgcctgatcccgcgcgacacggagctgctgatcccgatcatggcgatccaccacgacgccaggctctggggcgccgacgcggcgcagttcaaccccgcgcggttcgccggcggcgcggcgagggcggcgaagcacccgctggcgttcatcccgttcgggcttggcgcccgggcgtgcatcggccagaacctggcgcgcctggaggcccagctcaccgtggcggtcctgcttcagcggttcgagatcagggcgtccccgaactacgtccacgcgcccacggtcctgatgctcctctacccgcagtacggcgcgccggtgatcttccggccacgacgtcccgcgcgcccggcagccgcatcatagcccagattcttcgcctgtccggctgtcccacattctttttgtcgaaattgacgggaatgccgcgggtctgtcacctgcctcctggttctggtggacctgtccagaatgaccgaaacacccctcccgcgaccctttgtccctgtgtatattagcgagtgatactagaagccaaggagcactaactttttgtcctagcctgctgcctgcgctgcgccttggggcctacccaggttgcccggaaatgccctcgttaacaagaccagatcaggcccagccctttttaaagatttgatttgatgacacgcaaggagaggccggaggaccggacccacacctcacctgtgtttgttccctgccccgtggcgtctggtgcagtggtgtatgtgtttgtacataggcttgttgttccatgttctacgttattaatagagacaaaaaatgcaaaggaaaaaaagaga

SEQ ID NO: 121121 - DNA, 277 bp, Zea Mays
tgctttcaaactgtagatgaacaggatatgaaggcagccttgttccaaaagcagtctgtttggtgatgtacatggagcttttgcatagagtagtttatgtggcagttatctcaagaattttcatctggtggatgtacagggtttgtatagcaacatttccttgtagaaagttgaagttgtatatcgagggtggatttacatgtgtttatcttttcgaccccaagcctctaggaagctgtgaaccatagcctcatgaaatatgcctgttgttgattca

SEQ ID NO: 121122 - DNA, 1256 bp, Zea Mays
gccctttgacccgcctcgacgtcggtgcctcgcgtcccttcctctcccaccgatcaggcgaacaaatacgcacgcgaacgcaaagaaaaaaaaactgttgttttgttcttgcggagacgagacgagacgaggcgacgcgaggtaggttttcggacccctcttctcaatcccctcacgtttcgtttcgttttgtttgggttcttccgccgtcgatcctgacgagatcgtttccgtcctctctgccgacgcgccgccgtctgccagtcgcgaggagtcgaggaggatcggggctcaggtggtacaaacaaaggagcgtcaggggttgagggggaggggcaagatgaacaggaagccaggagactgggactgcagggcgtgccagcacctcaacttcagccgccgagacatatgccagcgctgcagcgagccacgtggagttgctgatcgtggcggcggaggaggaggaggcgactacgccagcttcggtggccgcggtggctcctccttcggcggcggctttggcgctgctggctctgacgtccggcctggtgactggtactgctcctgcggcgcgcacaacttcgccagccgctccagctgcttcaagtgctccgcctacaaggaggaggccgctgtgaacagtggcgctggcggctttgacggcgacatgtcacgctcacggggctacggcttcggcagcggtgctgctggtgctggtgctggcgctgcccgtactaccaaccgccccggttggaagtccggagactggatctgcaccagatccggatgcaacgagcacaacttcgccagcaggatggagtgcttcaggtgcaacgcaccgcgggactctggtagcgctgccatgacctacgaaaactacttgcactgaggtgtaggatcgagcaagttaaaaagtctgcagcgccgaagaaagcgacgacaagaggagtcctcatcacgtcgtaacgtaagagagagagagagtagtggatttgcaacaaaaaaaaaaaaagacggccgcgatgctctgttactagctagctagttttgttcaaccacccatgccgtctcttctcttttattagatttggtttggttctcatagccctttaattaccatttgggacctatgtttgctgttctgtttcccgttcgtctcctccgcatgtttgcgcttggatcgagtcttgtgatgtaaccccccaaaaaacgcttgcttaactagtactgttgcttcttaatatctccgggggcgt

SEQ ID NO: 121123 - DNA, 1031 bp, Zea Mays
gcacgcgaacgcaaagaaaaaaaaactgttgttttgttcttgcggagacgagacgagacgaggcgacgcgagtcgcgaggagtcgaggaggatcggggctcaggcaagatgaacaggaagccaggagactgggactgcagggcgtgccagcacctcaacttcagccgccgagacatatgccagcgctgcagcgagccacgtggagttgctgatcgtggcggcggaggaggaggaggcgactacgccagcttcggtggccgcggtggctcctccttcggcggcggctttggcgctgctggctctgacgtccggcctggtgactggtactgctcctgcggcgcgcacaacttcgccagccgctccagctgcttcaagtgctccgcctacaaggaggaggccgctgtgaacagtggcgctggcggctttgacggcgacatgtcacgctcacggggctacggcttcggcagcggtgctgctggtgctggtgctggcgctgcccgtactaccaaccgccccggttggaagtccggagactggatctgcaccagatccggatgcaacgagcacaacttcgccagcaggatggagtgcttcaggtgcaacgcaccgcgggactctggtagcgctgccatgacctacgaaaactacttgcactgaggtgtaggatcgagcaagttaaaaagtctgcagcgccgaagaaagcgacgacaagaggagtcctcatcacgtcgtaacgtaagagagagagagagtagtggatttgcaacaaaaaaaaaaaaagacggccgcgatgctctgttactagctagctagttttgttcaaccacccatgccgtctcttctcttttattagatttggtttggttctcatagccctttaattaccatttgggacctatgtttgctgttctgtttcccgttcgtctcctccgcatgtttgcgcttggatcgagtcttgtgatgtaaccccccaaaaaacgcttgcttaactagtactgttgcttcttaatatctccgggggcgttcatctt

SEQ ID NO: 121124 - DNA, 1117 bp, Zea Mays
ctcccctcctctttctagttttacgtgattcccttgttcctcgcgggccaaagcgcgctaagaatcaaaggcacaaagatagctcaccctcggtttcagcatcccctccaaacatcactataaatacccctgcacacacgcaccttgctgcatcaccaccatctcacttcatataccactccctaggaggacccagcaacacacacagccgagctttgcttaggcaagatgaacaggaagccaggagactgggactgcagggcgtgccagcacctcaacttcagccgccgagacatatgccagcgctgcagcgagccacgtggagttgctgatcgtggcggcggaggaggaggaggcgactacgccagcttcggtggccgcggtggctcctccttcggcggcggctttggcgctgctggctctgacgtccggcctggtgactggtactgctcctgcggcgcgcacaacttcgccagccgctccagctgcttcaagtgctccgcctacaaggaggaggccgctgtgaacagtggcgctggcggctttgacggcgacatgtcacgctcacggggctacggcttcggcagcggtgctgctggtgctggtgctggcgctgcccgtactaccaaccgccccggttggaagtccggagactggatctgcaccagatccggatgcaacgagcacaacttcgccagcaggatggagtgcttcaggtgcaacgcaccgcgggactctggtagcgctgccatgacctacgaaaactacttgtaaattaccgaatctttcccctcctctcggccgctctggctgccatatccatgacctaaccgagtacggggttcactcacttcgccgtgtgcaggcactgaggtgtaggatcgagcaagttaaaaagtctgcagcgccgaagaaagcgacgacaagaggagtcctcatcacgtcgtaacgtaagagagagagagagtagtggatttgcaacaaaaaaaaaaaaagacggccgcgatgctctgttactagctagctagttttgttcaaccacccatgccgtctcttctcttttattagatttggtttggttctcatagccctttaattaccatttgggacctatgtt

SEQ ID NO: 121125 - DNA, 1555 bp, Zea Mays
gtgattcccttgttcctcgcgggccaaagcgcgctaagaatcaaaggcacaaagatagctcaccctcggtttcagcatcccctccaaacatcactataaatacccctgcacacacgcaccttgctgcatcaccaccatctcacttcatataccactccctaggaggacccagcaacacacacagccgagctttgcttaggcaagatgaacaggaagccaggagactgggactgcagggcgtgccagcacctcaacttcagccgccgagacatatgccagcgctgcagcgagccacgtggagttgctgatcgtggcggcggaggaggaggaggcgactacgccagcttcggtggccgcggtggctcctccttcggcggcggctttggcgctgctggctctgacgtccggcctggtgactggtactgctcctgcggcgcgcacaacttcgccagccgctccagctgcttcaagtgctccgcctacaaggaggaggccgctgtgaacagtggcgctggcggctttgacggcgacatgtcacgctcacggggctacggcttcggcagcggtgctgctggtgctggtgctggcgctgcccgtactaccaaccgccccggttggaagtccggagactggatctgcaccaggtgcgtgttactaaacttgaacccttccaccttgactacatgtttcatggacgggcgtggtattcattctgtccatgaatccatgtgcttgttttcttgtcgtacgcaaggtctgatgagaaaaaaaaaggattgttttatcagcaacatgctggagtaagggacaacagaatcgtctggctatgctttctgtctgtctgtctgcatgcatgatatattagcgataacctagcctctaaatcttcttaggagttgctgatgtctcagttagtggatgagtaggtaggtactctgccagtatgcattttacctgtgaacactctgctaacctttgtgcgtgcgaatcgtccacagatccggatgcaacgagcacaacttcgccagcaggatggagtgcttcaggtgcaacgcaccgcgggactctggtagcgctgccatgacctacgaaaactacttgtaaattaccgaatctttcccctcctctcggccgctctggctgccatatccatgacctaaccgagtacggggttcactcacttcgccgtgtgcaggcactgaggtgtaggatcgagcaagttaaaaagtctgcagcgccgaagaaagcgacgacaagaggagtcctcatcacgtcgtaacgtaagagagagagagagtagtggatttgcaacaaaaaaaaaaaaagacggccgcgatgctctgttactagctagctagttttgttcaaccacccatgccgtctcttctcttttattagatttggtttggttctcatagccctttaattaccatttgggacctatgtttgctgttctgtttcccgttcgtctcctccgcatgtttgcgcttggatcgagtcttgtgatgtaaccccccaaaaaacgcttgcttaactagtactgttgcttcttaat

SEQ ID NO: 121126 - DNA, 1382 bp, Zea Mays
gtgattcccttgttcctcgcgggccaaagcgcgctaagaatcaaaggcacaaagatagctcaccctcggtttcagcatcccctccaaacatcactataaatacccctgcacacacgcaccttgctgcatcaccaccatctcacttcatataccactccctaggaggacccagcaacacacacagccgagctttgcttaggcaagatgaacaggaagccaggagactgggactgcagggcgtgccagcacctcaacttcagccgccgagacatatgccagcgctgcagcgagccacgtggagttgctgatcgtggcggcggaggaggaggaggcgactacgccagcttcggtggccgcggtggctcctccttcggcggcggctttggcgctgctggctctgacgtccggcctggtgactggtactgctcctgcggcgcgcacaacttcgccagccgctccagctgcttcaagtgctccgcctacaaggaggaggccgctgtgaacagtggcgctggcggctttgacggcgacatgtcacgctcacggggctacggcttcggcagcggtgctgctggtgctggtgctggcgctgcccgtactaccaaccgccccggttggaagtccggagactggatctgcaccagatccggatgcaacgagcacaacttcgccagcaggatggagtgcttcaggtgcaacgcaccgcgggactctggtagcgctgccatgacctacgaaaactacttgcactgaggtgtaggatcgagcaagttaaaaagtctgcagcgccgaagaaagcgacgacaagaggagtcctcatcacgtcgtaacgtaagagagagagagagtagtggatttgcaacaaaaaaaaaaaaagacggccgcgatgctctgttactagctagctagttttgttcaaccacccatgccgtctcttctcttttattagatttggtttggttctcatagccctttaattaccatttgggacctatgtttgctgttctgtttcccgttcgtctcctccgcatgtttgcgcttggatcgagtcttgtgatgtaaccccccaaaaaacgcttgcttaactagtactgttgcttcttaatatctccgggggcgttcatcttgttcttgctttatggtgtaaggctagctccaacaaggagctttaaaaggttctgtaccctaaatttagaggatcagggtcatctactctctccagcagcgtctctaaatgctgctggatcctttatatatagagtttctctaaacggttttttatctatttgaatactttaaacaaccggtttagtaaaactaaaatatgtataatatatttgagagtatgataaatacgtatgtataaaaaataaaaaatatct

SEQ ID NO: 121127 - DNA, 1351 bp, Zea Mays
gtgattcccttgttcctcgcgggccaaagcgcgctaagaatcaaaggcacaaagatagctcaccctcggtttcagcatcccctccaaacatcactataaatacccctgcacacacgcaccttgctgcatcaccaccatctcacttcatataccactccctaggaggacccagcaacacacacagccgagctttgcttaggcaagatgaacaggaagccaggagactgggactgcagggcgtgccagcacctcaacttcagccgccgagacatatgccagcgctgcagcgagccacgtggagttgctgatcgtggcggcggaggaggaggaggcgactacgccagcttcggtggccgcggtggctcctccttcggcggcggctttggcgctgctggctctgacgtccggcctggtgactggtactgctcctgcggcgcgcacaacttcgccagccgctccagctgcttcaagtgctccgcctacaaggaggaggccgctgtgaacagtggcgctggcggctttgacggcgacatgtcacgctcacggggctacggcttcggcagcggtgctgctggtgctggtgctggcgctgcccgtactaccaaccgccccggttggaagtccggagactggatctgcaccagatccggatgcaacgagcacaacttcgccagcaggatggagtgcttcaggtgcaacgcaccgcgggactctggcactgaggtgtaggatcgagcaagttaaaaagtctgcagcgccgaagaaagcgacgacaagaggagtcctcatcacgtcgtaacgtaagagagagagagagtagtggatttgcaacaaaaaaaaaaaaagacggccgcgatgctctgttactagctagctagttttgttcaaccacccatgccgtctcttctcttttattagatttggtttggttctcatagccctttaattaccatttgggacctatgtttgctgttctgtttcccgttcgtctcctccgcatgtttgcgcttggatcgagtcttgtgatgtaaccccccaaaaaacgcttgcttaactagtactgttgcttcttaatatctccgggggcgttcatcttgttcttgctttatggtgtaaggctagctccaacaaggagctttaaaaggttctgtaccctaaatttagaggatcagggtcatctactctctccagcagcgtctctaaatgctgctggatcctttatatatagagtttctctaaacggttttttatctatttgaatactttaaacaaccggtttagtaaaactaaaatatgtataatatatttgagagtatgataaatacgtatgtataaaaaataaaaaatatct

SEQ ID NO: 121128 - DNA, 3126 bp, Zea Mays
atggacgtggtgcaggtcctcgcgtcggcgacccagctggtctccgcgatggtgtccgcggtcggggcactggagcaggcggcatccgacttggcggaggccccgaggaggctgcaggtgctcgaggacttcgtgtccgacctcgacgcgctaacgcagcagtcgaggcagcggcacgcgcacaagctgcacggcccgcagctggaccgccagttccagagcctgggcaggctcatggaccagctgcgcggtaacgtcgccaaggccaggaaggtgctgggcagcaagggcaaagggaaggggtttgccaggttggtgcggagctccgtggtgggtgacccgctcatcaagtacgccaggctgatcagggacgacctcaaccagtggcttgagctgcaggagctgacccagagcatcggcaatgtcatagcgtcgactgccagaagcacgccgtcgttggtgagggttaagtcggagcatggatacccggtgtccaagaagtgcagctatgtcagggagctgttggagagggatggggctcatcgagtcgtcctcatagtcggtctctctggtatcgggaagtcatgcctcgcacgacagattgcttctgatccgccacttagtttcgtggatggtgcgattgagattggttttgggaggtggtgcagcagggcagcatgtaatgggagcagaagcgaataccataaacgccttgctaggaagatctgcacgttccttgtgaagatcggctccatgactctcaaggaggagactggaatagatcttgatgatgtctgttgcttgctccagacggcattggtcggaagaagcatgctgatcctacttgatgatgtttgggagcaagacattgttgatcgcttcacaagactttatgataatgattgccggtatctcgtgacaacaagggatgaagctatctacgagatagcagaagctgaaaaggtagaaatatgtaaagacgacatcaaggagatcagcacggaaattcttctctatcacagccttctcagtgctggagagcttccgcctgtcgcagaagtcttgttggatcgatgtggtcaccatccccttacagttgctgtcatgggcaaggctctgaggaaggaaactagagtggaaaaatgggagaaagctatatccaacctctcaacatatgccacatgtgcacctggtccagtttcatacgtcaatgagaaagatgtggagactacgttgaccatatttggatcttttgagttcagcttagaagcaatgccagaaaattcaagaatttttttcatggctcttgcagctatctcttgggaagaacctgttcctgaggcttgtctggaatccatttggtcagcgcttgagcagtgcggactgttctctctcgtggtttcaaaactagtcgaaggatcacttattatcaaactggaggaccagccgttgtatcatatgcatgacatggtctcactttacctggagaacaaaacaaatgatgccactcgtgctcttttatctgattccatttcatataatgtggcattagtagctccttggctttttgtttttggcaaagagtgtatgaaacggccagccgaacagaagatgggatcattcttttctctgctagaattcatggacatcgagattttattggtaaacacaactcaagctctcatggcatgcagatccctgtctgaacttgagacaaatagaattgggttcagcaaaatacttggccctcgaatagcagagataatttctatagggtcactagatcttatttttgcagtcactgccgcaattacagttatattttccccatcagactacataaatcttgctcactctcttgaaatagcaggttccatagataaattaattgatcttcttggtgcctgtgaagatacttcaactctagccaacctctcttctgttctgaccaagatatctgagcatgttgatgccacaattgcggatgaaattttgtcaagaattcccatggttcgaattgcagatctcttgactgcagaaaatgagcagtggcatgaaattgtgtttacaacacttgcatctctgacaaaggttggaaagctgaaggctgttgagacaatgattgaatcaggaattgacaataaacttcttgtgcttctgggcaatggttctgagatctcacagcaccacgcgattatcacgctaaaaacattctgtgaacttggtgctccacttcaagggtgcatagggcctgcagtgctgcttcatttgccctggcatgctcggatcagtttggaaagatttgttttatctgacagaaatgtgccgcaatcaccaaagcctcaacaatcatttgaggtgattcttcataatatccttcagagagacaacaaaaatatcattaaaggcatccaaggtttattatctcttgctgaaacggcaaatgatacaagggtgcaggacctccttctgggaagccatctgtttgataggttggcttggctgctacaacgcagagaggttgaaaagaaccaggtgaggtcccagaccgcctttttggtgatgaaattggcctgcactggaggagagccatacgtgcataggttcctggagcttaatattgttcacgagctcattgacatgctgcagtgcaacatcgatgagctccaggattcagcgtactacgctctccatcagatcgtctttgcgaagggtggatcccttgtcttgcaaagatttctgcaactaagaaccatagagaaactggtgaacttgctggaccgcaagtctttgaagaccaaggatctagccatgcaatttctggtggacatcacggaggttggaaccaaaccctgtatcgagagaatgctcgcttctcagatcgtcgagaagctcgtggcccttgagaaagccggtgatcctttcggcggcgcggtgtcgaggtacatccagggattgaacatgtgcaagaaactccagtctgctgagagggcggtgatgaagcaacatattctgaggaaggtgcggtcggcagtgagaggtcataagctggaggccatcctagtagcttctgtggaggcctccatcgctgaaggcttcaaaggagcaagtagcagtaggaaatag

SEQ ID NO: 121129 - DNA, 2340 bp, Zea Mays
ttcctcccgccagcacggtcagagagcatactatgacagcctcaaatcctacagtgttaaggagagtcactaagttacttaacatcttttttcgaaagaatattcatccatgtactgtgtaaatatgaaataacacgcagagagtaaggagcgaagaacgttaactgtaacatgggggggggggcaaagtaattttttggaggtggggtgattcacttttcacgccgaagacaagacacagaccttagaggagaaatatggttgcggtttaaggcgcccaacgaatccaaaaatctaagatgcgaatcgtaagaagcgactaacagatccaataaatgtgaagcagaaggaactagatctgctagaaggacaaagtatcgggaaaaaagaaaacatgcctttttctaacctggcaaaaacgtaggaagacgaagtggctacagatagacaagacggagggagtaaggacgaagaggagcgtggcagaaagaataatgagaggcgattacagtggaagactactggtcgaccgatgcaagctgcagaggatcgacggagggagtgaggagaaagagagacagaacaaaacgagcgagggtgggtgggaagtgaggaggaagagagacggagcaaaacgagggtgggtgggaagtgaggaggaagagagacggagcaaaacgagcgagacgaggctgacgctagcgtcacttggaagtctctagaggcgataagtacgaggggcgtatgagagagcaaggaagatggactaatgatccatcatcgaacggctacaaagttttctgacgacgtgaatgagctagtaggcgccgtccgttaataataaggaaatatgttgttaatatagatgtttaatgtataaaggaaaaaatgagatatcgaaaaaaaaatattttacgcgaggacggataggacattcggcgttcctaggtaccccgctgcttccgtgctcacctcgcctgcagggccgcagccgctggaagaacacgaagacgacgggagtgcggggtggcgtcgccgctggagcaccagctgtagccgccggctaggcctccgcgccgctctccgtggccaacgcgccgtcatgcttgcggcgtcggcgcggcggctgtccgccgccgcctcgttttcctcttcttccatgcgctccagccagctcgccgccgtactgaaccaacagaggtggatgcacgacaggaacaagaaggcgatggagctggtggccaagggatggagtgcgctccaggaggtcgaccgcgtcatcgactacgccgatctcaacgacaagcgcctcatcccgcttctaaggggcgctaaggaaaactttgagctggctttggagattgacaatggtaatacacatgcgaggtattggctgggaaaaatgcatttcaagtatcatgttcctggtgcttgcaaggcagttggtgctgctttgttggttgaagctgcaaatatgggtgatccagatgcacagtatgaacttggatgtcgactaagaattgagaatgactatgttcagtcggatcaacaggctttccattacattgagcaagctgttgatcagctgcaccctggtgctttatatcttctcggtgctgtatatctaactggggactgtgttaagagagatatggcttccgcgttgtggtgttttcatagagcttcagaaaagggacatgctggtgcagctatcgcatatggatccttgcttcttaaaggtgctgaaatacctgaagttattacaaggttcaactcaggcaagagtccatcaactgggaaaatgcggaaaaggacccaacagcaggatccagtaaagctagcgaaagaacagtttcaaattgcagctgaggcaggctgtgatctcggtctgcggtggttgaagaggcttgaagcttatgaaaaccaagaagaaaagctaaagcaggttcagcaatgatatccactgaaagaatcccattgcatttgtcgcatacaagtatggtatatggcagcatggttgctgcacataggtataccaataatttcctttcctgccttcattatgttggaggctattcgatcctcggatgttcgggtcaactttgcaggaagatatactgaaatttggatatttagactaacttcttggattataggcgattggatgttcactttgtacgatgtattagcgttgacattactggaagccctaattgtgagaagtagaaacatatcatgtgtgttgctacgggcattatggatgatttagaataaaattagactatataactacttatacgaaggaataaattgtggcatatgatgatgtggataacaaaa

SEQ ID NO: 121130 - DNA, 908 bp, Zea Mays
cgccataagcccataacggcataaccctagtccctaccccatataaaacgcggcagcgatgaggctttccttccaattccacccatcgccgccgaaatcccgttgcgtctctcgcgcgttaccaagctctcaagttttctcgcgccgacggcaatggatgaggtcaccgaggccgtgaacaacctcaacatctcgggcgtaggggccgcgggcgttgccggggcggaagggcacaagaagaatcgcatccaggtctccaacactaagaagcccctcttcttctatgtcaacctcgccaagaggtacatgcagctgcacaacgaagtagagctgtcggccctcggcatggccattgcgacggtggtgacagtagcagaaattctgaaaaataacgggcttgctgtcgcgaagagtatcatgacatctactgttgatatcaaggacgagactaggacccggcctatccagaaggccaagattgaaatattgcttggcaagacggagaagtttgatgagctgatggcagcggctgccgaggagagggaggctaatggggccgaggaacaaagctgagtacctgcaaggaaggaccttgttgtagcttatttactgttttctgctgctagatttgtcttcttcatagtttgtcgagtgggctagagacgattacttgtataatcaattaaaggcgcggcttatttagtgtgcttttacttgattcatttatgttggaatgatacaagttgtgttcaatatggtatactctagattcatcactatcttcaatttagaagatagtgcgttgcttctgatgttcgtggatattctgtttggtggcgttgcaatcaacgtctcctatatactacaggtgcctgaaatagggataaatttcaagcgccacttccaca

SEQ ID NO: 121131 - DNA, 637 bp, Zea Mays
gtgccttgttctctgcgtgccgcgcgcgcgaggagaataatctttgcgcgctcccctgctaccgggccgcgctgcccactccccatccccgcctctctcctcgcaacagaaccaagcatctccacacgtcgccatcgacacgtacgcgagtgccacgccggaggtcgacggagcaagctaggcagaggccgttcgagcacggccggcgcccgcgtcccacggtgcatctccggctgcggcgaaccggaccatgggcgcggaccgtgtgggtcaaggtctcgagtcaggttgactcgatagataaagattctttctcttctgactcgagaccaagatcaggttgattcgagagacaaagatttttttctcctctgacgagacaaagattctttctcctcgtccagatagtgatgtctggacgatgaaagggacagtttggtggatccatgaagtttgctaaaaaaaagtagagttatgtcgagagttatcacgagttctcgtataccgttagcctgttcgagatctcggcgaaaaagtgtattaggtgggataaagtgtgttgggtaggaaatgatcaacttttctggatactttggttactcacttagatcaagtgaagaataagttcgttatatta

SEQ ID NO: 121132 - DNA, 1398 bp, Zea Mays
atgcggcccaggcgccccaccttccctcctcctatatacacactcgatacctagggtttccttctctcacttctgtacccaacagaagagcggcggcgcggacggacaaggagcaggcggaagaggagttgtgccaaggcacaatgggtatctcgcgtgactcgatgcacaagcgccgagccaccggtggaaagcagaaggcctggaggaagaagcgaaagtatgagcttggtcgccagccagccaacaccaagttgtcaagcaataagacagttaggagggtccgtgttcgtggaggtaatgtgaaatggagggctcttcgccttgatactggtaactactcatggggaagtgaagctgttacccgcaagacccgtatcctcgacgtggtctacaatgcgtcaaacaatgagcttgtgaggacacaaacccttgtgaagagtgccattgtgcaagttgatgctgccccattcaagcagtggtacctcactcactatggagttgacattggtaggaagaagaaaacccctgctgcaaagaaggataatgctgagggacaagaggttgaggcagcagctgaggaaacgaaaaagagcaaccatgtcacgaggaagcttgagaagcgcaaggagggacgtacccttgacccacacattgaggagcaatttggcagtggacggttgctggcatgcatttcttcccgccctggacagtgtggccgtgctgatgggtacatccttgagggtaaagagcttgagttctacatgaagaagctacagaggaagaagggcaagagcgctgtagcttagagcattctcatggattgtcttgcaccgaaatgtgtgtcctgatgagtacactttttttggttagtcgtctcaagttcagagcgttatgccatgttttcagacctgattagtacactcttttctaaaagcgattgagctctagtccaatgtattgataatatctgctgttgtcctattgcggtgatgtttatttgccctgttcgctagctgcaatagttcctatttgagcagggtatgattatttgttgactagttgagtgcccgtgcgttgcaacggcaacatataataccatgatgaattatgtacaaatgtgtgtttcattattatagtactatgtacgtgctttacacacaatcatatttgatacccataaaaaatatatgttctatacacatttagatctcgagatgtctcgttccctccaacgaaataagtccaagaaattttgtttgaggcttaaatgacctcaaaacaaatgtttacattctgacaaatctttttaagatgctagaacatattcgatctttaaaaagaaccataggttccaatctgaaaaatcagcttgccgacattgacttggctccacgg

SEQ ID NO: 121133 - DNA, 1349 bp, Zea Mays
ccacctcacctcccctcccctatatacacactcgatacctagggtttccttctctcacttctgtacccaaccagaagagcggcggcgcgggcggacaaggagcaggcggaggaggagttgtgccaagccacaatgggtatctcgcgtgactcgatgcacaagcgccgagccaccggtggaaagcagaaggcctggaggaagaagcgaaagtatgagcttggtcgccagccagccaacaccaagttgtcaagcaataagacagtgaggagggtccgtgttcgtggaggtaatgtgaaatggagggctcttcgccttgatactggtaactactcatggggaagtgaagctgttacccgcaagacccgtatcctcgacgtggtctacaatgcatcaaacaatgagcttgtgaggacacaaacccttgtgaagagtgccattgtgcaagttgatgctgccccattcaagcagtggtacctcactcactatggagttgacattggtaggaagaagaaaacccctgctgcaaagaaggataatgctgagggacaagaggttgaggcagcagctgaggaaacgaaaaagagcaaccatgtcacgaggaagcttgagaagcgcaaggagggacgtacccttgacccacacattgaggagcaatttggcagtggacggttgctggcatgcatttcttcccgccctggacagtgtggccgagctgatgggtacatccttgagggtaaagagcttgagttctacatgaagaagctacagaggaagaagggcaagagcgctgtagcttagagcattctcatggattgtcttgcaccgaaatgtgtgtcctgatgagtacactttttttggttagtcgtctcaagttcagagcgttatgccatgttttcagtcctgattagtacactgttttctaaaagcgattgagctctagtccaatgtattgataatttctgctgttgtcctattgcggtgatgtttatttgccctgttcgctagctgcaatagttcctatttgagcactgagcagggtatgattatttgttgatgaatttgtttaaagcataaacacagaagcgggtatgattatttgttgatgaatttgtttgaagcataaacacagaacatatagtaaagaaaacctttttcactaagggcccgtttgtttccttggaaatgaaactcattccatgaataacattctagatattagattcctaaagaaagtaattccttagaatttgattcaattcaatttttttgtttgggtgctaatggaattcttttccatgaatcaaattcaatatcttgtttggatagttatatatgaaatttacatattt

SEQ ID NO: 121134 - DNA, 1515 bp, Zea Mays
ctatatacacactcgatacctagggtttccttctctcacttctgtacccaaccagaagagcggcggcgcgggcggacaaggagcaggcggaggaggagttgtgccaagccacaatgggtaagattccatccacccgcttctcgttttgcctgtactgacatagctgccccggtggttctccgatttgagcgacgctgccgcagtcgtttccggtttgatcgacgctgccgcgatggttcttcggtttgggcgatgagatgctaatgggtgcctctgcggatggtttggatgtatccgtgcaggtatctcgcgtgactcgatgcacaagcgccgagccaccggtggaaagcagaaggcctggaggaagaagcgaaagtatgagcttggtcgccagccagccaacaccaagttgtcaagcaataagacagtgaggagggtccgtgttcgtggaggtaatgtgaaatggagggctcttcgccttgatactggtaactactcatggggaagtgaagctgttacccgcaagacccgtatcctcgacgtggtctacaatgcatcaaacaatgagcttgtgaggacacaaacccttgtgaagagtgccattgtgcaagttgatgctgccccattcaagcagtggtacctcactcactatggagttgacattggtaggaagaagaaaacccctgctgcaaagaaggataatgctgagggacaagaggttgaggcagcagctgaggaaacgaaaaagagcaaccatgtcacgaggaagcttgagaagcgcaaggagggacgtacccttgacccacacattgaggagcaatttggcagtggacggttgctggcatgcatttcttcccgccctggacagtgtggccgagctgatgggtacatccttgagggtaaagagcttgagttctacatgaagaagctacagaggaagaagggcaagagcgctgtagcttagagcattctcatggattgtcttgcaccgaaatgtgtgtcctgatgagtacactttttttggttagtcgtctcaagttcagagcgttatgccatgttttcagtcctgattagtacactgttttctaaaagcgattgagctctagtccaatgtattgataatttctgctgttgtcctattgcggtgatgtttatttgccctgttcgctagctgcaatagttcctatttgagcactgagcagggtatgattatttgttgatgaatttgtttaaagcataaacacagaagcgggtatgattatttgttgatgaatttgtttgaagcataaacacagaacatatagtaaagaaaacctttttcactaagggcccgtttgtttccttggaaatgaaactcattccatgaataacattctagatattagattcctaaagaaagtaattccttagaatttgattcaattcaatttttttgtttgggtgctaatggaattcttttccatgaatcaaattcaatatcttgtttggatagttatatatgaaatttacatattt

SEQ ID NO: 121135 - DNA, 1171 bp, Zea Mays
atgagacaacgatgcggcccaggcggcccacctcccctctcctatatacacactcgatacctagggtttccttctctcacttctgtacccaatcagaagagcggcggcgcgggcggacaaggagcaggcggaggaggagttgtgccaagccacaatgggtatctcgcgtgactcgatgcacaagcgccgagccaccggtggaaagcagaaggcctggaggaagaagcgaaagtatgagcttggtcgccagccagccaacaccaagttgtcaagcaataagacggtgaggagggtccgtgttcggggaggtaatgtgaaatggagggctcttcgccttgatactggtaactactcatggggaagtgaagctgttacccgcaagacccgtatcctcgacgtggtctacaatgcatcaaacaatgagcttgtgaggacacaaacccttgtgaagagtgccattgtgcaagttgatgctgccccattcaagcagtggtacctcactcactatggagttgacattggtaggaagaagaaaacccctgctgcaaagaaggataatgctgagggacaagaggttgaggcagcagctgaggaaacgaaaaagagcaaccatgtcacgaggaagcttgagaagcgcaaggagggacgtacccttgacccacacattgaggagcaatttggcagtggacggttgctggcatgcatttcttcccgtcctggacagtgtggccgagctgatgggtacatccttgagggtaaagagcttgaattctacatgaagaagctacagaggaagaagggcaagagcgctgtagcttagagcattctcatggattgtcttgcaccgaaatgtgtgtcctgatgagtacacttttttggttagtcgtctcaagttcagagcgttatgccatattttcagacctgatttgtacactgttttctaaaagcgattgagctctagtccaatttgagcagggtatgattatttgttgatgacctagcgcctagcaaaactttggcataagcacagaagcagggtatgattatttgttgatgaatttgtttgaagcataaacgcagaacatgtcgtaaagaaaacctttttccgtaatattagcttgtaagatcgtcatggcttcactgcatacataattttccctttttaggtgtc

SEQ ID NO: 121136 - DNA, 1166 bp, Zea Mays
cctatatacacactcgatacctagggtttccttctctcacttctgtacccaatcagaagagcggcggcgcgggcggacaaggagcaggcggaggaggagttgtgccaagccacaatgggtaagattccatccacccgcttctcgttttgcctgtactgacatagctgccccggtggttctccgatttgagcgacgctgccgcagtcgtttccggtttgatcgacgttgccgcgatggttcttcggtttgggcgatgagatgctaatgggtgcctctgcggatggtttggatgtatccgtgcaggtatctcgcgtgactcgatgcacaagcgccgagccaccggtggaaagcagaaggcctggaggaagaagcgaaagtatgagcttggtcgccagccagccaacaccaagttgtcaagcaataagacggtgaggagggtccgtgttcggggaggtaatgtgaaatggagggctcttcgccttgatactggtaactactcatggggaagtgaagctgttacccgcaagacccgtatcctcgacgtggtctacaatgcatcaaacaatgagcttgtgaggacacaaacccttgtgaagagtgccattgtgcaagttgatgctgccccattcaagcagtggtacctcactcactatggagttgacattggtaggaagaagaaaacccctgctgcaaagaaggataatgctgagggacaagaggttgaggcagcagctgaggaaacgaaaaagagcaaccatgtcacgaggaagcttgagaagcgcaaggagggacgtacccttgacccacacattgaggagcaatttggcagtggacggttgctggcatgcatttcttcccgtcctggacagtgtggccgagctgatgggtacatccttgagggtaaagagcttgaattctacatgaagaagctacagaggaagaagggcaagagcgctgtagcttagagcattctcatggattgtcttgcaccgaaatgtgtgtcctgatgagtacacttttttggttagtcgtctcaagttcagagcgttatgccatattttcagacctgatttgtacactgttttctaaaagcgattgagctctagtccaatttgagcagggtatgattatttgttgatgaatttgtttgaagcataagccagggt

SEQ ID NO: 121137 - DNA, 1076 bp, Zea Mays
cctatatacacactcgatacctagggtttccttctctcacttctgtacccaatcagaagagcggcggcgcgggcggacaaggagcaggcggaggaggagttgtgccaagccacaatgggtaagattccatccacccgcttctcgttttgcctgtactgacatagctgccccggtggttctccgatttgagcgacgctgccgcagtcgtttccggtatctcgcgtgactcgatgcacaagcgccgagccaccggtggaaagcagaaggcctggaggaagaagcgaaagtatgagcttggtcgccagccagccaacaccaagttgtcaagcaataagacggtgaggagggtccgtgttcggggaggtaatgtgaaatggagggctcttcgccttgatactggtaactactcatggggaagtgaagctgttacccgcaagacccgtatcctcgacgtggtctacaatgcatcaaacaatgagcttgtgaggacacaaacccttgtgaagagtgccattgtgcaagttgatgctgccccattcaagcagtggtacctcactcactatggagttgacattggtaggaagaagaaaacccctgctgcaaagaaggataatgctgagggacaagaggttgaggcagcagctgaggaaacgaaaaagagcaaccatgtcacgaggaagcttgagaagcgcaaggagggacgtacccttgacccacacattgaggagcaatttggcagtggacggttgctggcatgcatttcttcccgtcctggacagtgtggccgagctgatgggtacatccttgagggtaaagagcttgaattctacatgaagaagctacagaggaagaagggcaagagcgctgtagcttagagcattctcatggattgtcttgcaccgaaatgtgtgtcctgatgagtacacttttttggttagtcgtctcaagttcagagcgttatgccatattttcagacctgatttgtacactgttttctaaaagcgattgagctctagtccaatttgagcagggtatgattatttgttgatgaatttgtttgaagcataagccagggt

SEQ ID NO: 121138 - DNA, 743 bp, Zea Mays
cctatatacacactcgatacctagggtttccttctctcacttctgtacccaatcagaagagcggcggcgcgggcggacaaggagcaggcggaggaggagttgtgccaagccacaatgggtatctcgcgtgactcgatgcacaagcgccgagccaccggtggaaagcagaaggcctggaggaagaagcgaaagtatgagcttggtcgccagccagccaacaccaagttgtcaagcaataagacggtgaggagggtccgtgttcggggaggtaatgtgaaatggagggctcttcgccttgatactggtaactactcatggggaagtgaagctgttacccgcaagacccgtatcctcgacgtggtctacaatgcatcaaacaatgagcttgtgaggagcaatttggcagtggacggttgctggcatgcatttcttcccgtcctggacagtgtggccgagctgatgggtacatccttgagggtaaagagcttgaattctacatgaagaagctacagaggaagaagggcaagagcgctgtagcttagagcattctcatggattgtcttgcaccgaaatgtgtgtcctgatgagtacacttttttggttagtcgtctcaagttcagagcgttatgccatattttcagacctgatttgtacactgttttctaaaagcgattgagctctagtccaatttgagcagggtatgattatttgttgatgaatttgtttgaagcataagccagggt

SEQ ID NO: 121139 - DNA, 117 bp, Zea Mays
ggacgtctgagtcccatccttgcaaatttatgtagtgggcactgctccttaggagccggtgtcggtgttttgggtccgaccgcgcacccagggttgcccctcgaggtgctttttgga

SEQ ID NO: 121140 - DNA, 1907 bp, Zea Mays
gcgtgaccgagcccccgccgcgtctccttccatcctcgcgtatacgtcggtgtctccttccatatatgccaacggaggcgaccgcgatggccgttcccccgcgtgcacaacatcccacgttcccctctccccccaggtcctaccgcagcacgttgctcagtaccccagccactgcccgctagcccccccccccccacacacacccatcctcgccggcctcagcaccgcaaacgccgtccgcgcgtcacttccccgcccttcaatggtgtcctcctccccatcactcgggggcagcaaggcgaccgatggggacgtgtccaactgcactgccttcctccaggcctcgccgaagtcatttgtggtcgtcgagttcttcacccactggtgcaatggtcaccagcccagaaggtcatggtcgacccacgcgatgcaacccaattggatgaagctaggtttaggggccttcttcgttggtttgactgagtttcttcttagttaaataaagtggggcaatatttcctcaccgacttcacaaagccgaccatggctgatgttatcggtttcgatctaggcacaccgaattcatgcatctccgtattggaatgaaaggtgtgtttttaacttgttcatcctaaaatctgccatattcggttgtttgtaaatgggttgttgtatccatctgtagtagatttcatgcttcaaacgctgaaattagtttgggccaactgttgtatcaatatgtacttaatgtcatggtttgaaatagctacgatttgagtaaattttgtggcaattagctccatctgctgttctggaggatggaacaacagtggtggtcaagagattgaaggaagtggtggcgggaaagagggaatttgaacagcagatggagctatttggcaaggtttgccagcatcagaacattgtcccattgcgtgcttactactactccaaggatgagaagctcttggtgtatgtcccactaggtagcctttgtgctgctttgcatggtatgtccccttcatttcaaataatctgtctgaatcattttacattttgttacctgtcatattgttagattgaaatttagttttcaaaattgaagctatttgctacttcaacttgaaagtataatccagatgggggtcgcatacttgaattctcaaagtggggatgctttacattgattgtagagaactctctaattctgggttatgtaaattataatctttggtccttactccttagttttttctgaataaggtaaaaaaaatttccgaataaggtatttattatttgtaacgtagacatacactccagatgtactatcttcagtccttagtttttattcttctgaatataacatagttttttacaaaggatgttgacatataccttcctcaaatcatttggtatttgggattccaatagctgttctggagttccctagaaacagttaacaagacctgctcttgttgctagaattttgggcttttgagatactgaaattttctggcctttgcagtgaatgcaaaagaataattggtggtttcatagtgctgccttgcttttctgttacctacttaatcttcaagaacgacatggacagttgggggtacaagtagcactacatgggttaatgttgtgttgcatattattaatcaggtttagacacatttggttgatctacttaatcaccatgaactggaaactgtgtgattttactaggagggctataggacttttgacatatttttgacagaacacctgagtttgctttcatttctttttcatctaatttgtctgtatggacatgttttcttttgcttggataccacaaatttaattggttactgagattttgggactgggtcaacaaatgaaaggtgcatttcaagttttgcttc

SEQ ID NO: 121141 - DNA, 979 bp, Zea Mays
tacattggaggggaaataccagaagcttggagctctgccccgactttcttgatcggcttgccaactggcttgtattcatcaccgaaaaccatttcttgtcttgagtgtattggtaaataatttctgtcaacctcaagattttccttcagaggataagaaggtgaacaagaagctgacaaccaagctgaccctatactcaggatgtgttgtgccttctggtggtgaaaccgtctctttaagcaactgaactgctttaagtataacagaagagctcagtgatttaccctttagaaaatcctctaccttgctagctctgatggcatggtcagctccataagcaccgaacaccaagcatatatcctccatgatgttcttccctgaagctgcatcagttgaagtccttgccaagagagcagcattgacatatgaagcagcattgccaaatggccgaggcgctgcccggaatgtctcaaaggtgatgccatctgaatcccactttgggatgaatatgctcatcaacagggtcctagaatcacatggagactgctgcaagaactcctccaaagtaaggcacaaccttttggaagccgtctggattgtgactgttgtacctgcagccagtagcacagttgctatgtctgactcgaatggcaacctctgcgccatgattatgttgccacctatggttgttgtgttccgaacaaatggtgaagccactttgcttaggtgattggcaatttttctgaagaccagatttccatctgacaacacctcaatggttgtagcctgtagagatggacacaaccgatccaagctcaattcccttaacgctgctgttgatgactgatagctctggtattcctttgatgtcaatgtacttgtcatagaggtcctgatccatgtgtaagggagttcactgccactccccgctcattttttctgaaggggaaatatccatcttcttgttgttttgtaccgt

SEQ ID NO: 121142 - DNA, 3047 bp, Zea Mays
atgcggtgccatgcacctggactactagtacgcttggggaatggggatgggtgcaacggtagaggaaggtcggtggtctcctccactatccccacagaggttccccttctccttccttccttcgcttcctttttttcccctgtcgccggcggcgatagggtcccgtttttcttgcttcggcgggctgtaaatgcttccggtcctctccggcggtccagatccggcggtgaccgtgctcctgttcgttctcctggtcttgattcgattgggaggggaaggggttccttcggtcttgggaaattcgaagacatgcctgcgctctacgcttattacggagatggcgggtgcctcgtctcggcgccggctgagctggccgggctcttctgccgcggcgccgtgcagcagcggaagcgcacgctggtgaccgcgtccgcggtcgccgcggcggcggccgagttcgtgagggcggccaagaagcagaggcagctgccgctgccgtcgctcgacgcgctcccagacgagtgcctcttcgagatcctgcgccgcgtgcccggcggccgcggccgcggcgcctccgcctgcgtctcccgccgctggctcgcgctcctcggcagcatccgggcctccgagctcggccaggccgcggcggcggcggcggacaccccgtcgctgcccgacctgaacgaggaattcgtcatggaggaggataatgaggagtcccccgcggatcggtgcgtcgacagggtcctagagggcaaggaggccaccgacgtccgcctggccgccatggccgtcgtcgccggatcccgtggcgggctggagaagctcgccgtccgcggcagccacccgacccgtggcgtcacggaccaaggactgtcggcggttgcacgcggcagccccaacctcagctcgctcgcgctctgggatgtgcctcttatcaccgatgctgggctcgcggagattgctgccgggtgtccctcgctcgagcgtctggatatctgtcgatgtcccctcatcacagacaagggcctcgtcgctgttgcgcaggggtgccccaacttggtgtctctgaccattgaggcatgccccggtgttgccaatgagggcctgagggcgattggccgcagctgcgtgaagctgcaagctgtgaacatcaagaactgccctcttgttggtgaccaaggcatttccagcctggtgtgctctgctaccgctgctcttacaaagatccggctccagggattgaacataactgatgcttcgcttgctgtgattggatactatgggaaagccatcactgaccttacacttactcgtctcgctgctgttggtgagaggggtttctgggtgatggctaatgctgctggcctgcagaatctcaggtgcatgagtgttacctcttgccctggagtcaccgatcttgcgcttgcttctattgccaagttctgcccgaacttgaagcagctgtacctcaggaagtgcggatatgtgtcagatgctggcctcaaggcgttcacagaatcagcaaaggtgtttgagaacttgcatctcgaggaatgcaaccgggtttctcttgtcggtattcttgctttcctcctcaactgcagagagaagttcagggctctatcgttggtgaaatgcatggggatcaaggatatctgctctgcgcctgcacaacttcctctttgccgatcacttcgtttccttacaatcaaggattgcccaggtttcaccgatgcaagcttggctgcggtggggatgatttgccctcagttggagcaggttgacctgagtggtcttggtgaggtcactgacaacgggcttcttccattgatccagtcttctgaagctggtctggtcaaggttgacttgagtggttgcaagaacattacagatgtggctgtctcctccctggtgaagggacatggaaaatctctgaagaaaatcaaccttgagggttgcagcaagataacagatgctatcctcttcaccatgtctgagagctgcaccgagcttgcggagcttaatctttcaaactgcatggttagtgactacggtgttgccatcctggcatctgcaaggcacctcaagctccgtgttctctcactgtcaggctgctctaaggttactcagaagagcgtgctgttcttgggcaaccttggccagtctatagagggcctcaatcttcagttctgtgacatgattggcaaccacaacattgcatcgctggagaagaagctctggtggtgtgacatccttgcataggcagacaagatggtccattgctggaagggctcatgtctagtctactgggagccacctccagatgcagatatacgaccgtagcagtagcacaaccaggtgatcttcaggtttttggctcgcatgcgatgcgagtgatgatggtgggcttccgcattgttcaaggaccagttgttttagggggtgctttctagtcaagtgctcgtttttcacagatcacctctcgggaggtttatctgttttttgagccttggctgccatcactggcatcctgcccctcgatccagacactggtccttgccttatagtcatataaggttttttaggttgccatagtgtccaagtcctttttcgttttactgcttcctggttatgaagttgcaggcatccgtgatccattggcagctctggactatcacaattctaactcaagaaccagatgctggtgtcatcttttccagggctgctgatgctggagcgtctgtggatttgtgcagtgtgtttggttgtcgagttttgagtttgtttttagtcttgatgtgttgtgtgctgttcatgttctccatggtgtgtaagggtcatgtagggttgcatcttttttacagtctctctgggatgcttggtgttcatggtgatcttggccaatgctaggcgcatactagaagccttgccttgacaaccttttatggtttttttgccagatccctatttttacaagcagattgttgagtgctgtaagcttggcgaccctctttgaataaatgaaatatgtgtttatgttgaaa

SEQ ID NO: 121143 - DNA, 1685 bp, Zea Mays
aaagataagcagcatcgtgagctctgcagtaacactagtcaaattttacgtaacttgcgtggttctcttcctgcgacggaagcaaacactgcccgagacatagacagcgggacgtcgagatggccgacggggaggacgccgccgccgcgcgccgccgggccgccatcacagactaccgcaagaagctgctcaactgcagggagctagagtcgcgcgtcggcaccgtgagagaaagccttaaaactgcaaagaaggattttaccaagactgaggacgacttaaagtctctgcagagtgtggggcaaataattggagaagtactccgacctcttgataatgaacgctttatcgtgaaggccagcagtggtccccgatacgtggtcggttgccgaagtaaagtggacaaggagaagttgacatctggtactcgtgttgtacttgacatgacgaccttgacaataatgcgcactcttccacgggaggtggatcctgtggtatataacatgcttcatgaagatccaggaaatgtcagttactctgctgtaggtggtctgtctgatcagattagagagctcagggagtccattgagttaccacttatgaatcctgaactctttcttcgggtgggaattaagcctcctaagggtgttctactctacggtcctccaggaactgggaagaccctattggcaagggctatcgcaagtaacatcgatgccaactttttgaagattgtttcaagtgctattatcgacaaatacattggagaaagtgctcgtttgattagagaaatgtttggctatgcacgtgaccaccaaccatgcatcatcttcatggatgaaattgatgctattggtggtcgaagatttagtgagggaactagtgctgatcgtgagattcagcggacgttgatggagctccttaaccaattagatggatttgatgagctaggaaaggtaaaaatgatcatggccacaaatcgacctgatgttctggacccggcgctcctgcgtcctggacgtttagataggaagattgaaattccgctacccaacgagcaatcaagaatggaagttctaaaaatccatgcagccggtatcgccaagcatggggagattgattatgaagcagtcgtgaaactagctgaaggtttcaatggggctgatcttcggaacgtgtgcaccgaagctggcatggctgcaattcgtgcagagagagattacgtagtccacgaagacttcatgaaggctgtgaggaagctaaatgatgcaaaaaagctggaatcgagtgcgcattacagtgcagattttggcaaagagtaatgatgctaatgccgatgcaacggacaaatgcatttggcatgtatcatcaggcgagcccagtcagatgcgatgcaaaagcgagaaaggaaccagctatttatgttcaggctacaggcagcttctctttttttccttctttctcgtattcacaattttagtgaggaggattgtcgagctgaccggtgggagaaaccagtcgagaatttagtagctttgcaccagatgccatttgcttctgtaaatcacacattatctgcttccgtgtgtagaatggtaataactcgtcccagctccatgtacttttgacagtgtgctcgacttgcgtggtaaaaacagagaaaagaacaatttgtgttcattctg

SEQ ID NO: 121144 - DNA, 1012 bp, Zea Mays
tttgtaaaagtatcgttatccctttaccttctctccagccccacgcacaggttatgcagttcctcagaggttcctggaagctgcaacaatggagctcaagtcactcgccaatccattcccgtacgcttccccgtctccaatatgccggcgtccaccggacccgaagaagaagatccggccggcgcgccgcagcagggctccgtatctgaagtcgacctgcgcgctctccaggcggagggcggtctcagacatggcggttgtcggcgcagtggccctctccacgcccacgccggcgctagcagagcagcctgacgtcaccaggtaccggaaggtggggagtggagtcatactcgaagatgtcgtcgagggggaggggcccgaggcgcgggagggcgacctggtgcagttcaactacgtgtgccgccgcgcgaacggctacttcgtgcacagcacggtggaccagttcagcggcgagagcaggccggtgacgctcgcgctcggcggtgaagagatgatccgaggcctgagagacgtcctgattgggatgaagtccggaggcaagaggagggctctgatccctcctgaagcaggctacgtcagcgagacactgaagcccataccggaggagtttggaccgaggcgaagcctgctgtcccacgccaaggagccgctggtgttcgaggttcagttgctcaaggtcctgtgatgctgcgttcatggtgccatcgtcgtggccagttcgttgtgaacttaaatgttcttcctttggaaacgaaatgccgttcacttcagaatggttctgctctggaatggaaaagcgaatggtttttttttttgtgtggatttcctcatgaccatttgcagatactgccgaaaacctgtcactcggcatagatgttcgtggcactgcagcagccagcagcagcagccgaatgtctccagtgctggggcctggaatggatttcctacttcttaatttaaggctctcttttatattgatagtttgatttaa

SEQ ID NO: 121145 - DNA, 991 bp, Zea Mays
tttgtaaaagtatcgttatccctttaccttctctccagccccacgcacaggttatgcagttcctcagaggttcctggaagctgcaacaatggagctcaagtcactcgccaatccattcccatgccggcgtccaccggacccgaagaagaagatccggccggcgcgccgcagcagggctccgtatctgaagtcgacctgcgcgctctccaggcggagggcggtctcagacatggcggttgtcggcgcagtggccctctccacgcccacgccggcgctagcagagcagcctgacgtcaccaggtaccggaaggtggggagtggagtcatactcgaagatgtcgtcgagggggaggggcccgaggcgcgggagggcgacctggtgcagttcaactacgtgtgccgccgcgcgaacggctacttcgtgcacagcacggtggaccagttcagcggcgagagcaggccggtgacgctcgcgctcggcggtgaagagatgatccgaggcctgagagacgtcctgattgggatgaagtccggaggcaagaggagggctctgatccctcctgaagcaggctacgtcagcgagacactgaagcccataccggaggagtttggaccgaggcgaagcctgctgtcccacgccaaggagccgctggtgttcgaggttcagttgctcaaggtcctgtgatgctgcgttcatggtgccatcgtcgtggccagttcgttgtgaacttaaatgttcttcctttggaaacgaaatgccgttcacttcagaatggttctgctctggaatggaaaagcgaatggtttttttttttgtgtggatttcctcatgaccatttgcagatactgccgaaaacctgtcactcggcatagatgttcgtggcactgcagcagccagcagcagcagccgaatgtctccagtgctggggcctggaatggatttcctacttcttaatttaaggctctcttttatattgatagtttgatttaa

SEQ ID NO: 121146 - DNA, 1244 bp, Zea Mays
aagaaaaagagaaacagaaagtagaaaataaggaaaacgggctggttatttgccacggcccacgagtgctcctatccgtacctattacttccaggctgggcctactgggcgctggccgatcgagtccgcctacgtctcccgtcgttcacctcccggctcccagtcccactgcctctctcgctctctcgtggcttcctggcggcgactgggcgagcgccgccgccctcttcgtcgggcccgcccttcaccggcgacgtgcatccctccgaatattgcgctcacataactgaataactgatattaggatgagtctctgtacaatagcacgacggctatgtctttcaaaaccatcctctggcagtcgtctttcagcaatttgggctcatctatacagcactgaggctgcaaaggacatgggtgctaagaagtacaagtaccccgatgtatacgacccctacgggcctatgccgccgccttcggagaaagtcgtggaactagctgatcgcatcgctgctctccctcccgaggagatcaaacagattgctccagcccttctcctcagactgaaccaggagccgccacaggcggtatctggccagggtttcggtttcggtgcccaggtcggctctggggcaggttctggaaaggctgagaagaaagccgagaagacagtcttcgacgtcaggttggagaagttcgacgctgctgcgaagatcaagatcatcaaggagatcaggacgtttacggatctggggctgaaggaggccaaggagctggtggagaaggccccagtcgttctgaagcaatcgctcacaaaggaggaagcggaagcgatcatagcaaagataaaggcagctggcggtgttgctgtgatggagtgaatgatagatgatcatctagacatcacgccttcttttttgtttcatatttttgttgccatgttcaggtatttgagattgcacattgcagtgccactgtgcagatggaggaaatagactagttcacagctacgttggtaacaagggagagatggagagtagagattagttgctatgatgatagtcatgacttgttctagaataagcagttctttgggctctacacagcttttctggtggagtgaatgtatgtggccatcagggccaacgatatgaatcttgtgctcttgttgtatctgctatgagttataaacacttcgcagttgcttacgtacctgatatcttacgtcagttccattgcagtgt

SEQ ID NO: 121147 - DNA, 2643 bp, Zea Mays
aagaaaaagagaaacagaaagtagaaaataaggaaaacgggctggttatttgccacggcccacgagtgctcctatccgtacctattacttccaggctgggcctactgggcgctggccgatcgagtccgcctacgtctcccgtcgttcacctcccggctcccagtcccactgcctctctcgctctctcgtggcttcctggcggcgactgggcgagcgccgccgccctcttcgtcgggcccgcccttcaccggcgacgtgcatccctccggagaagaatattgcgctcacataactgaataactgatattaggatgagtctctgtacaatagcacgacggctatgtctttcaaaaccatcctctggcagtcgtctttcagcaatttgggctcatctatacagcactgaggctgcaaaggacatgggtgctaagaagtacaagtaccccgatgtatacgacccctacgggcctatgccgccgccttcggagaaagtcgtggaactagctgatcgcatcgctgctctccctcccgaggagatcaaacagattgctccagcccttctcctcagactgaaccaggagccgccacaggcggtatctggccagggtttcggtttcggtgcccaggtcggctctggggcaggttctggaaaggctgagaagaaagccgagaagacagtcttcgacgtcaggttggagaagttcgacgctgctgcgaagatcaagatcatcaaggagatcaggacgtttacggatctggggctgaaggaggccaaggagctggtggagaaggccccagtcgttctgaagcaatcgctcacaaaggaggaagcggaagcgatcatagcaaagataaaggcagctggcggtgttgctgtgatggagtgaatgatagatgatcatctagacatcacgccttcttttttgtttcatatttttgttgccatgttcaggtatttgagattgcacattgcagtgccactgtgcagatggaggaaatagactagttcacagctacgttggtaacaagggagagatggagagtagagattagttgctatgatgatagtcatgacttgttctagaataagcagttctttgggctctacacagcttttctggtggagtgaatgtatgtggccatcagggccaacgatatgaatcttgtgctcttgttgtatctgctatgagttataaacacttcgcagttgcttacgtacctgatatcttacgtcagttccattgcagtgtaaaaagaaagttgtatatcttgtgtgcttggattaaatttccagtgacagaaacttggattgacgaagtgttcctggttacaaatttgtaaagctggatacgctttcaatgtcattcacatcaacagatcagtagcgcgaggacaagatcattgccttgcccttcaaatttcaccgcctcattccgtcctccatgcctgaaggaagaagcagaagtcagtcccgtcaccctggatggcgttccctccgctgtcctcttggatctccggcggtgcgccgggcttgaagacgaagactgcctgcgtgcccggcccggcgaagagccagtcgtgcacgtcccagatgacctgcaccggctcctcgtcgacgagcagcgtctcattgccccggaacttccactgaaggctcttgacatgcagcagcacggagccgtccaccgtgatccacatctccgggtccctgctggagcccgcggcggcgagcgcgtactcgatgacgatctcatgctccttgctcctcctggcgtcgagccgcgcgcgcgccgcgaagctgcggcggccgaacacgctctcccggcggcacaccagcacggcgtcctccagcgacgggcgggccttggtccgcttgtacgcgtccttcttgcagtcgccgagcaggaggacgacctcgtcgttgctgaccagcgcgacgtagtagccgccggcaggctccgggctgctgcccgccgccgcgaacttggccgagcgcaggtcccagaacatgtcgacgcggtcgccgccgcccacgtcgagcgccttgccgcccttcttgctccagaacggccacggcttcagctccaccctgtgggtgaccggcccgtcgccgtcgcccggccgttcgatggagacggtgaaggactggttgatgaggctcttgctccagacggcggtgacgtggcgcgcggcgccgttgatcttggcgaggaacaccgacaccgtggagcactgcgccgccgcggcgcccgccgtcctgccggtggcggagtcgtcgaaggacgtcgcggcattgctgcacccgacgcgctcctccatcttcctgtacggctcgcaggatttggatcgcttgtgcatgatcaaaaatcaatctcccgaatcgctacggattattaggaataagatcaaccgcgttagcatgcagcgttcgccccacgttcgtcttcgcgttcgtcaagcatgctgggagattggatcaagaactaggctcctccatatgctcgatcctcatgggctgcatgcgtgggcacgaacggcatgaatgaatgggcaattagaaaaacaataaacgaaacgcgaacatgaaatgaatccagaatccgagaaaagaaaaatggctggacaactcgacgtggtgaacat

SEQ ID NO: 121148 - DNA, 2059 bp, Zea Mays
ttaagatcaagagttcttcatgtcggccggcgtgcgcgtgcttccaggaagctgatcggcgcgcgctacttcaccaagaagggctacgcggcggccgggggcgcgcggaacgcgtcgacggagtgcccccgcgacacgtacgggcacggtaggcatacgctgtccacggcggggggctcgccggtgcccggcacgtcggtgttcgggctcggcaacggcacggcgaccggcggcgccctgcgcgcgcgcgtggcggggctaccgcatgtgcttcccgcccgtgaacggcagcgagtgcttcgacgcggacatcctggcggcgttcgacgccgccatccactacggcgtgcacggtgcacgtgctgtcgctctacctcggcggcgagccctcctcgggctacctggacgacggcgatgccgtcggctccttccacgccgcccgccgcggcgtcgccgtcgtctgttccgccggtaactcgttactcggcccccgcgcttgccaccgcctccaacctcgcgccgtggatcctcacctcgggcgccagcaccatggaccgcgagttcccgtcctacgtcgtctcttcgacgaccacaccaaggcagtaggatctcccctcgctaggccaccgcacggcggcatcacgaagaacaaggcacgcacgcacgcctcacgctcaccagaatcgtttcttgcaagtgagtatatatttttgcttattgtccatcgatcgatcgattgcccgcgcaggggcagagcctgtcgatgacgacgctgccggagaagacctcgtacccgttgatcgattcggtgaaggctgcagctgccaatgcaaccgctaaggagtaaggacgcgtacgtgcctgacagtctccaaacgaaggcgaagggcaaaatcgcggtgtgcctacgtgggatcaaccgccgggtggccaagggagaggcggtgaagcaggccggcggcgtcgggatggtgctcgccaacgacgcagcacgggcaacgagatcatctccgacgcgcacgtgctcccggccacatagatcaagtacagcgacggcctgctcctctactcctacctcaacgccaccaagaagccgaccggcttcatcacgaggccagcgactgtccttggcacgaagccggcgtcgttcatggccgccttctcgtcgcagggggccaacaccatcacccccgagatcctcaagattcttgactgatcgatccatccgctctcgttcggcggacgtacggcttgcattgatccatgtttctcgtgtgtgttgcaggcttgcagcccgacatcacggcgcccggggtgagcgtgatcgccgcgtggacccgcgccaactcgccgacggacctcgccttcgatcggcggcgcgtggccttcaactcggagtccgggcgtccggcacgtccatgtcgtacccgcacgtctccggcgtcgtcggtctcctccgcacgctccacccggaatggagccccgccgccatcaagtcggccgtcatgaccacagcgaccgagatggacgacaggggagagctcatcctgaacgcgtcgtccctgccgtcgagtcccttcggctacggcgccggccgcgccatgaacccgggcctcgtctacgacgtcggcgacgcggactaccccggcttcctctgcgcgctcaagtacaacgccacggcgatagccacgttcaacggcgcgccctacacgtgccccagcgaggcttcccggcgcgtcgcggacctcaactacccgtccatcaccgtcgtcaacgtcaccgcggcgggcgccacggcgcaggaccggcacgtacgtccttcattgccgagcccgctggcatcgccgtcgtggtgaccccttcggtgctcaatttcagcgccaagtgggaggagaaagggttcgaggtgcagttcacggtgaagaacgccgcgctcgccaaggactactcgttcggagcgctcgtctggacgaacgggaggcagttcgtgaggtcaaggcgtcagctttgattagttgagctcatggtgtagggttttgggaagcatgtgtagggtttt

SEQ ID NO: 121149 - DNA, 1044 bp, Zea Mays
ctgaattatcggctcgatagatctccgagccaacggcaacgtgtggtctcaaacattcgtggattcaaatagttatgggctagctagcaagccccaatctgggctagtttcggcccatctcaggcgaacagccatttcgaatacaagcaacggcccgtccaactattccgacatcacctcgctctgtcaaggaaaccctagggcccgccgccgccggccgccacacccgacacctctctgattctctccctctatataacctgacctgattttcagatcctgctcgaagctaccgccaccgccgccgattgctcgagctcgcttccttacgccggatctgcatctgcgtgctgatatcttcttttcctgttcgctcgttccgtgcttctctgttttttccctattcttctctcaactgtgcgagggattggttcgtagctcgggctgatgatgatttggatccgagaggatcttagcggatttcggtgaggcggatacttccgccgctgatcgccttatgttgttacacacactgaagcccccccttcgatgcgtctatcagatgggttcttttcccgtttcgtctctctcgctagatttctcactgggtggctgctgcaatgcgatgatgattcaatacatggttttggcagtggttaccccttgtggtcaccgtgagccgtcaaacctgaaaacgacttctctttccactgagcattgcgaaaaaaatgcagcgtattatcatcgggcaattgaatttatcatcaaatccacactgattctagcaaaaaaaaaacagataatttcacgtgagtctcaagtttttgaaaactcaatgcaggtttcatggaagtgactttacggcacctgccaattaccagtcgccccattttttaggaacgaacgcacctttcctcaacacgggtcgaatcggacatccaaggccaaacaaatccttgataaaacccgcattcagtatcgtctgacagcagagagcaacttcagcgccacccgttgcttcaccttgccgcctgaaaccacaac

SEQ ID NO: 121150 - DNA, 157 bp, Zea Mays
ggcgcgggttgcgcatacggtgggaggggaggggatgggatgggatggagagaaggagaagcagaggcgcgtccggcgccgagggcggtgggcagcctacgagagcagatgccccggtgaaacgcatgcgcgcggcgcgccaatgttcttcctcctg

SEQ ID NO: 121151 - DNA, 1532 bp, Zea Mays
acaggtatcaacccaagtgacctcctctctttcccggctccggtcgcgaatgcgcgatgcgttctctcctcctgccccgcaggtgcgccttcgcttcgcggcgcttcctctccgcgctcgccggcagcggggctagggccccgtgcgccggcgttgtgtacgggttcggggataacagccatggcgcggtgggccagcctccaccggctgcccacgcctacgtgcccacgcccgtgccctccctcccgccgtccgtgagcgccgtcgccgccggtcactaccactccctcgccgtatctgccgccggagaggtctgggcgtgggggcgcaacgacgagggccaactcggccgcgggcttcactccccgaggaatacttggagcaatgcagaactggtcagaggattggaaaatgttcaggttcaagctgtatctgcttcaggcgttgtttcagcagcaataggatctgatggttccctatgggtttgggggaggtcaaagcgtggccaacttggacttgggaaggacattgtagaggcagcagtgccatctaaagtgaaagctcttgctagctacgacattgttaaggtatcatttggatgggggcattccatggcactgacaaaggatggaaagctatttggttggggctactcggaaaatggaaggttaggagaaatgggccaaagcactagagctctttctgcagaagaatacataggaaaaacggtagacaagtattctagtgtaatgctggaggctgttgaaaagatggttgaagagaaaattcagagtgaagacgatatgcccattatctgggaaccatcccttgttcatgaagtgagtcgtcttgaggtgtctgatgtgtcttgtgggcttgaccattccttgattctctgctctgatggcattgtactgagcggtggtgacaacacttatggacagctgggtaggaaggccgggccacccgaattgcttcctgttggcatgagctataggccattctccatgtcggcaagtgtcggccactctcttgcactatgctacacaacgactgaaggcaccgctggtgtggaaactggcctcctctcatggggatggaactgcagctcccagctcggacggtccagccaagaggacatccctgcactggtggactctctgagcagggagaggctggtatcggcctcggctggtcgagtccattcggttgctctcacgtcgaaaggtgaagtttggacctggggatcgggcaggaatggcaggctaggcctgggcagctccattgatgaggcggcgccatgtcttgtagataccctggaaggggtggaagtcttgcaagttgcagcagggatggaccataatctcctcctggttgccgagtaggtataggttggtatgctggtgaactgaaagatggtactccatttgttcttaactagctgaatgctcgtgcgttgcaacggaaatatataataccagtatactacgataacttatatacaaaatgtgtgttataccgttataagaaaa

SEQ ID NO: 121152 - DNA, 855 bp, Zea Mays
tcattgtatggacaatttaacatacaatgcaagtagctgtacatttgttaatgttacttataggatcaacatagaaaaagttatgtcatcttaacctcataggaaacagactacaagaaaatgaaaaacggtgagaatctatcattctcaaattagcctttttggttattcttattttcaaatctctatctcccactctcatatggattctgtaattttccagctgatggcattgtactgagcggtggtgacaacacttatggacagctgggtaggaaggccgggccacccgaattgcttcctgttggcatgagctataggccattctccatgtcggcaagtgtcggccactctcttgcactatgctacacaacgactgaaggcaccgctggtgtggaaactggcctcctctcatggggatggaactgcagctcccagctcggacggtccagccaagaggacatccctgcactggtggactctctgagcagggagaggctggtatcggcctcggctggtcgagtccattcggttgctctcacgtcgaaaggtgaagtttggacctggggatcgggcaggaatggcaggctaggcctgggcagctccattgatgaggcggcgccatgtcttgtagataccctggaaggggtggaagtcttgcaagttgcagcagggatggaccataatctcctcctggttgccgagtaggtataggttggtatgctggtgaactgaaagatggtactccatttgttcttaactagctgaatgctcgtgcgttgcaacggaaatatataataccagtatactacgataacttatatacaaaatgtgtgttataccgttataagaaaa

SEQ ID NO: 121153 - DNA, 552 bp, Zea Mays
gagaacaagttggaggaggtgtgagtgtcttccttcgatccaggccgcagcgctcctctctcaaacggcccaagcccaaaaaggctgagatctcagagtagagcccactcgtcgggcgcgcacgcacgcacgccgtgaagacgacgacagagcccaagtcgaagcgagcggttttgccggcggcggcggcgaccggaggatggggatgggaggccggggcgtggtgggagacaggtggtcgcaacgcattctctggatctgcgccctgggcagcgccgtgagtaagcgcccgtacctaaaaaaaccctagcccctgctgctctgctcctttcattccgtcgcggtcttcccctaaccgcttctccccgttgccgcggtctcgctgtgctggtgcttccgtacaggcatctactttgtggcggtggagaggcaggcgcagaaccgcgcgcgggcggtagcggagggcctcaagggcctcgacggcgcaggggatgacgtgtgacagagctggacgctgccgttgcagaggggcctcctttgtttaggttatta

SEQ ID NO: 121154 - DNA, 557 bp, Zea Mays
gagaacaagttggaggaggtgtgagtgtcttccttcgatccaggccgcagcgctcctctctcaaacggcccaagcccaaaaaggctgagatctcagagtagagcccactcgtcgggcgcgcacgcacgcacgccgtgaagacgacgacagagcccaagtcgaagcgagcggttttgccggcggcggcggcgaccggaggatggggatgggaggccggggcgtggtgggagacaggtggtcgcaacgcattctctggatctgcgccctgggcagcgccgcatctactttgtggcggtggagaggcaggcgcagaaccgcgcgcgggcggtagcggagggcctcaagggcctcgacggcgcaggggatgacgtgtgacagagctggacgctgccgttgcagaggggcctcctttgtttaggttattaaaatgagccacttttttttttctgcttcacatgttcacagaacttcgtagcgttgcaataataatgtactaaacatctgtgcccggtctttgtagaaaggaatgttgatcaatgtgggtgttctcctatgtc

SEQ ID NO: 121155 - DNA, 577 bp, Zea Mays
gagaacaagttggaggaggtgtgagtgtcttccttcgatccaggccgcagcgctcctctctcaaacggcccaagcccaaaaaggctgagatctcagagtagagcccactcgtcgggcgcgcacgcacgcacgccgtgaagacgacgacagagcccaagtcgaagcgagcggttttgccggcggcggcggcgaccggaggatggggatgggaggccggggcgtggtgggagacaggtggtcgcaacgcattctctggatctgcgccctgggcagcgccgtgagcatctactttgtggcggtggagaggcaggcgcagaaccgcgcgcgggcggtagcggagggcctcaagggcctcgacggcgcaggggatgacgtgtgacagagctggacgctgccgttgcagaggggcctcctttgtttaggttattaaaatgagccacttttttttttctgcttcacatgttcacagaacttcgtagcgttgcaataataatgtactaaacatctgtgcccggtctttgtagaaaggaatgttgatcaatgtgggtgttctcctatgtcacttaatccatctgag

SEQ ID NO: 121156 - DNA, 3224 bp, Zea Mays
gagtgctagtcttcacggcggggttgttgtcgcttgtggccagccgccagcaccagcacaaggcgatcgagagtggtgaccaccagtaaactgcaaagtgcaaaccaaacaccacccacgagaaagcggaggagggagcaatggcggagccgagccagcagctgcggtcgttcgtggaggtgccggcgggctcccacttccccatccagaacctgcccttcggggtcttccgccggcggggggtgcaggcgcaggcgccgcgccccgcggtggccatcggggacttcgcgctcgacctcgccgccgtcgccgacgcggggctcttcgacgggcccgcgctctccggctccccgtgcttccaccaggagacgctcaacatgttcttggggatgggccggccggcgtggagggaggcgcgcgccacgctacagaaaatcctatcagccgacgagcccgtcttgcgtgacaacgaagcactgaggaacaagtgtctggtaccaatgagtgatatagagatggttctaccaatcacggttggaggttacacggacttcttttgttctgtgcaccatgcaatgaattgtggattcatcttccgagggccgcagactccagtcaatccaaattggttttatcttccagtaggatacaatgggcgagcatcatctatagttgtgtctggaaccaatgtcattaggcccaggggacaaggacatccaacaggaaactccgctccttattttggtccctcgcagaagcttgattttgagcttgagatggctgccattgttggtccagggaatgaattaggcaaacctattgatattaatgacgccgaagaacatatttttggcctaactttgatgaatgattggagtgccagagatatccaggcttgggagactatacctcttggacctttccttgggaaaagcttcagtaccacggtatcaccatggattgttaccctagatgctttgaagcctttcatgtgtgatgctcctaagcaggaacccgagcctttaccgtacttagccgaaaagaatcacataaattatgacattcctcttgaagcctggattaagccgaaagatcaaaatgacgcatcaattgtcacaaaaactaatttcaagcatctgtattggacgctgacacagcagctagcacaccacaccatcaacggatgcaacatgaggccgggggatatatttgcgactggcacactgagtggacctgaaccggactccctcgggtgtctgctggagctgacatggaacgggcagaaggagataccggtggggaatttgacccgcaagttcctagaagatggagatgaagtcatcttgacaggatgttgcaagggtgaaggctacaacattggttttggaacctgcaccgggaaggttctgccggcacttccctgagccaacacgtcttggcatcagttctccggagtctcaacgatctcagctatcagagagttgtctcaacggtctcaactatcaaagagttcatgccgctatctagcaaggctgctatgtaactgaacaatatgaatatgggttgttttcctgggctgttgaagatgaggagactgatgctctgttgtgcaataaaaccgcttcaccattttatacgatgtctccctctatttaagagttgggttgtgttcttaaacttgtacattgcaatgtcctctgtggcatgaaatttagatcatgtatatattttgaatggaattatagatccacactagtagaatgaataagaaagttcgcagattgccagaggcctaaaaaaagactggcgagagtgagaaagagagaggtgacgaagagtgagtgatggatgcaagtaggttcagacgcaggcgagctccttcgccatgccaatggacttgccgatggcgttcttgcagacggacatggtcttgttgtcggacctgttgtacttgatgtcgacgttgatgagctgcacgccctggcagggcaggttgttggcgcagttgagcgtgatggcctccggcgtgttggaggtgccgtggatgttcttgaagacgacgtcgttgacggccaccttggaggcgccggacttgacgcagatgttgttggggcagtacttctggtctatgatgatggggtaggagacgttgtccatggtgacgtcctggtacaggaacttggtggccttgagcgacgacttggagtcctcgtacgacttgatgcgcaggccgttggtggtgccggcgagcgtgcaccccgtcaccttcacgtcctccacgtccttctcgtccttgtaccgccccaggctgccgacgctgatgccgtggcccgggccgcacttgacgcccttcacgcggatggtcttgctcccggggccgatggagacgcagtcgtcgccgacggcgatggtggtgccgctgatggtcacgttgctcgagtcgccgatgtggatgccgtccgtgttggggctgttgccgggggccttgatcgtcaccttgtcgatcaccacgttcttgctcccgaagatgttcatgtggaagaacttgctgttcagcagcgtgatgccgcggatctgggcgttcgtcacgaagtccagcaccaggctctgcacgcgttcgccgttgcgatttacatcacatcaccttccgaagcaggggacagacagagaaagaagaagcacgtacgttggggaggattttgcagttgtaggaacgctggcactcgttcttgttccacaccagggctccctgcccgtcgatggtgccgtggccgttgatggacaggttgtcgacgttctggatctcgatccagttcctcttgtacgcgttgaggtcgccggtgccgagcaggttgccgtcgaggcggatgatgatggaggacttgcaggggcccaccaggtccagcgcgcccgtcaggtagttgcccttggggatgacgatcttctgctgccccgtcgcctcgcacgcgtgcttccacgccttgagcaccatcggggtgctgtccgacttgccgtcgcccttggcgcccagctgcgcgatgtccagcgagccagcgggcaccgacggcgcgcctcccacagccttcgccttcgcctccgcctccgccgccaccgcgcgcgcggcaggcgacaccgcggcgaacaccagcagagcggccacggctgccttcatcgccgcactgctgatgaacgccatcgatatgtctcgtgctgtagggtgcgtg

SEQ ID NO: 121157 - DNA, 2981 bp, Zea Mays
gaatgggtgttggtatcggttgcagcgtggaaatagttaattgaggatctaaggaaactggtctggtagtgagtagtgactatagagtagaaaataactggtgtccttggtgctgcatgcaggagacgctcaacatgttcttggggatgggccggccggcgtggagggaggcgcgcgccacgctacagaaaatcctatcagccgacgagcccgtcttgcgtgacaacgaagcactgaggaacaagtgtctggtaccaatgagtgatatagagatggttctaccaatcacggttggaggttacacggacttcttttgttctgtgcaccatgcaatgaattgtggattcatcttccgagggccgcagactccagtcaatccaaattggttttatcttccagtaggatacaatgggcgagcatcatctatagttgtgtctggaaccaatgtcattaggcccaggggacaaggacatccaacaggaaactccgctccttattttggtccctcgcagaagcttgattttgagcttgagatggctgccattgttggtccagggaatgaattaggcaaacctattgatattaatgacgccgaagaacatatttttggcctaactttgatgaatgattggagtgccagagatatccaggcttgggagactatacctcttggacctttccttgggaaaagcttcagtaccacggtatcaccatggattgttaccctagatgctttgaagcctttcatgtgtgatgctcctaagcaggaacccgagcctttaccgtacttagccgaaaagaatcacataaattatgacattcctcttgaagcctggattaagccgaaagatcaaaatgacgcatcaattgtcacaaaaactaatttcaagcatctgtattggacgctgacacagcagctagcacaccacaccatcaacggatgcaacatgaggccgggggatatatttgcgactggcacactgagtggacctgaaccggactccctcgggtgtctgctggagctgacatggaacgggcagaaggagataccggtggggaatttgacccgcaagttcctagaagatggagatgaagtcatcttgacaggatgttgcaagggtgaaggctacaacattggttttggaacctgcaccgggaaggttctgccggcacttccctgagccaacacgtcttggcatcagttctccggagtctcaacgatctcagctatcagagagttgtctcaacggtctcaactatcaaagagttcatgccgctatctagcaaggctgctatgtaactgaacaatatgaatatgggttgttttcctgggctgttgaagatgaggagactgatgctctgttgtgcaataaaaccgcttcaccattttatacgatgtctccctctatttaagagttgggttgtgttcttaaacttgtacattgcaatgtcctctgtggcatgaaatttagatcatgtatatattttgaatggaattatagatccacactagtagaatgaataagaaagttcgcagattgccagaggcctaaaaaaagactggcgagagtgagaaagagagaggtgacgaagagtgagtgatggatgcaagtaggttcagacgcaggcgagctccttcgccatgccaatggacttgccgatggcgttcttgcagacggacatggtcttgttgtcggacctgttgtacttgatgtcgacgttgatgagctgcacgccctggcagggcaggttgttggcgcagttgagcgtgatggcctccggcgtgttggaggtgccgtggatgttcttgaagacgacgtcgttgacggccaccttggaggcgccggacttgacgcagatgttgttggggcagtacttctggtctatgatgatggggtaggagacgttgtccatggtgacgtcctggtacaggaacttggtggccttgagcgacgacttggagtcctcgtacgacttgatgcgcaggccgttggtggtgccggcgagcgtgcaccccgtcaccttcacgtcctccacgtccttctcgtccttgtaccgccccaggctgccgacgctgatgccgtggcccgggccgcacttgacgcccttcacgcggatggtcttgctcccggggccgatggagacgcagtcgtcgccgacggcgatggtggtgccgctgatggtcacgttgctcgagtcgccgatgtggatgccgtccgtgttggggctgttgccgggggccttgatcgtcaccttgtcgatcaccacgttcttgctcccgaagatgttcatgtggaagaacttgctgttcagcagcgtgatgccgcggatctgggcgttcgtcacgaagtccagcaccaggctctgcacgcgttcgccgttgcgatttacatcacatcaccttccgaagcaggggacagacagagaaagaagaagcacgtacgttggggaggattttgcagttgtaggaacgctggcactcgttcttgttccacaccagggctccctgcccgtcgatggtgccgtggccgttgatggacaggttgtcgacgttctggatctcgatccagttcctcttgtacgcgttgaggtcgccggtgccgagcaggttgccgtcgaggcggatgatgatggaggacttgcaggggcccaccaggtccagcgcgcccgtcaggtagttgcccttggggatgacgatcttctgctgccccgtcgcctcgcacgcgtgcttccacgccttgagcaccatcggggtgctgtccgacttgccgtcgcccttggcgcccagctgcgcgatgtccagcgagccagcgggcaccgacggcgcgcctcccacagccttcgccttcgcctccgcctccgccgccaccgcgcgcgcggcaggcgacaccgcggcgaacaccagcagagcggccacggctgccttcatcgccgcactgctgatgaacgccatcgatatgtctcgtgctgtagggtgcgtg

SEQ ID NO: 121158 - DNA, 2301 bp, Zea Mays
cactttaaatactaacgtgtgctcctgcaccgttcgagaaaaagaaatactaatgtgtgttaataggatcccaactattcaaccatataatgttttgccatagcacataacagtgctggcacatttcttgtaaccaatttttgcacaggtattggacgctgacacagcagctagcacaccacaccatcaacggatgcaacatgaggccgggggatatatttgcgactggcacactgagtggacctgtatggagtaaacattgcaacttctatacccatagtatgaatcttactttgacatgtgccatttcaggaaccggactccctcgggtgtctgctggagctgacatggaacgggcagaaggagataccggtggggaatttgacccgcaagttcctagaagatggagatgaagtcatcttgacaggatgttgcaagggtgaaggctacaacattggttttggaacctgcaccgggaaggttctgccggcacttccctgagccaacacgtcttggcatcagttctccggagtctcaacgatctcagctatcagagagttgtctcaacggtctcaactatcaaagagttcatgccgctatctagcaaggctgctatgtaactgaacaatatgaatatgggttgttttcctgggctgttgaagatgaggagactgatgctctgttgtgcaataaaaccgcttcaccattttatacgatgtctccctctatttaagagttgggttgtgttcttaaacttgtacattgcaatgtcctctgtggcatgaaatttagatcatgtatatattttgaatggaattatagatccacactagtagaatgaataagaaagttcgcagattgccagaggcctaaaaaaagactggcgagagtgagaaagagagaggtgacgaagagtgagtgatggatgcaagtaggttcagacgcaggcgagctccttcgccatgccaatggacttgccgatggcgttcttgcagacggacatggtcttgttgtcggacctgttgtacttgatgtcgacgttgatgagctgcacgccctggcagggcaggttgttggcgcagttgagcgtgatggcctccggcgtgttggaggtgccgtggatgttcttgaagacgacgtcgttgacggccaccttggaggcgccggacttgacgcagatgttgttggggcagtacttctggtctatgatgatggggtaggagacgttgtccatggtgacgtcctggtacaggaacttggtggccttgagcgacgacttggagtcctcgtacgacttgatgcgcaggccgttggtggtgccggcgagcgtgcaccccgtcaccttcacgtcctccacgtccttctcgtccttgtaccgccccaggctgccgacgctgatgccgtggcccgggccgcacttgacgcccttcacgcggatggtcttgctcccggggccgatggagacgcagtcgtcgccgacggcgatggtggtgccgctgatggtcacgttgctcgagtcgccgatgtggatgccgtccgtgttggggctgttgccgggggccttgatcgtcaccttgtcgatcaccacgttcttgctcccgaagatgttcatgtggaagaacttgctgttcagcagcgtgatgccgcggatctgggcgttcgtcacgaagtccagcaccaggctctgcacgcgttcgccgttgcgatttacatcacatcaccttccgaagcaggggacagacagagaaagaagaagcacgtacgttggggaggattttgcagttgtaggaacgctggcactcgttcttgttccacaccagggctccctgcccgtcgatggtgccgtggccgttgatggacaggttgtcgacgttctggatctcgatccagttcctcttgtacgcgttgaggtcgccggtgccgagcaggttgccgtcgaggcggatgatgatggaggacttgcaggggcccaccaggtccagcgcgcccgtcaggtagttgcccttggggatgacgatcttctgctgccccgtcgcctcgcacgcgtgcttccacgccttgagcaccatcggggtgctgtccgacttgccgtcgcccttggcgcccagctgcgcgatgtccagcgagccagcgggcaccgacggcgcgcctcccacagccttcgccttcgcctccgcctccgccgccaccgcgcgcgcggcaggcgacaccgcggcgaacaccagcagagcggccacggctgccttcatcgccgcactgctgatgaacgccatcgatatgtctcgtgctgtagggtgcgtg

SEQ ID NO: 121159 - DNA, 2502 bp, Zea Mays
gtcagccacgttctgatttcgaagaggggcaaaaaagtccaagcagatgatcttttctctgttgatgtatcgaatagctcttcaatggcattttgtctgtaaacagcgtgtgagaatggcgaactagcgaagaccttgtacataatggcatttgggcgaaacccaagtttcataatggcatgattccaaatttctcctctccgcgacgggcgcccatggccatggcagacgaaacccttgcgccctcgtcgtcgtcggcaaagccctaaactttagtccacctccatttcggaaccttagccgggcgttcctgcgccgctgccatgggctgcagtcgccatgtccgttttgtctcctccggcgtcaagctaccgtccgcgtccgcgccatccccgttcccggcgcccgctcccgcgctcctctctgcggcgctcccgttcgcgcacatcggccgcgccatcgacgccgccgcgcgccgcctgggcgcatgcctgccccgcgtcccggttgcacgggccgacacggctccgcccccgccgcggaggcacgggaaggacggcggaggggccgaggagcgggtgctgatcagcgaggttgcggtgcggggaaaggacggggagccactggagcggcccgagctggaggccgaggccgcggcggcgctgcgcgcgtgccgccccaatgccgcgctcaccgtgcgggaggtgcaggaggacgtgcaccgcatcgtcgagagcggactcttccgatcgtgtatgcccgtcgctgtcgacacccgtgatggcattcgcctcgtcttcgaggtggagccgaaccaagacttccatgggctggtatgcgagggtgccaacttgctaccgtccaagttcctggaagatgcattttgtgttcgccatggaaaaattattaacattaggcatctggatcaagtgatcaagtccgtcaatggatggtatcaggagcgtggcctaactgggttggtctcatatgctgagatactttctggagggattctgaggctggaggtttcagaagctgaggttaataacattagcattcgctttctagacaggaagactggtgaaccaacacttggaaaaacacagccggaaaccatccttcggcagcttaccaccaggaaagggcaggcttacaatagggcacaagtgaaaagggatgtagaaacaatacttactatgggaataatggaggatgttacgataattccacaaccagttggagattctagtaaagtggaccttgtcatgaatcttgttgaacgcccttcgggtggtttctctgctggtggcggaatttcaagtgggataacaaatggacccctttctggacttattggcagctttgcgtattcacatcggaatgtttttgggaggaacaagaaattaaatctctctttggaaagggggcaaatcgattcaatatttagattgaactttactgacccttggattgatggtgacaacaagagaacctccagaactgttatggttcagaactctaggactcctggaacacttgtccatggtggtgatcatcctgaccatgggcctataacaattggacgtgttactgctggcttggaatatagtcgaccattcagacccaagtggagtgggacacttggcttaatttttcagcatgctggcgctcgtgatgataaagggaatcccgccatcagggatttctataacagccaattaactgccagtggacatgattatgatgatacattgctagctaaatttgaaagtatctacacagattctggggaccatagctctgcaatgtttgttttcagcgttgagcaaggtctccctgttcttcctgagtggctaagcttcaacagagtgacaacacgtttgaggcagggctatgaaattggtcctgctaggcttcttctaagtgcctctggaggtcacgtggagggaaattttccacctcatgaagcatttgcaattggtgggacaaatagtgtaaggggatacgaagaaggtgctgttggctctgggcgttcttatgctgtaggtagtggtgaagtgtcatgccgcatggtaaacttctttctcctcccaaccttactggcattttgtagttgtcaaatgggctccacgtggaagtatgccaaaatccagacacaattgtatggtaatttacctcagaatgctgtattggcaacaagggtatacatatctacataattcattataactggtactatcttagtatgatttgcaatttaagtaaaatttctttctcagatttagtttaatatatagctaactcagaaaggaaataaacaggtgggcatcctgtcacactgttcaagactcgaatacagattagatatggagcattttgtgcgtgtgtgtgcgtgcacccacactttttttatctgtatgcatgtatggaaccttctactgataggcgcctgacccagaagtaggaccccaaattaaaacacaatagagcagaccagtgctg

SEQ ID NO: 121160 - DNA, 2625 bp, Zea Mays
gtcagccacgttctgatttcgaagaggggcaaaaaagtccaagcagatgatcttttctctgttgatgtatcgaatagctcttcaatggcattttgtctgtaaacagcgtgtgagaatggcgaactagcgaagaccttgtacataatggcatttgggcgaaacccaagtttcataatggcatgattccaaatttctcctctccgcgacgggcgcccatggccatggcagacgaaacccttgcgccctcgtcgtcgtcggcaaagccctaaactttagtccacctccatttcggaaccttagccgggcgttcctgcgccgctgccatgggctgcagtcgccatgtccgttttgtctcctccggcgtcaagctaccgtccgcgtccgcgccatccccgttcccggcgcccgctcccgcgctcctctctgcggcgctcccgttcgcgcacatcggccgcgccatcgacgccgccgcgcgccgcctgggcgcatgcctgccccgcgtcccggttgcacgggccgacacggctccgcccccgccgcggaggcacgggaaggacggcggaggggccgaggagcgggtgctgatcagcgaggttgcggtgcggggaaaggacggggagccactggagcggcccgagctggaggccgaggccgcggcggcgctgcgcgcgtgccgccccaatgccgcgctcaccgtgcgggaggtgcaggaggacgtgcaccgcatcgtcgagagcggactcttccgatcgtgtatgcccgtcgctgtcgacacccgtgatggcattcgcctcgtcttcgaggtggagccgaaccaagacttccatgggctggtatgcgagggtgccaacttgctaccgtccaagttcctggaagatgcattttgtgttcgccatggaaaaattattaacattaggcatctggatcaagtgatcaagtccgtcaatggatggtatcaggagcgtggcctaactgggttggtctcatatgctgagatactttctggagggattctgaggctggaggtttcagaagctgaggttaataacattagcattcgctttctagacaggaagactggtgaaccaacacttggaaaaacacagccggaaaccatccttcggcagcttaccaccaggaaagggcaggcttacaatagggcacaagtgaaaagggatgtagaaacaatacttactatgggaataatggaggatgttacgataattccacaaccagttggagattctagtaaagtggaccttgtcatgaatcttgttgaacgcccttcgggtggtttctctgctggtggcggaatttcaagtgggataacaaatggacccctttctggacttattggcagctttgcgtattcacatcggaatgtttttgggaggaacaagaaattaaatctctctttggaaagggggcaaatcgattcaatatttagattgaactttactgacccttggattgatggtgacaacaagagaacctccagaactgttatggttcagaactctaggactcctggaacacttgtccatggtggtgatcatcctgaccatgggcctataacaattggacgtgttactgctggcttggaatatagtcgaccattcagacccaagtggagtgggacacttggcttaatttttcagcatgctggcgctcgtgatgataaagggaatcccgccatcagggatttctataacagccaattaactgccagtggacatgattatgatgatacattgctagctaaatttgaaagtatctacacagattctggggaccatagctctgcaatgtttgttttcagcgttgagcaaggtctccctgttcttcctgagtggctaagcttcaacagagtgacaacacgtttgaggcagggctatgaaattggtcctgctaggcttcttctaagtgcctctggaggtcacgtggagggaaattttccacctcatgaagcatttgcaattggtgggacaaatagtgtaaggggatacgaagaaggtgctgttggctctgggcgttcttatgctgtaggtagtggtgaagtgtcatgccgcatgtttgggccactggaaggcgtggtctttggcgactatggtagcgatcttggttctggtcctaaagttcctggtgacccagccggagctcgtggaaagccaggtagtggctatggctacggtgttggcgtccgcgtggactcccctctgggacctctgcggcttgagtacgccttcaatgataggcaagcaaggagatttcactttggtgttggctacagaaattgacatgtatattgattacattcagattcagccttgttcttcttagcattttgggctggtagaagatagtgccatgccttccaatttttggcgtttatcaaagcaaattttgtttagatcagatttctttttttctgtaacatatagtttccttctccacttctgtcgagtgttctccagctagagaaattagatggccccctgtaacgccctgaatttggggtaagattttttcttcttttctctcaccaaattcgggtgttactctcttttctctttccccgtttgctccttctccccaatttcaaactagtatagcgacaggtgtccg

SEQ ID NO: 121161 - DNA, 1496 bp, Zea Mays
gatgttaacatacaaaataggaacgaaggtctcatatgctgagatactttctggagggattctgaggctggaggtttcagaagctgaggttaataacattagcattcgctttctagacaggaagactggtgaaccaacacttggaaaaacacagccggaaaccatccttcggcagcttaccaccaggaaagggcaggcttacaatagggcacaagtgaaaagggatgtagaaacaatacttactatgggaataatggaggatgttacgataattccacaaccagttggagattctagtaaagtggaccttgtcatgaatcttgttgaacgcccttcgggtggtttctctgctggtggcggaatttcaagtgggataacaaatggacccctttctggacttattggcagctttgcgtattcacatcggaatgtttttgggaggaacaagaaattaaatctctctttggaaagggggcaaatcgattcaatatttagattgaactttactgacccttggattgatggtgacaacaagagaacctccagaactgttatggttcagaactctaggactcctggaacacttgtccatggtggtgatcatcctgaccatgggcctataacaattggacgtgttactgctggcttggaatatagtcgaccattcagacccaagtggagtgggacacttggcttaatttttcagcatgctggcgctcgtgatgataaagggaatcccgccatcagggatttctataacagccaattaactgccagtggacatgattatgatgatacattgctagctaaatttgaaagtatctacacagattctggggaccatagctctgcaatgtttgttttcagcgttgagcaaggtctccctgttcttcctgagtggctaagcttcaacagagtgacaacacgtttgaggcagggctatgaaattggtcctgctaggcttcttctaagtgcctctggaggtcacgtggagggaaattttccacctcatgaagcatttgcaattggtgggacaaatagtgtaaggggatacgaagaaggtgctgttggctctgggcgttcttatgctgtaggtagtggtgaagtgtcatgccgcatgtttgggccactggaaggcgtggtctttggcgactatggtagcgatcttggttctggtcctaaagttcctggtgacccagccggagctcgtggaaagccaggtagtggctatggctacggtgttggcgtccgcgtggactcccctctgggacctctgcggcttgagtacgccttcaatgataggcaagcaaggagatttcactttggtgttggctacagaaattgacatgtatattgattacattcagattcagccttgttcttcttagcattttgggctggtagaagatagtgccatgccttccaatttttggcgtttatcaaagcaaattttgtttagatcagatttctttttttctgtaacatatagtttcctt

SEQ ID NO: 121162 - DNA, 671 bp, Zea Mays
atgagtgggatggggtcagtcttggaatgtgaatatctagcaatgaatattttagcaaaagcaagatgaatattcaacgtggggtggggtcagtcttggaatgtgaggctgccatttgattacttaatgttcttgttctgaatgcagtttgggccactggaaggcgtggtctttggcgactatggtagcgatcttggttctggtcctaaagttcctggtgacccagccggagctcgtggaaagccaggtagtggctatggctacggtgttggcgtccgcgtggactcccctctgggacctctgcggcttgagtacgccttcaatgataggcaagcaaggagatttcactttggtgttggctacagaaattgacatgtatattgattacattcagattcagccttgttcttcttagcattttgggctggtagaagatagtgccatgccttccaatttttggcgtttatcaaagcaaattttgtttagatcagatttctttttttctgtaacatatagtttccttctccacttctgtcgagtgttctccagctagagaaattagatggccccctgtaacgccctgaatttggggtaagattttttcttcttttctctcaccaaattcgggtgttactctcttttctctttccccgtttgctccttctccccaa

SEQ ID NO: 121163 - DNA, 1312 bp, Zea Mays
accaacgaagtgtccccggagctggatgccagggccctcccacccgccgtagggagttcccggcgccgtcaggccggcctgcttgcggaagctccagacgaggcggtcgacgtcgaggaggagcaggtactccaggttggtctgctgggctcgccagtacatgctgcccggctccagccgcacgtcgtgcagggacgcctcggagaggaacgccccagccgcgaccccgggccgcgcggagccaccgccgccccggagctcgcggtagagcattagccagtcgaacgcctcctcgcgccgcagcgcccggcgcggcatgagcgacatccaggtggactcgtcggtcggggtgaggtgctgctcgcgtccgtggcggtggtggtggatgatgggctggagcaccgttgccggcggccctggccgcagctgcgccgccgcgcgctccgtgtgcgaggtcaatcccgggaacgcgttcgtgcacgatttaccttccgcgccgcggaagccggcggccagcagcatcacgaccacgatccctaccgccgtcgccgccggcatgcttggcgctcgcgccatggccccctttcttgcaggaacaagaaccgctcgatatcccccacccactgctcagtcggtggatacccaccgcattagcggaagccttcaacccctccagacctttaataccccatgacaagcgcgaagaggcgaagcggacgaaacatcaagaaatggcaacaacgcatcgtcgagtcaggcaagtattgcgcggaaagccattggcaatacagccgaggattggagaagacgcccttgttcctctcctcgcaagctgatagtgataggtgaagtggaccgactacggactgccaggtagtgaacgactgacacttgtgccgagatttttcacccttctctcctttcgatcaacgggaacgggaaatggtcgagaaatacgcatagcggagggggagacgattttataggggattcttggaccccaagaccaaggaccgcaagccaagtgccgaggccatcattaggggtcctcctgcatctgcctgcccattccaatccatcatcggccactgctcgacgcttgtttgcttgcacgccaccaccgcaacgccaacggctacggcggcgagtggcgcgtccgcgtcacgtcgcacgccacataggtcttttctcttcctcagctcggcggcgaggaccctataccagaatgtatgattgccacttgccggagcttgcaacagaagccgcggagagcgggtagatgcgtcaggttacaacaaacttggcaggccgt

SEQ ID NO: 121164 - DNA, 1675 bp, Zea Mays
gacccgcatcgcagatctcccccttccctccacgcctctcgcgtcgccgcgatggccgacgaggccctggaccagccgccggacgcgaccccttctccgactccggcgacgccgccggtacccgccaccccgtcccccacggtgctgctccgcccgcggcgggaggcattcgagcacgggctcttgcccatccccaagctcatcttcccggagggtacgctggcgcagaccctcgcccagctcaaggagaagctcgctgcctcggccccggacggacgcgtgcgcgccgcggccctggcggaggcgttgcagatcccgcaggagcaggcggcgctcgccctcgccacgctcgcggctgtgctcccggcagaggaccccgcgctcggcgacggcgccgtggatggttctgccgcggacatccgcgacatgctgctcttcctctacatccagtcttacaaacgtctcgtcccgcggagtgcgcacaaggactcgcccgtcgtggcggacgtctggccgtccacctccgcgttcgatgggtacctctccgcactctccccgatccagcttgttcgcagtaacagccgtcgttttatgccttctcaagctgatgaagaaattcatcagttgtcctatctgcaaaagcatatggcgaatattcttactctcttggcagattctgttgagggtgatggtgatgattcactggtgttgacaatggagacttttgagcaccttggatttctagttcaattctcagaaggaacttctttaagccaggctgctacattttttgcatgctcagatccagacatgcctgatgtgcctgtccctgctgctcaggttcttgattggatgtcacagaaaatagctttttcactggaatattctgctgagaggtccgcagcaaaggaaagcaaccagcaaaccatgtctgatcttgatgtgaccatggctgaggccaatacaagtcacccacggaacagtacaccaagtgccaatcctgcatactacagaaatgtaacatttgtggagggcttttccaaaacctctgttgtcaagcatgcatctgatgtcaaagggaattctataaaggttttgaactgccatgattctgttatctacatattagcaccgctgaagtatgctactgtgtacggttgttctgatgctacagttgttcttggtgctgttggtaaggtagtaaaagtggagcattgtgaaagagtgcatatcattgcagctgcaaaacggatttgtattgccaactgccgggaatgcatcttctacataggagtaaatcaccaacctcttgtgttgggggacaaccataaattacaagttgctccattcaatacgtgctacccacaactgcatgaacatatgatacaagtggctgtcgatcccagtgtcaacaaatgggaccaaccttttgtgttgggagttgttgatccacatgattcattatcccatcctgctggagtttcagatgttaaagctgaatcagcaacatgtctggatcctgatctattcaccaattttttggtatgttaaaaaaacgctttaggcttagttctgtaaaacaatacaagcacagatccaaccagtcttctaccttaaagtttcttttatctctgttctcgatgcggtatgaaaacattgtttcctgcgttgctca

SEQ ID NO: 121165 - DNA, 2174 bp, Zea Mays
gacccgcatcgcagatctcccccttccctccacgcctctcgcgtcgccgcgatggccgacgaggccctggaccagccgccggacgcgaccccttctccgactccggcgacgccgccggtacccgccaccccgtcccccacggtgctgctccgcccgcggcgggaggcattcgagcacgggctcttgcccatccccaagctcatcttcccggagggtacgctggcgcagaccctcgcccagctcaaggagaagctcgctgcctcggccccggacggacgcgtgcgcgccgcggccctggcggaggcgttgcagatcccgcaggagcaggcggcgctcgccctcgccacgctcgcggctgtgctcccggcagaggaccccgcgctcggcgacggcgccgtggatggttctgccgcggacatccgcgacatgctgctcttcctctacatccagtcttacaaacgtctcgtcccgcggagtgcgcacaaggactcgcccgtcgtggcggacgtctggccgtccacctccgcgttcgatgggtacctctccgcactctccccgatccagcttgttcgcagtaacagccgtcgttttatgccttctcaagctgatgaagaaattcatcagttgtcctatctgcaaaagcatatggcgaatattcttactctcttggcagattctgttgagggtgatggtgatgattcactggtgttgacaatggagacttttgagcaccttggatttctagttcaattctcagaaggaacttctttaagccaggctgctacattttttgcatgctcagatccagacatgcctgatgtgcctgtccctgctgctcaggttcttgattggatgtcacagaaaatagctttttcactggaatattctgctgagaggtccgcagcaaaggaaagcaaccagcaaaccatgtctgatcttgatgtgaccatggctgaggccaatacaagtcacccacggaacagtacaccaagtgccaatcctgcatactacagaaatgtaacatttgtggagggcttttccaaaacctctgttgtcaagcatgcatctgatgtcaaagggaattctataaaggttttgaactgccatgattctgttatctacatattagcaccgctgaagtatgctactgtgtacggttgttctgatgctacagttgttcttggtgctgttggtaaggtagtaaaagtggagcattgtgaaagagtgcatatcattgcagctgcaaaacggatttgtattgccaactgccgggaatgcatcttctacataggagtaaatcaccaacctcttgtgttgggggacaaccataaattacaagttgctccattcaatacgtgctacccacaactgcatgaacatatgatacaagtggctgtcgatcccagtgtcaacaaatgggaccaaccttttgtgttgggagttgttgatccacatgattcattatcccatcctgctggagtttcagatgttaaagctgaatcagcaacatgtctggatcctgatctattcaccaattttttgattcctagttggtttggggatgaaaggcaagggactacaaaccgcaatcctttcccactgcctgaaatttatgggacatcccaaagcaaaaagcgttctgctctggaagatatccaaaagatgattcgggagctgcagcttgatgagaaccggaaaagggaattggcaactgcccttcacgttcagttcaaggattggttatacgcttcaggcaatatccgccagctctactgtctacagggcgattaacgatgggatttgcaagactgactacccttttgccgactcctactccaaaacattcgacaattgtcgaaagctgaccttcctttccctgggagagaggattcccacccgcgcagaaggatgtgaagatgtactgttacctacttttttacagattcatttgggtatattccctttgctgcgagttggaggtactaattaggatgtaatctccaagcctactcattttttttggcccttgataacgtccacgagtatgtaatagggactggtgaatcatacgttgtaaacatttcttcatcccgttttgctaaatggctcgtcatgtcaaccctctattggatcaactgtattgtgctcatccttatagacatgcttgtttgcaa

SEQ ID NO: 121166 - DNA, 1327 bp, Zea Mays
tttttttttctcgaaagcgcaggggaactgcgcctttaattatattaagaagaggagaaacataatacattgcttgtggtcccttttgccagagtacatgccttgctataagagttgaagacctgtatcaatgagaaacactggtgaaattgaatcctgaacccatctctactgtttgtcctcctgtagctctcctctgatcccccactccctcctatttcagtatcttccaagtccgtcccagtagttagttgcattggcaaaactttaacaagtcatagtaaattagtaacgttttttatttattgtgaaattttttacaagtctactttgaatttttatgctgtcaggtagtaaaagtggagcattgtgaaagagtgcatatcattgcagctgcaaaacggatttgtattgccaactgccgggaatgcatcttctacataggagtaaatcaccaacctcttgtgttgggggacaaccataaattacaagttgctccattcaatacgtgctacccacaactgcatgaacatatgatacaagtggctgtcgatcccagtgtcaacaaatgggaccaaccttttgtgttgggagttgttgatccacatgattcattatcccatcctgctggagtttcagatgttaaagctgaatcagcaacatgtctggatcctgatctattcaccaattttttgattcctagttggtttggggatgaaaggcaagggactacaaaccgcaatcctttcccactgcctgaaatttatgggacatcccaaagcaaaaagcgttctgctctggaagatatccaaaagatgattcgggagctgcagcttgatgagaaccggaaaagggaattggcaactgcccttcacgttcagttcaaggattggttatacgcttcaggcaatatccgccagctctactgtctacagggcgattaacgatgggatttgcaagactgactacccttttgccgactcctactccaaaacattcgacaattgtcgaaagctgaccttcctttccctgggagagaggattcccacccgcgcagaaggatgtgaagatgtactgttacctacttttttacagattcatttgggtatattccctttgctgcgagttggaggtactaattaggatgtaatctccaagcctactcattttttttggcccttgataacgtccacgagtatgtaatagggactggtgaatcatacgttgtaaacatttcttcatcccgttttgctaaatggctcgtcatgtcaaccctctattggatcaactgtattgtgctcatccttatagacatgcttgtttgcaa

SEQ ID NO: 121167 - DNA, 1123 bp, Zea Mays
tttttttttctcgaaagcgcaggggaactgcgcctttaattatattaagaagaggagaaacataatacattgcttgtggtcccttttgccagagtacatgccttgctataagagttgaagacctgtatcaatgagaaacactggtgaaattgaatcctgaacccatctctactgtttgtcctcctgtagctctcctctgatcccccactccctcctatttcagtatcttccaagtccgtcccagtagttagttgcattggcaaaactttaacaagtcatagtaaattagtaacgttttttatttattgtgaaattttttacaagtctactttgaatttttatgctgtcaggtagtaaaagtggagcattgtgaaagagtgcatatcattgcagctgcaaaacggatttgtattgccaactgccgggaatgcatcttctacataggagtaaatcaccaacctcttgtgttgggggacaaccataaattacaaattcctagttggtttggggatgaaaggcaagggactacaaaccgcaatcctttcccactgcctgaaatttatgggacatcccaaagcaaaaagcgttctgctctggaagatatccaaaagatgattcgggagctgcagcttgatgagaaccggaaaagggaattggcaactgcccttcacgttcagttcaaggattggttatacgcttcaggcaatatccgccagctctactgtctacagggcgattaacgatgggatttgcaagactgactacccttttgccgactcctactccaaaacattcgacaattgtcgaaagctgaccttcctttccctgggagagaggattcccacccgcgcagaaggatgtgaagatgtactgttacctacttttttacagattcatttgggtatattccctttgctgcgagttggaggtactaattaggatgtaatctccaagcctactcattttttttggcccttgataacgtccacgagtatgtaatagggactggtgaatcatacgttgtaaacatttcttcatcccgttttgctaaatggctcgtcatgtcaaccctctattggatcaactgtattgtgctcatccttatagacatgcttgtttgcaa

SEQ ID NO: 121168 - DNA, 926 bp, Zea Mays
ttgaactcagtgatgtgacttacactacattagtgcttaataattaatatcttctcatggtatggtaaatttctatatctgtatcaacaggttgctccattcaatacgtgctacccacaactgcatgaacatatgatacaagtggctgtcgatcccagtgtcaacaaatgggaccaaccttttgtgttgggagttgttgatccacatgattcattatcccatcctgctggagtttcagatgttaaagctgaatcagcaacatgtctggatcctgatctattcaccaattttttgattcctagttggtttggggatgaaaggcaagggactacaaaccgcaatcctttcccactgcctgaaatttatgggacatcccaaagcaaaaagcgttctgctctggaagatatccaaaagatgattcgggagctgcagcttgatgagaaccggaaaagggaattggcaactgcccttcacgttcagttcaaggattggttatacgcttcaggcaatatccgccagctctactgtctacagggcgattaacgatgggatttgcaagactgactacccttttgccgactcctactccaaaacattcgacaattgtcgaaagctgaccttcctttccctgggagagaggattcccacccgcgcagaaggatgtgaagatgtactgttacctacttttttacagattcatttgggtatattccctttgctgcgagttggaggtactaattaggatgtaatctccaagcctactcattttttttggcccttgataacgtccacgagtatgtaatagggactggtgaatcatacgttgtaaacatttcttcatcccgttttgctaaatggctcgtcatgtcaaccctctattggatcaactgtattgtgctcatccttatagacatgcttgtttgcaa

SEQ ID NO: 121169 - DNA, 234 bp, Zea Mays
atggcgttgacgatgaggttgccggcgtcgaagagcgagtttcccaagctgaagatggcccgtgtacaacttcttgctcctagccgtgtcacaggtggcaggccgcgccaccacgcgcaatgggatagtgacggcggcggagacatggggaccggggagaggagtagaggagtctggaagtcttgcgatgttaggagacgccggaagctcgattcaagtgtgtccgttggataa

SEQ ID NO: 121170 - DNA, 619 bp, Zea Mays
caccacagagcagccacttggatccggtgctcagcggaacagctagctatagcctgtagctagcagctagcttcagtcacaggccggacggtcggctcacacacagctagccgccgccgccgctagcttagccaccagtagtccgatctgatctacaggcaaggggcaactagctagctagccgcgcgccggcgccatgatgaacctgaacctgaagcagcctctggtgctgcccgcgcaccacagcaatgtcgtcggctcgcgcctgtcgtcgtcgtcgccctcggcagccgccgccagcaggaggaccggcggcggcgtgtcctcccggtccggctcccggcggcacgtgcggctgccgaggatcagctgcagcgccaccgaggaggtcagcggcgccgtgtcgtccgtcaccgtggagaggatgctcacggtgacggcgtcggtggaggcgtcgccggccatcgggcagatgtacttccagcgcgccgtcgacgacatcggcgacctcctcggcaagacgctgctgctcgagctcgtcagctccgagctcgacgcaagtgagtatagtcactcatactgtcggccgtatggatcggatgggcgggcgccatgcatg

SEQ ID NO: 121171 - DNA, 3098 bp, Zea Mays
cacagagcagccacttggatccggtgctcagcggaacagctagctatagcctgtagctagcagctagcttcagtcacaggccggacggtcggctcacacacagctagccgccgccgccgctagcttagccaccagtagtccgatctgatctacaggcaaggggcaactagctagctagccgcgcgccggcgccatgatgaacctgaacctgaagcagcctctggtgctgcccgcgcaccacagcaatgtcgtcggctcgcgcctgtcgtcgtcgtcgccctcggcagccgccgccagcaggaggaccggcggcggcgtgtcctcccggtccggctcccggcggcacgtgcggctgccgaggatcagctgcagcgccaccgaggaggtcagcggcgccgtgtcgtccgtcaccgtggagaggatgctcacggtgacggcgtcggtggaggcgtcgccggccatcgggcagatgtacttccagcgcgccgtcgacgacatcggcgacctcctcggcaagacgctgctgctcgagctcgtcagctccgagctcgacgcaaagtcgggcgtggagaagacgcgggtgacggcgtacgcgcacaagacgctgcgggagggccactacgaggcggagttcaaggtgccggcgtcgttcgggccggtgggcgcggtgctggtggagaacgagcaccacaaggaggtcttcatcaaggagatcaagctcgtcaccggcggcgacagcagcaccgccgtcaccttcgactgcaactcctgggtgcactccaagttcgacaacccggagaagcgcatcttcttcaccctcaagtcatacctgccgtccgacacgcccaaggggctggaggacctgaggaagaaggacctgcaggcgctgcgcggcgacgggcacggcgagcgcaaggtgttcgagcgcgtctacgactacgacgtgtacaacgacctgggcgacccggacaagaacccggcccaccagcggcccgtgctgggcggcaacaagcagtacccatacccgcgccgctgccgcaccggccgccccaggaccaagaaggaccccgagacggagatgcgcgagggccacaactacgtgccccgcgacgagcagttctcggaggtgaagcagctcacgttcggggccaccacgctgcgctccggcctgcacgcgctgctgccggcgctccgcccgctgctcatcaacaagaaggatctgcgcttcccgcacttccccgccatcgacgacctcttcagcgacggcatcccgctgccggcgcagaccgggttcgacgccatccgcaccgtcgtcccgcgcatggtcaagctggtggaggacaccaccgaccacgtcctccgcttcgaggtgccggagatgatagagagggaccggttctcgtggttcaaggacgaggagttcgcgaggcagacgatcgcggggctcaacccgctgtgcatccagctgctgactgagttccccatcaagagcaagctggacccggaggtgtacgggccagcggagtccgccatcaccaaggagatcctggagaagcagatgaacggcgcgctgaccgtggagcaggcgctggcggcgaagcggctgttcatcctggactaccacgacgtgttcctgccctacgtgcacaaggtgcgggagctgcaggacgcgacgctctacgcctcgcgcaccatcttcttcctgacggacctgggcacgctgatgccgctggccatcgagctgacgcggcccaagtcgccgacgcggccgcagtggaagcgggcgttcacgcacgggcccgacgccaccgacgcctggctgtggaagctggccaaggcgcacgtgctgacccacgacacggggtaccaccagctggtgagccactggctgcgcacgcactgctgcgtggagccctacatcatcgccgccaaccggcagctgagccggctgcacccggtgtaccgcctgctgcacccgcacttccgctacaccatggagatcaacgcgctggccagggaggcgctcatcaacgccgacggcatcatcgaggagtccttctggccgggcaagtacgccgtcgagctcagctccgtggcgtacggcgcgacgtggcagttcgacacggaggcgctgcccaacgacctcatcaagcgcgggctggccgtgcgcggggaggacggggagctggagctcaccatcaaggactacccctacgcccacgacgggctcctggtctgggactccatcaggcagtgggcgtccgagtacgtcaacgtctactacaagtccgacgaggccgtggccgccgaccccgagctgagggcgttctgggacgaggtgcgcaacgtggggcacggcgacaagaaggacgagccgtggtggcccgtgctggacacccgcgacagcctggtggagacgctgaccaccatcatgtgggtcacctccggccaccactcggccgtcaacttcggccagtaccacttcgccggctacttccccaaccggccgaccaccatccggaagaacatgccggtggaggagggcgggccgggcgaggagatggagaagttcctcaagcagccggagacgacgctgctggacatgctgcccacgcagatgcaggccatcaaggtcatgacgacgctggacatcctctcgtcgcactcgcccgacgaggagtacatgggggagttcgcggagccgtcgtggctggcggagcccatggtgaaggcggcgttcgagaagttcggcggcaggatgaaggagatcgaggggttcatcgacgagtgcaacaacaacctggacctcaagaaccgctgcggcgccgggatcgtgccgtacgagctgctcaagcccttctccaagccgggagtcaccgggaggggcatccccagcagcatctccatctgatccatcctcagcatgcattagtccaattaaatcggggggtgtactattattgcatgcagaggctgcttgtcgaataaaacgtactatatgtacgattgtattgtacatgtgtgtcaatgcaacaagaggcacgtttgagactttgagttaataccaattaaactagtaagatggcattattaacaga

SEQ ID NO: 121172 - DNA, 1844 bp, Zea Mays
acagagcagccacttggatccggtgctcagcggaacagctagctatagcctgtagctagcagctagcttcagtcacaggccggacggtcggctcacacacagctagccgccgccgccgctagcttagccaccagtagtccgatctgatctacaggcaaggggcaactagctagctagccgcgcgccggcgccatgatgaacctgaacctgaagcagcctctggtgctgcccgcgcaccacagcaatgtcgtcggctcgcgcctgtcgtcgtcgtcgccctcggcagccgccgccagcaggaggaccggcggcggcgtgtcctcccggtccggctcccggcggcacgtgcggctgccgaggatcagctgcagcgccaccgaggaggtcagcggcgccgtgtcgtccgtcaccgtggagaggatgctcacggtgacggcgtcggtggaggcgtcgccggccatcgggcagatgtacttccagcgcgccgtcgacgacatcggcgacctcctcggcaagacgctgctgctcgagctcgtcagctccgagctcgacgcaaagtcgggcgtggagaagacgcgggtgacggcgtacgcgcacaagacgctgcgggagggccactacgaggcggagttcaaggtgccggcgtcgttcgggccggtgggcgcggtgctggtggagaacgagcaccacaaggaggtcttcatcaaggagatcaagctcgtcaccggcggcgacagcagcaccgccgtcaccttcgactgcaactcctgggtgcactccaagttcgacaacccggagaagcgcatcttcttcaccctcaagtcatacctgccgtccgacacgcccaaggggctggaggacctgaggaagaaggacctgcaggcgctgcgcggcgacgggcacggcgagcgcaaggtgttcgagcgcgtctacgactacgacgtgtacaacgacctgggcgacccggacaagaacccggcccaccagcggcccgtgctgggcggcaacaagcagtacccatacccgcgccgctgccgcaccggccgccccaggaccaagaaggaccccgagacggagatgcgcgagggccacaactacgtgccccgcgacgagcagttctcggaggtgaagcagctcacgttcggggccaccacgctgcgctccggcctgcacgcgctgctgccggcgctccgcccgctgctcatcaacaagaaggatctgcgcttcccgcacttccccgccatcgacgacctcttcagcgacggcatcccgctgccggcgcagaccgggttcgacgccatccgcaccgtcgtcccgcgcatggtcaagctggtggaggacaccaccgaccacgtcctccgcttcgaggtgccggagatgatagagagtaagctagctagcagacgcactcatctcaggactgcttgttatcttaatcttaaaaaaaataaatgatttgctttgctaggggaccggttctcgtggttcaaggacgaggagttcgcgaggcagacgatcgcggggctcaacccgctgtgcatccagctgctgactgagttccccatcaagagcaagctggacccggaggtgtacgggccagcggagtccgccatcaccaaggagatcctggagaagcagatgaacggcgcgctgaccgtggagcaggcgctggcggcgaagcggctgttcatcctggactaccacgacgtgttcctgccctacgtgcacaaggtgcgggagctgcaggacgcgacgctctacgcctcgcgcaccatcttcttcctgacggacctgggcacgctgatgccgctggccatcgagctgacgcggcccaagtcgccgac

SEQ ID NO: 121173 - DNA, 3055 bp, Zea Mays
cacttggatccggtgctcagcggaacagctagctatagcctgtagctagcagctagcttcagtcacaggccggacggtcggctcacacacagctagccgccgccgccgctagcttagccaccagtagtccgatctgatctacaggcaaggggcaactagctagctagccgcgcgccggcgccatgatgaacctgaacctgaagcagcctctggtgctgcccgcgcaccacagcaatgtcgtcggctcgcgcctgtcgtcgtcgtccggctcccggcggcacgtgcggctgccgaggatcagctgcagcgccaccgaggaggtcagcggcgccgtgtcgtccgtcaccgtggagaggatgctcacggtgacggcgtcggtggaggcgtcgccggccatcgggcagatgtacttccagcgcgccgtcgacgacatcggcgacctcctcggcaagacgctgctgctcgagctcgtcagctccgagctcgacgcaaagtcgggcgtggagaagacgcgggtgacggcgtacgcgcacaagacgctgcgggagggccactacgaggcggagttcaaggtgccggcgtcgttcgggccggtgggcgcggtgctggtggagaacgagcaccacaaggaggtcttcatcaaggagatcaagctcgtcaccggcggcgacagcagcaccgccgtcaccttcgactgcaactcctgggtgcactccaagttcgacaacccggagaagcgcatcttcttcaccctcaagtcatacctgccgtccgacacgcccaaggggctggaggacctgaggaagaaggacctgcaggcgctgcgcggcgacgggcacggcgagcgcaaggtgttcgagcgcgtctacgactacgacgtgtacaacgacctgggcgacccggacaagaacccggcccaccagcggcccgtgctgggcggcaacaagcagtacccatacccgcgccgctgccgcaccggccgccccaggaccaagaaggaccccgagacggagatgcgcgagggccacaactacgtgccccgcgacgagcagttctcggaggtgaagcagctcacgttcggggccaccacgctgcgctccggcctgcacgcgctgctgccggcgctccgcccgctgctcatcaacaagaaggatctgcgcttcccgcacttccccgccatcgacgacctcttcagcgacggcatcccgctgccggcgcagaccgggttcgacgccatccgcaccgtcgtcccgcgcatggtcaagctggtggaggacaccaccgaccacgtcctccgcttcgaggtgccggagatgatagagagggaccggttctcgtggttcaaggacgaggagttcgcgaggcagacgatcgcggggctcaacccgctgtgcatccagctgctgactgagttccccatcaagagcaagctggacccggaggtgtacgggccagcggagtccgccatcaccaaggagatcctggagaagcagatgaacggcgcgctgaccgtggagcaggcgctggcggcgaagcggctgttcatcctggactaccacgacgtgttcctgccctacgtgcacaaggtgcgggagctgcaggacgcgacgctctacgcctcgcgcaccatcttcttcctgacggacctgggcacgctgatgccgctggccatcgagctgacgcggcccaagtcgccgacgcggccgcagtggaagcgggcgttcacgcacgggcccgacgccaccgacgcctggctgtggaagctggccaaggcgcacgtgctgacccacgacacggggtaccaccagctggtgagccactggctgcgcacgcactgctgcgtggagccctacatcatcgccgccaaccggcagctgagccggctgcacccggtgtaccgcctgctgcacccgcacttccgctacaccatggagatcaacgcgctggccagggaggcgctcatcaacgccgacggcatcatcgaggagtccttctggccgggcaagtacgccgtcgagctcagctccgtggcgtacggcgcgacgtggcagttcgacacggaggcgctgcccaacgacctcatcaagcgcgggctggccgtgcgcggggaggacggggagctggagctcaccatcaaggactacccctacgcccacgacgggctcctggtctgggactccatcaggcagtgggcgtccgagtacgtcaacgtctactacaagtccgacgaggccgtggccgccgaccccgagctgagggcgttctgggacgaggtgcgcaacgtggggcacggcgacaagaaggacgagccgtggtggcccgtgctggacacccgcgacagcctggtggagacgctgaccaccatcatgtgggtcacctccggccaccactcggccgtcaacttcggccagtaccacttcgccggctacttccccaaccggccgaccaccatccggaagaacatgccggtggaggagggcgggccgggcgaggagatggagaagttcctcaagcagccggagacgacgctgctggacatgctgcccacgcagatgcaggccatcaaggtcatgacgacgctggacatcctctcgtcgcactcgcccgacgaggagtacatgggggagttcgcggagccgtcgtggctggcggagcccatggtgaaggcggcgttcgagaagttcggcggcaggatgaaggagatcgaggggttcatcgacgagtgcaacaacaacctggacctcaagaaccgctgcggcgccgggatcgtgccgtacgagctgctcaagcccttctccaagccgggagtcaccgggaggggcatccccagcagcatctccatctgatccatcctcagcatgcattagtccaattaaatcggggggtgtactattattgcatgcagaggctgcttgtcgaataaaacgtactatatgtacgattgtattgtacatgtgtgtcaatgcaacaagaggcacgtttgagactttgagttaataccaattaaactagtaagatggcattattaacagagcctttatacattttgaaacaa

SEQ ID NO: 121174 - DNA, 2675 bp, Zea Mays
cagtagtccgatctgatctacaggcaaggggcaactagctagctagccgcgcgccggcgccatgatgaacctgaacctgaagcagcctctggtgctgcccgcgcaccacagcaatgtcgtcggcgacctcctcggcaagacgctgctgctcgagctcgtcagctccgagctcgacgcaaagtcgggcgtggagaagacgcgggtgacggcgtacgcgcacaagacgctgcgggagggccactacgaggcggagttcaaggtgccggcgtcgttcgggccggtgggcgcggtgctggtggagaacgagcaccacaaggaggtcttcatcaaggagatcaagctcgtcaccggcggcgacagcagcaccgccgtcaccttcgactgcaactcctgggtgcactccaagttcgacaacccggagaagcgcatcttcttcaccctcaagtcatacctgccgtccgacacgcccaaggggctggaggacctgaggaagaaggacctgcaggcgctgcgcggcgacgggcacggcgagcgcaaggtgttcgagcgcgtctacgactacgacgtgtacaacgacctgggcgacccggacaagaacccggcccaccagcggcccgtgctgggcggcaacaagcagtacccatacccgcgccgctgccgcaccggccgccccaggaccaagaaggaccccgagacggagatgcgcgagggccacaactacgtgccccgcgacgagcagttctcggaggtgaagcagctcacgttcggggccaccacgctgcgctccggcctgcacgcgctgctgccggcgctccgcccgctgctcatcaacaagaaggatctgcgcttcccgcacttccccgccatcgacgacctcttcagcgacggcatcccgctgccggcgcagaccgggttcgacgccatccgcaccgtcgtcccgcgcatggtcaagctggtggaggacaccaccgaccacgtcctccgcttcgaggtgccggagatgatagagagggaccggttctcgtggttcaaggacgaggagttcgcgaggcagacgatcgcggggctcaacccgctgtgcatccagctgctgactgagttccccatcaagagcaagctggacccggaggtgtacgggccagcggagtccgccatcaccaaggagatcctggagaagcagatgaacggcgcgctgaccgtggagcaggcgctggcggcgaagcggctgttcatcctggactaccacgacgtgttcctgccctacgtgcacaaggtgcgggagctgcaggacgcgacgctctacgcctcgcgcaccatcttcttcctgacggacctgggcacgctgatgccgctggccatcgagctgacgcggcccaagtcgccgacgcggccgcagtggaagcgggcgttcacgcacgggcccgacgccaccgacgcctggctgtggaagctggccaaggcgcacgtgctgacccacgacacggggtaccaccagctggtgagccactggctgcgcacgcactgctgcgtggagccctacatcatcgccgccaaccggcagctgagccggctgcacccggtgtaccgcctgctgcacccgcacttccgctacaccatggagatcaacgcgctggccagggaggcgctcatcaacgccgacggcatcatcgaggagtccttctggccgggcaagtacgccgtcgagctcagctccgtggcgtacggcgcgacgtggcagttcgacacggaggcgctgcccaacgacctcatcaagcgcgggctggccgtgcgcggggaggacggggagctggagctcaccatcaaggactacccctacgcccacgacgggctcctggtctgggactccatcaggcagtgggcgtccgagtacgtcaacgtctactacaagtccgacgaggccgtggccgccgaccccgagctgagggcgttctgggacgaggtgcgcaacgtggggcacggcgacaagaaggacgagccgtggtggcccgtgctggacacccgcgacagcctggtggagacgctgaccaccatcatgtgggtcacctccggccaccactcggccgtcaacttcggccagtaccacttcgccggctacttccccaaccggccgaccaccatccggaagaacatgccggtggaggagggcgggccgggcgaggagatggagaagttcctcaagcagccggagacgacgctgctggacatgctgcccacgcagatgcaggccatcaaggtcatgacgacgctggacatcctctcgtcgcactcgcccgacgaggagtacatgggggagttcgcggagccgtcgtggctggcggagcccatggtgaaggcggcgttcgagaagttcggcggcaggatgaaggagatcgaggggttcatcgacgagtgcaacaacaacctggacctcaagaaccgctgcggcgccgggatcgtgccgtacgagctgctcaagcccttctccaagccgggagtcaccgggaggggcatccccagcagcatctccatctgatccatcctcagcatgcattagtccaattaaatcggggggtgtactattattgcatgcagaggctgcttgtcgaataaaacgtactatatgtacgattgtattgtacatgtgtgtcaatgcaacaagaggcacgtttgagact

SEQ ID NO: 121175 - DNA, 2544 bp, Zea Mays
atggacctcctcgacgcgaggcaccgccacacgccggattcgagctcctccccacatgccgcctccgacatgggtctcccgctcgccggggctgcctaccagccctacgtctctgagctcctctccttctccatcgagcgcctccacaaggagccggagcttctgagggtcgacgcggagcgagtgcggcggcagatgcaggaggtggcggtggagaactacggcgccttcatcgccgcctccgaggcgctctccttcgtccgcgcgcagctcgagaacttcgatggccacctcgaggccatggtgagaacatgcacacaaataacccggagattgcccttgcccagacttgctggaaatttggcactgaaccaactatgcagtcattttgaagcctatagagatatgcccaaaataacaaagctgagagagaaattcaagaacatcaagaaaaatcccttagttgaattatttgtctcccgcggagtgatgatgggtaatttgtatctggtctatactgcccagctggtagttatctcattgcataaatttatgagtgcaagcattagcagctctattgagtggagctccattgtcctcctcgtatggattatgtccactcagttaggatatactcttgcaggaagtagacctagcagcctatccaattacagctacaagagccctatactgaagaaggctaggatggagatagaagctactctttctggaactgccactctgtgttgtagtcaagtaggttgcaatctgctatccaaaagaacacttttgcaagcgcttatttctgacgtgcatttgtttcattcttatcttaatgtgaggcttatgtgtgttttggaattgagttccaagaaggccactaagaggaacaaacctaccaaaggaagaaataggttccgaaagaacattggctttggtttcaagacacccaaggaagctattaaagtcacggtaaccgtcggcggccccgtgtgcgctgctggggaggacgtcgcgccggagaaaatgtcggaggaggacgaggagatcgtggttgcccccgctcccgtcactaccgcgcccctcgaccacagccggagtgggtgtttctttagtagcttgaacttggttacagctgtagcaaatctgatgggcaccaagtttgacttcttggcctactcgtcgacgctcaagcatttggtacttggtcaggtctacttattatacggttctttcttgttcaagtatccttgtcttcatggtggcaacatgattattctggtcaccatggaaaactatactctttacatatttggatacggacagacaagcagagaaacaccagttggtcaagatgttagctggtttccagctcgtgcgcaggagttttgtagtgtgggtgatgatgcttgtcttattctgtgggatgctcgaactggcactgccccagctgttaagtggtcacctgacagagcatctgtttttggaagttctgcagaagatagtttcttaaacgtgtgggatcatgagaacgtaaccactcatacactgaactatcttgtcttttctgaaggaaccatgcacaacatcggtgaagtgtctctgatgatggcgagagcactggtggaggtggaacactgcaggtttattgatatggcagaatccttgtgccagaaacgtgctttggaggctttccgtttggacccgacgaagtggggagcgaataatgtgcaacctctatccggttcgcccgccaacttccatgtatacactgcactcttgaagccacatgaaaggatcatggctttggatcttcctcacggtggacatctttctcatggttaccagcgtgggcgcacactagctgttcgccgaaactcctgtggagtttactatgatggcttccaagtctgtcattcccttggaggaggcactggatctggaatgggcatgcttctcatttcaaagatcggagaggagtaccctgatcggatgatgctgacattttctgtctttccctcgcccgaggtgtcagacactgttgttgagccatacaatgcaaccatgtctgtccatcggctggttgagaacgctgatgaatgcatggttcttaacaacgaagcactttatgacatttgcttccgaactctgaagctgacgacccctagctttggagacttgaaccacttgatcagtgcaacgatgagcggtgtcacttgctgcctctgcttcctaggacagctgaactatgacatgcacaagcttgcagtcaacctgatctcgttccctcggctctacttcttcatgatcggctttgcgccactcacctcgcgtggctcgcagcagtaccgtgcgctcaccgtctctgagctaacccagcagatgtgggatgccaagaacatgatgtgcgttgctaacccacgcctctgccatgttccgtggatgagcactaaggaggttgatgagcaaatgattaatgtccagaacaagaactcgtcctactttgtggagtggatccccaacaacgtcaagtccagcttatga

SEQ ID NO: 121176 - DNA, 1870 bp, Zea Mays
atcacacttataaaatataaagggactgaataggaggaattgttggagaggaggtcaaagaggaggaataaaagatatatttaaaaatgaatagaagatacaaatagcgggagatgagagggagacatttaaaaatgaaaagaaggcacaaatacggagagacgagaggggtaattgttgaaatcggtaactataggagcgggtcgccgcaatgcgcacggcagccctcttcctcgggaagatttcaaatccccgcggcctcttccatcttctgctcggcacggcactccggctgcccgaaaaatttcgcacatcccagattcccgcccgctctggttcgcgccctcgtctggttcccttgccaacccggtcattcaacgtcgcagccaccccgcgcggctagggctgggactcgaggcctagggtttggctgtaagtttggtaacacgatggcgggggccgcgggggagagcagcggcgagcggcaggggacggtggagcggcggatgctgcggtcgcggtaccacgccgtgaagaacatcatcagcgatgagcgggatgagatgtcgagggcggattcggacaggttcacagccatcatccagcaggtggattgcctacacgagctcgtgcagaggcctagggagcaaatagcggatgcagaagctctgcttggcattacaaacactttggtaacttcggtgaggtcccactcaagtgaaggaatcagcccttctgatttcataacagctttactcaagaagtttgggcagcaagggaatcatgatgatgagtctgtctcattacgatggggtgatcttgggctttctgtttcacatatcttcaggcctgtgcctggatgctgtaccatgcttggtcctatgaatactgaagtaaagcaacggaaagttgtagctgttggtaggaaacggactgcacggccaacagaaaatacctgtcctgaagagcttgctgagtcttcagaggaagtaaagacagacactgacaggaatgtcttagttatgtttgatatcctcaggcgaaagaagagcgcaaaattggaaaaccttgtgttgaataggctttcctttgcccaaacagttgaaaatgtttttgcactatctttcttagtgaaagatggtagggtggaaataactgtagatgatagcgggcatatagtacggccaaggaatgcacctgctgctagcgctatagcctcaggagaagtctcatacagtcattttgtttttagatttgacttcaaggactggaagcttatgaaagaagttgttacagagggagaagagctgttgccacacaggacttcccagagcaatctttgcaacgaagaaaacgaccaaccaaatctggaggcacgtgcgcaaataacgcccatcaggaaactcacccggaaccgaggattggtcttgcaggatcatgtagtcgaggaaactcctgaagagaaccaagcgtctaagcgcaggcgccttttcaggaatcaagattgacctagcaattgcttggcatgagtagtgtaggcaggcaacctggcttgtgttgtatgcaaaaaattgcctgagcctgagtaacgtgtctttcactaggtctgttgtgccatgctgtcttgttcttggcacagctcgtgcttatctgaacttccagttgtgccagcggagtagagctgtaattataaattgtttgaagttctggtcacatcttgcaactacagaatggtgtttgtagggctgagtgtaactagctagcttggctcggtctggtctgggtcattaactcatttattatcatggcaagatgtgcctcgggtcagcttgttaggctgtcatagcttactcatcctatctcttatttt

SEQ ID NO: 121177 - DNA, 665 bp, Zea Mays
ggtgtgggaatagattgtttagtcttatttgtatgcatgaacttcacataatctgaattttcctcctctttttattccaaccacagcttatgaaagaagttgttacagagggagaagagctgttgccacacaggacttcccagagcaatctttgcaacgaagaaaacgaccaaccaaatctggaggcacgtgcgcaaataacgcccatcaggaaactcacccggaaccgaggattggtcttgcaggatcatgtagtcgaggaaactcctgaagagaaccaagcgtctaagcgcaggcgccttttcaggaatcaagattgacctagcaattgcttggcatgagtagtgtaggcaggcaacctggcttgtgttgtatgcaaaaaattgcctgagcctgagtaacgtgtctttcactaggtctgttgtgccatgctgtcttgttcttggcacagctcgtgcttatctgaacttccagttgtgccagcggagtagagctgtaattataaattgtttgaagttctggtcacatcttgcaactacagaatggtgtttgtagggctgagtgtaactagctagcttggctcggtctggtctgggtcattaactcatttattatcatggcaagatgtgcctcgggtcagcttgttaggctgtcatagcttactc

SEQ ID NO: 121178 - DNA, 885 bp, Zea Mays
gcagaaaacagatttagttggccaacagcgaaggactaaagaagtcagcaaatttagtagtaggcctgaagccagcaattcattagcgtagacctaaagaagccaacaaatccatcatcagaggccaagttttgagttacattgactaatgactatgaggtaagaaacagggcatggatctcaagcagcggcaggcttgcgcagctcactctcaccatgggcaaagtggcatttgccgccataagagcatgacccttttgcgaagttctcacacatcttggtcttgaagttgcttcctatgccactgatgctaacaatcagctcgatgaccatagcactagcgttcctgatctgatcaaaggtgccctcaaactcaatgtttttcaagctggtgtctgattcatggcggtcctcctgaatgaccaccttggcccctgtgacggaagatatttgctttatgttagctccacccttcccaatgatgccacctgcaagggacgcatcgacactgatcttggccgtggcataagcgccgaagctagctggagtggccaaaccagggttggccataggtggaggtgcaaaataaccggttggtggtggtccgatggggggtggcatatagttgtccatcatagacttgccaagctcactttcaccatgtgcaaagtggcatctgtccccccatttgcatccctctgcagtgttgtacttgttgcacaagcgagtcttcacgatgggtgtaggtggcccatccatcatcattcctccaggaggtgcgattgttgcgccacccaggttggtcatttctgaaacggcccggtagtcaccagggaagtaatggacaaaatggcagccctcaccaaagggacaaccataagtact

SEQ ID NO: 121179 - DNA, 836 bp, Zea Mays
ctcctcgcccgcccccgtacgtgtccatctctccactcctttcctttccttgttggtaagagcaaggcgagacgtaacgtaatccggccatggcgttcttccggggcctcaccgcggtctcgagactgcgatcccgcatggcgcaggaggccaccacgctgggtggtgtgagatggctgcagatgcagagcgcgtccgacctcgatcttaagtcccagctgcgggaactgattccggaacagcaggaccgcttaaagaagcttaaatcagagcatgggaaggttcagcttggaaacataactgtggatatggtccttggtggaatgagagggatcattggaatgctttgggagacatccctagtcgacccagaggagggtattcgttttaggggcctctcaattccagagtgccgaaaagtgctgccaacagcagttgagggtggtgaacctttgcctgagggtctcctctggcttcttttgacagggaaggtcccaaccaaagatcaagttgatgctctatcaaaagaattgcttgcgcgctcaactgtcccaggtattttgatcacaccgctggctacttgtgttattgttttgaccaattaaatctacaaatcatctgaatgaactgatgctgatgtctccctgttctaaagttcaaaggtagtcacagattgatagagaggtctatatgattctgtcagtatgattgtgttaatgtttatatgctttatcttgctactctctagcggctcataattaatatccttgcagctcatgtctataaggtaatagatgctctcccagtaactgcacatcctatgacacaatttaccg

SEQ ID NO: 121180 - DNA, 1830 bp, Zea Mays
ctcctcgcccgcccccgtacgtgtccatctctccactcctttcctttccttgttggtaagagcaaggcgagacgtaacgtaatccggccatggcgttcttccggggcctcaccgcggtctcgagactgcgatcccgcatggcgcaggaggccaccacgctgggtggtgtgagatggctgcagatgcagagcgcgtccgacctcgatcttaagtcccagctgcgggaactgattccggaacagcaggaccgcttaaagaagcttaaatcagagcatgggaaggttcagcttggaaacataactgtggatatggtccttggtggaatgagagggatcattggaatgctttgggagacatccctagtcgacccagaggagggtattcgttttaggggcctctcaattccagagtgccgaaaagtgctgccaacagcagttgagggtggtgaacctttgcctgagggtctcctctggcttcttttgacagggaaggtcccaaccaaagatcaagttgatgctctatcaaaagaattgcttgcgcgctcaactgtcccagctcatgtctataaggtaatagatgctctcccagtaactgcacatcctatgacacaatttaccgcaggaataatggctcttcaggttgagagcgaatttcaaaaagcttacggcaatggattgcccaaaatcaaagctttgggagcctacttatgaagactgcttaaatttgattgctcggcttccaccagtggcttcttatgtttaccggagaattttcaaggatgggaaatcaatagaagctgatgattctctggattatgcggcaaatttatcacatatgcttggttttgacgaccccaggatgctggagctgatgcggctccatgtaacaattcacgctgatcatgaaggcgggaatatcagttctcatactggtcatctggttggaagtgctctgtcagatccttatctttctttcgcatcatctgtgaatgggttagctgggccactacatggccttgcaaatcaggaagcgcttctatggctcaagtctataattcaggaaacagggagcgacgttacgacagaccaactcaaagactatgtctggaagacactgaagagtggaaaggttgttcatggatttggtcatggagttctgcgtaggacggacccacggtatctatgccaaagggagtttgccctgaagtatttgccagaggatccgcttttccaactgctgtccaagttatatgaggtcgtgcctccgatcctcactgagctgggaaaggtcaagaacccatggcccaatgttgacgctcacagtggactcttgctgaaccactttggactatctgaaacacggtatcacactgtcttgttcggtgtttcgagaagcatgggggtaggatcccagctcatctgggaccgtgcccttggcctgccactcgagaggcccaagagcgttaccatggagtggctggagaactactgcaagaacaaggctgcctgaagcttttcacaaatgctgctgctttttttccccccagccttggctgttaatgattaaacatgagttgtagaactattctttttccccccattggccgttgaataacgcaatagcagcgtgctctcgggcgctagaattctgtatctctccgtcacttggtggacgtccagatagacagttcatctgcggcaacactgtgcagaagagattaggacatttcacttggtgtatgccgacacttgagtttttgtttaacgttatgtttggcagagttaatcggtaattacagatttgggctatggcatgttatgttatcatgta

SEQ ID NO: 121181 - DNA, 1816 bp, Zea Mays
ctcctcgcccgcccccgtacgtgtccatctctccactcctttcctttccttgttggtaagagcaaggcgagacgtaacgtaatccggccatggcgttcttccggggcctcaccgcggtctcgagactgcgatcccgcatggcgcaggaggccaccacgctgggtggtgtgagatggctgcagatgcagagcgcgtccgacctcgatcttaagtcccagctgcgggaactgattccggaacagcaggaccgcttaaagaagcttaaatcagagcatgggaaggttcagcttggaaacataactgtggatatggtccttggtggaatgagagggatcattggaatgctttgggagacatccctagtcgacccagaggagggtattcgttttaggggcctctcaattccagagtgccgaaaagtgctgccaacagcagttgagggtggtgaacctttgcctgagggtctcctctggcttcttttgacagggaaggtcccaaccaaagatcaagttgatgctctatcaaaagaattgcttgcgcgctcaactgtcccaggtaatagatgctctcccagtaactgcacatcctatgacacaatttaccgcaggaataatggctcttcaggttgagagcgaatttcaaaaagcttacggcaatggattgcccaaaatcaaagctttgggagcctacttatgaagactgcttaaatttgattgctcggcttccaccagtggcttcttatgtttaccggagaattttcaaggatgggaaatcaatagaagctgatgattctctggattatgcggcaaatttatcacatatgcttggttttgacgaccccaggatgctggagctgatgcggctccatgtaacaattcacgctgatcatgaaggcgggaatatcagttctcatactggtcatctggttggaagtgctctgtcagatccttatctttctttcgcatcatctgtgaatgggttagctgggccactacatggccttgcaaatcaggaagcgcttctatggctcaagtctataattcaggaaacagggagcgacgttacgacagaccaactcaaagactatgtctggaagacactgaagagtggaaaggttgttcatggatttggtcatggagttctgcgtaggacggacccacggtatctatgccaaagggagtttgccctgaagtatttgccagaggatccgcttttccaactgctgtccaagttatatgaggtcgtgcctccgatcctcactgagctgggaaaggtcaagaacccatggcccaatgttgacgctcacagtggactcttgctgaaccactttggactatctgaaacacggtatcacactgtcttgttcggtgtttcgagaagcatgggggtaggatcccagctcatctgggaccgtgcccttggcctgccactcgagaggcccaagagcgttaccatggagtggctggagaactactgcaagaacaaggctgcctgaagcttttcacaaatgctgctgctttttttccccccagccttggctgttaatgattaaacatgagttgtagaactattctttttccccccattggccgttgaataacgcaatagcagcgtgctctcgggcgctagaattctgtatctctccgtcacttggtggacgtccagatagacagttcatctgcggcaacactgtgcagaagagattaggacatttcacttggtgtatgccgacacttgagtttttgtttaacgttatgtttggcagagttaatcggtaattacagatttgggctatggcatgttatgttatcatgta

SEQ ID NO: 121182 - DNA, 1816 bp, Zea Mays
ctcctcgcccgcccccgtacgtgtccatctctccactcctttcctttccttgttggtaagagcaaggcgagacgtaacgtaatccggccatggcgttcttccggggcctcaccgcggtctcgagactgcgatcccgcatggcgcaggaggccaccacgctgggtggtgtgagatggctgcagatgcagagcgcgtccgacctcgatcttaagtcccagctgcgggaactgattccggaacagcaggaccgcttaaagaagcttaaatcagagcatgggaaggttcagcttggaaacataactgtggatatggtccttggtggaatgagagggatcattggaatgctttgggagacatccctagtcgacccagaggagggtattcgttttaggggcctctcaattccagagtgccgaaaagtgctgccaacagcagttgagggtggtgaacctttgcctgagggtctcctctggcttcttttgacagggaaggtcccaaccaaagatcaagttgatgctctatcaaaagaattgcttgcgcgctcaactgtcccagctcatgtctataaggtaatagatgctctcccagtaactgcacatcctatgacacaatttaccgcaggaataatggctcttcaggttgagagcgaatttcaaaaagcttacggcaatggattgcccaaaatcaaagctttgggagcctacttatgaagactgcttaaatttgattgctcggcttccaccagtggcttcttatgtttaccggagaattttcaaggatgggaaatcaatagaagctgatgattctctggattatgcggcaaatttatcacatatgcttggttttgacgaccccaggatgctggagctgatgcggctccattgatcatgaaggcgggaatatcagttctcatactggtcatctggttggaagtgctctgtcagatccttatctttctttcgcatcatctgtgaatgggttagctgggccactacatggccttgcaaatcaggaagcgcttctatggctcaagtctataattcaggaaacagggagcgacgttacgacagaccaactcaaagactatgtctggaagacactgaagagtggaaaggttgttcatggatttggtcatggagttctgcgtaggacggacccacggtatctatgccaaagggagtttgccctgaagtatttgccagaggatccgcttttccaactgctgtccaagttatatgaggtcgtgcctccgatcctcactgagctgggaaaggtcaagaacccatggcccaatgttgacgctcacagtggactcttgctgaaccactttggactatctgaaacacggtatcacactgtcttgttcggtgtttcgagaagcatgggggtaggatcccagctcatctgggaccgtgcccttggcctgccactcgagaggcccaagagcgttaccatggagtggctggagaactactgcaagaacaaggctgcctgaagcttttcacaaatgctgctgctttttttccccccagccttggctgttaatgattaaacatgagttgtagaactattctttttccccccattggccgttgaataacgcaatagcagcgtgctctcgggcgctagaattctgtatctctccgtcacttggtggacgtccagatagacagttcatctgcggcaacactgtgcagaagagattaggacatttcacttggtgtatgccgacacttgagtttttgtttaacgttatgtttggcagagttaatcggtaattacagatttgggctatggcatgttatgttatcatgta

SEQ ID NO: 121183 - DNA, 1962 bp, Zea Mays
tctaggacctgtatatattcatgtcccgagaacttgtcaggctctcttcctccctcgccgcggaacacgcgccccgtcctcgcccgcccgtgttcatctctccattccataccttgattcgtctctaatctgccctccccgctctgtcggactgtctcggattcgttcgctgcgtggcggggcggagccgattacagtgcaggtgcggtggtagccgagcgctccggccatggcgttcttccggggcctcaccgcggtctcgaggctgcgatcccgcatggcgcaggaggccaccacgctgggtggtgtgagatggctgcagatgcagagcgcgtccgatctcgatcttaagtcccagttgcaggaattgattccggaacagcaggatcgcctaaagaagcttaaatcagagcatgggaaggttcagcttggaaacataactgtggatatggtccttggtggaatgagagggatgattggaatgctttgggaaacatccctacttgacccagaggagggtattcgttttaggggtctctcgattccagagtgccaaaaagtgctgccaacagcagttaagggtggtgaacctttgcctgagggtctcctttggcttcttttgacagggaaggtcccaaccaaagagcaagttgatgcactatcaaaggaattgcttgcgcgctcaactgtcccagctcatgtctataaggcaatagatgctctcccagtaactgcacatcctatgacacagtttaccacgggagtaatggctcttcaggttgagagcgaatttcaaaaagcttatgacaatggattgccaaaatcaaagttttgggagcctacttatgaagactgcttaaacatgattgctcggcttccaccagtggcttcttatgtttaccggagaattttcaagggtgggaaatcaatagaaactgacaattctctggattatgcggcaaatttctcacacatgcttggttttgatgaccctaaaatgctggagctgatgcggctctatgtaacaattcacactgatcatgaaggcgggaatgtcagtgctcatactggtcatctggttggaagtgctctgtcagatccttatctttctttcgcagcggctctaaatgggttagctgggccactacatggccttgcaaatcaggaagtgcttctatggatcaaatctgtaattcaggaaactgggagtgatgttacaacggatcaactcaaagagtatgtctggaagacactaaagagtggaaaggttgttcctggatttggtcatggagttctgcgtaagacagacccacggtattcatgtcaaagggagtttgccctgaagcatttgcccgaggatccacttttccaactggtgtccaagttatatgaagtcgtacctccgatcctcactgagctaggaaaggtcaagaacccgtggccgaatgttgatgctcacagtggagttttgctgaaccactttggactatctgaagcacggtattacactgtcttgttcggtgtttcgagaagcatggggataggatcccagctcatctgggaccgtgcccttggcctgccacttgagaggccgaagagtgttaccatggagtggctggagaactactgcaataacaaggctgcctgaagattttaacagttgctgttttttcccaaccatggctgataataattaaacatgcgttatagagttttttcccccttttgactgttggataatacaagagcaacatgctctagaattttgtatcttccatcacttagtcggcatccagattgttgatctgcggcaacactgcagaagagattaggacatgctgattaatctttgcagagttaattggtaattacagaattgggcttttgcatgtatcatgtatgccaattatctcgttgtggcagttctgttttaagttgatccgcgacatggctggattgctg

SEQ ID NO: 121184 - DNA, 1884 bp, Zea Mays
tctaggacctgtatatattcatgtcccgagaacttgtcaggctctcttcctccctcgccgcggaacacgcgccccgtcctcgcccgcccgtgttcatctctccattccataccttgcagtgcaggtgcggtggtagccgagcgctccggccatggcgttcttccggggcctcaccgcggtctcgaggctgcgatcccgcatggcgcaggaggccaccacgctgggtggtgtgagatggctgcagatgcagagcgcgtccgatctcgatcttaagtcccagttgcaggaattgattccggaacagcaggatcgcctaaagaagcttaaatcagagcatgggaaggttcagcttggaaacataactgtggatatggtccttggtggaatgagagggatgattggaatgctttgggaaacatccctacttgacccagaggagggtattcgttttaggggtctctcgattccagagtgccaaaaagtgctgccaacagcagttaagggtggtgaacctttgcctgagggtctcctttggcttcttttgacagggaaggtcccaaccaaagagcaagttgatgcactatcaaaggaattgcttgcgcgctcaactgtcccagctcatgtctataaggcaatagatgctctcccagtaactgcacatcctatgacacagtttaccacgggagtaatggctcttcaggttgagagcgaatttcaaaaagcttatgacaatggattgccaaaatcaaagttttgggagcctacttatgaagactgcttaaacatgattgctcggcttccaccagtggcttcttatgtttaccggagaattttcaagggtgggaaatcaatagaaactgacaattctctggattatgcggcaaatttctcacacatgcttggttttgatgaccctaaaatgctggagctgatgcggctctatgtaacaattcacactgatcatgaaggcgggaatgtcagtgctcatactggtcatctggttggaagtgctctgtcagatccttatctttctttcgcagcggctctaaatgggttagctgggccactacatggccttgcaaatcaggaagtgcttctatggatcaaatctgtaattcaggaaactgggagtgatgttacaacggatcaactcaaagagtatgtctggaagacactaaagagtggaaaggttgttcctggatttggtcatggagttctgcgtaagacagacccacggtattcatgtcaaagggagtttgccctgaagcatttgcccgaggatccacttttccaactggtgtccaagttatatgaagtcgtacctccgatcctcactgagctaggaaaggtcaagaacccgtggccgaatgttgatgctcacagtggagttttgctgaaccactttggactatctgaagcacggtattacactgtcttgttcggtgtttcgagaagcatggggataggatcccagctcatctgggaccgtgcccttggcctgccacttgagaggccgaagagtgttaccatggagtggctggagaactactgcaataacaaggctgcctgaagattttaacagttgctgttttttcccaaccatggctgataataattaaacatgcgttatagagttttttcccccttttgactgttggataatacaagagcaacatgctctagaattttgtatcttccatcacttagtcggcatccagattgttgatctgcggcaacactgcagaagagattaggacatgctgattaatctttgcagagttaattggtaattacagaattgggcttttgcatgtatcatgtatgccaattatctcgttgtggcagttctgttttaagttgatccgcgacatggctggattgctg

SEQ ID NO: 121185 - DNA, 1881 bp, Zea Mays
tctaggacctgtatatattcatgtcccgagaacttgtcaggctctcttcctccctcgccgcggaacacgcgccccgtcctcgcccgcccgtgttcatctctccattccataccttgtgcaggtgcggtggtagccgagcgctccggccatggcgttcttccggggcctcaccgcggtctcgaggctgcgatcccgcatggcgcaggaggccaccacgctgggtggtgtgagatggctgcagatgcagagcgcgtccgatctcgatcttaagtcccagttgcaggaattgattccggaacagcaggatcgcctaaagaagcttaaatcagagcatgggaaggttcagcttggaaacataactgtggatatggtccttggtggaatgagagggatgattggaatgctttgggaaacatccctacttgacccagaggagggtattcgttttaggggtctctcgattccagagtgccaaaaagtgctgccaacagcagttaagggtggtgaacctttgcctgagggtctcctttggcttcttttgacagggaaggtcccaaccaaagagcaagttgatgcactatcaaaggaattgcttgcgcgctcaactgtcccagctcatgtctataaggcaatagatgctctcccagtaactgcacatcctatgacacagtttaccacgggagtaatggctcttcaggttgagagcgaatttcaaaaagcttatgacaatggattgccaaaatcaaagttttgggagcctacttatgaagactgcttaaacatgattgctcggcttccaccagtggcttcttatgtttaccggagaattttcaagggtgggaaatcaatagaaactgacaattctctggattatgcggcaaatttctcacacatgcttggttttgatgaccctaaaatgctggagctgatgcggctctatgtaacaattcacactgatcatgaaggcgggaatgtcagtgctcatactggtcatctggttggaagtgctctgtcagatccttatctttctttcgcagcggctctaaatgggttagctgggccactacatggccttgcaaatcaggaagtgcttctatggatcaaatctgtaattcaggaaactgggagtgatgttacaacggatcaactcaaagagtatgtctggaagacactaaagagtggaaaggttgttcctggatttggtcatggagttctgcgtaagacagacccacggtattcatgtcaaagggagtttgccctgaagcatttgcccgaggatccacttttccaactggtgtccaagttatatgaagtcgtacctccgatcctcactgagctaggaaaggtcaagaacccgtggccgaatgttgatgctcacagtggagttttgctgaaccactttggactatctgaagcacggtattacactgtcttgttcggtgtttcgagaagcatggggataggatcccagctcatctgggaccgtgcccttggcctgccacttgagaggccgaagagtgttaccatggagtggctggagaactactgcaataacaaggctgcctgaagattttaacagttgctgttttttcccaaccatggctgataataattaaacatgcgttatagagttttttcccccttttgactgttggataatacaagagcaacatgctctagaattttgtatcttccatcacttagtcggcatccagattgttgatctgcggcaacactgcagaagagattaggacatgctgattaatctttgcagagttaattggtaattacagaattgggcttttgcatgtatcatgtatgccaattatctcgttgtggcagttctgttttaagttgatccgcgacatggctggattgctg

SEQ ID NO: 121186 - DNA, 1944 bp, Zea Mays
aattctagacgtaatcgttcgtttcattcgctgggattgggatctcttctctcatcgcgagccctcgaatccaaccccagattcgtctctaatctgccctccccgctctgtcggactgtctcggattcgttcgctgcgtggcggggcggagccgattagtaactatccatttgcttccctgcaggtgcggtggtagccgagcgctccggccatggcgttcttccggggcctcaccgcggtctcgaggctgcgatcccgcatggcgcaggaggccaccacgctgggtggtgtgagatggctgcagatgcagagcgcgtccgatctcgatcttaagtcccagttgcaggaattgattccggaacagcaggatcgcctaaagaagcttaaatcagagcatgggaaggttcagcttggaaacataactgtggatatggtccttggtggaatgagagggatgattggaatgctttgggaaacatccctacttgacccagaggagggtattcgttttaggggtctctcgattccagagtgccaaaaagtgctgccaacagcagttaagggtggtgaacctttgcctgagggtctcctttggcttcttttgacagggaaggtcccaaccaaagagcaagttgatgcactatcaaaggaattgcttgcgcgctcaactgtcccagctcatgtctataaggcaatagatgctctcccagtaactgcacatcctatgacacagtttaccacgggagtaatggctcttcaggttgagagcgaatttcaaaaagcttatgacaatggattgccaaaatcaaagttttgggagcctacttatgaagactgcttaaacatgattgctcggcttccaccagtggcttcttatgtttaccggagaattttcaagggtgggaaatcaatagaaactgacaattctctggattatgcggcaaatttctcacacatgcttggttttgatgaccctaaaatgctggagctgatgcggctctatgtaacaattcacactgatcatgaaggcgggaatgtcagtgctcatactggtcatctggttggaagtgctctgtcagatccttatctttctttcgcagcggctctaaatgggttagctgggccactacatggccttgcaaatcaggaagtgcttctatggatcaaatctgtaattcaggaaactgggagtgatgttacaacggatcaactcaaagagtatgtctggaagacactaaagagtggaaaggttgttcctggatttggtcatggagttctgcgtaagacagacccacggtattcatgtcaaagggagtttgccctgaagcatttgcccgaggatccacttttccaactggtgtccaagttatatgaagtcgtacctccgatcctcactgagctaggaaaggtcaagaacccgtggccgaatgttgatgctcacagtggagttttgctgaaccactttggactatctgaagcacggtattacactgtcttgttcggtgtttcgagaagcatggggataggatcccagctcatctgggaccgtgcccttggcctgccacttgagaggccgaagagtgttaccatggagtggctggagaactactgcaataacaaggctgcctgaagattttaacagttgctgttttttcccaaccatggctgataataattaaacatgcgttatagagttttttcccccttttgactgttggataatacaagagcaacatgctctagaattttgtatcttccatcacttagtcggcatccagattgttgatctgcggcaacactgcagaagagattaggacatgctgattaatctttgcagagttaattggtaattacagaattgggcttttgcatgtatcatgtatgccaattatctcgttgtggcagttctgttttaagttgatccgcgacatggctggattgctg

SEQ ID NO: 121187 - DNA, 5082 bp, Zea Mays
atggctacgtccacgatgccactcggcggggcgtctccgtcgggccgcgttctgggtccggcgctggaccggatcataaaaaacgccgcatggcggaagcactcagcgctcgtggccgcggcaaaggcggcactcgacctcctctcttcatcgccggcatacccgtcttcggaccctatctcgccgcaatcctcgctgctgctcggcctgccctccgccgccgccgacgcggccctccacgcgctgctgctcgctctcgagtcagcttcgcccaaggtcgtcgaccccgctctcgattgcgtcaccaaacttctttaccaccgcctcctctttggcgacctcggctgcgccggggacgatgcctcttcccccacctccaggctcttcaccgccgtccttacctgtggcgctctctctgatgatgcaatggagcttgccaccctccgtgttatcatcgccgccgcgcggtgccccactgtcgccatccgcggggagggcctcggccaggtgctcaagacctgctacaacatatacctcagcagcaacagtggggccaatcagctctgcgccaagcttgcgctggcgcaggtcctgctgattgtgtttgcacgcgtggaggtggattcgatggacgtgcgcattcggacggtgtcgatcacggagatgatggacgtgtctgatcgcaacctgaacgactccagcatcgtgcaggtggctcaggggtttataaacgagacaatggaggggagtgttgcaccagagccagggtcacatttggagccaaccgaggtggatggaaaggaggatactgggatgagcaagattagagaggatgggcttgcactcttgaagaacctgtgtaagctgtcaatgaagttctcgacgccagataaccctgaggatcagatgttgctgcgcggcaaggtgttgtcacttgagttgctgaaaatggttatcgacaatgctggccctttctggagaacaaatgaaaagtacattggagcaatcaagcagtatctttgtttgtccttattgaagaacagtgctttgtcagcaatgagtattttccagttgttgtgctccatatttgtgggcttactgtcaaggtttagatctggactgaaagaggaaattggaatattctttccaatgcttgttctaagggttcttgagaatgtccatcaacctagctttctacaaaaaatgacagttctaaacttgttggagaagatctgtaaagaatctcaggttcttattgatatctttgtgaactatgattgtgatgtagatgcaccaaatatttttgaaagggttgtcaatggacttctaaagactgctttaggtgttcctccaggatctacaacaacattaactatagcccaagaccaaacatttcgtattgagtcagtgaagtgccttgcaaccataatcaagtcaatgggttcatggatggaccaacagctgagaattggtgatttttcaccaaaaatatctgaagcttctttaagttctttaagttcaatagataaccccaacatccttattggagaagatggtagtggaattgattatgaactgcaatctgactctggtagcccagatgtatctggtgctccctcccttgagcagcgtcgtgcttttaaaatagaacttcagaaaggaatatccttgtttaaccgaaaaccttccaagggaattaattttctcgttaaaagcaagaagatagggcatacaccagaagatgttgcttgtttcttgagaaatactgctggtttaaatgcaacaatgattggagactatttgggtgaaagagatgaattccctatcaaagttatgcatgcatatgttgatgcactaaactttgaaggtatggacttcggtgaagctattaggtattatttgcgaggcttcaggttgcctggggaagcacagaaaattgatcggatcatggaaaagtttgctgaacgatactgcaaatgcaatccaaactcctttaccagtgcagatactgcatatgttcttgcttattctgtaatcatgctcaacactgatgctcacaatactatggtcaaggataagatgtctaaatctgacttcattcgcaataaccgaggaatagatgatggaaaggatttgccagaaacttatctgggtacactatatgaccaaattgtcaaaaatgagatcaaaatgagtgctggttcatcagttccacaaaacaagcaacctagtagtgtgatgaagctactaggattggacaatattattagctttgttaactggaaacaggctgatgacagggtagttggagcaaacgacctgctcatcaaaaccatacaagagaaatttaaactaaagagtggaaagtcggagtctgtgttttctgttatcactgatacaacaattttaagattcatgatggaggtttgttgggcccctatgatggctgcattcagtgtgacacttgatcagagtgatgataaggcggccacgtcgcagtgtttgcagggattcagatctgctgtgcatgttacctctgttatgtgcatggagacacagagagatgcctttgtgacatctgtagccaaattcacatatctgcattgtgctgctgacatgaaacaaaagaatgtggatgctgtgaaggctattatatccattgcaatcgaagatggtgattatttgcaggaagcttgggagcatgtactaacatgcctttcacggtttgagcatttacaccttcttggagagggggcacctactgatgcttcatttctcacagtaccactggttgactcagaagaaaaaacacagaagtctacctctatgtcatcaaagagaactaatgcacttcagaatccagctgtaatggctgctgttagaggaggttcttatgacagcacaacagcaaaaaataaagcatcaccgttggttactcctgaacagattaataatttcatatcaaacataaacctgctagaccagattggcatttttgagttaaatcacatatttgctcatagcccaagattaaatagtgatgctattgttgcttttgtgaaagctctttgcaaagtttcaatgacagagttgcagtctcctacagatcctcgtattttctgcctaacaaagattgttgagattgcgcattacaatatgaaccgcattcgtttggtttggtcccgtatttggaaagttctgtcagatttttttgtttctgttgggttgtcagagaacctttcagttgcaatatttgttatggactctttaaggcagctagctatgaagtttctggaaagagaagaactggcaaattataatttccaaaatgaattcctgcaaccttttgcggttgttatgcagaagagcaatgcttcagaagttcgtgaacttatagttcgatgtgtctcccaaatggttctgagtcgtgtcaacaatataaaatctggttggaaaagtgtttttacggtttttactgcagctgctgctgatgatcgaaaaaatattgttttgttggcatttgaaaccatggaaaagattgttcgggactatttcccttacataactgaaactgaaacaacaacgtttactgattgtgttaaatgccttatcacattcacaagtagtaaattcagcagtgatgccagtcttaatgccattgcatttcttcggttttgtgctgtcaaactcgctgaggaaggatttattagtcatgagaaggatactgaacagcaaccaagtaaaatagattcatcagatgggaacagcatggtgcataaggacgatcatgtttacttctgggttcctttgcttgctggtctagctagattgacaacggactcaagaccaactatcagaaaaggttctgcagaagtgctctttgacatcttggcagatcatgggcacctcttttctcagtccttctgggctaatatcttcgaatcagttatctatcctctttttagcagtgaaagttttgcaccaaatggccagatctcaagtgtaaatagtactgaggatgattcttggaattttgaaactaaaacggtggctctaaaatgtttagcagatttgtatattatgttttttgaagtgatgcgtccagaactttctagagttacttctgttattacgaatttcatcagaagcccttataaacaatcagctagcacgggtatatcagtttttcagcgtttaacagaaggactcgcgagcaagctctccaatgatgagtggggaacggtcctgttgtgcttcaaagaatcagcatcacatacatttgttgtgtttgacaaaatagttaaaatgatgaaagtcattgaaattccagatagaaatgaatcttactctgaagctgagcaatattcagatcatgacatatacaatgatgaagaagaggaagccaatatggaaacggcgtcttatgctattgtcagaatgaagaatcatatggctttgcaactcttaatcgttgagggcatcatcaaattgtatgaggttcacaggagctttcttggtgctgagcatatagtcataatgttggagattctatctgccattgcatcacatgcaagtgaagtgaactctgaatctaacttgcacaggaaactacataaagcatgctctattttggaggtacctgagccagcggttatccatttcgagagcgagtcctaccagagctacctcaaacttctccaagctcttcttcatgataacccatctttgtcagaaactatgaatgtggagtcacaaattatgctcgtctgtgagaaaatactgcgaatgtatctgacctgcgcagagcatgaactgtctaatggtgtttctggtaggggtccagctttacaacggatgcctctgggtacttctaaaaaggaggagctgggtgctagaactccatttgtccttcatgtgatggggttattgggcagtttagagaagaactgctttaggagaaacttgccccgctttttccccttattagctaatcttattcgctgcgagcataactctggagaagttcaagttgcactgtatgatatcttccaatcatcaataggccccataatatcagcatag

SEQ ID NO: 121188 - DNA, 2144 bp, Zea Mays
atctcacgcggccatccgacgaccagcttctttcactttggaaccctcgtgtgaggccaccatccccttctctctcccttctttcatctcccctccccatttggatcctccgccaccggttccccattgctgcctccaccgcccccgctcctcgccggttccccattgctgcctccactgccctcgctccgaggagggccacgacggccagatcctggactcattgtcgcgtacctggatccaggggaaatggcggaacacggcgaacgcgagcgtgacggcggggttcatgtgcgcgcccgagatgtggccgacggcgtagatcatgacggtgacgatgagcccgccggcgaccgactgccccagctgcgagatgcggtccttgtcgctaccgtagatccctgccgccccgcacatgacgaacaccagcaggaacgtggacaccacctccgagaccacctgtcgatcgataaccatgggaggagcaccaccaccacaaagcactctcatgcatcagtcgatctccggccgccggtacttgattctgaataacaaataatttccactactgggactgaaacttagtatccatctactgcttgattaggacatggcttagaaaatgtcatctttcacttgagtagtctttggtcattcaagcaccacttggcattcagttacgtcatggcagttttggtgtggcccaaatacctttaccccttgcttctgtgagttcaaaggatacctctgatacttgtattgaagatggtgaactctgtgatactttgtcaatgaagaaaaggacagacgaagtggcaggagcaaatgggttggaaggggtctcgatagagtgtgctaatttgttgaataatggcattgatgttttcatgaagcagttaattggatcttgcattgaattagttagagcaaggtctcgacatggcaaactaaggcatgagacattgaagcagcagctgtgccgaaagctaataaatggtgtatcagtgcataaccatgttcctgggcagagttctgttatacctccagagacaaattccatctccatgcaggacttaaaggcagtaatagagttaaacccttgtttgcttgggattaatgcatcactgctacacgaaaagatcaattcatatgactagtaggatggagctagttgtattcatctcgtcacaagatcctatgatcttgatggtctgtcttgtttcatggctgttgtaatcaagccataagtttactgatgggtggcggtgaaggcaagcacattctgtgcagtaccctgattgttttgcatgtcatctccagtgcaatcttccagaatgaacaaaaaactgtgtatctgctgggtgcagtactaaaataattcatttcatccacctaaggagtaaggactacgatgggcgaaagtgctccagagataactatgttgctggactccagacaaattgaggaaccatatcaaagatttatctccaaatgaaagcctgtatgagcagaagcccgaagaaacagctcttgtcctgccatcatcggtgattgcaagtactacagctaggagcaaaccccatacttcccgatttgaatatgtagaaaatgcacctgctcctaagactgggagcagcttagaaggcaatctcatgagtggacatgttgcacccctaaagtcatcgaacttctttgttgaatttgggatggacagtggatatcacaaaaaatatacatccagttcatccaaagtgcaggttgtgctgtggttgttgatgaacaaacctagttgttgccagaatatcctgtttctctgcactgggttgcggcttgtggtactggtcgactatggtggcacaatgcctcaactacaagaaaatctttgtggcctgctatatcttgcccgacagttcaaactttgcaaggtgaggtctgttcagtttggccagaaaggcatcccctacctgaacacctacgacggccgcaccatccgctaccccgaccctctcatcaaggccaacgacaccatcaagatcgatctggagaccaacaagatcatggacttcatcaagttgtatttgccctttcatggacttcatcaagttatatacttagttaggctcaatgttagcacaaacagttga

SEQ ID NO: 121189 - DNA, 646 bp, Zea Mays
aatgcctccgtgatcggtttaagttctttcgctgcagagatggcagcggcggcggggccgtacaaagagatgctggaagtggtgaacgcgtgcgcggcccggatccggtggcgcctccgtccagcttccaagcgccgcctcctcaacagttgtgctgtggttgttgatgaacaaacctagttgttgccagaatatcctgtttctctgcactgggttgcggcttgtggtactggtcgactatggtggcacaatgcctcaactacaagaaaatctttgtggcctgctatatcttgcccgacagttcaaactttgcaaggtgaggtctgttcagtttggccagaaaggcatcccctacctgaacacctacgacggccgcaccatccgctaccccgaccctctcatcaaggccaacgacaccatcaagatcgatctggagaccaacaagatcatggacttcatcaagttgtatttgccctttcatggacttcatcaagttatatacttagttaggctcaatgttagcacaaacagttgatgagcaagtttaaatttagagtacacttatgtatgagttatttgacaatgcttatttatgagatattgaatgttatttatctatattatattaattatagtgttattaaat

SEQ ID NO: 121190 - DNA, 2399 bp, Zea Mays
gtaggtcgcagtaaaaaaaaacatctgaaaaatgcttgcgtgcttggtcttcagtagtagattcgaagagagagagagagaaaagaaataagtgcggtgggattgagggaggaggtattaggctattattagggcgtagtacagtgcatacacaaaaccctacggcgtccctctgatgcggcgctgagggctgaggctaagcacgtgggtggtggcctctataaaccccttcactccgggcactcgcatcccgcagcccgccccgtccgcccgcccgagtcacactcacacagagccgagccgagcccaggcaggcaggcaggcggcccaggcgcccagcccacccccctacccccgcggcgccgccggagccagagcgagagcgatggacgcgctgccggaggcgtggtcgcaggtgcgcgcgccggtgatcgtgccgctgctgcggctggcggtggccgtgtgcctcaccatgtcggtgcttctgttccttgagcgcgtgtacatggccgtcgtcatctccggggtgcgcctgctccgcctccgccccgaccgccgctaccgctgcgaccccctccccgaggacgacccggagctgggctcctccgcgttccccgtcgtgctcgtccagatccccatgttcaacgagcgcgaggtgtaccagctgtccatcggcgccgtgtgcgggctgtcgtggccggcggaccggctggtggtgcaggtgctcgacgactccacggacgaagtgattaaggagatggtgcggatggagtgcgagcggtgggctcggaaggggatcaacataacgtaccagatccgggaggaccgcaaggggtacaaggccggcgcgctgcgggcggggatgaggcacgcgtacgtgcgcgactgcgagtacgtggccatcttcgacgccgacttccagcccgacccggactacctcaagcgcaccatcccctacctcgtccacaacccggagatcgccctcgtccaggcgcgctggagattcgtgaacgcggacgagtgcctgatgacgaggatgcaggagatgtccctggactaccacttcaccgtggagcaggaagtgagctcctccgtctgcgccttctttggattcaacggcaccgccggcgtgtggcgcatctccgcggtgaacgaggctggggggtggaaggaccggaccacggtggaggacatggatctggccatccgggccagcctcaagggctggaagttcgtctacctcggtgacgtccaggtgaaaagcgagctgccgagtaccttcaaggccttccggttccagcagcacaggtggtcgtgcggcccggcgaacctgttcaggaagatgctcatggagattgtgacgaacaagaaagtgacgatctggaagaagatccacgtcatctacaacttcttcctgatacgcaagatcatcgcgcacatcatcaccttctcgttctactgcgtcatcatcccggcaaccatcttcgtccccgaggtccgcatacccaagtggggctgcgtctacatcccctcggccatcaccctcctcaactctgtcggcactcccaggtctttccacctgcttttcttctgggtcgccttcgagaacgtcatgtccctgcacagaacaaaggccacgctgatcggcttgctggaggccggcagggccaacgagtgggtggtgacggcgaagctcggcagcgccatgaagatgaaatcggctaacaaagcggggctcaggaagcagttcatgaggatatgggagaggctgcacgtcacggagctcggggtggcagccttcctcttctcctgcggctggtacgatcttgcgtacgggagggaccatttcttcatctacctcttcttccagtctgtcgcgtttttcatcgtcggcgtcggctacgtcggcaccatcgtcccgcagtcgtagcggaagcgtgtccagatcatccgcttctctctggttttcgcattgtgtcttgggtaagtttcgtagtggatgaccggtttgaggtaaagatcatgcatgcggtcctctcttccatcgtctttttttggggaccggccgtgtgtgcttcgtcgaccttcggctgcatgcgcggtgttttactgtaaaataggaaagcagtgttgcaagatcgctgcaggagaatttagagattggtgccacatgggcaggagatgtcctggtgtttctgcttatatgctatatcaactatgtgatgtgttttaagggggggtgcaggatggctgcttccaatgtactagtaacatacagagaaacaggttcagacatgtgttcagaaaaaaaagagtcaactattcagccttcttgtagcatgctacattttacatgcgttctcctgttatgtgggcgtattaattagtatgaagcagta

SEQ ID NO: 121191 - DNA, 2054 bp, Zea Mays
gggattgagggaggaggtattaggctattattagggcgtaccagagcgagagcgatggacgcgctgccggaggcgtggtcgcaggtgcgcgcgccggtgatcgtgccgctgctgcggctggcggtggccgtgtgcctcaccatgtcggtgcttctgttccttgagcgcgtgtacatggccgtcgtcatctccggggtgcgcctgctccgcctccgccccgaccgccgctaccgctgcgaccccctccccgaggacgacccggagctgggctcctccgcgttccccgtcgtgctcgtccagatccccatgttcaacgagcgcgaggtgtaccagctgtccatcggcgccgtgtgcgggctgtcgtggccggcggaccggctggtggtgcaggtgctcgacgactccacggacgaagtgattaaggagatggtgcggatggagtgcgagcggtgggctcggaaggggatcaacataacgtaccagatccgggaggaccgcaaggggtacaaggccggcgcgctgcgggcggggatgaggcacgcgtacgtgcgcgactgcgagtacgtggccatcttcgacgccgacttccagcccgacccggactacctcaagcgcaccatcccctacctcgtccacaacccggagatcgccctcgtccaggcgcgctggagattcgtgaacgcggacgagtgcctgatgacgaggatgcaggagatgtccctggactaccacttcaccgtggagcaggaagtgagctcctccgtctgcgccttctttggattcaacggcaccgccggcgtgtggcgcatctccgcggtgaacgaggctggggggtggaaggaccggaccacggtggaggacatggatctggccatccgggccagcctcaagggctggaagttcgtctacctcggtgacgtccaggtgaaaagcgagctgccgagtaccttcaaggccttccggttccagcagcacaggtggtcgtgcggcccggcgaacctgttcaggaagatgctcatggagattgtgacgaacaagaaagtgacgatctggaagaagatccacgtcatctacaacttcttcctgatacgcaagatcatcgcgcacatcatcaccttctcgttctactgcgtcatcatcccggcaaccatcttcgtccccgaggtccgcatacccaagtggggctgcgtctacatcccctcggccatcaccctcctcaactctgtcggcactcccaggtctttccacctgcttttcttctgggtcgccttcgagaacgtcatgtccctgcacagaacaaaggccacgctgatcggcttgctggaggccggcagggccaacgagtgggtggtgacggcgaagctcggcagcgccatgaagatgaaatcggctaacaaagcggggctcaggaagcagttcatgaggatatgggagaggctgcacgtcacggagctcggggtggcagccttcctcttctcctgcggctggtacgatcttgcgtacgggagggaccatttcttcatctacctcttcttccagtctgtcgcgtttttcatcgtcggcgtcggctacgtcggcaccatcgtcccgcagtcgtagcggaagcgtgtccagatcatccgcttctctctggttttcgcattgtgtcttgggtaagtttcgtagtggatgaccggtttgaggtaaagatcatgcatgcggtcctctcttccatcgtctttttttggggaccggccgtgtgtgcttcgtcgaccttcggctgcatgcgcggtgttttactgtaaaataggaaagcagtgttgcaagatcgctgcaggagaatttagagattggtgccacatgggcaggagatgtcctggtgtttctgcttatatgctatatcaactatgtgatgtgttttaagggggggtgcaggatggctgcttccaatgtactagtaacatacagagaaacaggttcagacatgtgttcagaaaaaaaagagtcaactattcagccttcttgtagcatgctacattttacatgcgttctcctgttatgtgggcgtattaatt

SEQ ID NO: 121192 - DNA, 1657 bp, Zea Mays
ctcgcatcccgcagcccgccccgtccgcccgcccgagtcacactcacacagagccgagccgagcccaggcaggcaggcaggcggcccaggcgcccagcccacccccctacccccgcggcgccgccggagccagagcgagagcgatggacgcgctgccggaggcgtggtcgcaggtgcgcgcgccggtgatcgtgccgctgctgcggctggcggtggccgtgtgcctcaccatgtcggtgcttctgttccttgagcgcgtgtacatggccgtcgtcatctccggggtgcgcctgctccgcctccgccccgaccgccgctaccgctgcgaccccctccccgaggacgacccggagctgggctcctccgcgttccccgtcgtgctcgtccagatccccatgttcaacgagcgcgaggtgtaccagctgtccatcggcgccgtgtgcgggctgtcgtggccggcggaccggctggtggtgcaggtgctcgacgactccacggacgaagtgattaaggagatggtgcggatggagtgcgagcggtgggctcggaaggggatcaacataacgtaccagatccgggaggaccgcaaggggtacaaggccggcgcgctgcgggcggggatgaggcacgcgtacgtgcgcgactgcgagtacgtggccatcttcgacgccgacttccagcccgacccggactacctcaagcgcaccatcccctacctcgtccacaacccggagatcgccctcgtccaggcgcgctggagattcgtgaacgcggacgagtgcctgatgacgaggatgcaggagatgtccctggactaccacttcaccgtggagcaggaagtgagctcctccgtctgcgccttctttggattcaacggcaccgccggcgtgtggcgcatctccgcggtgaacgaggctggggggtggaaggaccggaccacggtggaggacatggatctggccatccgggccagcctcaagggctggaagttcgtctacctcggtgacgtccaggtgaaaagcgagctgccgagtaccttcaaggccttccggttccagcagcacaggtggtcgtgcggcccggcgaacctgttcaggaagatgctcatggagattgtgacgaacaagaaagtgacgatctggaagaagatccacgtcatctacaacttcttcctgatacgcaagatcatcgcgcacatcatcaccttctcgttctactgcgtcatcatcccggcaaccatcttcgtccccgaggtccgcatacccaagtggggctgcgtctacatcccctcggccatcaccctcctcaactctgtcggcactcccaggtgaaaacccccctcctagacgaagacgacctcgcaaaggcagatatatagccatcagtcgatgacgattccaggtggctaaacgaccacacagttacctgaccagatgacatggactttgttgcgtgcaggtctttccacctgcttttcttctgggtcgccttcgagaacgtcatgtccctgcacagaacaaaggccacgctgatcggcttgctggaggccggcagggccaacgagtgggtggtgacggcgaagctcggcagcgccatgaagatgaaatcggctaacaaagcggggctcaggaagcagttcatgaggatatgggagagg

SEQ ID NO: 121193 - DNA, 1569 bp, Zea Mays
cttttatttatagcagtgataatttatactggcacaattttactgtcactttttccgtcgttattttgatgatgaccatgagcccacgaggcccaagacgatgaggagtatatttgaaagtaatcgatggtcatatctgatattccgattgttgtctgtccttgtggtggcgaccagtgaacgcggacgagtgcctgatgacgaggatgcaggagatgtccctggactaccacttcaccgtggagcaggaagtgagctcctccgtctgcgccttctttggattcaacggcaccgccggcgtgtggcgcatctccgcggtgaacgaggctggggggtggaaggaccggaccacggtggaggacatggatctggccatccgggccagcctcaagggctggaagttcgtctacctcggtgacgtccaggtgaaaagcgagctgccgagtaccttcaaggccttccggttccagcagcacaggtggtcgtgcggcccggcgaacctgttcaggaagatgctcatggagattgtgacgaacaagaaagtgacgatctggaagaagatccacgtcatctacaacttcttcctgatacgcaagatcatcgcgcacatcatcaccttctcgttctactgcgtcatcatcccggcaaccatcttcgtccccgaggtccgcatacccaagtggggctgcgtctacatcccctcggccatcaccctcctcaactctgtcggcactcccaggtctttccacctgcttttcttctgggtcgccttcgagaacgtcatgtccctgcacagaacaaaggccacgctgatcggcttgctggaggccggcagggccaacgagtgggtggtgacggcgaagctcggcagcgccatgaagatgaaatcggctaacaaagcggggctcaggaagcagttcatgaggatatgggagaggctgcacgtcacggagctcggggtggcagccttcctcttctcctgcggctggtacgatcttgcgtacgggagggaccatttcttcatctacctcttcttccagtctgtcgcgtttttcatcgtcggcgtcggctacgtcggcaccatcgtcccgcagtcgtagcggaagcgtgtccagatcatccgcttctctctggttttcgcattgtgtcttgggtaagtttcgtagtggatgaccggtttgaggtaaagatcatgcatgcggtcctctcttccatcgtctttttttggggaccggccgtgtgtgcttcgtcgaccttcggctgcatgcgcggtgttttactgtaaaataggaaagcagtgttgcaagatcgctgcaggagaatttagagattggtgccacatgggcaggagatgtcctggtgtttctgcttatatgctatatcaactatgtgatgtgttttaagggggggtgcaggatggctgcttccaatgtactagtaacatacagagaaacaggttcagacatgtgttcagaaaaaaaagagtcaactattcagccttcttgtagcatgctacattttacatgcgttctcctgttatgtgggcgtattaattagtatgaagcagta

SEQ ID NO: 121194 - DNA, 1332 bp, Zea Mays
cttctgcatttcatccatagcaccaggtagctgagtagtttcggcaaccaggcaccgccggcgtgtggcgcatctccgcggtgaacgaggctggggggtggaaggaccggaccacggtggaggacatggatctggccatccgggccagcctcaagggctggaagttcgtctacctcggtgacgtccaggtgaaaagcgagctgccgagtaccttcaaggccttccggttccagcagcacaggtggtcgtgcggcccggcgaacctgttcaggaagatgctcatggagattgtgacgaacaagaaagtgacgatctggaagaagatccacgtcatctacaacttcttcctgatacgcaagatcatcgcgcacatcatcaccttctcgttctactgcgtcatcatcccggcaaccatcttcgtccccgaggtccgcatacccaagtggggctgcgtctacatcccctcggccatcaccctcctcaactctgtcggcactcccaggtctttccacctgcttttcttctgggtcgccttcgagaacgtcatgtccctgcacagaacaaaggccacgctgatcggcttgctggaggccggcagggccaacgagtgggtggtgacggcgaagctcggcagcgccatgaagatgaaatcggctaacaaagcggggctcaggaagcagttcatgaggatatgggagaggctgcacgtcacggagctcggggtggcagccttcctcttctcctgcggctggtacgatcttgcgtacgggagggaccatttcttcatctacctcttcttccagtctgtcgcgtttttcatcgtcggcgtcggctacgtcggcaccatcgtcccgcagtcgtagcggaagcgtgtccagatcatccgcttctctctggttttcgcattgtgtcttgggtaagtttcgtagtggatgaccggtttgaggtaaagatcatgcatgcggtcctctcttccatcgtctttttttggggaccggccgtgtgtgcttcgtcgaccttcggctgcatgcgcggtgttttactgtaaaataggaaagcagtgttgcaagatcgctgcaggagaatttagagattggtgccacatgggcaggagatgtcctggtgtttctgcttatatgctatatcaactatgtgatgtgttttaagggggggtgcaggatggctgcttccaatgtactagtaacatacagagaaacaggttcagacatgtgttcagaaaaaaaagagtcaactattcagccttcttgtagcatgctacattttacatgcgttctcctgttatgtgggcgtattaattagtatgaagcagta

SEQ ID NO: 121195 - DNA, 1254 bp, Zea Mays
attttttaactagtctaaatacttgacagaagaaattcccgttttcgcttgactattcttcttcgtccctgatttttatccccaaactcaccgccggggcacaacaatccagttctcctttcgccggaatctgtccctcctccccctcctccccgcctctgcgggtactggaccaccgtggagcgggcattcatccaggctaggtccattccttcctttgctcgttctcttctccatcgcggaagctccacccgagttgacgccagaagagaatcggtgccctagggtgttctcgcagaattattttccagaagatttgcagatcgagtcgaaccctatgccccacgttaagcctgccgccggcctgcccccttaccaccaccgggcgctccctggccccgggcagggtccagttcccacgggacatgggatgatgcaccgggaggtccgtgatcagtacgggccgctggggccgaggatgcacctaccaccgctggggcacgggcccgctccgttcccctacgacatgctgcctccgctgcccccaccggaggtcctggagcagaagcttgtggcacagcacggggagatgcagaagctggttatagagaacggccggcttgctgcaagccacgcctcgctgaggaaagagctagccgcggcgcagcaggagctgcagaggctgcaggcgcagggggaggccgcgaaagccgctgaggaggaggagatgaggggcctccttgacaaggttgggaagatggaggccgacctgaaggcccgtgagtccgtgaaggtggagctgcagcaggctcatgctgaggcgcagagccttgtggccatgaggcagaacatggtggcagacgtgcagaagctgagcaaggacctgcagaggaacctcggtgaggcacagcagctccccgcgctcttggctgaacgggatgttgcaaggcaagaaaatcagcatctcaggagtacttatgattacgaaaggaaactcagggtggatcactctgaatctttgcagacgatgaagaggaattatgactccatggttacggagcttgaaaaacttcgtgctgagttgagggacacatctaatcttgacaaaagtggttttttctacaatagcaccacccaaaaggccgatggtatatctagccatctttctgttggacaaattgcttatgatactggctatggaagtacacaggtgagccgtgagcatctttagttctttacttccaaacttaaaag

SEQ ID NO: 121196 - DNA, 2383 bp, Zea Mays
attttttaactagtctaaatacttgacagaagaaattcccgttttcgcttgactattcttcttcgtccctgatttttatccccaaactcaccgccggggcacaacaatccagttctcctttcgccggaatctgtccctcctccccctcctccccgcctctgcgggtactggaccaccgtggagcgggcattcatccaggctaggtccattccttcctttgctcgtaagtgaccctgatttttgctctacgagtttgtttcgtgctccattgaatctaaatcccactccgcatttgcggattcatgccctactactattacaacccctttcatccatccattcctcgactaggttctcttctccatcgcggaagctccacccgagttgacgccagaagagaatcggtgccctagggtgttctcgcagaattattttccagaagatttgcagatcgagtcgaaccctatgccccacgttaagcctgccgccggcctgcccccttaccaccaccgggcgctccctggccccgggcagggtccagttcccacgggacatgggatgatgcaccgggaggtccgtgatcagtacgggccgctggggccgaggatgcacctaccaccgctggggcacgggcccgctccgttcccctacgacatgctgcctccgctgcccccaccggaggtcctggagcagaagcttgtggcacagcacggggagatgcagaagctggttatagagaacggccggcttgctgcaagccacgcctcgctgaggaaagagctagccgcggcgcagcaggagctgcagaggctgcaggcgcagggggaggccgcgaaagccgctgaggaggaggagatgaggggcctccttgacaaggttgggaagatggaggccgacctgaaggcccgtgagtccgtgaaggtggagctgcagcaggctcatgctgaggcgcagagccttgtggccatgaggcagaacatggtggcagacgtgcagaagctgagcaaggacctgcagaggaacctcggtgaggcacagcagctccccgcgctcttggctgaacgggatgttgcaaggcaagaaaatcagcatctcaggagtacttatgattacgaaaggaaactcagggtggatcactctgaatctttgcagacgatgaagaggaattatgactccatggttacggagcttgaaaaacttcgtgctgagttgagggacacatctaatcttgacaaaagtggttttttctacaatagcaccacccaaaaggccgatggtatatctagccatctttctgttggacaaattgcttatgatactggctatggaagtacacaggcaagggcaactcctaccggtctggcagacttaagtggagtccctggaggcgctggccttcgttctggattcgacccatcaagaggcaatgcatacgatggctctcatgttgccaatttcagctcttcaaaaactgggacccatgatgcatcaaggggtgccactggctttgactctctcaagggttctgggtatgatgcttcaaaggcgcatgtaactggacaggcgtcagctacagcggctcatgggggcattgctggttactacgggtccaatcaggcagcacatgcgtggggacaatctgcatcgccctacggatctgtacaggtgccaccatcctacgcatctgggtcaaacacatcctatggcgcagcagcagcagcagcagtgcgtccctatggttcagctcaggcgcaaccatcatatggacaaacgcaggcaccatctgcgtatgggcacacacagctaccatcatcctacagtctagcacaggcgcagtctcccttcaccgctgcgcaggggtcctcgccctatgggttggctgcgcagcctccagcctatggatctgggcgagcaggctccaatgctggcagttacgaagctcctcaaggacgtaaataagttcgcgccaaatttgcatacttggccacttgcgaaagagagctttgttacaccgagtccaaatcctttctgttgctacttaaaccttgtttaactgtgatgtcagaggaacctgttacagccgataaaacgattctctgtaaacgtattatcgtgaccgatgatgccgatgcatttttttgttcagtagagtaggccatttgggaacgcagatttgagttgtgcgatattggttctatatctggcttcactggttggttcattcataacgttaaattatgtttgtttaagttcaaccgtaatcagataccacactaaaaattgctaacagcgtattcgatctttttattgctgatacatctttttattgtcgatactcgagtgtaaatcattatcatttaagttaccaaacagtatccaagtt

SEQ ID NO: 121197 - DNA, 683 bp, Zea Mays
atcatattcaagccaaccaataataataccagccaaaccaagcagcagcagctccggcggctgctggtccgtcctcgcaagcgccgctcgaccggcgaagagatgggcagctgcttctcgtcgtcgtcgagcgggtgggccgcgggcgacgacgcggccggcggcgacgagaggaggagggtgtggcccagcgacgacgacggcggcgagtgggacgtcgacaacaaggccgccatctacatcgccaagttccaccgccaccagtccggcgtcgtctgcgccgactgcgccgaccagcagcagcagcacgcgccggcggccgccactgctgccgcccagtgacttggcttggctagctcgctgatcgatgcatggaatccgagatggtgacgagagttcagttcagtagcagtaatcatgtcttgttctttttgggcgtggatgatccaaatccaatcaatcggtcatgcccccgccatccctcctcctcctcctcctctgcctaaggttttttctctctagctaggactatccatcgagctggttagctgctaatgaataatcatatcgacggatattacctaggcctagattgtgtagtacatacgtatgtatgtaaatttgttccatatatatacacacatatgtgaagagactatatatatatgcgcttgcttttcgaa

SEQ ID NO: 121198 - DNA, 2438 bp, Zea Mays
ttgccacgcaggcgatgatggatcggacggtgcagacagcctcgagatccgtggatccagcgggtaactagccttcccctgtccccgccaccgcgcggcgccacgtccacgcccacgcgctcggcctcgccttccgtttccaaccaggcacctcgccacctcctcgtgggatcgcgcgcaggagcggatcgccgccgcaggagagcgttccgagtccgaatacgtacgggatggtggaggcgccggccggtctgagcgcggcggcgcaggtgagcgcgctgccgctgcaggtggatctcctgcagctgccgccggaggtgcccgcgccaggggatcccgccctgcgcggcgtcctcgacagcctcttcgcgcattggctctcgctaccgaacaccgccgtgctgctcgccagcctcgtgcacaaggccaaggccagcggcggcggcgccgcggcggcgggggctgggatgctgccctccatgttgctgcaggggggagccgccgtgccgcctctctccccgaggtccccgcgcctctcgcggaggcccagcagcctcggcgttgccccacccaaccacgccgcgtcgccgctccgcccgccagccgcgcgccccgccaaggaggtcataccgcagttttattttcgagatggccggccaccgccgtacgaggtgaggaggcaatgcatatcgacagttgatcagctcttcgccggccactcaaatggtctccgggctccagaatttcggatggttaccagggaactctgcaaattaccgacattctttactactgttcttttcgataagatagacaaggagagcacgggattcgtgacaagggaggccttcattgatttctgggtgaataacaatctgatgagtatggatagtgcaacccaagtgttcacaattctgaagcaacagaatcacaattacctcacaaaggaggattttaaaccgattctgaaagaccttttggacaaccatcctggtctggagtttttaaagagcacacctgaatttcaagaaagatatgctgagactgtcatatatagaatattctattgcttgaatcgaattgggagtggacatctaacacttagggagctgaagcgtggaaatctactcaacgcactcaggcatgctgatgatgaagaggacatcaataaagttttaagatacttctcatatgagcatttctatgtgatatattgcaagttctgggaactggacacagaccacgacttctttattgacaaagaaaatcttattaagtatggaaaccatgcattgacatataggattgtagatagaatcttttcagaggttcctagaaaatttaccagtaaggttgaagggaaaatgggctatgaagatttcgtccattttgtattgtctgaagaggacaaatcatcagcgccaagccaagaatattggttcacatgtatagatttggatggcaatggcatacttacacacattgaaatacaattctttttcgaggagcaacttcatcgcatggagtgcatggcccaagaacctgttctatttgaggacatcttgtgtcagctcatcgatatgattggacctgagaatgatagctatttgacactgaaagacttccgaaggtgcaaattgtctgggcatttcttcaacattctctttaatctgaacaaattcatggcatttgaagctagggacccattcctcatccgccaaatgcgtgaagagccatcattgacagactgggatcgttttgcacggagagagtacgtaaggttggcgatggaagaagatggtgaagatgcttccaatgcaagtggagatgtttgggacgagtcactcgaatctcctttctagatttttttttatcaaaaaaaaaaacactgggaagacataacagatgttcacatgcagccctaataatcaagtcaaaatcatgatcctggctaagcatgaaaagttatttggtatcttatatctacagaaactatagttgaggcagctgcatgcttgctggcaccggccatccaaattttgacatgggagtacgtccacccagtttcctggtgacagtgagatttttggccatggcttccatgatatgctctagttttgctgttaaacttcaactgattgttctatggcagcaacaagagaacagcaccttgtgattgttccggaggcacatcatgggtcgttgcagcggatgcaatcatcatatggtggatagtggatagtgaatagttggcgtcacaatttttgttcccatagtcacgattagccatctgtcaaagtactctctctctctctcttcgttgaataaggtcatcaagaaggccggtcatttacttgtgtattctgtactttatttagtttgtagtcacatgaacaatgagctgaaatactatatcacaggtctattgtcatttttat

SEQ ID NO: 121199 - DNA, 872 bp, Zea Mays
acattgcaaagcctagctactactacaacccacacagcgcggcggcggccaatctagcaaccgccctggtcagtccttccagagagtttcatcaggcatgcaacagagctgcgcggcggccaatctagcaaggctcccactcccagtcgtccctgggctggaggacctggccagcctcttcctgccgcggaacggtcctgttcttcccgcccacgattattccagctcgttcgacttcgacgtggtcgccggcctcgaccccgcgtactactactacccacacagctgcgatggcggcgctgctattgccacccccgtcagctcggtgtctgccgagaggaagaggagaaggctggcgtccaaccgatcgtccgcgcggaggtcgcgcgcccggaggcagcggcgcctgcacgagctgtcgttgcgggccgccgagctccttggcgccaaccagaggctccttgtcgacctcaaccgcgtggtcgccaggcacggtgccgtggctcgtgagaacgccaggctcagagaggaagccgctggcctgcggacaaggctcggcgaggtggaggtgggagaggccgcagcggcagcggcagcagggcagggacccctgcgtggccccagctgagatggctttggtagcctttttagtacagtagactgtatagtactgttgagtatagtacagactatagccactgtttgacacagcttattttccgttttttcacaaatttaagccaaagttctgccaaataaacagcttctgcagcagcttatcagttcagctgcttctcaaaatgaactaaaagcagtcaacaagcagaagctgctttttaccggcttatcagataagctgtttttttaaccag

SEQ ID NO: 121200 - DNA, 1292 bp, Zea Mays
atggcatgtggaggctctcgagctgaatccctcccagtcctgctggatgatctcacatgcactctggcatctcttgcttctccttttgttttatcatcattgccgtcgtcgttctctgctaccaccagtgaccagttcccacaggttctgcgtcgctatgactattctggttatgggcaatccactgggaagcctagtgaacagaatacatatgctgacatagaagctgtgtacagatgtctcatagaaacctatggagcttctgaggataatatcattctttatggccaatcagtgggcagcggccccactttggatttagcatcccgattagctcgtttgagagcggttgttctacatagcccaattttgtctggcttaagggtgatgtatcctgtaaaacatacatactggtttgacatatacaagaacatcgacaaaattccattagtcaggtgtcccgtgctagtgatacacggcacagccgacgaggtcgtcgactgctcccacgggcggtcgctgtgggagctggcggacgtgaagtacgagccgctgtggatcaagggcgggaaccactgcaacctagagctgtacccggagtacatcaagcacctgaagaagttcgtcggggccatcgagaggtcgccgccgccgccgccgcctccacctccagccaacgggtccacggagacctccggcgcccctcctgtggaacaacccaagtgcgcggcggacgaggccgactcgaggaaggctagcacggactgccgggacaaggacagagcaaggccgagcgtgggcgtgggcgtggacgagagacgcagcgtggaccggcgggagaagccgccgcggggcagcagcgcggaccggcgggagcgggacagggcgaggaggagcgtcgaccaccaccaccccgacaagccgcgggccagcgtcgaccaggcgaggaagagcatcgaccggttcggaggcatgatgaagtcggtgaggctgtgcaacatcgactgcttcaaggtgacggcgacctccgggagctgaacaagtggaggaacggatgtgggtgggtggtggtaagtgacaggaaacggtagcgctgccgcccgtctgtatgtattcttcttattcccttggtgtaataacatactcttattcaattttattggggtgattggtgtggctgtagcaggaggctgtgtttttggtttctctctctctctctttcttttcttttcctcttccttcctcatacgatacaacgggggcctcgggggctggctctgctccgttttcgt

SEQ ID NO: 121201 - DNA, 643 bp, Zea Mays
gaattcaagaacgtggagttctgctacccgtcgcggccggagaccccaattttcgtgagcttcaacctgcgcgtgccggcggggcgcacggtggcgctggtgggcggcagcgggtcggggaagtcgacggtgatcgcgctgctggagcgcttctacgacccgtcggccggggaggtgaccctggacggcgtggacatccggcggctgcggctcaagtggctgcgcgcgcagatggggctcgtgagccaggagccggcgctgttcgcgacgtccatcagggagaacatcctgttcggcaaggaggacgccacgggggaggagatcgtcgcggcggcgaaggcggccaacgcccataacttcatctcccagttgccgcagggctacgacactcaggcaagctatttaccacaccagcccaccacttttgcagctggcgtatgcatgcagtcgtttcgttggctacacttttctgcctgcttttgcgtgcacactagtactaacaatgcctaaatgtcccgtggaatttatgctctaatttttttcctggttttctatggagcactgaggtgtttaggcccaccgtccacctcatacagtactcactgctccacaaatatttgttgttatagtatttaattatgcc

SEQ ID NO: 121202 - DNA, 3039 bp, Zea Mays
gaattcaagaacgtggagttctgctacccgtcgcggccggagaccccaattttcgtgagcttcaacctgcgcgtgccggcggggcgcacggtggcgctggtgggcggcagcgggtcggggaagtcgacggtgatcgcgctgctggagcgcttctacgacccgtcggccggggaggtgaccctggacggcgtggacatccggcggctgcggctcaagtggctgcgcgcgcagatggggctcgtgagccaggagccggcgctgttcgcgacgtccatcagggagaacatcctgttcggcaaggaggacgccacgggggaggagatcgtcgcggcggcgaaggcggccaacgcccataacttcatctcccagttgccgcagggctacgacactcaggtgggtgagcgtggtgtccaaatgtctggaggacagaagcagaggattgctattgccagagctatccttaagtcacccaagattctcctgcttgatgaagccacaagtgcattggacacagagtcagagcgtgttgtgcaagaggcacttgacctggcttctgttggcaggacaaccattgtcattgcacatcggctctccacaatccggaatgctgacatgattgctgtgatgcaatacggtgaggtcaaggagctgggatcccacgatgacctcattgacaatgagaatgggctctacacatctcttgtccgccttcagcagaccagagattcaagggaggccaatcaggttggtggaactgtaagtacatctgctgtggggcaatctagcagccacagcatgagcaggaggttctctgcagctagcaggtcaagctcaggacggtcaatgggtgacgcagaaaatgataatattgccgagaagccaaagcctcccatcccatcattcaggaggttactgatgcttaatgcaccagaatggaagcaggctctgatgggaagtttcagtgcaattgtgtttggaggcatacaacctgcatatgcatatgccatgggcagcatgatctcaatctacttcttggcagaccatgatgagatcaaggacaaaacaaggacctacgcactcatctttgttgctcttgcagtgctctcattcttgatcaatattgggcaacattacaacttcggtgccatgggggaatacctcacaaagagagtgagagaacagatgcttgcaaaaatcctcacttttgagattgggtggtttgaccgtgatgagaactccagtggtgccatatgctcacaacttgccaaggatgccaacgtggtgaggtctcttgtgggtgatcgaatggctctagtgatccagacagtttctgcagttctcatagcctgcactatgggtctggtgatcgcttggcgtttggcccttgtcatgatagcagtgcaaccccttatcattgtttgcttttatgctcgccgtgtcttactgaagagcatgtccaagaaatcaatacaggcacaatctgaaagtagcaagctagcagctgaggctgtctccaatctccgcaccatcactgctttctcatctcaggaccgtatcctacgcctctttgaccaagcacaagatgggccacgcaaggaaagcatccgacagtcatggtttgcaggactgggccttggcacctccatgagcctcatgacatgcacatgggccctagatttctggtatggtggcaagctcatggctgagcgtcacataactgcaaaggcactcttccagaccttcatgatactagtaagcacagggcgtgtgattgcagatgcaggtagcatgacaacagaccttgctaagggtgctgatgcagtagcttcagtattcgctgttcttgacagggaaaccgaaattgaccctgataaccctgaggggtacaaaccagagaagctaaaaggtgaggttgacatcaaaggagttgactttgcatacccatcaaggccagatgtgattatattcaaaggtttctccttgagcatccaaccaggcaagtcaacagcccttgttgggcaaagtggttctggtaagtcgactatcataggtcttatagagaggttctacgacccacttaggggggtagtgaagatcgatggcaaagacatcaaaacatacaatctcagagccctgcgtcgacatattggattagtcagccaagaaccaacactatttgcaggtacaataagagaaaatattgtgtatggtacagaaacagcaaccgaagcagaaattgagaatgctgcaaggtctgcgaatgcacatgacttcattagcaacctcaaggatggatatgacacatggtgtggtgagaggggtgtgcagctctcaggaggccaaaaacaacgcattgcaattgcccgtgccatcctgaagaaccctgcaatcctgctactggatgaagctacaagtgcactggacagccagtcagagaaggtggtacaagaggcattggaccgagtgatggttggcaggacaagcattgtggtggcacacaggctcagcacaatccagaactgtgaccagatcactgtgcttgaaaaaggaattgttgtggagaagggcacacatgcatcccttatggctaagggtccctctggaacatactttggattggtcagtttgcaacaaggaggcaaccagcactgagtttttttgcatgagaacacagcagtacttacaaatttgttgctccaatcaaatgatgtattactttggatcaatctgcaaaagatatctagcctattccaactagcttgggactgtaagctttgttgttgttgatgatgaaaacgcgagatggcccagcaggcgattgaaatttctgtgacagtggggtgtttttcttccctttgttctattagcactgtagcacacataagtctgacgagcatatagtttcttgatataactgttggacatgtattgtagttgtgcaacggccaggaaatctctgataatatgtacattaggtattatttcatcttattctctactgacttttgtactcgaaattattacattagcttttatttt

SEQ ID NO: 121203 - DNA, 1285 bp, Zea Mays
gagaagaagggtcaaggtagaaaaggaaaagaaaagaaaaggattgagaagaaaaagacaagccgggcaaggatggtggtgtccggtgtggtgggaggcgagccgcgagttggtggggaaggggtgggcggtggcagcgcaaacaagcaactccttcccaccttcccttcccctccccttctcatcctttctccgattgcctccaattacgattctccgatccccattcctgccccacaccctcgcgttcggctaatccggcggcatgcggcgcggcggcgtggctgcggcggcggcggacggtgatgtggagtcgcgtttccgcggggtgcggaagaggccgtggggccggtacgccgcggagatccgcgacccggcgaagaaggcgcgcgtctggctcggcacattcgactccgccgaggacgccgcccgcgcctacgacgccgcagcgcggatgctgcgcggacccaaggccaggaccaacttcccgcaccccgccgcccaccaccaccacctcctccacatgcccgccgccgccgcagcaccatacacgactcccactgccacaggcgtctcgacgccgccggtccctaggccggcttgcagcagccttagctccaccgtggaatccttcagcggcgcgcgcccgcggcccgtgctcccgccgcggcccccgccgccaccgatcaccgacgtcgactgccgcagcgactgcggttcctcggcctcggtcgtggacgatgactgcacggatgcggccgcctctccgtcatgcccgtccccgctcccgttcgaccttaacctgccccccagcggcggcggctgcggagccggcgtcgggtcttacgctgatgaggagggcgagctcaggctcacggcattgcggctgtgacgtcgagctcaatcgagccgttgcctagagaaagatgaaaaggagaaaaatatttggttcttctcttctctcgttgccgacacgaactctccctccactacgatgttgttgtttacctgatatgatgatgattactatttgcctgaatcctggccaacttatctgcctgcttgttttcgggcgattggggtttatcgccaaatcttgcagcagctgttgtactgtaatatagcaacatttacttccttcctcttgtgagggaagagacagacaaagtaacttatttcaacctttagctacagtttcccttcttgtttttactttttactcttcatgtataacttgtttgggatcgatgaactggaaaaaaatcctttaaatgttgagatcaaa

SEQ ID NO: 121204 - DNA, 154 bp, Zea Mays
aaatccatagtctcatctattacatcacaaaagtctcatccatagtcataagacacatctcatccaatcataataagagacaatatctcatatatagtcataataaaagtctcaagtatcacaacacataacatggaagctcacgatcgccgat

SEQ ID NO: 121205 - DNA, 1417 bp, Zea Mays
ttttggcgaagccacactttagcgtgtgcatttttttccaaatattaaaaaaaaacgccggctgcaactgcaatcggcgacggtgaaccatagagcagccggcagcgtcgccgtcgcgccgctcccgcactgctcccctgccccggccgccgccgccgtcgtcgtccgcccgctcaccgctgatcgatgaccgcccgctctggcgctcggccttcgccccgtttctgccctcgcccctcagccgcctcggcgcctgtccgagaccgacgtcctctctccatccagtcagttgaccagctcgactgctctagctcgtgctctccgtcgcggatttgatttcttcctttcagcccaacccagcccaaagccgccagatcgcggcactccgtccaaccctcggcgccaccgatccccttctccaccccctctcctcctcgtcgtcggtgaagatgattccccagagccagagcagctccctgcagcgccttcaacacgtcgagaagcggatagtgcgggtgctggagcttgcgggagcggtgatggaggagctgggatactctcagggccctcgcaccgatgcagtcggcgcgcactgccgcgagttcatgatggctatgaaggaaattcaaacgacactgcgtgaggaaatcaaaagtgcttgcgaataccgtccatttgaaaagtgtgattacagcgcaaggattgctaatgagatatgttgcaagaagctggagtatgtactcgagaagttggatacaatgcaacaaaaccttgaacagagcactgataatgtttagcgagctggctacatattagttgggaatacaacagatatctgatcgatcagtatgcagaaggaatgtagaagcattctatcaactcatgattggaggaactctgggattgtaacttgtgattccatgttctgtggcagagttattagttttggctgcctgctgatgtccagtagcatagcaatgggtccttgggcttgaagtcgtgggattttgaggcactatttttaccgacgagaatttcctcttctgtattttatcgacttgcttcatccttaaaacatgcctttggtacattgttaacccatttcttcactggtgatcttcatatattatgcagtgaccgctgttctgattttattgctgatgctggcccgacatccattgcattagaagctcatcaggttttatcggctgcaaatgttgtatgactgtttagtctagcaatctagtttagagagcaagtaagacataaatgagccatttatctgtcactaaccttgaagtctatgacttgtataaaatggctgggtatgccgacaatatcaacctcttcggacatctgattttcggtgtatcttcggatcttcctagtatctttcctgtttgcagacttgttcttt

SEQ ID NO: 121206 - DNA, 2181 bp, Zea Mays
tttttccaaatattaaaaaaaaacgccggctgcaactgcaatcggcgacggtgaaccatagagcagccggcagcgtcgccgtcgcgccgctcccgcactgctcccctgccccggccgccgccgccgtcgtcgtccgcccgctcaccgctgatcgatgaccgcccgctctggcgctcggccttcgccccgtttctgccctcgcccctcagccgcctcggcgcctgtccgagaccgacgtcctctctccatccagtcagttgaccagctcgactgctctagctcgtgctctccgtcgcggatttgatttcttcctttcagcccaacccagcccaaagccgccagatcgcggcactccgtccaaccctcggcgccaccgatccccttctccaccccctctcctcctcgtcgtcggtgaagatgattccccagagccagagcagctccctgcagcgccttcaacacgtcgagaagcggatagtgcgggtgctggagcttgcgggagcggtgatggaggagctgggatactctcagggccctcgcaccgatgcagtcggcgcgcactgccgcgagttcatgatggctatgaaggaaattcaaacgacactgcgtgaggaaatcaaaagtgcttgcgaataccgtccatttgaaaagtgtgattacagcgcaaggattgctaatgagatatgttgcaagaagctggagtatgtactcgagaagttggatacaatgcaacaaaaccttgaacagagcactgataatgtttagcgagctggctacatattagtaagtgtacccccttttttttgcaataaagtgtaaactcttagcaaataaggactactgtataatgaaagaatccgtttaatcaagtgatgttctcaatactctgcctgcagtggtagagttggtgaattagctcttttcagttcctggtacatgcaaaatgcaaccagtatacactacatgacttccgttgcattatacgttacatgtctacagggacttttattttgatttgtgaatttgcttgcagaagttctttcaatttgtatcttgatgttagccttcatcttctcatcctcgatgtgtgattctgttgtttgtgagggtaatgtttaaccagacatttgtatgcaaatactatgctgatatcatctggtatgtgcttttgtaatatgtttatttggtttggtgatgtctgggttaggtatcttcctgtgtgcttccatatgtccacaagggggtagtcctcttttttttgccccatcgtccatatgtcctgtatacttccatatgtcctgtttgaatacaaagctaatcactagccagctaattatatgtagcccatccaaacagggagctaataagtgggctaatttttatcccaatccccaaccagtcactggccaactagctgaggaaccccatctagtttgggctaaaagcgtgtaccaaccgctcaaacaccaaaaatcccctgattctataataatctcttctggtactcatccttgacaggttgtctgcctatcttctaaatgaggaactggtttcctgagttaaattactcatactctgctgattactttcaggttgggaatacaacagatatctgatcgatcagtatgcagaaggaatgtagaagcattctatcaactcatgattggaggaactctgggattgtaacttgtgattccatgttctgtggcagagttattagttttggctgcctgctgatgtccagtagcatagcaatgggtccttgggcttgaagtcgtgggattttgaggcactatttttaccgacgagaatttcctcttctgtattttatcgacttgcttcatccttaaaacatgcctttggtacattgttaacccatttcttcactggtgatcttcatatattatgcagtgaccgctgttctgattttattgctgatgctggcccgacatccattgcattagaagctcatcaggttttatcggctgcaaatgttgtatgactgtttagtctagcaatctagtttagagagcaagtaagacataaatgagccatttatctgtcactaaccttgaagtctatgacttgtataaaatggctgggtatgccgacaatatcaacctcttcggacatctgattttcggtgtatcttcggatcttcctagtatctttcctgtttgc

SEQ ID NO: 121207 - DNA, 227 bp, Zea Mays
cgcctcctcccccgcccgccaacctccctctacgcgcctgcctcctcctcggccggatcccgctgccagcgcctgatccaccccagcctccaccgccgccgcgctcgcgctcccccgcgacagccgccatgcgccctatcttcgccgtgcctgcgcctcctcccccgcccgccaacctccctctacgcgcctgcctcctcctcggccggatcccgccgcaagcgcct

SEQ ID NO: 121208 - DNA, 1095 bp, Zea Mays
gttttttttttttggttgggtcggtttttttttcagattagataaaaaatcatgactcgtgctttgcgaataaaaaactgtgaccgtatccgttacattaattgagtcgggtgtcgggtggctatgctcaagtctaactgtggttccctccaaaatccacgaataaagaggataagccgcagccttcactgtccatcgtctccctctgtactccttcctcagcctcatcctatccaagaacgcagaaccgagacccacgaactcgcagcaggccagcagccatggccgcccccgcaacgagctccctgctgagcacgctgctgcagctaccgctcgctccgttctcggggaagagctcgccgccgtccgtggtgcacgtggcgcgccgggcgccgacggcggtggtggcggccaaggggttcaatgtgcagatcctggtggacgagaacgagggggaggagtccatctttcgcaggttccggcgggaggtgatgcgcgccggcgtgctgcaggagatcaagcgccgccggaggtacgagagcaagacagacgagaagaagcgcaaggcgcgcgaggccggacgccgcaaccgtcgcaggcgtatgatggacgagccgaggttcccagaagaagacgccgacgcgacctccaaggctcgggacgaggacaacgacaactgggaggtcgacggcatcctgtgaaacaaaaggaacgcatgcagtccacagttcaatttcacagcgtccagatgatgcacagcacagacccgtcaaattcgagttctttttgaggcccccccgtaagacgcaatccaaaccgtatatttgcgttttggccgcgttcgtttccacttcagtgtccaatggttacagctgcaattgcacaactaacgttcgcaaatgtagcgtcctccgatcccttctcgttccctgagctcttcttgtgtccatggtgtttgaaaccctactcttgtgtctgttccaacatctatcctttgtgtagcttgcgctcatgaaagttcagaaactgatgaagatacgataatgtctctgaagatgaacaaccaggaatcgcatgccatacctgatgcgcgcc

SEQ ID NO: 121209 - DNA, 544 bp, Zea Mays
gtcggcctccactccaccttcccgaaaaagcttaccctttgtgtttgtgtgtctgtctggcaatcgatcgatctccatgacgacgtccccgccgcgcgcacgcctgctcgccatggcgctggcgctcgcctgcgtgctgctcgtcaggtccgcggacgccgccacgcccggcggctccgcgtacgggtgcaacccggccacggacaggacgtgcaggcccgagggcgtcggggtggtgctgcctgacggcggcattgacctcgacggcgacggcgacgaggacgagctgccgcagttcgacccacacttcacgatcctcggccatgcccagtgagtgtgagtgtgagtacaggtgcagctggctggttggtcatctcagtcggtgtactggacatgcgtcgtaatctctgtcgttcattcgacgcgagaggaattgaatgggcatgtatatgatggtaatctgttcactgttcaaacttgaaagcgcactgattcaagggcaaaaactgtgacgttgcagctcctgctgacaccattttttaga

SEQ ID NO: 121210 - DNA, 2043 bp, Zea Mays
gtgcagcggtggcgttgtatactccaccactctgctaaagagtaaagacccaagcagacatagatcagtgggtcctcgtcaagcagcacggtgatccacgcttccacgggcgcacagggctttttgccggccattacagaggagaggaggccgacaaaggcgtggcagaggtcccatccatgggagaggaagcggccgcggccacggccacggccaccgtggcggcagggaacgcacctccgcacctgctcctggtatgcttcccggggcagggtcacgtgaacccgatggtccgcctggccaagcgcatcgcggccaagggcccccttgtgaccttctcctcgctctccagcatcggggcgaagctcaccgcgtccgcgggcgtatcggccggcggcgacggcgtgccggtgggccggggccgcgtccggttcgagttcatggacgacgaggaccccgggcctgacctggacgacctcatgcgccacatcgccaaggacggcccgccggcgctggccgagctgctggggcggcaggcacgggccgggcggcccgtggcgtgcgtggtggtgaacccgttcatgccgtgggcggtcgacgtggccgccgacgccgggatcccctcggcggtgctgtgggtgcagtcgtgcgcggtgttctcgctctactaccaccacgtgcacggcctcgtggagttcccgcccgaggacgacctggacgcgcgcttcacgctgccgggcctccccgagatgtccgtcgccgacgtgccgtcgttcctgctcccgtccaacccgtacaagctgctggtggacgcgatcatcgcccagttccacaacatccaccgcgcgtcgtgggtgctcgccaactccttcacggagctggagcccgacgtggcggcggcgctcccgggcgtgacgccgcggccgccggagctcatccccgtgggcccgctcatcgaggtcggcggcgggcgggacgacgacgagggcgcggtgcgcggcgacctgatgaaggccgcggacggctgcgtggagtggctggacgcgcaggccccgcgctccgtggtgtacgcgtcggtgggcagcgtggtgcggctgaacgcggaggaggtgggggagatggcgcacgggctcgcgtccacggggcggcccttcctgtgggtggtccgccccgacacccggccgctgctgccggacgggttcctggactccgtggccgggcgcggcgcggtggtgccttggagcccccaggaccgcgtgctggcgcacccgtccaccgcctgcttcctcacgcactgcgggtggaactccaccctggagaccatcgcggcgggcgtgcccgtggtggccttcccgcagtggggcgaccagtgcacggacgccaagttcctggtggacgagctcgggatgggtgtccgcctccgcgggccgctgcggcgggacgccgtgcgggaggcggtggacgccgcagtggcggggcccgaggccgacgcgatgctcgccagcgccaggaggtggagcgcggcggcgcgggaggccgtggcgcccggcgggtcctcggacgcgcacgtccaggcgttcgtggacgaggtgtcccggcgagcttgtggcgtgcaagtggctaaggtcgtgccgccgtcgtcagaggagcttcaccagtcaccggtcagagtccaaacctgatcagcagtcatcccgtgttggttggtattgttaccgtctgtctgatacgaaccaattttttgcttcctctaccgtcttgacgccatttgtggactgtggccggcggtcgcgcagcgtatactgaatcacgagtatagcttgggtttagctggcgtctcgccggccgcgtggctttcattttccgggaaaaactattcttttttaagaacttgtttggatgcacaatgtaatcctttattatatagtctagcaaggtattatatacctctcaatcttctccaataataattatgcatccaaacaaacctataaggtcaccaatggtactcgaaacttttatttatgtacatattttacgaat

SEQ ID NO: 121211 - DNA, 508 bp, Zea Mays
acagcgcagcacacaagcgcatcgcgctaaccataaacaagaactacgactcagatgtgcaggctggcactgagacttttacttaacagagaattgttctagaggaggactagagggccacaataatgctccatggaaacacacactttggaaggttattagttaagtctcaatggtgttactttttgcaaaatttgcactgaactttaattttgggtggtgtattcataaacttgggtcactggctatgaaaactgtactgctttctctaggtgatcaatactatatgctgttgaacttatatctttttaatcactaggcttttgcagcatttcgtaggaatttgttgaatgtacgtatacatacagagacagcaaaaactgccatgctttctttcataattttaaggtgccaaaaaaagtcttgtaaacaattgtgggaactgtgctgtccttaattgcctgatttttgtttcttccacaagcatttaggaaggatgctgttacaa

SEQ ID NO: 121212 - DNA, 915 bp, Zea Mays
atgtatccaccaggcaaggcagttgggatggcagctgcccatgatggttatggggcgtcaggcaggggcctccgcgagggggacgtcgtgctcctcgctctgccgaactccatcgctagggttcgggacaccagccccgccctcgtgttcgccacgcccgacaacgtcgagaagctatcgccgttgcgcgtcccggtcgtcctcgtccccgacgccttccacctcgtgggcgacggcgcccccgagttcgcgcccttccccgagttgctgctgctcgattccgagccactgtcgggcccttcggtacgccaggacgacgcggccgccatcctctactcgtcggggacgggcggccagagcaagggcgtcgtgctcacgcaccgcaacctcatcgccacggtcgagctctttgtgcgcttcgaggcctcgcagtacgccgcacctgcttgtgacaatgtctacctggcggcgctgcccatgttccacgtctacggactctcgctcttcgccgtgggacttctctcgctcggttccatggtggtcgtcatgaagaggttcaacgcaggcgaagccgttaaggccattcgcagattcaaagtcacgcacttcccgatcgttccgcccatcatggcggcgctggtgcacaccaccaagccagcggcaatgccgttggaatgcttggtgcaagtgtcaaccggtgcagcgccgtccagccgcaggctcatcgacgatttcgtcaaggctttccctcacgtcgatctcattcaggttcctgcctaccccacttacagtcacgtcattcgttcttccctaccttgcccaagtgtgtgtattccacattggtattacatgctcgtgagtgcaggtgtcgaaatcagtggtacaacgtacaaggtgcccgtatggggtgtttga

SEQ ID NO: 121213 - DNA, 2406 bp, Zea Mays
ggaggagtccaatcagctggcaatcaactaagcagaaggtggtggcgctatcaagttgtgaggcggagtacatcgctgctgctactgctgcatgtcaagctgtttggctggcacgactgcttgctgaaatcaggaactcagagacaagcagacctttgctaagggtggacaacaagtccactatctcgctgattaagaatccagtgcatcacgaccggtcaaagcatattgataccagatttcatttgattcgggagtatgaaaattcagggcaaatcaaggtgaagttcatcagtactgaagaacagctgggggatattctgaccaagccactcggcaaagtcaagttccaggaactctgcaccaagattggcctaagcctagtgtaagtagatgcacaagtcttaggaggagaattgttaaaataatccttgtgcttttagctggtgtttgttttattttctgttagctgaagtcagtcgcacggtctgttgttggctgtgcgtgtagtgggctcggacgtgcgcgttttgttcgcatggagagcgcgtactgcgccatgtatccaccaggcaaggcagttgggatggcagctgcccatgatggttatggggcgtcaggcagggtgttagtgccccgtttctaggaagtagtaggtcacgttctctattgagtcttttatattccagtgaatagagtctgaaaaagctgttcgttgttcacagcaccaaatcagagtgtctccacttgtgtttgtgtgtgtgcgcgattttctctgcaacctgcagggtgagctcgccggcaacaggaggttgtttctccggcgaggtctgacagtggtgttctgggtggccgacatgatagaggaggaggaagtggaggaagaagaatgcatattagggatttaggaaaatagccttggctctggtggcccagagcacggcagaggctctcttggggctgtattccaatatttatagatagaagattacatggatgcatgtgctacaatcacggaggcacagcctaaacaggaatcaaggtttccatctatctatagatagataacacctttctatgtttaacacacacgccatagccctccgcgcgcgtcaagcgcggaggagccagcaagctggtggaggttttaataatagagaatcccctgaactacctacctgatgcatctctttcctctcaaagaagaaagaaagaaagaaagaaagtagcagatcgcttgttgctgcgtttttcaggagctcacgacattaatgcgctgtaatgtagggtgctcctcctggccaaatgggagcaagctatcctcgcatgtttctggtcctcctgctgcttcatggagccagtgctgctttgaatcctccaacagcagggccaaaatggcagactctgagcggtcgtccccctcaagtcgtagctcgaggaggattctctgcgaccgcataggcttctgtaagacagggctgacccttgataactcgacgactgtcgctgagatcttccccaagatggacaggacgtacaagctgcagggagaggatgtccatggctggttctccctagatttcaccgcggagcagctggttcagaacgtcactttgatccagaacatcttttctcgcccgagcacattcgatgcctcctttgggatgtacacgctcgatgatgtcgttgaactccacccccctcaaatatggctgaatgtagagtacaattcattctttatggagcacaagttaagcagcgaggactacatactagagctaccaaaagattttagcctcacgtacatctcctcgccggagattgggttcctgaaaagcttgagtgggaagctcaggaacgccaagacaaagctcatcttccggttcctcaacgaagacgtcgaggagccttcgaccaagaaaacgtacggggagctcctgaaagatctgaagtccatcaaggagtttgcagctggcgtccttgtgcccaagacgtacatctggccactgaaaaaggaccagtacttggcgccatccaccagcttggtcaaggatgctcatgccctcggcctggaagtgtacgcctccgggtttgccaacgatatcatcttgagctacaactacagctacgatcccactgccgagtacttgcagttcatcgacaatccagacttctctgtcgacggtgtgatcacggacttcccgcccaccgcatcaggagctgttggtaagaactatccaatgttggaaggaactgaaaggagctgaaaccacactccctcttttgtaaaatctcaagtttttttttctctctcttttttccccccagcttgcttggctcattccaagggcaatcctctaccacctcctggaagtaagctcaagctatgaattgtttctactgtta

SEQ ID NO: 121214 - DNA, 3746 bp, Zea Mays
ggaggagtccaatcagctggcaatcaactaagcagaaggtggtggcgctatcaagttgtgaggcggagtacatcgctgctgctactgctgcatgtcaagctgtttggctggcacgactgcttgctgaaatcaggaactcagagacaagcagacctttgctaagggtggacaacaagtccactatctcgctgattaagaatccagtgcatcacgaccggtcaaagcatattgataccagatttcatttgattcgggagtatgaaaattcagggcaaatcaaggtgaagttcatcagtactgaagaacagctgggggatattctgaccaagccactcggcaaagtcaagttccaggaactctgcaccaagattggcctaagcctagtgtaagtagatgcacaagtcttaggaggagaattgttaaaataatccttgtgcttttagctggtgtttgttttattttctgttagctgaagtcagtcgcacggtctgttgttggctgtgcgtgtagtgggctcggacgtgcgcgttttgttcgcatggagagcgcgtactgcgccatgtatccaccaggcaaggcagttgggatggcagctgcccatgatggttatggggcgtcaggcagggtgttagtgccccgtttctaggaagtagtaggtcacgttctctattgagtcttttatattccagtgaatagagtctgaaaaagctgttcgttgttcacagcaccaaatcagagtgtctccacttgtgtttgtgtgtgtgcgcgattttctctgcaacctgcagggtgagctcgccggcaacaggaggttgtttctccggcgaggtctgacagtggtgttctgggtggccgacatgatagaggaggaggaagtggaggaagaagaatgcatattagggatttaggaaaatagccttggctctggtggcccagagcacggcagaggctctcttggggctgtattccaatatttatagatagaagattacatggatgcatgtgctacaatcacggaggcacagcctaaacaggaatcaaggtttccatctatctatagatagataacacctttctatgtttaacacacacgccatagccctccgcgcgcgtcaagcgcggaggagccagcaagctggtggaggttttaataatagagaatcccctgaactacctacctgatgcatctctttcctctcaaagaagaaagaaagaaagaaagaaagtagcagatcgcttgttgctgcgtttttcaggagctcacgacattaatgcgctgtaatgtagggtgctcctcctggccaaatgggagcaagctatcctcgcatgtttctggtcctcctgctgcttcatggagccagtgctgctttgaatcctccaacagcagggccaaaatggcagactctgagcggtcgtccccctcaagtcgtagctcgaggaggattctctggtttgtttcctgactcgagccagatggcctaccagcttgccttgtctaccagcttgcctgacgtcgttctgttatgtgatctacaattctcaagcgaccgcataggcttctgtaagacagggctgacccttgataactcgacgactgtcgctgagatcttccccaagatggacaggacgtacaagctgcagggagaggatgtccatggctggttctccctagatttcaccgcggagcagctggttcagaacgtcactttgatccagaacatcttttctcgcccgagcacattcgatgcctcctttgggatgtacacgctcgatgatgtcgttgaactccacccccctcaaatatggctgaatgtagagtacaattcattctttatggagcacaagttaagcagcgaggactacatactagagctaccaaaagattttagcctcacgtacatctcctcgccggagattgggttcctgaaaagcttgagtgggaagctcaggaacgccaagacaaagctcatcttccggttcctcaacgaagacgtcgaggagccttcgaccaagaaaacgtacggggagctcctgaaagatctgaagtccatcaaggagtttgcagctggcgtccttgtgcccaagacgtacatctggccactgaaaaaggaccagtacttggcgccatccaccagcttggtcaaggatgctcatgccctcggcctggaagtgtacgcctccgggtttgccaacgatatcatcttgagctacaactacagctacgatcccactgccgagtacttgcagttcatcgacaatccagacttctctgtcgacggtgtgatcacggacttcccgcccaccgcatcaggagctgttgcttgcttggctcattccaagggcaatcctctaccacctcctggaaaggacaccaggccgttgatcatcacccacaacggcgcgagcggcatgttcgccggcagcaccgaccttgcctaccagcaggcgatcaaagatgccgccgacgtcatagactgcacggttcagatgtcaaaagacgggacggccttctgcatgcagtccgctgacatgtccagctccacgaccgcgtccaccgctttcgcgtccaaggcctccactgtccatgagatccagaacaagtccggcatcttctcgttcgacctgtcatggagtgagatcgcgaccttgaagcccgacctcatctccccgtttgctcaggcaggcatgaaaagaaatcctcaagcgaagaatgccggcaagctgatgactgtgccccaattcttggacttggccaaggccagcaacatcaccggtatactgatcgaaatagagcatgcttcgtacctggccaagagagggatcggcgtggtggaggcggtgtccagcgcgctgaccaaggcgggctacgacaaggagaccaagcagcaggtgttcatccagtccgacgactcgtcggtgctcgcggcgttcaagaagttcacgacgttcaggagggtgctcaacatcgaggccaagatcagcggcgcctccaagccgtcggtggatgacatcaagaagttcgcggacacggtgaggatcaaccggaactcggtggcgcaggtcaccgggtacttcatgacgcacttcaccgacacggtcagtagcctgcaggacgccaacctcaccgtcttcctcggcgtgctcaagaacgagttcatgaacctcggcttcgacttcttcgctgacccgacgatcgagatcgttacctactcgtgggcggtgctggccgacgggctcgtcacggactaccctgccaccgcggcttcgtacttcagaagtccatgcagtgacatgaacctgaacctgagctactcgatcctgcctgcacaacctggcgctctggtgaacctggcagcccccgggacgctggctccggcgggagcaccggcaccattgctccaaccctccgacgttgtggacccgccgctgcctccagttaaagctgtgatcaccgccgacgcgccagcgccagaggcggctgacaatacctcctcggcgtccagctccaacgcggggaatggcctcttgtgggctgccatcgttgccctcttgtccctgagctttctgcgctgatcccttcctcgatggcttccattgtactcccgcatgtccccctcccccctacatcctcgaatgtgctgtaacataatgttccttaaatagatataacctgtcattaacctgcacataaatacaggtcagaaaaagtttaccctgcaccaattcatgattggatagtggatact

SEQ ID NO: 121215 - DNA, 291 bp, Zea Mays
ctgatacctcatttgattatctgaagggagggctatgaagttaaggacaaaacagccagaatggaagtctcttattcctctacaattgagcagattgagcaggaaatctgctttgcgtttctttttgttccccaaggttcagtcggctggtcaatcgccatatggtacccagtttatcttaacgtgtatgatttgataccaatgaatggatatatatattgggcaggcctgggcatatttcactcaggaattgaaggttcttttctctgccatatgcacgcatattttccc

SEQ ID NO: 121216 - DNA, 1675 bp, Zea Mays
cgggagcccgcgggtgagcggaccgcgccccggctgcctgtcgctgagcctggcttagtggctttgcttgcgtacgatagtggggaagcggtggtgcgctcgtcagccgatgagccgacacacacacagacacagcacaggacacacggcccccggtttctccccgttgctgctgtcccgccggcgtccagtctcggcggggctctagctggggacgcgccggctcgcgctgtgacctgggagctctggactctggaggcgctgcaggcggtcgggcgggcgatggggtgggcttcctgctgcaagcggtctgacggggctgaacctggcaggaggaggaggaagaagaaggacacggcgtggcggatcttctcactcaaggagctccagtcagcgacgaacaatttcaattacgacaacaagctcggcgagggcgggttcggcagtgtgtactggggccagctctgggacggatcacagatcgccgtgaagaggctcaagagctggagcaacaaggccgaaacggagttcgctgtcgaggtggaggttctggcacgcgtgcggcacaggagccttctaagcctgcgcgggtactgcgccgaaggccaggagcgcctgatagtctacgattacatgccgaacctgagcatacactctcagctccatgggcagcacgcggcggagtgcaacctcagctgggagaggaggatgaggatcgctgtggactccgcggaagggatcgcgtgagtcaattcgtgctctcatctcaccaaaactccagcgaccatcttcttacttacttactaatccaattcagaacttgttccaactaacccaacctttggggcctttggcagctacctgcaccacagcgcgacgccgcacatcatccacagagacgtgaaggcgagcaacgtgctcctggacgccgacttccaggcgcgggtcgccgacttcggcttcgccaagctggtcccggacggcgcgacgcacgtcaccaccaaggtgaaaggcacgctgggctacctggcgccggagtacgcgatgctcgggaaggcctccgagagctgcgacgtcttcagcttcggggtcacgctgctggagctggccagcgggaggaggcccgtggagaagctgagccccaccgccgccgcgaagcagaccgtgacggagtgggcgctcccgctggcccgcgccaggaggttcggcgagatcgccgaccccaagctcggcggcggattcgtcgaggaggagctcaagcgggtggtgctcgtcgggctcgtctgcgcccaggacaggccggagcttcggcccacgatgtctgaggtcgtccagctgctcaagggagagtctgctgagaagctcgacagcctggagaacgactgcctgttcaagcctggtggtggctcgttccagggctcggactgcgtcggcgagggcgagggcgagggcgaggggaggagccccggagcagatggagggatacaggaggcagttgattcgagcgagacagtttcctcagcaagctagtgtgtggtattggcagtagctggttcctcagcaagacagcagctccctgcctctgggagaaacgtgtgttgatcagtgtattttttgtgtggttaatccttgctattagcgagttaattcgggagtttcattgcccagttctcct

SEQ ID NO: 121217 - DNA, 1762 bp, Zea Mays
cgggagcccgcgggtgagcggaccgcgccccggctgcctgtcgctgagcctggcttagtggctttgcttgcgtacgatagtggggaagcggtggtgcgctcgtcagccgatgagccgacacacacacagacacagcacaggacacacggcccccggtttctccccgttgctgctgtcccgccggcgtccagtctcggcggggctctagctggggacgcgccggctcgcgctgtgacctgggagctctggactctggaggcgctgcaggcggtcgggcgggcgatggggtgggcttcctgctgcaagcggtctgacggggctgaacctggcaggaggaggaggaagaagaaggacacggcgtggcggatcttctcactcaaggagctccagtcagcgacgaacaatttcaattacgacaacaagctcggcgagggcgggttcggcagtgtgtactggggccagctctgggacggatcacagatcgccgtgaagaggctcaagagctggagcaacaaggccgaaacggagttcgctgtcgaggtggaggttctggcacgcgtgcggcacaggagccttctaagcctgcgcgggtactgcgccgaaggccaggagcgcctgatagtctacgattacatgccgaacctgagcatacactctcagctccatgggcagcacgcggcggagtgcaacctcagctgggagaggaggatgaggatcgctgtggactccgcggaagggatcgcctacctgcaccacagcgcgacgccgcacatcatccacagagacgtgaaggcgagcaacgtgctcctggacgccgacttccaggcgcgggtcgccgacttcggcttcgccaagctggtcccggacggcgcgacgcacgtcaccaccaaggtgaaaggcacgctgggctacctggcgccggagtacgcgatgctcgggaaggcctccgagagctgcgacgtcttcagcttcggggtcacgctgctggagctggccagcgggaggaggcccgtggagaagctgagccccaccgccgccgcgaagcagaccgtgacggagtgggcgctcccgctggcccgcgccaggaggttcggcgagatcgccgaccccaagctcggcggcggattcgtcgaggaggagctcaagcgggtggtgctcgtcgggctcgtctgcgcccaggacaggccggagcttcggcccacgatgtctgaggtcgtccagctgctcaagggagagtctgctgagaagctcgacagcctggagaacgactgcctgttcaagcctggtggtggctcgttccagggctcggactgcgtcggcgagggcgagggcgagggcgaggggaggagccccggagcagatggagggatacaggaggcagttgattcgagcgagacagtttcctcagcaagctagtgtgtggtattggcagtagctggttcctcagcaagacagcagctccctgcctctgggagaaacgtgtgttgatcagtgtattttttgtgtggttaatccttgctattagcgagttaattcgggagtttcattgcccagttctcctatgtgactgtcatctcttcgtgttggcatggttctatcttctatggttccagatgttcactgcactggtgttagcgtttcgctacttcagtgcatcaatggttttgtgtgcaagtccgtaataatacatttttgaggttttcatcatgcaaggttcatttcttcgagcacgagtactgcaatgaagttttcagacaaaaca

SEQ ID NO: 121218 - DNA, 113 bp, Zea Mays
gagaaacgtgtgttgatcagtgtatttattttttgtggttaatcctttctattagcgagttaattcgggagtttccttgcccagttctatcttcgtgttggcatggttctatc

SEQ ID NO: 121219 - DNA, 2689 bp, Zea Mays
gctgcactccatacgcggccgggagctcccccggttccaccacctcctcacctcatccgtctgaagccgccgcttttgcctcgacctcgcccgcagtccgcgatagcgcgggttgccacccgtccgatcgcgcccggacgaccgcgaccccctcccctcatgttccgcggccatgcccctctcctccaccacctcgccgtcggcgggggcggccgccgccgccgcagtgcgcaccgcttcgccgcctcgccgcatcgccacccacgttttgttcaggcagaagctaggcattccggcggggttccaggctcaacatgtgaaatgtttacctcatttgatcagatctattgtaagaggtgctagatcagatatcactgacggtgacaatggaacaactgagcccgcgagggaactattggagcgtctgtttgccaagacaaagagtctagatccaagcgcttctcagggtagggaactgagcatgagcattgaggtcctgaagactgagtttgaggctgccttatcaatcctaaggaagaaagagaaggatcttcgtgatgcggagaagaaagtctccgtggataggtcaaggttgaaccagacgaagcaggacctcgatcagagggaggaggacatcatcaaagcatactcgaggcaacatgaaatggagaaagcactgatgaaggcgagcagggatttgactctacaagtccgacagatcaataacctgaaggttatgatcgaggaacaagacaaaaaacttgttagttcacaagacgcactttctaagaaggttattgaagtggataagcttaaacaagagatgctgaagaagaatgatgaagtagctttgctgcattcagagatcgagtccaaggaacaagagcttcttgtagctaatcaggccattgcacgtcaagaagcaacaattagggagcttcgaagtgaaactaaaagaaaggaaactgaggttgagagattaaatgaattggcgaaagctaatgaagacaaactgaaatttgcagaacaggaacttgagaagcagaattcaggatggattgcagcacagcaagagttaaaggaattggcacaaatggcattcaaggataaagatgatatcaagaatacaatcaatgacttcaaacgggtgaggtatttgctggatgctgtgcgttctgaactaatagcttcaaaagaggctttaaccttctcacgcaagcaagtagaagatcaagcggcacagttgagtaaccaagtgcaggaactcacagaccaaaaggcactgattatttcttatacccggaatctggaagctgcccagctggagattcaaggaaagtcaaatgagctcagtactgtacaatctcgttgtagtgaacttgaatctcagttacttgaggaaacggagaaggttgagttcctagaggctatgttaaccaaagaaagggagatcttggaacagaaaactaaggaagtggcgttccttcaagaggaggtagttcagaaggagaaggattacttcaattcacaaaagcttgttgaaacaaaagagactgagctgttagaggcgaggcatgaagtcgaagatatgaaattgaaggtggattccatacaatttgctgttcgagagaaggatttggagcttctggaggcacaaagaaaacttgatgaagttaacagcgaagttgttgaacttcagcagctgataaatagcaaggaggatcaactggtccaagttagaactgaattacaggataaagagcaatgcatacaattgatgcaggatgaattggataagatgagattaggacgctcgcaagctgaatctgtggttcaaaagatagtcgagcttactagcaatctcataggttctgtcaaaggcgaagaattcaacatttataacttgctggatgatgaaattttaagcacgagcacagcccttgagtacagtttgcataagcataaccaactggaggctgacatagacatgttaaaagaatccctgcgacagaaggacatggatctgactgctgcttataaagcgcttgacgccaaagatcgagagttgaaggcagtagttggaaggttagatgttagggacaaggaactagacaagttggaagagctatccatagacccctatggcaccaggaaactgtctagagttgctgatgaggcaaccgaagacaacattgctggtgaagcggagctccaaaagcatgagatggaatctgtggagatggaggcactagctgctagcactatgttgaagaagcttgcggatgtgactaagaaattcttgagaagtggtagaactgattctggtaccaatttagattcaaacgttagtgaaggtgcttctgaattggaaccacaaaggaaacttaatgtgattctcgaggctaaaaaggagattgtcgggctattttctttgacagaagagctcgtcactggtgctcaaacgaaggacgatgatgaggaaccatagcatcataagttcataactgaacatataactgcatcatgaatgttatgcatgtcaactggaatgacgcagctgaaattgttaccatcgtttcctttccttttggggctcaggatttctttatgttcttttggttcatggatggcatcgcaaaatgaaaaaaaaagattgtttagattttggttaaaaggatgatgattgtgc

SEQ ID NO: 121220 - DNA, 3072 bp, Zea Mays
gctgcgccgccgctcgcctctcctcccttcccttccccgtaccgtgtcactctcctccccggttcgtcgtgcggagggccaaagcttcgaggaagcagaaccctagcgctagcgctgttggagtagtagcctacgccctacggccgatggctgcggcggcgatcctgccggagctggggacgcaggtgctcatcccggtcgcggcggccgtgggcatcgccttctcggtgctgcagtgggtgctggtgtccaaggtgcggctcgcccccgagcgacgcgcggacggcggcggagccgtcaagagcggccccagcgactacctcatcgaggaggaggaagggctcaacgaccacaacgtcgtcgtcaagtgcgccgagatccagaacgccatctccgaaggagctacatctttccttttcactgagtacaagtatgttggattattcatgggcatctttgcaatccttatattcctcttccttgggtccgtcgagggattcagcacaaagagtcaaccttgccactatagcaaggacaagacttgcaagcctgcccttgctaatgccatcttcagtactatagcttttgtgcttggtgcggtcacctcactggtttctggttttcttggaatgaagatagcaacttatgctaatgcccggacaactttagaggccagaaagggcgtcgggaaggcatttattactgccttccgatctggtgcagttatgggtttcctgcttgctgccagcggtcttttggttctttatattgctattaatttgtttggaatttattatggcgatgactgggaaggtctttttgaggctattactggttatggccttggtggttcttctatggctctttttggccgtgttggtggtggtatttataccaaggctgctgatgttggtgccgaccttgtggggaaggtagaaagaaacattcctgaggacgatccaagaaatccagctgtcattgctgacaatgttggtgataatgttggagatattgctggaatgggatcagatctctttggctcatatgctgaatcgtcatgtgctgctcttgttgtggcctcgatctcgtcttttggaatcaaccatcaatttactccaatggtgtatccccttcttgtcagctctgttggtattatagcatgtctcataacaacgctgtttgcaactgatttcttcgagataaaggctgtgaatgaaatagagcctgctctcaagaaacaacttataatatccactgttgtgatgaccattggcattgcgctcatcagttggcttggtcttccatacaccttcaccatttataactttggagcccagaagacagtgcaaagctggcaattgttcttgtgtgtggcggttggtctctgggctggcttagtcattggttttattactgagtactacacaagcaatgcctacagccctgtacaagttgttgctgattcctgcagaactggagctgccactaatgtcatttttgggcttgctctgggttacaaatcagtcattatcccaatttttgctattgcgtttagtatcttccttagcttcagccttgctgccatgtatggtgttgctgtggctgctcttggaatgctgagtaccattgccacaggccttgctattgatgcctatggccctatcagtgataatgctggaggcatagctgaaatggctgggatgagccataggattcgtgagagaactgatgctctagatgctgcaggaaacaccactgctgcaattggaaagggttttgctattggctctgcagccttggtatcccttgcactcttcggtgcctttgtaagccgggctgctatctccactgttgatgttctgactcctaaagtgttcattgggcttattgttggtgctatgctcccatactggttctcggcaatgaccatgaaaagtgtaggcagtgctgcactcaagatggtggaggaagtccgccggcagttcaacaccatccctgggctcatggagggcaccacaaagcctgactacgcaacttgtgtcaagatctcaacggatgcatccatcaaggagatgatccccccaggtgctcttgttatgctgacaccactgatcgttgggattttgtttggggttgagaccctcgctggggtccttgctggtgcccttgtctctggtgttcagattgccatttctgcatccaacactggtggtgcctgggacaacgccaagaagtacattgaggctggagcttcagagcatgccaggacccttggcccaaaaggttctgaccctcacaaggcggctgtcattggtgacaccattggagatcctctcaaggacacgtctggcccctccctcaacattctcatcaagcttatggcggttgaatcccttgtcttcgcccccttcttcgccgcccatggtggcattatcttcaaatggctctaaagatagcgacaacgttagttagtcgcaagagaaaggccgcagttctgcggctgcgaggggaatagagcagtatgtcagctatacaacatctatggcatgtgctttgctcctccacttgattatagcccccgttgtgtgtttcggtttctgttttcctggagtttttggttccaggcttccgaccatgttttgatcccataaattctcctccagccttcgagcaactgagtccatcttcgtaagtcatcagccctagccagacattgaagcatcggaaaactttaagggcttgttcgttttggtgataatccacatgtattgggtgggattgagccggtttaaatccataacaagtcaaaatacatctcaatctcacccaatacacttcaatacacatgtaatatcaataaccgaacaagccctaatagtttttagagatatggtgatgattatgatgatgattaatctcagtttttttcctttgaaagtaattagcatggtctttgcttgagattttgttctcttttcaaaacgatatgcatgcgaaatggaggtgatgtttttttttgaacggttgtttcaaagcaatatgaaaacataaaggtagtgatgttcttcaaaa

SEQ ID NO: 121221 - DNA, 598 bp, Zea Mays
aaaatttcagcactcatccgcctcgtgaaaggcagagcacgcgcaaaagccaccaccgcgtcgtcgtctccaagcaagcgaagagcgcctcccctccccctcgagatcttctctccctccccgcgccgctatggacgctgttgactcggtggtcgacccgctccgcgagttcgccaaggacagcatccgcctcgtcaagcgctgccacaagcccgaccgcaagggtaactgctaagtgctaaaccccagatacccccctgcccccgtatgttgctggctggctccgagatcggaccggatctgacgggccgcgcttcggttcgattcgcgcagagttcaccaaggtcgccgcgcgcactgcgatcggcttcatcgtcatgggattcgtcggcttctttgtcaagctcatcttcatccccatcaacaacatcatcgtcggctccggctgatccatgcccctcaggagtggacaatggcgtctccgccttggaggcgcagctctggcatccggaaagcagtttgtttaggtgaaggacgagtcccgtggtagacctgtaactcttggttgggtctttctcgattgctttctagtgcggca

SEQ ID NO: 121222 - DNA, 1711 bp, Zea Mays
aaaatttcagcactcatccgcctcgtgaaaggcagagcacgcgcaaaagccaccaccgcgtcgtcgtctccaagcaagcgaagagcgcctcccctccccctcgagatcttctctccctccccgcgccgctatggacgctgttgactcggtggtcgacccgctccgcgagttcgccaaggacagcatccgcctcgtcaagcgctgccacaagcccgaccgcaaggagttcaccaaggtcgccgcgcgcactgcgatcggcttcatcgtcatgggattcgtcggcttctttgtcaagctcatcttcatccccatcaacaacatcatcgtcggctccggctgatccatgcccctcaggagtggacaatggcgtctccgccttggaggcgcagctctggcatccggaaagcagtttgtttaggtgaaggacgagtcccgtggtagacctgtaactcttggttgggtctttctcgattgctttctagtgcggcatggacgcatcgttcataattccccttttagggcttgttcggttacatcaatccagaagggtattggaggggtttaatttcccttctagtcatttttgattatgagagaatttaatctcctccgatccccttctgaattggtgtaaccgaacatgcccttattggtgcaccatacgcctgctagagtggacgtgaccacaatcataacacctatacctagcactacagaagaccatgatggcctactgtcgaataaactcgtccgaaagggtagagcaacaccttttcgaccaccatcgtagtctgacataatccatagttaacaattattttaatcaaacaactttcagctttcttacaaccattagccacttcctcacagctaaatcagattgttcagcaatatgtagctaacccaacagacactaccatcccctcttcaacgttgcgtatcgactcaacacagcaaatcactaattaatttgaaccaacttagaaggcaatggaacaggcaaccgtcgcacaaacaattgcttaacaaaatgttaccagatcaccggaggccgaggagccaaggggaacgcgtcggccggcagcgaagttgcggggcggagcaaggaggctagttagtgcctgctggatatgctgaaggaggtgaccttcatgggcgtggccaccaccagtggagcctccggggagtcgctgaccgagtacttgtcgtgcatgaagcggctggccacgatggactcgtccttggggatcaccttgtagcaatagcagctcttcagcccctcctggtactggtagcactcgtggtggctgttcttcacctgcaggaagttccacaccacgctgtacttccccaccgtcgccactagatgccgctcctgcttcccgttctccgtcacctgcgcaacaatcattggacgagagctcaaatgccaacaaatgcacatgtccgctcatgctgggtggtgggtaactggttttttttttgttaaatcagagaacagagtttggggtgtttctagctgccggaaatacattaaccatttgagatcgcagggctgatccaagatgtgctagatgtttcgttagcataggttttctagtttatctgagaaccacgaacattaaagttcacagcgtatcagtagttcaaaacagaaacagctcaaacaatatgcaccactgaaccgcatccaaatggtacaaagaagcat

SEQ ID NO: 121223 - DNA, 1168 bp, Zea Mays
ttttgcatcgaatagttaattctctgagggatggtaaagttccatgggtggtgggtgggttcatcctctttctctctctctcccccatgcgttcctcttcacagtctttttacacacaacaagagcacggaagctttttgatacagagtgtagtgtctgtgtcccaaacctgcgtgctcacgcgattcgcggcgtcagccttcgctcatcgggacggggacggcgacggcggcgcggcagacggggcaggcgggcgtcctggcgagccacgggtcgacgcaggcggcgtggaacgcgtgcgcgcaggccggcatcgcgcgccaccgctccccggcgcgcgcggcctcgaggcacacggcgcacgcgcacgagcacgagggggaggagcaggcggcctcatcgtcaccgttgccgttggcgcgcggggaggagggggaggggaaggtgaagctcggaaggcggtggatgtcggcgggcgagagccccgcgcggagagactgaggcggcggcggcgagggggcagggtcgagcgacgggacgcggtagcggctgccgccgcggtggcgggatgcgcgcgcggcgaggacgaggacgaggaggagcagggcggacgcggcggcgaagaggaagaagaccgcgagcgcgaacggctgcacggcgagcgagaggaggcgcgcgcccgcgcgctggcgctcgcggggcccgtgcttgttggcttctcctcccggtcccggggcgagctcgccggctggagcgggcgtggccattcgggtgaggcggggcggtcggcgtccttggccggcgtggctggctcgggcgttccacgctgcggggtgtggagtgtggactcgaatattcagacaggaattggaagggctttggctttggctttgctttccccggccggccggccggcctttgagccctttgcccgcgttcggtacgttggcgggtgtgtctgccgactgccgtgagctcgaccgttcggtggttcttgttattttaaaggaacgagtggggttattattattattattactgctaatataaaaccagtcaaagcaagtcgcattacttgcccgctggtaggagggaggggtttcatgcgaagttgtcgaattatctgtggttgatggcaggacactttaataaaaccatgtggatggta

SEQ ID NO: 121224 - DNA, 2399 bp, Zea Mays
atccgggagagaggggaagttaaaacagcagggcgatctgtactgtaccttccttccctgctgctccgccgtgatcgcgatccccttttgatcaatgaccccgggaggcacggcacgggccgcccggccggatcacactcctcaaagccgagcagaaagccccgcccgcccggcgcccggacgtccgattttattatataaatatcggcgctcccccgcaacggccaccgcttcctcgtcctcctcctcctcgtttcgctcacgagaaagcacgcaaacgcggtcctcgctcgagatcccccaccgcccgccccctaaagcctcgcggcgccgaccccgaccccccgtggatccaccctgcgcgcggcctctagagctagtccagatccgcggggcgcgcgccctcaccatcatcacatcgcgcgcccagctagccgcgccttggaggcaaggcatcgtgcgtgccaccgtacgtccaccgatcggtctcgatctcgggccctcccgctgacgccttcggctggcctaataggggcgccgccgggggatcggaggggggcgccgccgtcatgtggaaggggaagaagagcgggcctctggcgccgcggggccggaagcgggagttccccattcgtgcggcggactacgagctgctcgagcctatcggcgacggcgccaccgccgtcgtccgccgggcgcgctgcctgccgcacggcggcgagatcgtcgccgtcaaggtcatgaacatggcgcaccgcaccgagtccgacgtgaacaatgcctcagaggaagtgaagaccatgatcatgatcgaccacccaaaccttctcagcgcgtactgctcgttcacggaaggcgaagccctgtggatcgtaatgccctacatggccggaggttcgtgctaccacctgatgaaatcgtcgtaccccaagggattcgacgacgagaacttcatcgcgttcgtgctgcgcgaaacgctgaaaggtctggagtaccttcatgagaacggccacatacatcgggatgtaaaggctggaaacatactgcttgatcaagataaaggagtcaaactatcggattttggagttaccgccagcctttatgactcaataatcaatagacacggcaaaaggaagacacttgttgggacgccttgttggatggcccctgaagttatggagcaaaaggattacgatttcaaggcggatatttggtcatttggcattactgcacttgaacttgctattggtcatgcaccattttctagccaacctccagcaaaggtttttctcatgacgttgcaacatgcccctccatcacttcataacacgaaggagaagaagttttcagactcttttaaaagtatgattgccacttgtctcattaaagacccaacaaagaggccacctgcaaaaaagctattaaaacacccatttttcagaagagcaaggtcagaccataatgccgtgaaatgtatgctaaataagttgccgtcattggctgagcgaatgcaatttataaaggaaaacgaggcgaagttgcaggcagataaaaaacctcttgataactgcaaagagaaagcatcacaggaagagtatagaagaggtgtgagtgagtggaatttcgatattgcagatttaaaagcacaagcggcattgtaccccgatgagaacgaagcagaagacttcttacgttttctatttgaactggacattgttgatgaaacaacccagttaaaagatattagagcagaaagtcactctataaataatgatggaacgaatgttgctgatgatggcttaggaaaatcaaattcaacaagtccgatgtcttcatcccaaagtgtgaaacagcttgataaaggaagtcctaatggccttgtgcgcagtgaatcatttgaaattcattccatatcacccgctaagcaactgacaacagcagtttctacgtgcaacgatgttgatgaatatttagagaaaacagcttttcagaagggtcgttttaaggtgatacatgattatagcaagcttgaaggagcaacgccaagagagaaggaattattagatcgtataagtagtttagagcaaatgcttcttgctacccaagacgaagttgagaggcttaaagcaaaggagtcataaggagcagaaggatgactgcaacaacaatagtagtgaagtggaagttaaattcaactgttacctagagcttgtaatgatagaaagcagttgtagtacgttttaaccataaaagagtacactaagttgatccgatggattatctattagaaatcatttgcgcattatgtattattttcaaatatttcttagatatttcctttcttattagatggatttaaaaatgagatttgttatatatgatggtctagtgttatgatg

SEQ ID NO: 121225 - DNA, 960 bp, Zea Mays
taatatatgaaaaaatgtccgtgagtcggtctagcacttagtatataacaacttgaatcgttcaacagaattgctgagttcattcatggagtatatatggacagaactcagagcaggcgtaggtctatgcctcactgacttgccaactcttgagaaaatgaggccaacgacattcctatttgccataactaacctatcgacctaccagctagatcaaattgcctgcataatccaataaccgtacagagtagggaacatagtatctactgagaattcgacggagatgaatgaaggcatgacaccgagcagacgccagggaacgtgcagatctacacacggcccgagggaaggagctgcggcgaggaagaaaaaaaagggggcaaatcttacctgcagcgacggcgatcgggatccaatctaatcgaagccgaagggcaaggcgaagagatggggcttcgttggtaggtgggcttacccttgcgtgctctcctcggcgggggctttgacggctcctttacctggctgtctggctctcctggggcagatccgtagagggcagggcagcgcgaggcgggaggctcgtgagcagcggcaatggccagcgggcatgaaaaggcgctcgtccttggccccctcctcgccttcggtggtatagagacggggcgttcaggagcgacgggcggagcgcacgaggcgaggacggggaggaatgcagggggagggcttgaaggagcaacgccaagagagaaggaattattagatcgtataagtagtttagagcaaatgcttcttgctacccaagacgaagttgagaggcttaaagcaaagggtaaatatgctataatgctgagtcataaggagcagaaggatgactgcaacaacaatagtagtgaagtggaagttaaattcaactgttacctagagcttgtaatgatagaaagcagttgtagtacgttttaa

SEQ ID NO: 121226 - DNA, 1971 bp, Zea Mays
ccttcattggcctcatctctccctccctccttgacccatctgcgacttcccctgcattaaggatgacctcttctctctaggtcttacaaccctagacgtggaatcaggatcagtgtgcacggggaaccagcaacggcagcacgtacgtggaaccggcaccgacgaattgcacggggcagcagacaatcgtcgcctccttgactccatccgcgaccttcctccatccgtggtgccagcaaactgcacgagaagacctaggtgactcggtgctagccacactattacaagatgcctcctagtcgtttgcaggttggaacaaaaacaacagaaggacataaccaagcaggaaacacattacatccatatgaagtgcagcgccttagacaagttatgagaaacaatgcaaggctgcaacaactgggaattcctggtttatgcgacacactgccaaaggcatattcctttcatcacaacaaaaataagccaaattttacaaataatgaagattcagaatctgattataatccttcatcaaatgacactggtgaagaagatttacttgatgatgacaatgttcagggctcgaaggattataatatgaggactacaaacatgtctaatggtgtaatcaagctacgcactaaaagacttcttgcagagaaagaatctattagaattacaaggtcaaaaaaaactgctgcccagcctaatggtactgaagtgtttgacaacaacgatggccatacccaggctacagttcaagctagtgaccctgctctatttgacgagtacacccacatggctaatggaggtcattccattgctcgccctgatgggcacaacctgatgggaaacaaagataatgtaaacatccaagttgatgacaacatgaccagtggaggtgaagctagcatcgagcctagtgtacatgtacaactaggtgaaaatgatcgatgggaaaggggagttaatatgggacatggtctccataggatgaaccgagctatgcgtggaaaactgccggttgttattcctgaagggaggataaggcccgtggcacctcttgttgctgcaaagttttcaactgaatgcaatattgcagttaggaaccatgtgccagtgtacaagcattggaaggattacaagaaccataatggcatgtttaacctatttacagataaacttagtgcaaagtttgatatcaacacaaatgatgcaccagtccaaaaggcttgttcccaaatgatgaaaaatgctataaggcaacaacggtacagactaaagaaaaaattctttgatccttttccactacatttggtgacaaaaacatcaccaatcagatcgatgagtaatgaagagtggaatgatcttgtggaatattggaagagcccaaaaaggatggagacatcacaaaagaacaaagataaccgatccaaagttaaatttcatcaaacaacgggatctcgtagctatatggttcatgtagaaaatttgggagataaaaacattggtcaagagcccgatgcattagatttgttcaaggagtgtcattacagcaggaaaaagaaatgttacacatctaccgtgcaacaagctataactcaaatggataacaagcggtctgcaactacagaaggtgaaaaatcaatgtctgcaactgaagttgttgctaatgtgcttgctgaaaatacaaagaagaatttgttccttcaaaatgtggggatacaaaatgttggtcctaggtctagtctgagaaatattgaagcacagttggaagtggagaagagggcaaacagtgaccttaaatctattgttgatgctcaacatgaacaattggatgcattgttaaagcaaatgcaagaaactgaagaaaataggatcagggagcaagaggaagtgaagaagaagcaagctgagatggaaacaaagatgcaacttgtgttgagtcagattcattcaagattgagatag

SEQ ID NO: 121227 - DNA, 2315 bp, Zea Mays
ccttcattggcctcatctctccctccctccttgacccatctgcgacttcccctgcattaaggatgacctcttctctctaggtcttacaaccctagacgtggaatcaggatcagtgtgcacggggaaccagcaacggcagcacgtacgtggaaccggcaccgacgaattgcacggggcagcagacaatcgtcgcctccttgactccatccgcgaccttcctccatccgtggtgccagcaaactgcacgagaagacctaggtcaggtgactcggtgctagccacactattacaagatgcctcctagtcgtttgcaggttggaacaaaaacaacagaaggacataaccaagcaggaaacacattacatccatatgaagtgcagcgccttagacaagttatgagaaacaatgcaaggctgcaacaactgggaattcctggtttatgcgacacactgccaaaggcatattcctttcatcacaacaaaaataagccaaattttacaaataatgaagattcagaatctgattataatccttcatcaaatgacactggtgaagaagatttacttgatgatgacaatgttcagggctcgaaggattataatatgaggactacaaacatgtctaatggtgtaatcaagctacgcactaaaagacttcttgcagagaaagaatctattagaattacaaggtcaaaaaaaactgctgcccagcctaatggtactgaagtgtttgacaacaacgatggccatacccaggctacagttcaagctagtgaccctgctctatttgacgagtacacccacatggctaatggaggtcattccattgctcgccctgatgggcacaacctgatgggaaacaaagataatgtaaacatccaagttgatgacaacatgaccagtggaggtgaagctagcatcgagcctagtgtacatgtacaactaggtgaaaatgatcgatgggaaaggggagttaatatgggacatggtctccataggatgaaccgagctatgcgtggaaaactgccggttgttattcctgaagggaggataaggcccgtggcacctcttgttgctgcaaagttttcaactgaatgcaatattgcagttaggaaccatgtgccagtgtacaagcattggaaggattacaagaaccataatggcatgtttaacctatttacagataaacttagtgcaaagtttgatatcaacacaaatgatgcaccagtccaaaaggcttgttcccaaatgatgaaaaatgctataaggcaacaacggtacagactaaagaaaaaattctttgatccttttccactacatttggtgacaaaaacatcaccaatcagatcgatgagtaatgaagagtggaatgatcttgtggaatattggaagagcccaaaaaggatggagacatcacaaaagaacaaagataaccgatccaaagttaaatttcatcaaacaacgggatctcgtagctatatggttcatgtagaaaatttgggagataaaaacattggtcaagagcccgatgcattagatttgttcaaggagtgtcattacagcaggaaaaagaaatgttacacatctaccgtgcaacaagctataactcaaatggataacaagcggtctgcaactacagaaggtgaaaaatcaatgtctgcaactgaagttgttgctaatgtgcttgctgaaaatacaaagaagaatttgttccttcaaaatgtggggatacaaaatgttggtcctaggtctagtctgagaaatattgaagcacagttggaagtggagaagagggcaaacagtgaccttaaatctattgttgatgctcaacatgaacaattggatgcattgttaaagcaaatgcaagaaactgaagaaaataggatcagggagcaagaggaagtgaagaagaagcaagctgagatggaaacaaagatgcaacttgtgttgagtcagattcattcaagattgagatagtatttatgtcatgttgacaactttttttgttgttgcaacaactttctttcttttttatggaaccaactataatgttttggatatgatgtggtgttctggttggatagtctttattgtttgggattgtccatgtgaagttctagttggatatttgaatttaaatattgatattttgtcattataattgttatgttatgtgctgattgtgcttttgatgtgagaatgaaattattgaaaattattatgggctgtagttataaatggtcgataaaatttctagattttagccttggcaaaaataattaaactgaataaaataaatgcacaaattaaaatcaa

SEQ ID NO: 121228 - DNA, 2212 bp, Zea Mays
ctctcgctgtctacgcccaccaacggatccgctctcccatggaaggaaactctccaccgcgtccatggaagccgcccggatctgcgtgcgcaccatctctctcgcccccgacccgtctctctcgctgcccagccacgttcgctctccaccgcgcagatcctcgcttcgcaatcaacgctcccttgacttaccagttaccacaccaacccaaccccgactctccatggaaggcgcgacgaccgagacccagctctccatggaaggcgtcaacatgccctcgtccccgctcgcccacgcatgcgcgcgcccacgtggctgggcagctcccgcaccctagcctgtgccttcgccacgccctcgcccacgccaacccctgcctctctcccgccgcgtccgcgttccggatctgtcgcctcccgccgcgccctgcctccctctcccaaccttgccagcaggaccaccgtcggcgatgcctccctcctgtcgcaccttacctcctcatcccgacctctccaccacgcccatgtccccattgtcgctcgtgctgggcccgtgccagactcatccacgccgctgatgtagagcgtgcgctaggcgagggggtgagtgcgtgaccgagatagaggctgcgacaacctccccggccaccttgccatctccatcgtcctcggggccaatgctggtagaggcactttggttcctggatgacctacaaggaatgggagatggtgggtaagcgtggggtgtagatccttccaggctcagatcgatttcttcgttcgctggtgagttacctaggcaagctgaacgggatggttcaagagcgcgcaagatcgatctaacaaaataactcagatctgtttgtgtgtcagctcgacaaacagatctgagtgtcagctcgacaaactcatgcttgttgtcggcacctaaaaaatagtgaagcgggtaatgatgtcaatttggtcttgcatccaactatttcaataaatgaaaatacagtacatgtcatagctgcattctgggtgccatcctcgatcatggaaaacaacattctctatcaaattatatctcctcatgtaagcagatgtagcctcttcttctgtagtgtgattagtttgaacattgatacagaattaaacatgcagtaggctattattctcttttatgcaggatggtgctcaaattttgaaaaatagaggtaggtgatccaattatattttactaccatggttcattgagaggcttgcttgtggacattccttttgtggtattttttctatatattgctattgactcatgtcataaatcagttagttatattttgctttgttgatggaactccatgaggtgacaacataatgtttcatttgcaaatttaggtgaaagtgaaggttgtttgcccctcataatgttccatgaaaccgaacaacagtcaaactgttagttgtgagttatataggatctgtttattttcctattttcatttctctgattttactacacatctttttccccacccattccaggagcattccttaatgcatttggatcaattgttctcaatgcgcctgttggaatcaagagttattacctcagcttattcttagagttgtcacatattgccatgcccttcataagagttgagtgtcctacttccgggtgcccatgattggaaggtctcttgggttgattttctcagggactacacaatcactaggctggaaattagcttatacttgcatgagctcaccttgtcatttgtggaagcattcactgtctcctgataagggtgagcttcacatctttagaacagacacgttgaaggaaatgagtatccgagtaccaagaacgaaagaagagcttttggatataaatggcctctacaagtaatgcagctactctgccttttttgaatgaattatgtatgctgccatccttttgttttcaaaaagggcttggtcccggtttgttcctttctttgttttttctcgaacgtttcttgtcgcggtctcatggtggttgctataactcaatctccagttcacagtagggttgaacaaagtataaggggcaggttgactcttctcacttgaaacgaaaattgcaggggctatgttgtgtaatggtaatatagtgtcacatcaaaccattgtccctgactcagttcatgctattcatgtgtgacatgtgtccagactttagagatcagata

SEQ ID NO: 121229 - DNA, 1538 bp, Zea Mays
ctctcgctgtctacgcccaccaacggatccgctctcccatggaaggaaactctccaccgcgtccatggaagccgcccggatctgcgtgcgcaccatctctctcgcccccgacccgtctctctcgctgcccagccacgttcgctctccaccgcgcagatcctcgcttcgcaatcaacgctcccttgacttaccagttaccacaccaacccaaccccgactctccatggaaggcgcgacgaccgagacccagctctccatggaaggcgtcaacatgccctcgtccccgctcgcccacgcatgcgcgcgcccacgtggctgggcagctcccgcaccctagcctgtgccttcgccacgccctcgcccacgccaacccctgcctctctcccgccgcgtccgcgttccggatctgtcgcctcccgccgcgccctgcctccctctcccaaccttgccagcaggaccaccgtcggcgatgcctccctcctgtcgcaccttacctcctcatcccgacctctccaccacgcccatgtccccattgtcgctcgtgctgggcccgtgccagactcatccacgccgctgatgtagagcgtgcgctaggcgagggggtgagtgcgtgaccgagatagaggctgcgacaacctccccggccaccttgccatctccatcgtcctcggggccaatgctggtagaggcactttggttcctggatgacctacaaggaatgggagatggtgggtaagcgtggggtgtagatccttccaggctcagatcgatttcttcgttcgctggtgaaagtgaaggttgtttgcccctcataatgttccatgaaaccgaacaacagtcaaactgttagttgagcattccttaatgcatttggatcaattgttctcaatgcgcctgttggaatcaagagttattacctcagcttattcttagagttgtcacatattgccatgcccttcataagagttgagtgtcctacttccgggtgcccatgattggaaggtctcttgggttgattttctcagggactacacaatcactaggctggaaattagcttatacttgcatgagctcaccttgtcatttgtggaagcattcactgtctcctgataagggtgagcttcacatctttagaacagacacgttgaaggaaatgagtatccgagtaccaagaacgaaagaagagcttttggatataaatggcctctacaagtaatgcagctactctgccttttttgaatgaattatgtatgctgccatccttttgttttcaaaaagggcttggtcccggtttgttcctttctttgttttttctcgaacgtttcttgtcgcggtctcatggtggttgctataactcaatctccagttcacagtagggttgaacaaagtataaggggcaggttgactcttctcacttgaaacgaaaattgcaggggctatgttgtgtaatggtaatatagtgtcacatcaaaccattgtccctgactcagttcatgctattcatgtgtgacatgtgtccagactttagagatcagata

SEQ ID NO: 121230 - DNA, 1471 bp, Zea Mays
ctctcgctgtctacgcccaccaacggatccgctctcccatggaaggaaactctccaccgcgtccatggaagccgcccggatctgcgtgcgcaccatctctctcgcccccgacccgtctctctcgctgcccagccacgttcgctctccaccgcgcagatcctcgcttcgcaatcaacgctcccttgacttaccagttaccacaccaacccaaccccgactctccatggaaggcgcgacgaccgagacccagctctccatggaaggcgtcaacatgccctcgtccccgctcgcccacgcatgcgcgcgcccacgtggctgggcagctcccgcaccctagcctgtgccttcgccacgccctcgcccacgccaacccctgcctctctcccgccgcgtccgcgttccggatctgtcgcctcccgccgcgccctgcctccctctcccaaccttgccagcaggaccaccgtcggcgatgcctccctcctgtcgcaccttacctcctcatcccgacctctccaccacgcccatgtccccattgtcgctcgtgctgggcccgtgccagactcatccacgccgctgatgtagagcgtgcgctaggcgagggggtgagtgcgtgaccgagatagaggctgcgacaacctccccggccaccttgccatctccatcgtcctcggggccaatgctggtagaggcactttggttcctggatgacctacaaggaatgggagatggtgggtaagcgtggggtgtagatccttccaggctcagatcgatttcttcgttcgctggagcattccttaatgcatttggatcaattgttctcaatgcgcctgttggaatcaagagttattacctcagcttattcttagagttgtcacatattgccatgcccttcataagagttgagtgtcctacttccgggtgcccatgattggaaggtctcttgggttgattttctcagggactacacaatcactaggctggaaattagcttatacttgcatgagctcaccttgtcatttgtggaagcattcactgtctcctgataagggtgagcttcacatctttagaacagacacgttgaaggaaatgagtatccgagtaccaagaacgaaagaagagcttttggatataaatggcctctacaagtaatgcagctactctgccttttttgaatgaattatgtatgctgccatccttttgttttcaaaaagggcttggtcccggtttgttcctttctttgttttttctcgaacgtttcttgtcgcggtctcatggtggttgctataactcaatctccagttcacagtagggttgaacaaagtataaggggcaggttgactcttctcacttgaaacgaaaattgcaggggctatgttgtgtaatggtaatatagtgtcacatcaaaccattgtccctgactcagttcatgctattcatgtgtgacatgtgtccagactttagagatcagata

SEQ ID NO: 121231 - DNA, 1628 bp, Zea Mays
tgcctctctcgtttcggtgctattcgccccccaaactccggacgagccttccgcgcgacgctgcacggctccgccagccacccgtaaaaccctagacggctagccggcgcacggaagcgggcagcggagcggaggtgagcctctcctgcatcggattgtccccgcccccgctaggcgccatgaagctgacggtgaagaccctcaagggaacgcacttcgagatccgggtgcagcccaacgacacgattatggctgtgaagaagaatatagaagagatacaagggaaagacagctatccatggggccaacaactgctgattttcaatggaaaggtcttgaaagatgaaagtacattggaagagaataaagtcaatgaggatgggtttctagttgtcatgcttagtaagggtaaaacatctggttcaactggaacttcatcttcccagcactcaaacactcctgcaacaaggcaggcacctcctctagaggccccacaacaagctcctcaacccccggtggcaccaattacaacttctcagcctgaaggacttcctgcacaggcacctaacacacatgacaatgcggcatcaaatcttctgtctggaaggaatgttgacacaataattaaccagctaatggagatgggtgggggcagttgggacaaagataaagtccaaagggctctccgtgccgcttacaacaaccccgaacgtgctgttgaatacctctactctggtattccagtaacagctgaaattgctgttccaattggtggtcaaggggcaaacacaactgatcgagctcctactggggaagctggtctctctgggattccaaacaccgctccactagatcttttcccgcagggggcttccaatgctggaggtggtgctggtggtggaccacttgattttcttagaaacaatccacagtttcaagcagttagggaaatggtccatacaaatccacaaattttgcagcctatgctcgttgagttgagcaagcagaatcctcaaattctaaggttgattgaggagaatcatgatgagtttcttcagttactaaatgagccctttgaaggcggagagggggatttcttagaccaacctgaggaggatgaaatgcctcatgccattagtgttacaccagaggagcaggaggccattggacggcttgagtccatggggttcgacagagcacgcgttattgaagcattcttagcctgcgataggaacgaggagctagcagcaaactatctccttgagcatgctggtgaggaagattaagcgggagtagttttcatacggtgagaactctgctatcctctggttggttaccctccttaacatatatggcaagtggctcactgtggggtgatttcctttttttcttcttttgaaccttgcctctcgtcgacatctgaccgacattgatcaagattttttttagtaccgagtgacgaagagttgatatggagctgacgatcatttgaattgatttcgttgtgcaagacttgtattacataaacatttaaatacatgtagctgaacatttcagtagaaatgctacggttgtggtctcccatcgttgactttcattagcgtggtggtaaacatcggttctgctcc

SEQ ID NO: 121232 - DNA, 1708 bp, Zea Mays
tgcctctctcgtttcggtgctattcgccccccaaactccggacgagccttccgcgcgacgctgcacggctccgccagccacccgtaaaaccctagacggctagccggcgcacggaagcgggcagcggagcggaggtgagcctctcctgcatcggattgtccccgcccccgctaggcgccatgaagctgacggtgaagaccctcaagggaacgcacttcgagatccgggtgcagcccaacgacacgattatggctgtgaagaagaatatagaagagatacaagggaaagacagctatccatggggccaacaactgctgattttcaatggaaaggtcttgaaagatgaaagtacattggaagagaataaagtcaatgaggatgggtttctagttgtcatgcttagtaagggtaaaacatctggttcaactggaacttcatcttcccagcactcaaacactcctgcaacaaggcaggcacctcctctagaggccccacaacaagctcctcaacccccggtggcaccaattacaacttctcagcctgaaggacttcctgcacaggcacctaacacacatgacaatgcggcatcaaatcttctgtctggaaggaatgttgacacaataattaaccagctaatggagatgggtgggggcagttgggacaaagataaagtccaaagggctctccgtgccgcttacaacaaccccgaacgtgctgttgaatacctctactcttaacagctgaaattgctgttccaattggtggtcaaggggcaaacacaactgatcgagctcctactggggaagctggtctctctgggattccaaacaccgctccactagatcttttcccgcagggggcttccaatgctggaggtggtgctggtggtggaccacttgattttcttagaaacaatccacagtttcaagcagttagggaaatggtccatacaaatccacaaattttgcagcctatgctcgttgagttgagcaagcagaatcctcaaattctaaggttgattgaggagaatcatgatgagtttcttcagttactaaatgagccctttgaaggcggagagggggatttcttagaccaacctgaggaggatgaaatgcctcatgccattagtgttacaccagaggagcaggaggccattggacggcttgagtccatggggttcgacagagcacgcgttattgaagcattcttagcctgcgataggaacgaggagctagcagcaaactatctccttgagcatgctggtgaggaagattaagcgggagtagttttcatacgattttttttagtaccgagtgacgaagagttgatatggagctgacgatcatttgaattgatttcgttgtgcaagacttgtattacataaacatttaaatacatgtagctgaacatttcagtagaaatgctacggttgtggtctcccatcgttgactttcattagcgtggtggtaaacatcggttctgctcctgtcctgtattaacacaagcttggcttgggaggaagcacaaggagctattgccacctagcaaaaggataaaagggaggatgacgaattggcgatgtgtttgcgacacgctgccctcaagtgtggatgatgagtgcagataggttgatgactgtgccaaggctgtcaagtgtgtaaacgaacgctgccttcgtagttctgacaactgcgacagttctgtagct

SEQ ID NO: 121233 - DNA, 1857 bp, Zea Mays
tgcctctctcgtttcggtgctattcgccccccaaactccggacgagccttccgcgcgacgctgcacggctccgccagccacccgtaaaaccctagacggctagccggcgcacggaagcgggcagcggagcggaggtgagcctctcctgcatcggattgtccccgcccccgctaggcgccatgaagctgacggtgaagaccctcaagggaacgcacttcgagatccgggtgcagcccaacgacacgattatggctgtgaagaagaatatagaagagatacaagggaaagacagctatccatggggccaacaactgctgattttcaatggaaaggtcttgaaagatgaaagtacattggaagagaataaagtcaatgaggatgggtttctagttgtcatgcttagtaagggtaaaacatctggttcaactggaacttcatcttcccagcactcaaacactcctgcaacaaggcaggcacctcctctagaggccccacaacaagctcctcaacccccggtggcaccaattacaacttctcagcctgaaggacttcctgcacaggcacctaacacacatgacaatgcggcatcaaatcttctgtctggaaggaatgttgacacaataattaaccagctaatggagatgggtgggggcagttgggacaaagataaagtccaaagggctctccgtgccgcttacaacaaccccgaacgtgctgttgaatacctctactctggtattccagtaacagctgaaattgctgttccaattggtggtcaaggggcaaacacaactgatcgagctcctactggggaagctggtctctctgggattccaaacaccgctccactagatcttttcccgcaggtgtactttatgtccgtcattcattatcactgcatgttgaagcttgtattgaccattaaacaattcagcagggggcttccaatgctggaggtggtgctggtggtggaccacttgattttcttagaaacaatccacagtttcaagcagttagggaaatggtccatacaaatccacaaattttgcagcctatgctcgttgagttgagcaagcagaatcctcaaattctaaggttgattgaggagaatcatgatgagtttcttcagttactaaatgagccctttgaaggcggagagggggatttcttagaccaacctgaggaggatgaaatgcctcatgccattagtgttacaccagaggagcaggaggccattggacggcttgagtccatggggttcgacagagcacgcgttattgaagcattcttagcctgcgataggaacgaggagctagcagcaaactatctccttgagcatgctggtgaggaagattaagcgggagtagttttcatacgattttttttagtaccgagtgacgaagagttgatatggagctgacgatcatttgaattgatttcgttgtgcaagacttgtattacataaacatttaaatacatgtagctgaacatttcagtagaaatgctacggttgtggtctcccatcgttgactttcattagcgtggtggtaaacatcggttctgctcctgtcctgtattaacacaagcttggcttgggaggaagcacaaggagctattgccacctagcaaaaggataaaagggaggatgacgaattggcgatgtgtttgcgacacgctgccctcaagtgtggatgatgagtgcagataggttgatgactgtgccaaggctgtcaagtgtgtaaacgaacgctgccttcgtagttctgacaactgcgacagttctgtagctagacctatttgctatcttcatgataaaattatctaaatgggacggtccttgaccgattaattgcacga

SEQ ID NO: 121234 - DNA, 1807 bp, Zea Mays
tgcctctctcgtttcggtgctattcgccccccaaactccggacgagccttccgcgcgacgctgcacggctccgccagccacccgtaaaaccctagacggctagccggcgcacggaagcgggcagcggagcggaggtgagcctctcctgcatcggattgtccccgcccccgctaggcgccatgaagctgacggtgaagaccctcaagggaacgcacttcgagatccgggtgcagcccaacgacacgattatggctgtgaagaagaatatagaagagatacaagggaaagacagctatccatggggccaacaactgctgattttcaatggaaaggtcttgaaagatgaaagtacattggaagagaataaagtcaatgaggatgggtttctagttgtcatgcttagtaagggtaaaacatctggttcaactggaacttcatcttcccagcactcaaacactcctgcaacaaggcaggcacctcctctagaggccccacaacaagctcctcaacccccggtggcaccaattacaacttctcagcctgaaggacttcctgcacaggcacctaacacacatgacaatgcggcatcaaatcttctgtctggaaggaatgttgacacaataattaaccagctaatggagatgggtgggggcagttgggacaaagataaagtccaaagggctctccgtgccgcttacaacaaccccgaacgtgctgttgaatacctctactctggtattccagtaacagctgaaattgctgttccaattggtggtcaaggggcaaacacaactgatcgagctcctactggggaagctggtctctctgggattccaaacaccgctccactagatcttttcccgcagcagggggcttccaatgctggaggtggtgctggtggtggaccacttgattttcttagaaacaatccacagtttcaagcagttagggaaatggtccatacaaatccacaaattttgcagcctatgctcgttgagttgagcaagcagaatcctcaaattctaaggttgattgaggagaatcatgatgagtttcttcagttactaaatgagccctttgaaggcggagagggggatttcttagaccaacctgaggaggatgaaatgcctcatgccattagtgttacaccagaggagcaggaggccattggacggcttgagtccatggggttcgacagagcacgcgttattgaagcattcttagcctgcgataggaacgaggagctagcagcaaactatctccttgagcatgctggtgaggaagattaagcgggagtagttttcatacgattttttttagtaccgagtgacgaagagttgatatggagctgacgatcatttgaattgatttcgttgtgcaagacttgtattacataaacatttaaatacatgtagctgaacatttcagtagaaatgctacggttgtggtctcccatcgttgactttcattagcgtggtggtaaacatcggttctgctcctgtcctgtattaacacaagcttggcttgggaggaagcacaaggagctattgccacctagcaaaaggataaaagggaggatgacgaattggcgatgtgtttgcgacacgctgccctcaagtgtggatgatgagtgcagataggttgatgactgtgccaaggctgtcaagtgtgtaaacgaacgctgccttcgtagttctgacaactgcgacagttctgtagctagacctatttgctatcttcatgataaaattatctaaatgggacggtccttgaccgattaattgcacgatctaaggtgagaaaaagt

SEQ ID NO: 121235 - DNA, 1804 bp, Zea Mays
tgcctctctcgtttcggtgctattcgccccccaaactccggacgagccttccgcgcgacgctgcacggctccgccagccacccgtaaaaccctagacggctagccggcgcacggaagcgggcagcggagcggaggtgagcctctcctgcatcggattgtccccgcccccgctaggcgccatgaagctgacggtgaagaccctcaagggaacgcacttcgagatccgggtgcagcccaacgacacgattatggctgtgaagaagaatatagaagagatacaagggaaagacagctatccatggggccaacaactgctgattttcaatggaaaggtcttgaaagatgaaagtacattggaagagaataaagtcaatgaggatgggtttctagttgtcatgcttagtaagggtaaaacatctggttcaactggaacttcatcttcccagcactcaaacactcctgcaacaaggcaggcacctcctctagaggccccacaacaagctcctcaacccccggtggcaccaattacaacttctcagcctgaaggacttcctgcacaggcacctaacacacatgacaatgcggcatcaaatcttctgtctggaaggaatgttgacacaataattaaccagctaatggagatgggtgggggcagttgggacaaagataaagtccaaagggctctccgtgccgcttacaacaaccccgaacgtgctgttgaatacctctactctggtattccagtaacagctgaaattgctgttccaattggtggtcaaggggcaaacacaactgatcgagctcctactggggaagctggtctctctgggattccaaacaccgctccactagatcttttcccgcagggggcttccaatgctggaggtggtgctggtggtggaccacttgattttcttagaaacaatccacagtttcaagcagttagggaaatggtccatacaaatccacaaattttgcagcctatgctcgttgagttgagcaagcagaatcctcaaattctaaggttgattgaggagaatcatgatgagtttcttcagttactaaatgagccctttgaaggcggagagggggatttcttagaccaacctgaggaggatgaaatgcctcatgccattagtgttacaccagaggagcaggaggccattggacggcttgagtccatggggttcgacagagcacgcgttattgaagcattcttagcctgcgataggaacgaggagctagcagcaaactatctccttgagcatgctggtgaggaagattaagcgggagtagttttcatacgattttttttagtaccgagtgacgaagagttgatatggagctgacgatcatttgaattgatttcgttgtgcaagacttgtattacataaacatttaaatacatgtagctgaacatttcagtagaaatgctacggttgtggtctcccatcgttgactttcattagcgtggtggtaaacatcggttctgctcctgtcctgtattaacacaagcttggcttgggaggaagcacaaggagctattgccacctagcaaaaggataaaagggaggatgacgaattggcgatgtgtttgcgacacgctgccctcaagtgtggatgatgagtgcagataggttgatgactgtgccaaggctgtcaagtgtgtaaacgaacgctgccttcgtagttctgacaactgcgacagttctgtagctagacctatttgctatcttcatgataaaattatctaaatgggacggtccttgaccgattaattgcacgatctaaggtgagaaaaagt

SEQ ID NO: 121236 - DNA, 1793 bp, Zea Mays
tgcctctctcgtttcggtgctattcgccccccaaactccggacgagccttccgcgcgacgctgcacggctccgccagccacccgtaaaaccctagacggctagccggcgcacggaagcgggcagcggagcggaggtgagcctctcctgcatcggattgtccccgcccccgctaggcgccatgaagctgacggtgaagaccctcaagggaacgcacttcgagatccgggtgcagcccaacgacacgattatggctgtgaagaagaatatagaagagatacaagggaaagacagctatccatggggccaacaactgctgattttcaatggaaaggtcttgaaagatgaaagtacattggaagagaataaagtcaatgaggatgggtttctagttgtcatgcttagtaagggtaaaacatctggttcaactggaacttcatcttcccagcactcaaacactcctgcaacaaggcaggcacctcctctagaggccccacaacaagctcctcaacccccggtggcaccaattacaacttctcagcctgaaggacttcctgcacaggcacctaacacacatgacaatgcggcatcaaatcttctgtctggaaggaatgttgacacaataattaaccagctaatggagatgggtgggggcagttgggacaaagataaagtccaaagggctctccgtgccgcttacaacaaccccgaacgtgctgttgaatacctctactctggtattccagtaacagctgaaattgctgttccaattggtggtcaaggggcaaacacaactgatcgagctcctactggggaagctggtctctctgggattccaaacaccgctccactagatcttttcccgcagggggcttccaatgctggaggtggtgctggtggtggaccacttgattttcttagaaacaatccacagtttcaagcagttagggaaatggtccatacaaatccacaaattttgcagcctatgctcgttgagttgagcaagcagaatcctcaaattctaaggttgattgaggagaatcatgatgagtttcttcagttactaaatgagccctttgaaggcggagagggggatttcttagaccaacctgaggaggatgaaatgcctcatgccattagtgttacaccagaggagcaggaggccattggacggcttgagtccatggggttcgacagagcacgcgttattgaagcattcttagcctgcgataggaacgaggagctagcagcaaactatctccttgagcatgctggtgaggaagattaagcgggagtagttttcatacgtaccgagtgacgaagagttgatatggagctgacgatcatttgaattgatttcgttgtgcaagacttgtattacataaacatttaaatacatgtagctgaacatttcagtagaaatgctacggttgtggtctcccatcgttgactttcattagcgtggtggtaaacatcggttctgctcctgtcctgtattaacacaagcttggcttgggaggaagcacaaggagctattgccacctagcaaaaggataaaagggaggatgacgaattggcgatgtgtttgcgacacgctgccctcaagtgtggatgatgagtgcagataggttgatgactgtgccaaggctgtcaagtgtgtaaacgaacgctgccttcgtagttctgacaactgcgacagttctgtagctagacctatttgctatcttcatgataaaattatctaaatgggacggtccttgaccgattaattgcacgatctaaggtgagaaaaagt

SEQ ID NO: 121237 - DNA, 1330 bp, Zea Mays
aggttcgtggtgacaccagctaacgcttcgtggggaagcgcccagcatttgggtgtgccaagccacgacggcagggcgtcgcagtccggcgtgccgcggtggccgcggacggtgttcctggtgggcgccatgtcgtgcctggccatcagcgcgacggcccacctgctggcgtgccactcgcggcgcgccagcgtggtgttctggcagctcgactacgcgggcatctccgtgatgatcgtcgcctccttcgtgccgccggtgtactacgccttcctctgccacccgccggcgcgggcggcctacctgtccgccatcgcggcgctgggcgcgctcgtggtggccgcgctgctctccccgtcctgctcgtccccgcgctaccgccgcctccgcgcggcgctgttcctggccatgggcctgtcgggcgtcgtcccggcgctgcacgcgctgtggctcaactggggccacgccgcctgctacctggcgctcggcctcgaggtcgccatgggtctcgcctacgccacgggcgcctggttctacgtcagccgcgtgccggagaagtggaggcccggtgtgttcgacgtcgtgggccacagccaccagatcttccacgtgctcgtgctcgtcggcgccgtcacgcactacgtcgccgtcgccgtgctcatccactggcgggagaaggtggctgccgcctgtggcgcggcgtcgtaggcaggcggggcttgctgctcctggcttctgcagcaagccagctgaggtgtttgatcatccagagcttcaatgtgccagtgcgatggattcaacaagcgttcgaatcggcgaacgaagtagttgcagttgcagttgcagcatagatcggctctagagttcgacgatttgtaatttaattgatgggatgattgagtatggtggttcactaatttatgttgagatttatctgtcgactgggcgccttggatttgcaggtttaagattgcaatgtcggtatagtctctactcaggcaggtttcagctaatacagacaaatttggaggtggccaggcctgggctgattgaacatatagctctagagttttgagtttttatcttgtgaacaagttcgaggacagttctagtttgtggcatcagattgatatgtacgattcgactgaaatggtttcagcttccggctaaactacttggattgacaagaagcgggtatgcaacttagcaaatgtgatgcagtgcaacgtgctcaagaaatctcagcaaactttgttatttcttgacaagcttttctaaactcaacttataataaagcaaaaaaagaagaaggaaatgctggattctctct

SEQ ID NO: 121238 - DNA, 113 bp, Zea Mays
tttttttctattatatatattatatatatttatatatattatactaggtcagtgcccgtgtgtcggtgtttcgaccccgagggtccctggaccgacgagtaaattgtcgctgc

SEQ ID NO: 121239 - DNA, 129 bp, Zea Mays
tatttaattgtacaaaataggtgttcatgccatctaagtgaaagcttcagttatgagctcataccttcaatgtgtaaaatttgagccagaaaatacctgctacaatggatcctaagcaactgagaaaaa

SEQ ID NO: 121240 - DNA, 815 bp, Zea Mays
ctctctcactccttatcccttctctatccgccagagggaaatacccattgatctcatctcatgccctgttgccgcgcctgctcctccttccccatccgcgcccaccgccgcccctccggcagccccgccacgagcccacccgcaagcttcccgcacggccaccgctgcctggtatcaatcaaaccagtcgtccgtcctcctttccttcaaatcaagtccatttccactccctgtctaccctctccctcgtctctggtgggcggtggcctcgcctccctttccccgtcgccctgatggctccctccgcagctctcgctccggtggccttccgctccgccttctcgactccgctcgcgtcgaaccctacccgtaatagaataaacatagaaggcactttctgtttgccgtgttccgcaaggaagagagctagttatagatctttccgagtgtacagtttatttggagggaagaaggataaagatgagaatggcgatgaagcgccatcgaaagcagggatttttggaaacatgcaaaatctctatgaaactgttaagaaggcccaaatggttgtccaagttgaggctgtccgggtgcagaaggagcttgcagcgtatgcatttatatcattaatttatctatctcttgtcgatgcaaaatagccagcctgtgcgatttttttctcctattttttaggactgagattgatggttattgtgaaggtgaactaatcaaggtacctttgggaaggccttctattatattatctgtatttaaactttgtttatccctgccaaacaattgattttttacattat

SEQ ID NO: 121241 - DNA, 1121 bp, Zea Mays
ctctctcactccttatcccttctctatccgccagagggaaatacccattgatctcatctcatgccctgttgccgcgcctgctcctccttccccatccgcgcccaccgccgcccctccggcagccccgccacgagcccacccgcaagcttcccgcacggccaccgctgcctggtatcaatcaaaccagtcgtccgtcctcctttccttcaaatcaagtccatttccactccctgtctaccctctccctcgtctctggtgggcggtggcctcgcctccctttccccgtcgccctgatggctccctccgcagctctcgctccggtggccttccgctccgccttctcgactccgctcgcgtcgaaccctacccgtaatagaataaacatagaaggcactttctgtttgccgtgttccgcaaggaagagagctagttatagatctttccgagtgtacagtttatttggagggaagaaggataaagatgagaatggcgatgaagcgccatcgaaagcagggatttttggaaacatgcaaaatctctatgaaactgttaagaaggcccaaatggttgtccaagttgaggctgtccgggtgcagaaggagcttgcagcgactgagattgatggttattgtgaaggtgaactaatcaaggttacactttctggaaaccagcaacctattagagttgaaatcacagaagctgcaatggagttgggtgctgaaaaactttcggagctggtcaatgatgcatacaaggatgcgcatcaacggagcgtccaggccatgaaagagaggatgtctgacttggcacagagcttaggaatgcctgcgggccttggtgatggtctcaagtgatgctgcctgccattcgggaagcctttctaataatttttttccctcaattttgaatacgagccgtgtgggcacctctcgtagtcacgtagtaagaagtgtactcgtgaccagctgtttcgttcagcgttagctgtgattttgttttgtacaagcagatatatttgcactaaatcgtggtaacgtcgtcctatggaactcggatatcacatgtggtatgctaatctgcaagatataggggatatgcaccgaaaccaatttaaatcgtgt

SEQ ID NO: 121242 - DNA, 1081 bp, Zea Mays
ctctctcactccttatcccttctctatccgccagagggaaatacccattgatctcatctcatgccctgttgccgcgcctgctcctccttccccatccgcgcccaccgccgcccctccggcagccccgccacgagcccacccgcaagcttcccgcacggccaccgctgcctggtatcaatcaaaccagtcgtccgtcctcctttccttcaaatcaagtccatttccactccctgtctaccctctccctcgtctctggtgggcggtggcctcgcctccctttccccgtcgccctgatggctccctccgcagctctcgctccggtggccttccgctccgccttctcgactccgctcgcgtcgaaccctacccgtaatagaataaacatagaaggcactttctgtttgccgtgttccgcaaggaagagagctagttatagatctttccgagtgtacagtttatttggagggaagaaggataaagatgagaatggcgatgaagcgccatcgaaagcagggatttttggaaacatgcaaaatctctatgaaactgttaagaaggcccaaatggttgtccaagttgaggctgtccgggtgcagaaggagcttgcagcgttacactttctggaaaccagcaacctattagagttgaaatcacagaagctgcaatggagttgggtgctgaaaaactttcggagctggtcaatgatgcatacaaggatgcgcatcaacggagcgtccaggccatgaaagagaggatgtctgacttggcacagagcttaggaatgcctgcgggccttggtgatggtctcaagtgatgctgcctgccattcgggaagcctttctaataatttttttccctcaattttgaatacgagccgtgtgggcacctctcgtagtcacgtagtaagaagtgtactcgtgaccagctgtttcgttcagcgttagctgtgattttgttttgtacaagcagatatatttgcactaaatcgtggtaacgtcgtcctatggaactcggatatcacatgtggtatgctaatctgcaagatataggggatatgcaccgaaaccaatttaaatcgtgt

SEQ ID NO: 121243 - DNA, 1767 bp, Zea Mays
ctctctcactccttatcccttctctatccgccagagggaaatacccattgatctcatctcatgccctgttgccgcgcctgctcctccttccccatccgcgcccaccgccgcccctccggcagccccgccacgagcccacccgcaagcttcccgcacggccaccgctgcctggtatcaatcaaaccagtcgtccgtcctcctttccttcaaatcaagtccatttccactccctgtctaccctctccctcgtctctggtgggcggtggcctcgcctccctttccccgtcgccctgatggctccctccgcagctctcgctccggtggccttccgctccgccttctcgactccgctcgcgtcgaaccctacccgtaatagaataaacatagaaggcactttctgtttgccgtgttccgcaaggaagagagctagttatagatctttccgagtgtacagtttatttggagggaagaaggataaagatgagaatggcgatgaagcgccatcgaaacgtggctcacattggccagagacatttttgtggttgtggcagtagagatggaggaagagatggcacatgagaggtggcggcttgtggtggtggcagcaagggagtggaaagagagcagatagagaaaggcaaaagagaagagagggagaggtggaagccaacaagttggtcccactgccacatgtagtccatgtcaacgaaaactgcaaggaaaccactctagatggccaaatgtaaacggtttcaatagttgggtggttgaagatttctgttttttgtgtttcatggttgaaatcatacttgggcgatagtttgatggcaaaaatgacctatctgtatacttatgaggcaaataaagaaaaaaaaacatgcaaaaaattccagggaaatgatattttactagcagctaacacctactctttatgccgcaagtcatgcaacctaaaatgtcaagctttttcattgtttggatgcttgagtagtgattgttcatgtgaaaaataattctgctcgtacattgtttggatgctacctttgaagattgccgaactgactcatttagttttttgatatatatcttctcatttcgtaattggcattttgtttacaataatcttgaagctatctgatattctaataactttaggcagggatttttggaaacatgcaaaatctctatgaaactgttaagaaggcccaaatggttgtccaagttgaggctgtccgggtgcagaaggagcttgcagcgactgagattgatggttattgtgaaggtgaactaatcaaggttacactttctggaaaccagcaacctattagagttgaaatcacagaagctgcaatggagttgggtgctgaaaaactttcggagctggtcaatgatgcatacaaggatgcgcatcaacggagcgtccaggccatgaaagagaggatgtctgacttggcacagagcttaggaatgcctgcgggccttggtgatggtctcaagtgatgctgcctgccattcgggaagcctttctaataatttttttccctcaattttgaatacgagccgtgtgggcacctctcgtagtcacgtagtaagaagtgtactcgtgaccagctgtttcgttcagcgttagctgtgattttgttttgtacaagcagatatatttgcactaaatcgtggtaacgtcgtcctatggaactcggatatcacatgtggtatgctaatctgcaagatataggggatatgcaccgaaaccaatttaaatcgtgt

SEQ ID NO: 121244 - DNA, 1117 bp, Zea Mays
ctctctcactccttatcccttctctatccgccagagggaaatacccattgatctcatctcatgccctgttgccgcgcctgctcctccttccccatccgcgcccaccgccgcccctccggcagccccgccacgagcccacccgcaagcttcccgcacggccaccgctgcctggtatcaatcaaaccagtcgtccgtcctcctttccttcaaatcaagtccatttccactccctgtctaccctctccctcgtctctggtgggcggtggcctcgcctccctttccccgtcgccctgatggctccctccgcagctctcgctccggtggccttccgctccgccttctcgactccgctcgcgtcgaaccctacccgtaatagaataaacatagaaggcactttctgtttgccgtgttccgcaaggaagagagctagttatagatctttccgagtgtacagtttatttggagggaagaaggataaagatgagaatggcgatgaagcgccatcgaaaggatttttggaaacatgcaaaatctctatgaaactgttaagaaggcccaaatggttgtccaagttgaggctgtccgggtgcagaaggagcttgcagcgactgagattgatggttattgtgaaggtgaactaatcaaggttacactttctggaaaccagcaacctattagagttgaaatcacagaagctgcaatggagttgggtgctgaaaaactttcggagctggtcaatgatgcatacaaggatgcgcatcaacggagcgtccaggccatgaaagagaggatgtctgacttggcacagagcttaggaatgcctgcgggccttggtgatggtctcaagtgatgctgcctgccattcgggaagcctttctaataatttttttccctcaattttgaatacgagccgtgtgggcacctctcgtagtcacgtagtaagaagtgtactcgtgaccagctgtttcgttcagcgttagctgtgattttgttttgtacaagcagatatatttgcactaaatcgtggtaacgtcgtcctatggaactcggatatcacatgtggtatgctaatctgcaagatataggggatatgcaccgaaaccaatttaaatcgtgt

SEQ ID NO: 121245 - DNA, 624 bp, Zea Mays
atgggagtggtggatgaagcaaagccagtgaagaagacgacgataagagtgagggagtttgacgtggagagggacctccgggctgtggaggagctggagcgactgtgccaggtcggcctgtctggcgaccaaggctctgaccaccctgtcgccgaccattatggcggcgcagagaagacgacgaggagcagcaagaagaagaaaggcatgtcgctctacgtcgagcagatcggtgacccgtttgcccgggtgcgccatgcgccggacaacgtcatactggttgctgagtacggcgaagaagacgaggttgtgggagtgatcaaggcgtgcaccaggatggtgagcagagggaagaagaagcaaagcctcggcagcagctcaaagcagtttgtcaaggtggcgtgccttcttggcctcagggtgtccccctcccacaggcgcctcggggtcgcgacggagctgatccggcgtgccgagacgtggtgcgcggcgcgcggcgcggcgtacgccaccatggccaccaccgagtccaacgcggcgtcgctggcgctcttcaccggccgcttcgcgtacgcgccgttccggcggccggcgttcctcggccgccccgtgcaccgccaccgg

SEQ ID NO: 121246 - DNA, 1459 bp, Zea Mays
gggacgtcgccacccgagcgctcagctcaaacatccctactctcctgctcctcttcttcctcctcctctcgctctcaagcgcgtcttcactccggcctagctcggacggatcgacatcgaggggaaagggaataagtgggggcgccagcagatggatccatggatcagcagccagccttctctgagccttgacctgcgcgtcggcctgccgccgctcagcctccaccaggcgccggtggccgtcgccttggccaggcccaaggtgctcgtcgaggagaacttcctgctgcctcccaagaaagaaccagaggtggcggccgctctcgagtcggagctacggcggatgagcgaggagaaccggcgcctggcggaggcgctggccgcggtggtctccaagtacgaggcgctgcgcagccagcacacggagatggtggccgcgtcgtccgcgtcggagggcgggtccgtgtcgccgtcgcggaagcgcaagagcgagagcgcggacacggcgccggtgcagcgccttcaccagcagcacgcggcggcggacctgtcggagtgcaccctccggcggcgagccgccgtgcaagcgcgtcgtgcgtgaccgggcggaggaggtggaggaggaggaggagtgcagccccagggtgtcgaagctgtacgtgcgcgccgacccggccgacctgagcctggcggtgagggacgggtaccagtggcgcaagtacgggcagaaggtgaccaaggacaacccctgcccgcgggcctacttccgctgctccttcgccccggcctgccccgtcaagaagaaggtgcagcgcagcgcccacgacgcctccgtcctcgtggccacgtacgagggcgaccacacccacggcccgcccccctcgggctcgggctcgggttcgggcgccagcagcaagaacgccgcgaagccgccgtcgccgccgcgccgccaggaggctgctgtcgcggtgactgcggccgcggcggcgtcggagatggtccggcggaacctggcggagcagatggcggtgacgctggcgcgggaccccagcttcaaggcggcgctcgtgtccgcgctgtccggccggatcctcgagctgtcgccgaccaaggactgacggaccgcagacggatcggatcgagcggcgtgacacgagattctcgcctcagggctcagggtgtcttcgcacgcacgcggcaatggtcggccgaacaggagacgaggatctgcagcccagcaccagggacgagcagaccggggctgctcgcgcggccggacatggcgtggaccggtgtccagactccggagatcgtcatgccgacgacgtaacatgcgaaacgctactagtacaagaaacaacatccaagtgtacaatcccctgtactttgtagtcttgtttaggcaaactgttctctgtccatccaatcgatgaaacgagaacgttacaaatttttttta

SEQ ID NO: 121247 - DNA, 1293 bp, Zea Mays
ccagggagtagaagaggttaaccttctggttggaaacgatgtacttcgaaggctatggcttccgtggaagtactttcgagcagacatatcgctgctatcctgcgtctttcatcgacaagccacaacttgaggccggtgacaaaattataatgccaccatcagctcttgatcgtcttgcatctctgcatattgaataccctatgctatttgaagtccacaatgcagcagcagaacggacttcgcattgtggtgttctggagttcattgcagaagaaggcatgatctacatgccatattggatgatgcaaaatcttcttttgcaagagggagatatggtgttcataaaaaatgccaacctccccaagggcacatatgtgaagttgcagcctcatacaacagactttctagatatttcaaaccccaaagcaatcttggagaaaactttgcggaacttttcttgtctaactacaggtgacagcattatggttgcatataataacaagaagtactacattgatatagtagagacaaagccctccaatgctataagtattattgagaccgattgtgaggttgactttgctccaccacttgactacaaagaacctgagccagtaaaacctgctgttcctgcaagcacggagcctggtaccgacgttccagctgaagaagaaccaaagttcatccccttcactggttcaggaaggcgcttggatgggaagccttccaaagataaagatgtgctagcctcttcccctgcaaagcgacaagctaatgcgaccaacggtgtacagccttcaacagccaccacatcacagggcagttcatcgcgtaaggccacaggaaaacttgtctttggctctggtggtaaccgagccgaaaaggcacctgaaaaggaagcagaggagcccaagaaagaagacccaaaattcgcagcattcacaggaaagaaatactcactgaagggctgaataaataggaagacaatgtattatcagtatttccggtgacggacattctcagggagaagcgcttaccaaccctgttatgtgggagggtctttcggtgggatagtggtctctgtttctcctgaactattacccttgtgtagttgtgtcagccacaccggagcaactgatgtataaagccgctcttgtccgataatggatttctgttgagcttgcatgtacattttctaaaaagataactgaaatcgccaaaaaaactacaaatactatctagaattctgttgaaattttagattttatttgcacttatctttgtttcactcta

SEQ ID NO: 121248 - DNA, 1413 bp, Zea Mays
tttttttggggtatctagtattttgcgtaaaagaggagcatgggagaggtgtgtgtcgtgtgtgtcagttttttttaatccgcgggttcagtgtatttaaaaggctcccccgggcacgacgccgctctgctctggttcgccttccacctccaccggctccacgcgccccacaccccgttcctttccttccttccactcgccttcgcctcccttccctcgcttctccacctctctctctctccctcacgccgccgacgttccgttttcctcggcccgcgagctgagcagagcagagctgcggcctgcgacggaggccactatggcggcatcatcggcggacgagctggtggcagcagccgccggcatcatctgctcgatgcgcggggccgacctcgccgccggctgggcgccgccgcggcgcaagcagcaggagccggcgcgggagggagcgctgatctggccggcggtggcgcgggggaagcggtcgcgccgccgctcgccgtccgcgggcttctcctcctcgggcaaggcgcggtgggggggcagggccagcccggcgtcgaccctcgactacagcggcggctccggctccggctccgggtccgctcccgcgtctaccagcggcggcgaggacggtggcttctgctccctgccccaccgacccgtacgaccagcggcaaggcacgtgccttgggacgctgacggctgacggctgacggctgacgcccacctcccccctgttcgtcttctgtctcctctcaactgccgccgccgccgccgtgctggtgggagccaccgaccggccgcagctcatcttcccgaccccgccgcttccacgcctcgccggccagcgaccgcggaagaaactgaggctgccggagatgcagcagctggtgcggtcactcgccgtggacaacgagaggctccgcgaggagatgcgggatctacagggagcttgcgaggcgctgtccaaggaaaacgacgagcttgagacaaggttaggccaatcgagccgtcagagcgaggtcgcttcgaaggagcagagaggaaagggtctgcttgatccgcggcagcccgcacgggacagcttcgcgctacctgatctcaacctcccaccacaggactctgccgatgtctcaacagtttcattgatcgctccagatcgtttgcagctttgttaatcgaacaacaagtgtacagagaggaagcagggtagcagtctatgcatccgttcttttttatttgtcgcagtttagtttaaaaataaactagcggacggcaaattttcgagaactgtagtatttgataagttgttactagatcacagagttttatttcgactatagtcgtaagtgataagccacatctgtagctaaagggagctctaattttaactcacccgacattaattgt

SEQ ID NO: 121249 - DNA, 1431 bp, Zea Mays
atggagaaaaccaacccaaagtcccaaacctgtgtagccttccaaccaaaccaacccacgccatcatcttccgtcaatccatccatccgcttgtccctaccacctccaccaaccaaaacccccaaccgccgaggtcaccggcgactccgtcctcgccgcgccgcgccgcgccgtgaggatgtcgttccactaccacgaccacgggctgtccatggacgccgcggcggcggcggccgccgccgccgcgtcgtcgccgaacctagcggcttctcccccggcatcggcggggagagggagaaggcggccatcgcggcgcacccgctgtacgagcgcctcctggaggcgcacgtcgcctgcctacgcgtcgccacccccgtcgaccagctcccccgcatcgacgcgcagatcgccgcgcgccccccgccgctcgccgcggccgccggggccgcggccgccggggccgcggccgcgggaggcccgtccggcggggaggagctcgacctcttcatgacgcactatgtattgctcctttgctcattcaaggaacagctgcagcagcatgtacgtgttcatgcaatggaagcagtgatgggttgctgggagcttgaacaatccttacaaagcctaacaggggcatctccgggtgaaggcactggaggaaccatgtctgacgatgaagataaccaggtggatagtgaagccaacatgttcgatggaaatgatggatcagacggtatgggctttggccccctgatactaacagagggtgaacggtccttagttgagcgtgtacggaaggagctgaagaacgagcttaagcagggttacaaggaaaagcttgtcgatatcagggaagagatcatgcgcaaacgcagggctgggaagcttcctggagataccgcatctgtactgaaagcttggtggcaagctcattccaagtggccgtacccaactgaagacgacaaggccagactggtgcaggaaacggggttgcagctaaagcaaatcaacaactggttcattaaccaacgcaagcggaactggcacagcaacccaacatcctcggctgaaaagaccaagaagaaaaggtgatgatggcccagagcaatcttggcaaaaagctagagatgtccactatactttattatggcgaagtacattctccctcacttcgtaggcaagagggaaaggtatcttgggtgacttgagtggccacctaatgcgcaagtttgacgacgtggtggggctggagttggtagtgacctcagcagtatagcattcgctaacgtgatgtgggtgaatcacgtgttgcagtagaaccggcgagcgggaggggggtaatttatgttgtattgtaattgtgttttttattaccttgtaatgatattttagggagaatcccaagattcatattcgcatgttttgtcgtcc

SEQ ID NO: 121250 - DNA, 767 bp, Zea Mays
tctgctactagtacagtgctctatatgttctgcttctgcaggacatgaaccaaaactcgtcgacgaacgcaaagcatccgcacgcaaaactaatcgcagcaaacaaactaaaaacacatccatggcctgccctcatcggccgccagggagagcgagcgagctcgatcgcagggccgggcgctagcgctagacggctacgcgacctcgacgaccacggccggcgtggacagccgcgacgagaagccgtggtagagcaggccgtcgccgcggtgggcgtggactccccgctgctgctgttgctcctcctcctccacgtcgaggtcgccctcgtcgaagttgagcgcgtagctgagcgggtcgtaccggaactccccgacgcccgcgcggcggcgccaccacgtccgctcgcccgggccgccgccctggccgaagcagcagcacacggtggccctcagcctgtgccgcagcgcgctcagcgacgacgacggcgacggcgactccatctcctcgactcctcctgctcctgctcgcgggctgaaggctgaagcgacagccgacagcgtcgggtcgggtactcaggtatctgcgctccgcttggcaggtcagtcaggggtcaggactagctagcgaacgtgattagtagccttgcttttttataattagccggcctgcgtttggttaaggtgggcgcgacgcaggttaaggccgggcgaggtggtcattaagtagtaagcatggccggtggtgccgtgccgtggtggtggtgg

SEQ ID NO: 121251 - DNA, 525 bp, Zea Mays
acagtaggttcattccccccaccacatcgaactgtgcgcgcgctgcgcggtcggtcgctcccctcctctgtccgcgatctcggctggccgcctgggcttggccctcgccaccgctcccgtctccggttccggcggccgagccaggtttgctcgggtcttcgtgccagcgacgatgaaggacaagcgtgggctcgaggacgccggcgacgggcgccctgatgccaagaggccgcggcctccggctctggccaggtgaggagccctccggattccacttttggccttttgggcgtgtttagcttcgtgatgcgcatgagtggggagcactagcgggagccctactgacttacagtattgtacttgtacacaatcggaaacttggttctggattactttcccgctgatcttttatggtagtgagcgccagtggaaatggccccggcccccgtgtgttttttctcgtctcccacttgtcttgggtgacctcaactcgagctggaatcatcatcttcagtggctactggt

SEQ ID NO: 121252 - DNA, 1258 bp, Zea Mays
acagtaggttcattccccccaccacatcgaactgtgcgcgcgctgcgcggtcggtcgctcccctcctctgtccgcgatctcggctggccgcctgggcttggccctcgccaccgctcccgtctccggttccggcggccgagccaggtttgctcgggtcttcgtgccagcgacgatgaaggacaagcgtgggctcgaggacgccggcgacgggcgccctgatgccaagaggccgcggcctccggctctggccaggtgaggagccctccggattccacttttggccttttgggcgtgtttagcttcgtgatgcgcatgagtggggagcactagcgggagccctactgacttacagtattgtacttgtacacaatcggaaacttggttctggattactttcccgctgatcttttatggtagtgagcgccagtggaaatggccccggcccccgtgtgttttttctcgtctcccacttgtcttgggtgacctcaactcgagctggaatcatcatcttcagtggctactggtctgtgcttagagcagcgtttagggtggtgtttggtgcaggctgttggacgattggctggaatgaactggtttgctggatcgtgggatttggaagaaatattgatctttgttgtgtgcgtggtagattttttatgcagtagccatagtcgcaactcatggaaccatgtgcctttgcatggaatattcatagtgagtgctaccttgtccaaaatggaaagtatttgtatcgttactgtcgacctaacggcctacgtgttagttggacacgagtaataacgtcggcaaattcggtaacgctccctgtttatttcaatagtttaagtaaccgctgtcgagtgtgcattaccaggtaagcaaaggaatcaagcccagcatggttggttaaagggtgtaatactgtagttcagtgattgcgtgctcagccaacacaagttcaagttctattcaatatggatttgggtgcctgtttcttcttaatgtaaagtcacttgatttttccaagtttggtgtacgtttccaggaagtatgtaaaaatctcaagtgaaattagagcatggtagcctatgcaaacatacaatgttggtgagtatgagtctagatggattcagggacacatggatttctgtagtacagtaagtaggaatagatttatctgtgtaataatcagtgttatagttcagttacatatacagtatacctgtattctatttgcaaacgcaagttgaagattgaa

SEQ ID NO: 121253 - DNA, 2312 bp, Zea Mays
acagtaggttcattccccccaccacatcgaactgtgcgcgcgctgcgcggtcggtcgctcccctcctctgtccgcgatctcggctggccgcctgggcttggccctcgccaccgctcccgtctccggttccggcggccgagccaggtttgctcgggtcttcgtgccagcgacgatgaaggacaagcgtgggctcgaggacgccggcgacgggcgccctgatgccaagaggccgcggcctccggctctggccagtgttattgttgaagcgttaaaggtggatagtctgcagaggctctgctcatcattggaaccaattcttcgtagagtagtcagtgaagaagtggagcgcgcactgggcaaacttggccctgcaacaatcggtggaaggccttccccaaagcgaattgaaggtccaaatggaagaactctgcaactcgaattccgaacaaggctgtcacttcccctttttactggaggaaaagttgaaggggagcagggagctgcaattcatgttgttttgtttgatgctggcactggctgtgttgtatcctctggaccagagtcgtctgccaaacttgacatcgttgttctagaaggtgatttcaacaatgaagatgaggagggctggaccggagaagagtttgacagtcacgttgtgaaggagcgtgagggaaagcggcctattttaactggtgatctacaagtcacactaaaagaaggtgtggggacagttggggagcttacattcacagataactctagctggataaggagtaggaaattcagacttggcttgaagattgcctcaggattttgtgagggtgttcgcattcgtgaggcaaaaacagaagcctttatggttaaggaccatagaggagaattgtacaagaagcactatccacctacactgaaagatgaggtctggaggttggaaaaaatagggaaggatgggtcattccataagaggctgaacaaatctggaatatctacagttgaggatttccttaggcttgtggttcgggatccacagaaattacgcagtatacttggaagtggtatgtccaacaaaatgtgggaaacccttgtggagcatgcaaagacttgtaccttaagtggaaaatattacatatactattctgatgagactagaagtattggtgctattttcaacaacatctatgcattctgtgggttgatttctggcgagcagttttattcatctgagagtcttgatgatagccaaaagctgtttgctgatgcattggtaaagaaagcatacgataactggatgtatgtcattgaatatgatggcaaaggtcttttgaaccctaaaccaaagaaaaagtctgcatccactggtcaagtggagacacatgctcctgcgggtggcccgacttcatatcaacaatacctctcttcgatgagcatgccagggccatcaccatcaggtggaactgattctgcagggtatggcgtcgaccaaagcgcaacacatccatctcagctgcagagttcatccgccaatgtccaggcaccatatgatgacacattttcgttcttaccacctaacatgctgacagggtctgcaaatgatgccatgggtctggaactgggccagttgcagcaagtaacttctcaaggccagacaattcagccagcaaacgtgggatatggtgattggcccaggaaccgtgacagtcagtatcctgatgacttcactgaggacattcgcgttaagagccaccagttgctcgagggcgaggacatgcagcagctgctgagggtcttcagcatgggtggagcttctggcagtttgccagacgacaccttcaatttccagtcctacatgccctctccgttgcccaacctcgggttcgaaactgagcgtagccattcgtctggcaaagctgttgttggctggctcaagatcaaggcggcgatgaggtggggaatcttcgtcaggaagaaagctgccgagagaagggcgcagctagtcgaactggaggattgacaccgtggctttacaatggtcaaggttgccttgtagattactagtagttatctgcccccataccttcctgttaccgtttaaacaagtttctgaaactcttttctgaaatgtacaacgagtagttctactattttcttgtacagaattcaccttgttttgattgtgttagttgtggaacattgctctgctaagtttgacacatgactggacccgtatgcttgtgtatcttattttccatagctcttcagtgcagaatgtaccgcaacgatgcgaattaatccaaagattatgtgtacatgtt

SEQ ID NO: 121254 - DNA, 2370 bp, Zea Mays
ctgcgcggtcggtcgctcccctcctctgtccgcgatctcggctggccgcctgggcttggccctcgccaccgctcccgtctccggttccggcggccgagccaggtgaacgatctctccagtccgcgacgatgaaggacaagcgtgggctcgaggacgccggcgacgggcgccctgatgccaagaggccgcggcctccggctctggccagtgttattgttgaagcgttaaaggtggatagtctgcagaggctctgctcatcattggaaccaattcttcgtagagtagtcagtgaagaagtggagcgcgcactgggcaaacttggccctgcaacaatcggtggaaggccttccccaaagcgaattgaaggtccaaatggaagaactctgcaactcgaattccgaacaaggctgtcacttcccctttttactggaggaaaagttgaaggggagcagggagctgcaattcatgttgttttgtttgatgctggcactggctgtgttgtatcctctggaccagagtcgtctgccaaacttgacatcgttgttctagaaggtgatttcaacaatgaagatgaggagggctggaccggagaagagtttgacagtcacgttgtgaaggagcgtgagggaaagcggcctattttaactggtgatctacaagtcacactaaaagaaggtgtggggacagttggggagcttacattcacagataactctagctggataaggagtaggaaattcagacttggcttgaagattgcctcaggattttgtgagggtgttcgcattcgtgaggcaaaaacagaagcctttatggttaaggaccatagaggagaattgtacaagaagcactatccacctacactgaaagatgaggtctggaggttggaaaaaatagggaaggatgggtcattccataagaggctgaacaaatctggaatatctacagttgaggatttccttaggcttgtggttcgggatccacagaaattacgcagtgtaagtttgtgtgtgcagtgttattaacttattcttactatactttcatgtgttttggttgctgattataaatgctattctgtgatagatacttggaagtggtatgtccaacaaaatgtgggaaacccttgtggagcatgcaaagacttgtaccttaagtggaaaatattacatatactattctgatgagactagaagtattggtgctattttcaacaacatctatgcattctgtgggttgatttctggcgagcagttttattcatctgagagtcttgatgatagccaaaagctgtttgctgatgcattggtaaagaaagcatacgataactggatgtatgtcattgaatatgatggcaaaggtcttttgaaccctaaaccaaagaaaaagtctgcatccactggtcaagtggagacacatgctcctgcgggtggcccgacttcatatcaacaatacctctcttcgatgagcatgccagggccatcaccatcaggtggaactgattctgcagggtatggcgtcgaccaaagcgcaacacatccatctcagctgcagagttcatccgccaatgtccaggcaccatatgatgacacattttcgttcttaccacctaacatgctgacagggtctgcaaatgatgccatgggtctggaactgggccagttgcagcaagtaacttctcaaggccagacaattcagccagcaaacgtgggatatggtgattggcccaggaaccgtgacagtcagtatcctgatgacttcactgaggacattcgcgttaagagccaccagttgctcgagggcgaggacatgcagcagctgctgagggtcttcagcatgggtggagcttctggcagtttgccagacgacaccttcaatttccagtcctacatgccctctccgttgcccaacctcgggttcgaaactgagcgtagccattcgtctggcaaagctgttgttggctggctcaagatcaaggcggcgatgaggtggggaatcttcgtcaggaagaaagctgccgagagaagggcgcagctagtcgaactggaggattgacaccgtggctttacaatggtcaaggttgccttgtagattactagtagttatctgcccccataccttcctgttaccgtttaaacaagtttctgaaactcttttctgaaatgtacaacgagtagttctactattttcttgtacagaattcaccttgttttgattgtgttagttgtggaacattgctctgctaagtttgacacatgactggacccgtatgcttgtgtatcttattttccatagctcttcagtgcagaatgtaccgcaacgatgcgaattaatccaaagattatgtgtacatgttgatgccttgccttt

SEQ ID NO: 121255 - DNA, 776 bp, Zea Mays
caactactttctggcggcggttcgtccctgatctccaggaggtccctgtaccccgcttgggctctcctaaaccctaatcgtgaccgccgcgccagcgccaggaactgtagtttcgtcctcgcggccttctctccctccagtcgaaccgcgccgacgagcgacgacaactgctgctgcattcttcaatggcgactgtgccagttaacccaaaacctttcctgaacaacctgacggggaagcctgtaattgtcaaactcaagtggggtatggagtacaaaggttatcttgcttcagtggactcctatatgaatctccagcttgccaatactgaggagtacattgatgggcaattctctggaaacctgggagagattctgatcaggtgcaacaacgttatgtatctccgaggcgttccagaggatgcagagatagaggatgcagagtgagaagatgtgaatgtaatttgattctgacatgtatgtttgaatacgccggtgacaactagacctatcggatctttatgttgtcattctattgaatgtgaggaatatcagatttccttgaaacagtttctcttgcctcattgccaactacctccctcgtttcaaattatagattttttttagatacgaagctctatgtctagtaaagccaaaacgtataatctggagtggagggaatatcacgaattatttgaatgtgaacttgcacgatgtgttagatgttatatcaatgcaaaacaatcggctctggttgctgagatcatagaaatgaaa

SEQ ID NO: 121256 - DNA, 948 bp, Zea Mays
ttacaaatgcaaattgaggcatgtcatgataccgaacgccacagctactccattccaccagctcgtagcactgcgtccggcgggcgatggaaccttggctgccatgccgccgtgcacgctaggaatcggaataattcctgtctcacctagcgccggcggagtatttgtgaggtttggcgtaggcaccggcctgatcggggacgggaccagcgggccggaaccaacgaacggttcctgctggggtccgggcgcagccaccggcgcctggccggggggcgctgccatgtgcctcgcccttggcggcgggaacggcttggggaccctgatgcccggcgggacgacgaagccgctcacctgcagcacggcgaggctgtacggctgcgcggcgaccacccgctcgacggtggcgttccggagccccgcgggcgcggcggaggagacggtggcgcgcccgtcgcgcccggcgtagacgcggaggaagccggtgccccgcggaacggcgcgcatcacctgcagcagcgtggtgaccacggagcctcggcccgtgcgcccgcgctccagcgcgcccagcctgggctcgtcgacgtaatcgagcacgacgtggagcgcgagcaggtccgccaggaacgagcgcgggatgtggggcaggccgccgaacgccgcggcgacggccgtgttgttgggcgccagcacggtggccctgtcgcggctgttgatggcgagcgcgacgctggtctcggtcagcatggcgctgaagacgctgaactccgggaagccggcgagggtcttggtgatgttgatggtgcccgcgcccccctccccgtagccggctccgaggctgggcggcgccgcggggaggaggacggcgagcagggcgaggaggaagggcgccatgcggtggcagagcgcgcggatgcggacgaacgtggtggcggtgaggagggggct

SEQ ID NO: 121257 - DNA, 1477 bp, Zea Mays
aaatcccccacagttccctttccctccgtccacccgcccttctccttcgttcccggctaagtggccaacggacgtgcgatccggcgcgcttcctcgccgtcgatcggaggccgagaggaatgtcaggggcggcatccgtgaaggaccgggccaccggcctcatcgacaagttcgtgctccgcgaggcccgcggcagctccgtcgaggtatatttatacggaggccaagtgacattttggaaaaacaacttcggtcagcaactgctttttatcagtaacaaggctacttttaaaccgccaaaagcagttcgtggtggtatccaaatttgcttccctcaactaggtaaccatggagttcttgaacagcatggatttgcaaggaaccggttttggagtgtcgatgaaagcccacctccttttccagttgctacttccaattgtcatgttgacttgatactcaagtcatctcccgaggatttgaagatctggccacatagttacgaatttcgtctgagagttgctctgagtccaaggggagatcttattcttacatctcgcataaaaaacatcagctcagacagcaagccattccaatttacatttgcataccacacctacttttcggtgtctgacatcagtgaagtgagggttgaaggtctggagaccttggactatcttgacaacctgcactccaagaaacgttttactgaacaaggagatgcggttgtattcgagtccgaagtggacaaggtgtatttgagtgctccgccgaaggttgcgatcatcgaccacgagaagaaaagaacgtttgtgttgagaaaagagggccttcctgacgttgtcgtttggaacccctgggacaagaaggacgaggggtacaagagcatgctgtgcgtcggggctgcggctattgagaagtcagtcactttaaagccaggcgaagagtggacagggaagcaggaaatttctgctgtgccgtccagttacagcagcgggcagttggaccctgaactgattcgtcgaatgcacacaatataaagtttacctgcgattgcatcctacgtgagtattctgcactaaacttttgagtgtcagcacaaaaaaaatcgtgcctccttccttacactattctgttataagccacctgtttacttggaattatgccctttgttttcctgtcaggttccaaactagcctgtggttttttttttattattattattctgaagcagcactgggattggaatcatcaccctgttaattactagacaaattgggccgggggagtttttcatccatagctggggccggaggtgccattccgatccgtatacaatattctttttctctgtgtttttttggtattgtattgtaccactagtccgctgcaaaaggaagccccaagtttgtactgcatgtggcaaacaaaactaccaagatatactaattgagttgtataataaagcgtcacacgtttc

SEQ ID NO: 121258 - DNA, 1674 bp, Zea Mays
aaaaacgcagcccttccttccttgcttcccatgctcgcatcgcgtccttctcttcccgacttcctcgcgttcatttcttcaccccacccgcccccaaacgccaaatctaacagcaaaggtccggaaccttctagccgcacctagggtttggattggcgccgagcatggcgtacgtcgaccacgccttctccatctccgacgaggacgacctcgtcggcggcgccatggggggcccgcgcggggcgcccgtgaaggagatcgccttcgccgccgcgctgctcgccttcggggcgctcggtaccatcggtggcctgctaatggctgtcaaccgcgtcggaggggaccgcgcgcacggtgagtcagacaatccgaatccccctccctccgtttgctcttctgctgcctctacctcaacctctcctctctcgtctcgatgcgagcagctggagttcccttcctgcgtgcacctcatagaatccgcacgcttttatcagatctctgcgggatttttagctgcacggtgacatcgagttcccttagggtttcaggaattcccccgcctgttagtcctgtttcggggcgcgaacctagcattttgacttttcatgcgattacctaccgcgagcaatgtgactgcacaaagagagttggtttattttcttacaactacttattattagtatcacatccatcctcgatctggattgggatgcttggggttggtgatgcatcgatgtagttgaccgggttccaattggttgaactggcctgtgtccacttatgggtaataatattcatttcatcagacatgtctatctaaattttagagtgtcaacaaaccatcacaggccacagcactgagtgcatttggttgcctcgaagctgcagatgcaacaggggtttaggtgtagtttcatatgaatgcaggagtggaaattttaataaattggaggcaataccaccgcaacatatatcacataattttcatactctatgatagaagcctgtgatagagggataataagaacaagttgtgattggtacgcacagtcttcataatttgtatggatgctgattcaccattcaagtactgatgcggtttgaaccctttcatatagcagttttagttaagtacgtattcgatcacatgaaatgctgtgcttatgcatgaatttttttactccctttacctgaacttatgaccctttatgttgtatcaggaattttcttcatgatgttgggcattgtaatgttcatccctgggttctactacacaaggatcgcctactatgcttacaaaggttacaagggtttctctttttcgaacatcccaccgatctgaaggagtgtgctgcctgcctgctggtcatgaagtggtgtcgctggtttaagagtttgtcgactctgtcgaatggctctgtagacacccttgttctacatctttctgtggccacattctctttgaacactctagaatgaactggtggatgtgtacagataaatgcagccatagttgtgctccatcgctgtttggccgattggaaggttgtttgttgtgctagtgtgaccatgttcaactgatacgcattgctacttgtgcattactatcgtttttgtcagggaccttaaatcattatatgggaataagatctcgtcgttccaattgtgaagaat

SEQ ID NO: 121259 - DNA, 808 bp, Zea Mays
aaaaacgcagcccttccttccttgcttcccatgctcgcatcgcgtccttctcttcccgacttcctcgcgttcatttcttcaccccacccgcccccaaacgccaaatctaacagcaaaggtccggaaccttctagccgcacctagggtttggattggcgccgagcatggcgtacgtcgaccacgccttctccatctccgacgaggacgacctcgtcggcggcgccatggggggcccgcgcggggcgcccgtgaaggagatcgccttcgccgccgcgctgctcgccttcggggcgctcggtaccatcggtggcctgctaatggctgtcaaccgcgtcggaggggaccgcgcgcacggaattttcttcatgatgttgggcattgtaatgttcatccctgggttctactacacaaggatcgcctactatgcttacaaaggttacaagggtttctctttttcgaacatcccaccgatctgaaggagtgtgctgcctgcctgctggtcatgaagtggtgtcgctggtttaagagtttgtcgactctgtcgaatggctctgtagacacccttgttctacatctttctgtggccacattctctttgaacactctagaatgaactggtggatgtgtacagataaatgcagccatagttgtgctccatcgctgtttggccgattggaaggttgtttgttgtgctagtgtgaccatgttcaactgatacgcattgctacttgtgcattactatcgtttttgtcagggaccttaaatcattatatgggaataagatctcgtcgttccaattgtgaagaat

SEQ ID NO: 121260 - DNA, 513 bp, Zea Mays
atgagcagcccaaggatacacctccaacattgccagcccggccgatgtgtcttggccggatgcccaccaccaaggcggccatcactgcctgctggatttaagctcgagaatggcatggtaacagttcctgccacagaagctgcagtggttgacaagaaggcagatgccaaggagattactgggttggaggtcaaggaggaaaaggcagtgaaaggatgcgtctttgggactaagaggaagttccctagcagacaagtgctggaggaatcgccatatttgatgaacttcatgaggagaggaagctgcgagggggaggaaaggtgggatggcagccggcggcgtcagcaacagcagcaggcacaaggatacgggaatcagcaccaggaagaaagaataaacgatggaggctggcagaccgtcggtgagaaaaagcgccatggaagaccacaacaggcttgtttgggagcaatgatagaggaggagattgaagggtctgtctccagtgcgcactga

SEQ ID NO: 121261 - DNA, 2108 bp, Zea Mays
ctcacttcgccgccactcccagtcccagtcgtccctctctatctccatctctctatctctgcactgcactgctcacagtcacagctatagattctagaagccaacaaaaacagacgggagcggagaatcgtgctccgggaaaacaagagaatccacctcctctcccctcccctccccttcactctccagatctacgccggcggcggctggtgcgtccgtgctgctccgcggaggcggtgctgcgctgctagctggtcgtccgagagagcccggcccccgaccgagcgatgggggcggcgccggtcctcgtcctgctgctgctggtcgccgctgccgcattgccgcggcgggcaagcgcggccaccgacgccggcgacgtttctgctataaatggactttatgttgcacttggatcaccaaagctacctggatggtctgctagtggtggagatccctgtggtgagagttggcagggtgtcacatgtaccggctcaagtataacctcaataattttcaatgctgcaaatttgggtggacagctaggcagcctggggaacttcacttcaataactgaaataaatcttagcaacaacaatatcggtggaagcataccggaagatctacctgtcacactgcagaatatctttctctcagataaccaactaactggaagcattccagtgtcattatcaaaactccatagtctaacagccatgtcactgaatgataaccatctagatggaaaactaccagatacatttgattccctcacagaacttgtaaatcttgatatttcttccaacaacttcagtggtccattaccaccttcattgggaagcttgacatcactgactacattgcacatgcaggataatcaactatctgggacccttgatgtcttgcaggatctctccctcaaagatttaaatgtcgagaataatatgttttctggaccagttcctccgaagctgctcaacataccaaacttcaaaaatgatgggaatccttttaataccagcatagctccctccacctcaccctcttcacctacaggctcaccaacacaaacaccatcgtcctcttcatccccttcaggatctccttcaccatctaatgcagcatcaaactcttctagtggatctactgctcgaaatagcaattctacgtcatccaagaagaagaagccttcaaccctcagaactgttggatatgttcttcttgctattgtgctattcatagttcttgcgctactggtagtattttgcttgtccaagtatcaagaaagacagactagacgtgattattccatggctcaattaggtaggcatcagagggctgaggagccaaaaagcaagcaagcttcggtgcagtctagacatgatgccaaaaaaggtttatctgaagttcctgaaagaaagaaaccccgtgaaataaatttagctgtaccagttgccattgagaagcctcctgaaaagagaaaagagcatgtaattaatttggagcgaacagaatcagagatctttgctgcagcgcctcctccacctccacctccacctcctccacctccacctccgccaccaccaccctcaacaccgccacctccatctccacctccacgattgccatcaccacctcctgctgaaaaagtaactgtaaatcccattgtacgtccagtaaaaagagttaacactccgccaaggactggtccctcgacatctgcaacatccttttccgtggcatcacttcagcaatatacaaatagttttcaagagcaaaatttgataagggagagtagattgggaaaagtttatctggcagaacttcctgaagggaaattactggaagttatgaagattgataatgctaatggaagaataccagtagatgactttctagagttggttgcttgtatatcagatattagacaccctaacattcttgaattagttggatactgtgctgagtatgaacagaggttacttgtgtataaccacttcagtagaaaaacattacttgatgtactacatgaaggggaggatattgataatccattatcctggaatgctcgcctccagattgctcttcatgcagcaaaagccttagagtaa

SEQ ID NO: 121262 - DNA, 1443 bp, Zea Mays
aatgtaaaacttcttataatagcattccctttatctcagctatcaggtcgtatgcgggctctactcaattatgaagcacctgaaatccatgactctgagccttttactcagcgcagcgacgtatatagtttcggtgtggtgatgctagaacttcttactggtcgtaagccatatgacagctctcgtccacgtgctgaacaacatcttgttagatgggctgattctcagcttcatgacatgaagtccctgtcagagatggttgatccatctatccgaggagagtgttccgtgatactattgtcatgttttgcagacatcatcagtcggtgtattcagccgggaccagaattcaggccagcaatgtctcaaatcgtccaagacctagctaggattgtaggtgctagtagtgaggtatcagagtgacaaataaaggaggaacagtaaaatatctagcttgccagtggcgtggccagcgaagatccctagatccatagcgcagtgccaggggcactctatctatcagcatttatattggacgagattgcggctagtgtacatgccattttggagcctcatttacttctggaaagatgtagactggtagtatggcacaaccagtgagatatggcttctcattgttgccgagcagattcatgtgctctagacatgatagtttcacctgtaggcagtatttcttgtaactaattctaatttttattactttattacattatggctagctatgttaaatatgatgcctttaccatgtcttgagactcatgtttctccggttgctaactccgtatggtttgttaatcatagaagtctactgttattgagattattttcagaggcaaagcgacattccaacttgacatggacatgatcatcatagtgacctggtgtcttctgccgaccacatgaaggttctcctccttgaagcgaaagcacccctgctaggtatgcatcgtgtgcttggttatgctgtcttttcttcgtgtgatttcttcaagacctggaataaactaggacgatgttgaactatgctgattgggattagacaaacttttgtagtgacctgttcttaattgttagatggcaccctgtggttgattgcaagtttgatctgtcatggtgccttgtacggttgtgccatgcactgttaggttctggatttctggctgttcaacacttttggctgttttgttcttctttttttccccagcttacactgctaacagctaagtcaattctagtgcaggagtatatgttggcctacaattttttgcaagcttgattgaactgacaatataccatcttgtcttttagcagagcaagagcatgtcacgaaactgggagagtttgccctgcttcctatcttgttgggggaaatggttggcgatgttatgcttgcctttcaggaaaagaaaaaaaacaaaaggt

SEQ ID NO: 121263 - DNA, 154 bp, Zea Mays
tttttgtttttctattcactattgcattctgtttggcaatcttttctagaaataccatgatgcattcaaggttcactctactgatctctcaaatctattgtgcagccgggaccagaattcaggccagcaatgtctcaaatcgtccaagacctag

SEQ ID NO: 121264 - DNA, 835 bp, Zea Mays
gtgagacctggtcacctggagggtgcaagggagggaggcggtcgaatccgtcatccgctgagcacagtggcggacccagctgctacgctcccgagtccgaggggaaggcagaggagacaagcaggcaggatgggtgccgctggtgacgccgcggcagcgggcacgcggacgcggtgcgagctctgcgggagcgcggcggccgtgcactgcgccgcggactcggcgttcctctgcccgcgctgcgacgccaaggtgcacggcgccaacttcctggcgtccaggcacgtgaggcgccgcctgccgcgcgggggcgccgagtccggggcgtcctcgtccagcggctcctgcctgtccacggccgactccgcgcagtcgagggcggcgccgccgccgccagggagagggaggagggcggaggacgtgctggagggggggtgggccaggaggaagagggtcgcggcggggcccgcgtgccgtcgtcgcgtcccgctccgcgtcgcgatggccgccgcgcgctggtcggaggtccgcgccggcggtggagcggaggctgcggtgctcgcagttgcggcgtggtggatgacgcgcgcggcgagagcgagacccccggcggcgggcgctccggacctggaggagggatgggccgagtgctctcctgaattcgtggtccggcagggcccacatccgtctgcaatgtagcaacagcatgtgggcgacgttagtttgtccttttcctccctaattattttagtaattaacgagatcgatcgtgtggtgtcgttggcttggcttcctctcgtcgtccgattaacaaaagccggttccattggctgga

SEQ ID NO: 121265 - DNA, 1728 bp, Zea Mays
gcatcggcccacccagccgcggccggcggcccacgccacgactcggcctcgtacggtcgggcccacgaccccgacccgagctgctctggcgccgtgacgccgtcttcctgttccccgttacttttcctcccccggcgaccgaagccgccgcccagccacgccatggactctctcctcgccagctacgcctcttccgacgacgacgctgatgaggccccacctgctcctcctcctgctcattcccccgccatcgccacttcctccggtggcggcgcaggcgggtttttctcctcgctcccgcaacccaagtccgcccccgcaccgctcttctcctccctcccggcgcccaaatccacccccacgccgctcttctcctctctctcggcgcccaaatcctcccccgcccctaaccccaccttctcctctatcccgccgcccaagtcttccggaggaaaccctaagcgcgtcgtccagtatcgcccgcagccgatccggcagcccacaggcgacagctccgacgacgaggaggacgatcccaagaagcgccgcgcgagcaacaacgaggcgcgcttgccgcccgtgtctgctggctcgggtcccgtgtcctcgttcctcccgcctccgaagcactcgctcgggctcggcgccggctctggcgcgggagcgaggaggtcggcaatcgatacggctgcgccagagaagctaaatctcggcaccgctctgccttcaagctcggttgccaacacaggagccccggaaaggcctgacaccggcgcaaccgacgacgacgattcggaagatagtggcagtgatggtgacatgcctgcgccggagctggaggaggagcatgaaaaccagcaggcttttaatgctgcaaccggggagcagcagcaaagctatgatgctggagctgggagcactagtggatatgaaacatatgcgtgggatccaaaccactatgcgcaacacggtgcttatggttgggatcctagtgccagtgcgaattatgaggatggaacacagtatgccgcatatgaaagagggcaaagtgcagggtatgttcatgcgcatggaggggagcatgccagtggatatgaccatgttgcggcagtgccatatggagtagattatactgctggaggttatggtcatgaggtagcagcgacattgccaccggtgcatgaaccgatattgccaccagagatgggtaggagtggagggaagagaggtagaaatgatacgccggtccagattttagaagtaaatcaagcagagctgatgaagaacagaccaaagcaggataagtctaagctcacggggttggccttcggtcctagttatcagcctgcaccttcagcaaaaggaaagccatccaagttgcataaaaggaaacatcagattggttctctgtactttgacatgaagtcaaaggagatggagcttgcggagaggcgttctaagggcattcttacgaaagcagaaactcaagcaaaatatggctggtgaggagggatgtaaaagaactcaagatacctgtgtgggaggctgggagctgtagaattgagatgcgtgaatttttgttgcacattttgttgtaagagttacggactttgtaagttcaatcctgaacaaatagagaacaaatagttcaataacgagtcaatatttttaaacttgtgttacccattaagaatcacgctcacattcaattgatgtgatctctgccaa

SEQ ID NO: 121266 - DNA, 881 bp, Zea Mays
tttcactgcgaatttcacgtccaacaaagagggagctagaatgtacaggtatttcacgagatgcatggatatagatggaatatcgaccatcatgaccctgtgcaaagaatttcgagcaaactaaatgaactattacaaaatggttataatacaacagacataatacaaacttcatatctgttaactccaaaaatagatgatgggtatatataagcactgcacctgtaaaaattcctcccacaacttctcaaaaggcaatgaacctggtgtcaagaacataaaggcaatctttgggttcttcgacacagccataggcatcgaaaggagattcctaataaccacggatgacactatctcttcatcagttcgctcccgaacaacagcaggtagccaatccttgaacggggtacagacactcgaagcaaagaagtagcatgcagagtagtgccgtggtgggtagacataggcccccataagggcaacacaaaccaacgacaatagcactatgatccacatgggcttcttagcagcgccacggtggcgcggagggggcatggttgtcatgtccttgctgctccgcccccacacctgtttcatctcctcgccatcgagaaatcacaacatatgtcttgtggtgacaacctccaccaataataaaatactacatggcatgcagtaacctgtaatcaaggtgaagtacgttatgccccagacgcggcaaacttacagtggtccgggcgtgttgcagtgcgaggagcggcgaattcggcgaggcgcgtcccgggatgccgcaagcggcgggatctagtgcctgccgccggctagatcgggctagggctcgcgcgcggcggtggtgggagacgacgaggtggaggtggtgg

SEQ ID NO: 121267 - DNA, 172 bp, Zea Mays
tccaaagaaccgaaagaaccgaaagaaccgaaaaacccaaaagtattagattcaatttgttacatgtgtttgtaacttcggatgttgtgttatcgacttatgttgaacctctaatcatccatgtattatctatgaaattatagtcattgtgcacttgtcgttgtttgtgggg

SEQ ID NO: 121268 - DNA, 560 bp, Zea Mays
tgttcgtttggtccggaattgttccagctaatcaaacattatataaattaggtaagtaatccgactaggaatagttctgggtggccaatccccaagaaccgaacgggcccttaggcagatgctaacatgactatagagccaactagtgctggagttgacactgctggtacctaagaagaaaagaacctctaagaataaaaatacaccactgaagaaagaacagaagaaaggatttgcagtagttgcagtagcctgtgatcgagtaatggcctgtgagctttgttggcctttcagaagttgcagtagcctgtgaactccaataatttaatttcgctttggttggggcgcgcctagctcagcctgtagtgcaacagccgagcgacgctcgaggaacccagtggcaagccactgttgtggtccctcccccacaaaaaataaatttaatatcgaagtggacacatggtccacatatcagatattaaactgataagaacagatactacacttgatcttagccaaaaggccgagaaaggtatgaatttggacggtgccctgcacct

SEQ ID NO: 121269 - DNA, 406 bp, Zea Mays
gtggaggtggggttttgcatcgtgaagtcggagctgctacgtcaggggatgtggctcgacaacgataacatgagacgaacctcccttcttcatggtccagtttgtttcgaaggtcgggcaaattccggaggcagggtggagggtcaagattggaagtcggagctgctctatgccttaagcccgacaacgatgacctgtcgggacctttcgcttcgggctgtatgtctgcttttcgtttgtttcgcctgtcggttgctttgggaagtcggagtgcgtgctctcgtgtggggttgccgctgcctgtgttgtttgggcactgtgttggcggtgagtgtggtgccgtgttgatgccccaatccaaccggcgagttgagttgtatggtgtcggcgcattgatgtctcaatc

SEQ ID NO: 121270 - DNA, 1824 bp, Zea Mays
atacgctgcgagcctgccttgttttccattactctcagcctgctctctctctctctctcatggcgacgactgggtggccgtcgctaccaacggcacacccatgtattcttgggaccctgcgccggcgacgagcaccgcaagagcttgtgagggggcagggaagatgacatttcttgcttgaggatgggaaacttgcaacagctctattattaggattggatcctgagagatgaccgaggcggcgaggtttcatggtatgataggtggtggtggtggcaaggggatgcaagacaatgtgatcaatggcttcgacaacattccgtattaccaaaagtttggggagggctctcacatgtccgtagacagtgtcgatggcttcaacctgaccaattgtgctggtggttctgttgccatgtcagttgacagcagcagtgtgggctccaacgagtcccgcacggtcatactgaagcacccaggcctccgtgatgctccgactgcaagctattcagtcaacaatagtgtcttccgccccaaccgtgtagccgcacacactctaaatgaggatgcattggcccaggttttgatggacccaaatcatcctacagaggtactgagcagctatgagcagtggaccattgatctgggaaggttggacatggggggtccttttgctcaaggagcctttggaagctgtaccggggaatatataatggagaagatgttgccattaagctgctggagaagtctgagaatgatccagaaagagcccattcgatggagcagcaatttgtgcaagaggttatgatgctgtctaggctgagtcacccaaatattgtaaggttcataggggcatgcaggaaatcagtcgtgtggtgtattattactgagtatgcaaaaggtggctcagtttggcaattcctggcaagaaggcagaacaagtgcctttgcggttggctgtgaaacaggcgttggatgtagctcggggaatgacatatattcatgcattgggatttattcacagagatctgaagtcagataaccttctgatttcagcagacaagtccattaagattgctgactttggagttgctcgtatcgaagtgaaaactgaagggatgacaccagagacaggaacctaccggtggatggcaccggaaatgatctagcacaagccctatgatcataaagttgatgtctatagctttgggctttggcatcgtcttgtgggagctaggagctataaccggcatgcttcccttcaccaacatgacggccgttcaggcagcttttgctgttgtaaataagggtgcccgtccggtgatccctcaagactgcctaccttctctaagacacattatgactcgctgctgggatgcgaaccctgaagttcacccgccatttactgagattgtctgcatgcttgagagtgctgagatggagctcctgagcaacgtgcgcaaagcacgcttccgctgttgtatttctgagcccatgaccaccgactgaagtggaaggtgccaaggtggtggctagatgaccacaaaatgggtaagagaattgcgggggaaaaggataaagagcctatctcgatgtactcgcgtcaagtgtcagggtccctctgaagaccctgggatttgagcttgtgtgttgttgcattctatcttgtgtaagttgcacagctgagtaatctcttctgaaagtataggtgatgcttccttgtatgttgacaagatctaactctaatagagttttcctatgttaataacatctgcctgttcttgtaatcagcaagtttgcttgcaccattgccgttccttacccttt

SEQ ID NO: 121271 - DNA, 1614 bp, Zea Mays
atggcactggccgcctccgccgatcctgtgttccttgcttttttcgttttcttctttgcgcccttaccacctgggccaccgtctgcagattcaggctggttattaaggctgcaaggcacaggcgacaacatggcgggcgtgagtgctgcggctaggcgggtgcacccgggcagggtgcgggagaagctggtcggagctcagattactgcaggcaagcgattgccagatctggatttgtggagccaacacctatctgttaaaatttctggatttcacaaatcacaagagagttgtagagagttcgagctgagcagagatcccggtactgctggccagtggccacacaggagttctggagcaggcacagggacaacgagcggggtggtgtacatggagaagacggtggaggacgcggagggcacggcgtccgtggtgcgcgccatgagcgagaagttcgacctgctcatcatgggtcgttgtccctgtgccttggagtcggagcctcggaggagggagagggcgaagagtagggggaaccaaatcttgaagggctcggaaatgcccctgaacagattcacagggggtcctagattaggattatttcctatgactttccaagagtcaggagcacgattccttgatatcattgagttctggcgagactttatttcgctgatgaacatagcatctgaatccttagagatggcttcagctggtgtagccccatctgggtacaaaaacagcagcagcaatcctgtccgcggagttcgcgtccaaggaccgcatatttcacgcgctcgccgtgctctacggcatcgtctcggccgtcgcgccgataatgcagtaaatgattataggggtttaaagaagtttactaaagaatgttgcccactaaagctctttgctaaacacttgaaagtggagcgacagcgccactactcggagttcgacgcggcgggcgtcgtccgccagatcgcgcgcgggctgcaggcgctccacggcgcgggcgtcgtgcaccgggacctcaagcccgagaactgcctcttcgccgacaggggcgaggcctccacgctcaagatcatggatttcggcctcagctccgtcgagggcttcagcgaccccgtcgtcacccctgttcggctcgatcgactacgtctcgccggaggccctctcgaggcaggatgtctcggctgccagcgacatgtggtctgttggggtgattctgtatatcttgttgtccggtcggtgtcgacgcaccgcacagatggagtctctgtgggcggtgatcgattgaagcttggccaattccgcactggagcgcttcatcagcgcgtggccgtctctcatcgcaaacagaaaactacactgcgtggaggccgcggcatggcactggccgcctccgccgatcctgtgttccttgcttttttcgttttcttctttgcgcccttaccgcctgggccaccgtctgcagattcaggctggttattaaggctgcaaggcacaggcgacaacatggcgggcgtgagtgctgcggctaggcgggtgcacccgggcagggtgcgggagaagctggtcggagctcaggttaaagagctttcggacatgatatgctaa

SEQ ID NO: 121272 - DNA, 77 bp, Zea Mays
tttctatttttatttcatttttctatattattgtgaattactaaaccttggtgatagaccagagcaacttattgtga

SEQ ID NO: 121273 - DNA, 1841 bp, Zea Mays
acaatcccattgactaattcaactcctccctcgccttggtcatctccgccggctcgaggggggtttgtcacgactcacgagtcacaacacgatcaccagtcaccaccacggccaccctcctcttgtatagtcaaaccggccctctcctccttcttgtaaccttgggcaagaggagcagaaaggtcccagctttccgtgttcttctgcttctttccccgcctcgccttccttccccccgtcaccagatctcgaggcagcggagtccggggacgccgttctttccgttgtgcttcctttgcctcttgctgccggtggccggtgattttcccgaggtctgtttgggcggcaggtagaggctattttcttggcggctggtgggatggatagccacgccgccgggtcgagctccggcgggtccggggatggcggcgcgcagcccaggaggagctccaggaaacccacgtattccaagtttactcagcaggagcttccagcttgcaagccgattcttactccaaaatgggttatttcagtattcgttcttgttggcgtgatttttgtctcgattggtattgtttcgctgcgagcttcacgacaggttgtcgagatcgttgatcggtatgatgatgcatgtgtccctgctggtgtgactgacaagcttgcttacatccggaatgatagtataccaaaaagctgcacaaggaatctgacgattacaaaggatatgaagcagccgatttttgtgtattatcagctggatgacttttaccagaatcataggaggtatgtcaagagccgtaatgatgcacagctaagagataaaagtaaggcgagtgactttaccaattgtgatcctgaggccaaaacggtagacggaaaaccaattgtgccttgtggtcttattgcatggagcctgttcaatgatacatataaactcattcacaacaatgtaaccttgagagtggagaagaaggacatctcttggaagagtgacagagaccacaaattcgggagtgatgtcttcccaacgaactttcagaaaggacctcttaaaggtggaaaaacacttgatccaagtattccgttgagtaagcaagaggacctcattgtttggatgcggactgcagcacttccgacattcagaaagctgtatggaaggatatatgttgatctcaaggaaaacgacacaatcacagtccagttggacaacaactacaacacctatagctttggtggcaagaagaagctggtgctttcgaccgcaacctggctcgggggaaagaacgattttctgggccttgcgtacctcaccgtcggcggactctgcttcttcctggcattcgcgttcaccttgctatacttgataaagccaaggaaaatgggagataacagctacctgtcatggaacagacccccttcaggtcgctgatgatgtgctttggaagttaaacgcgatacacaggcagcaccaaacaaattcagattatggtcggaatgtatcttgtaccacagagaaattttatccgtgctcgtcggtgtagaatatatacggcacccttgcacatattgtacattacatcgaaacacatagcttttgttttctacaaaattgtatactcaaaagtctcagaagtggacgccagtagttccatgctttgtttttttgttccccttaataaaacagctaaacctaacctgcatgactgagctatgagatgaacatgagctcttcgtaagtgatcagttctcgaaggctaggcatttgcagaaatttggacttttggattccaaacagtgcgtttcgtgtttttgccattcgtaacacagacttcaaagaaata

SEQ ID NO: 121274 - DNA, 119 bp, Zea Mays
gcccaatatgcatcatactctttgacccaacctgctgcatcacatgcttcgtttttaaaacttcgaaaggcaataacgaaagacccgaaaggtaccggactaccggggcttcttttcac

SEQ ID NO: 121275 - DNA, 3462 bp, Zea Mays
attcaaacaacccctcggcacccgtctccggtctcccttccgtcattgcgcgtcccaccttccgtccccacaatttccgctcccctcacgagcatttcccccgcctacccgtcgccgacggccatggcccacctccagctcacggcgctcgccggcggcgccgacgacgagatggaggaggtcgcgctgctgggatcctacgacgaggaggccggggtggggccggaggcggagggggaccgggcggaggccggcatgcggcgggtgcaggtgcgcgtaaccggcatgacgtgctccgcgtgcacgggagccgtggaggccgcgctctccgcccgccgcggcgtgcgccgcgccgccgtgtcgctgctccagaaccgcgcccacgtcgttttcgaccccgcgctcgccaaggaagacgacattgtagaagcaatagaagatgctggcttcgaagcagaaattcttcctgactctactgtttctcagccaaaaccgcataagactttgtcaggacaatttaggataggggggatgacttgtgctgcatgtgtgaactcggttgaggggatcttaaaaaaattgccaggtgtaaaaggtgcagttgttgcattagcgacctcattgggtgaagttgaatatgatccttctgccattagcaaagatgaaattgttcaggccatcgaggatgctggttttgacgctgcactgttgcaaagtagtgaccaagacaaggtcctattaaatgtccaggggttacatttcgaggaagatgtagatgtattgcatgatatcctgaagaaaatggaaggcttgcgtcagttcggtgtaaattttgcaaactcagaagttgacattgtatttgaccctgaagtagttggtttgagacagattgtagatactatcgagacggagagcaacaataggctgaaagctcatgtacaggatccatatatacgagctgcatcaaatgatgcacaagaggcctctaagacgcttcatcttcttcgttttagtttattcctaagtattcctgtatttttcatccgcatggtatgccctcgcatacctctgattagttcattcctacttatgcactttgggccatttcgtataggagatctgctgaggtggattctggtgaccatggtacagtttattgttggcaaacgattctatgttgcagcgtatagggccctaagacatggctctacaaatatggatgtcttagttgttattggcactactgcttcatatgtctactctgtttgtgcactactttatggggcattcactggatttcatcctccaatatattttgagacgagcgcaatgataattacatttgtgctatttgggaagtatcttgaggtgctcgcgaaaggaaagacatcagatgctatcaagaagcttgtagagcttgctcctgctacagctattctacttctgaaggacaaagagggaaaatattcaggagagaaggagattgatgcgtcgttagtacaacctggtgatgtgttaaaagtgcttcctggttcaaaggttcctgctgatggtatcgtcatttggggtacaagtcatgtcaatgagagtatggtaactggtgaatctgtaccaatctccaaggaagtatccagtctagtcattggaggcacaatgaacttgcatggtgttcttcatatacaagcgacgaaagtaggatctggaacagttttgagccagataatttctctcgtggaaaccgcccagatgtctaaggcccctattcagaagtttgctgattatgtagccagcatttttgttcctattgtcatcaccctgtccttcttgacattccttgcatggtttctatgtggatggttgggagcatatccaaactcatggtctgctgaaagtagcaattgctttgttttctccctaatgttctccatatctgttgttgtgattgcttgtccatgtgctcttggtctggcaacaccaactgctgttatggtagcaactggagtcggggctagtcatggagtacttgtaaagggcggagatgccctggagagagctcagaatgtgaagtatgttatttttgacaagaccggaacactgacccaaggaaaggctactgtaactgcaacaaagattttttcaggaatggatctgggtgactttctcacgttggtagcgtctgcagaggcaagcagtgagcatccactggcaaaagctatcttggattatgcattccatttccatttcttcggcaatcttccctcaggaaaagacagcatcaagagaagaaaagaagagatactttctcagtggcttctggaagtcgtggactttgctgccttgcctggcaaagggattcaatgttggatcaatgggaagaaagttttggtagggaatcgtgctttgataactgaaaatggggtaaacattcctgaagaagctgaacgtttcctggtagacatggagctgaatgcaaagactggtattctcgtagcgtatgatggtgacttcattggcttagttgggataaccgatcctttgaaaagggaggctgctgtggtcatacaaggtctaaaaaagatgggtgttcatccagttatggtcactggggataactggaggactgcacgagcagttgcaaaggaggttggcatcgatgatgtcagagccgaggttatgccggctggaaaagccgatgtaatccactccctgcaaaaggatggcagtgttgtcgcgatggtcggagatggcatcaacgactcgcccgcccttgctgccgccgatgtcggcatggccatcggcgcaggcactgacatcgctatcgaggcggctgactatgtgctcgtccggaacaacctggaggatgtgatcacggctattgacctctcacggaagacgttcatccggatccggtggaactacttctttgccatggcctacaacgtgatcgccatccccgtagctgctggcgcgttgtttcccttcaccggggtccagatgccgccttggttagccggcgcgtgcatggcgttctcgtccgtcagcgtggtgtcgtcgtcgctgctgctgaggaggtataggaaacccagactcaccaccgtgcttcagataacagtggaataagttccttttttttttggcaatttgttgtatctcactttatcggagagaaatagatacaaacgtgaatgttggtgtggacgtgcggtgcagtactgagagtcaaacacagaaacacttgtacatatcgaacagtttgcaattgcaaccgagttatacatgttaactatgtgagggatcaagagacatgcgacaagacaattctagttttctcctagtgttagtttggtttggaggataatatgatggatctgcccctagagtagaatattccctgtcacatgtcattcctcgccatctcttttaggcattatcggtgaggccgtcttcttctccacgcgctgc

SEQ ID NO: 121276 - DNA, 486 bp, Zea Mays
gatccatcccagtgcagatcagcatccaacaaatccctcacgagcgtctcgatcgagcaagcagctgaagccatatggctcgccaggccacagccctcttcgcatctgcgctgctgctgctggcagtagccttcatgtctcatgattctggtgtggaagcgtggtgcctggagtacccttcgccggaccccaactgctgccacggaagcgacggccttcgttactgccgcgacttgtgcgtgggggtcggcaatggcttcgtcggcggggagtgcaataagggcacctgctactgcctcaagtgcgccgacgagccaccaccggcgtcgcgtgctctgtagggctcatatagagtctgcagcggatgcatgcatcatgcgtagcccagatgcgccggcgccgtgcatgcattaggattgttttcgtataagaaatatgaagtttcaattcgtaaaccatacggcgtgtgaaaaaaaaatatgcgta

SEQ ID NO: 121277 - DNA, 267 bp, Zea Mays
atggctcgccaggccacagccctcgtcgcatctgccctgctgctgctggcagtagccttcatgtctcatgatgctggtgtggaagcgtggtgcctggagtaccctgcgccggaccccaacgcctgccacggaagcaacggccttcgttactgccgcaacgagtgcgtggcggtcggcaatggcttcgtcggcggggagtgcaataagggcacctgctactgcctcaagtgcgccgacgagccactaccggcgccgcgtgctctgtag

SEQ ID NO: 121278 - DNA, 456 bp, Zea Mays
gctccaaggcagctaggagccgttgagagcattccaggaaggcaatctcattctaccgagcgctccattctaccaccagccacctccactcgttctcccacacagaaaaccctagccgccgccaccgaagcggcctcccaggtaagcaggagcgcccatcccgccgctgccatgaagcgcaatccccgcatcacgagctcccgccggaagtgcagcaaggcgcacttcacggccccgtcctccgtccgctgcgttctcatgtccgacgggctgtcgacggagctccatcccgatccacaaggacgacgaggtgcaggtcgtgcgcggcacctacaagggccgtgaggggaaggtggtgcaggtgtaccaccgccgctgggtcatccacgtcgagcggatcacacgcgagaaggtgaacagctctgtgcctggatgagcgatcatccaagagataga

SEQ ID NO: 121279 - DNA, 1349 bp, Zea Mays
ggcccatactcctgctaggtttggggtggtccatagtcgcgcgacagcaggagtagcagtcttcttcggccgtccgctggcagccgagcaggcccaagtggtgcgtcctgttcacccacgacgcctgcgtcggccctgcccgaactggcgtgcagagcagtgctccacgacgccgccaccacctgccccagcagcggcacgctccgacaacgtcgaccatggcggtgcgggcgcgggggctggggagtctgttccctgctagatccagtagatggccgactcatcgaggccctccgtgaacatcatctgcgccggtcgtctgctcggctgcagtggattaggtgagcggggttccggtagaggattgtttagtttgggattctaggttcctcgctcccgtgccggagacgacgctagacgatgaggtcagtgccgcggcggcgcggcgcgtcgcagagatgaaggcgcggaagcggtccgagcggcgcacctacctggtggccgccgtgatgtccaggctcggggtcacgtccatggccgtcgccgccgtgtactatcgcttcagctggcaaatggagggcggcgcggtcccggtgagcgagatgttcggcacgtttgcgctctccgtcggcgcggcggtacgcggcggtccttggcagtcgggatggagttctgggcgcggtgggcgcaccgggcgctatggcacgcctccctgtggcacatgcacgagtcgcaccaccggtcgtgcgagggcccattcgagctcaacgacgtgttcgccatcgtcaacgccgtgccggccatctccctcctcggtgacgtcgcgagcagatacaccatatggacaattttgagggcgtcccgtatgggctcttcctgggaccaaaggagctggaggaggtcggtggcctggacgagctggaaaaggagctcgcgcgaatcggccagaccatctgatggatttgtccggattccggcgcggcgatctccgctccgctccgtgattccggcgcagcctcatggttggggagccgacgaccagaacctccagaagggatttggtttggatgcgcgagcgtagatcttgacctgcatttcggatggtctgtggaggcatagctcgtacctggagatgtctggtgccatggaattacttttcttttcttcttttcctgacattttcatgccggcgtctttatttgtggagacgtcgcacgttctggcccctgtattactgttcttatggctaggattctgtatataacttgtagagacatgttatgaaccaccagctcaatgaagctaaaaattcggtggttggaaacagcgctgaaaaaacagaaggtcct

SEQ ID NO: 121280 - DNA, 1621 bp, Zea Mays
ggcccatactcctgctaggtttggggtggtccatagtcgcgcgacagcaggagtagcagtcttcttcggccgtccgctggcagccgagcaggcccaagtggtgcgtcctgttcacccacgacgcctgcgtcggccctgcccgaactggcgtgcagagcagtgctccacgacgccgccaccacctgccccagcagcggcacgctccgacaacgtcgaccatggcggtgcgggcgcgggggctggggagtctgttccctgctagatccagtagatggccgactcatcgaggccctccgtgaacatcatctgcgccggtcgtctgctcggctgcagtggattaggtgagcggggttccggtagaggattgtttagtttgggattctaggttcctcgctcccgtgccggagacgacgctagacgatgaggtcagtgccgcggcggcgcggcgcgtcgcagagatgaaggcgcggaagcggtccgagcggcgcacctacctggtggccgccgtgatgtccaggctcggggtcacgtccatggccgtcgccgccgtgtactatcgcttcagctggcaaatggagggcggcgcggtcccggtgagcgagatgttcggcacgtttgcgctctccgtcggcgcggcggtcgggatggagttctgggcgcggtgggcgcaccgggcgctatggcacgcctccctgtggcacatgcacgagtcgcaccaccggtcgtgcgagggcccattcgagctcaacgacgtgttcgccatcgtcaacgccgtgccggccatctccctcctcggtgacgtcgcgagcagatacaccatatggacaattttgagggcgtcccgtatgggctcttcctgggaccaaaggagctggaggaggtcggtggcctggacgagctggaaaaggagctcgcgcgaatcggccagaccatctgatggatttgtccggattccggcgcggcgatctccgctccgctccgtgattccggcgcagcctcatggttggggagccgacgaccagaacctccagaagggatttggtttggatgcgcgagcgtagatcttgacctgcatttcggatggtctgtggaggcatagctcgtacctggagatgtctggtgccatggaattacttttcttttcttcttttcctgacattttcatgccggcgtctttatttgtggagacgtcgcacgttctggcccctgtattactgttcttatggctaggattctgtatataacttgtagagacatgttatgaaccaccagctcaatgaagctaaaaattcggtggttggaaacagcgctgaaaaaacagaaggtcctcctttcacattcagaggcgctagcgcaacgagggcacgacgaccaacgttacacaatagttccattagccagccttaacttaaagttgtagccacgtagagggagaagaaggcgatgcaacagtctttaaaaaaacaacgatgatgcaaacagtctctcggtgcaagtagtagaagaggctatcttattttaacccaaatgcatgtaatttgctaatttctccttttatcttgttgtttttttgctcgttactggatcagctatatggatgaataaaatattttctttcaat

SEQ ID NO: 121281 - DNA, 1947 bp, Zea Mays
ctacttccaattcagcgagcgattcaccaccccaccaccaaaccgtctccgtcgcgcctcccgaatccccgtcgaatccgagctcccggaggcacccgaggcgcgggctccccaaccgcctcccgaccccgcgggcctgcgctgcgcaccgcgacgaaaacaaagaactactgatcaatataaaatggctgtaagcttcaaatactgggacgattgcttggatccagaggatatgagattgatgtggcaggatcctgttgtaagtaaagagtggaatgatgctggggaagagcaaggacagaaagttcacctgtcacgggaccctgatggtgaagcatatctcacacaaactgaaatgatggcagtggcggcaattaccgtccatagacatttcaaatcgcagctagacccgtatatgataggagcacttgctgaaattgcaagtggaaggagactctttgtagatacctatgatcgcaagactaaagaaaccaaggttggcatactgcaggtggcacctgaagttgctcaatggcttggaagggaactaggttacaagagttatgacattgaagataatactaatttgctgtactggcctcttgtgaatgtctattttggtgctgcttatgcaaaatggctcttctcttgtgatgacagacaaagaactgaagaatttgttgttagagcatataaaggcggcaaaaagaaggctgctcacaaatcaacttcccccatcttccagcgttatctttatgtgaaagagaacctgttgtctataagacaaccagaaatttgccatgacctcgctcctgaccaagaaaaactgtcaagcacagaatcacagttgatatattgggattccaaggtatcagaggctgatatggatgcaatgtggaaacatcctgatgtgtataaggagtggataaaatctggtgagagacgtggaaatgtacgattctcccatgatgcaaagaacaggccttacctttctcgcgttgaggtgaaggctgttgccgaaataatcatatcacgccatttgagcacaagaggagtaaaaccagaagctctcgcagcacttgcagaggtttgcagtatgcgctttgttcatggagtaagtacccggactggattgatgggaatagactaccctactgctgtatggctttccagggattgtggctacagggcatatacactgatctctgtggatgatctctacaatccttttgcatcaatgtactttggtgcatcgtacttggcatggttgtctcagtacgaaggaagggagcaaagctacgaattcattgtccaggcttaccttgggggaccagagaatgttagtcttcaggagactggaccgttttggaaccaattcctggagtcattaacacagtatcaagatccaaagaaggacaataataatagctgctgtatcttgtgaagttatctgatacctcttccaactttggttactgaagtttctgctgaggatcatttatgaatgctcatcgacattcttgccaaatttcaaatcccctcccgaagggttcgggtactggcaaacaattttgcttgctagacaacacgaggtacaggataacaggggctgtcagttcgttcatacattttggtcgctggcgccttgctcatgtttaaacaattattgatcccatctcggttcatacagctgcccacacccccacccccggttccatatgttttttgttctacttttaccatcagaaagttaacgcccttcctgttctttccgctcattggtgtatggcatactgtacctctgttgtataataataggaactttagaagaaaatggcctttgtaaaattatcgacgctccatagtacatgtgctaccgttatagatgtaccaactgatactctgatagcagaaccgtaaaaatgtcgtcgcagactcgcagctgtg

SEQ ID NO: 121282 - DNA, 1939 bp, Zea Mays
ctacttccaattcagcgagcgattcaccaccccaccaccaaaccgtctccgtcgcgcctcccgaatccccgtcgaatccgagctcccggaggcacccgaggcgcgggctccccaaccgcctcccgaccccgcgggcctgcgctgcgcaccgcgacgaaaacaaagaactactgatcaatataaaatggctgtaagcttcaaatactgggacgattgcttggatccagaggatatgagattgatgtggcaggatcctgttgtaagtaaagagtggaatgatgctggggaagagcaaggacagaaagttcacctgtcacgggaccctgatggtgaagcatatctcacacaaactgaaatgatggcagtggcggcaattaccgtccatagacatttcaaatcgcagctagacccgtatatgataggagcacttgctgaaattgcaagtggaaggagactctttgtagatacctatgatcgcaagactaaagaaaccaaggttggcatactgcaggtggcacctgaagttgctcaatggcttggaaggttacaagagttatgacattgaagataatactaatttgctgtactggcctcttgtgaatgtctattttggtgctgcttatgcaaaatggctcttctcttgtgatgacagacaaagaactgaagaatttgttgttagagcatataaaggcggcaaaaagaaggctgctcacaaatcaacttcccccatcttccagcgttatctttatgtgaaagagaacctgttgtctataagacaaccagaaatttgccatgacctcgctcctgaccaagaaaaactgtcaagcacagaatcacagttgatatattgggattccaaggtatcagaggctgatatggatgcaatgtggaaacatcctgatgtgtataaggagtggataaaatctggtgagagacgtggaaatgtacgattctcccatgatgcaaagaacaggccttacctttctcgcgttgaggtgaaggctgttgccgaaataatcatatcacgccatttgagcacaagaggagtaaaaccagaagctctcgcagcacttgcagaggtttgcagtatgcgctttgttcatggagtaagtacccggactggattgatgggaatagactaccctactgctgtatggctttccagggattgtggctacagggcatatacactgatctctgtggatgatctctacaatccttttgcatcaatgtactttggtgcatcgtacttggcatggttgtctcagtacgaaggaagggagcaaagctacgaattcattgtccaggcttaccttgggggaccagagaatgttagtcttcaggagactggaccgttttggaaccaattcctggagtcattaacacagtatcaagatccaaagaaggacaataataatagctgctgtatcttgtgaagttatctgatacctcttccaactttggttactgaagtttctgctgaggatcatttatgaatgctcatcgacattcttgccaaatttcaaatcccctcccgaagggttcgggtactggcaaacaattttgcttgctagacaacacgaggtacaggataacaggggctgtcagttcgttcatacattttggtcgctggcgccttgctcatgtttaaacaattattgatcccatctcggttcatacagctgcccacacccccacccccggttccatatgttttttgttctacttttaccatcagaaagttaacgcccttcctgttctttccgctcattggtgtatggcatactgtacctctgttgtataataataggaactttagaagaaaatggcctttgtaaaattatcgacgctccatagtacatgtgctaccgttatagatgtaccaactgatactctgatagcagaaccgtaaaaatgtcgtcgcagactcgcagctgtg

SEQ ID NO: 121283 - DNA, 657 bp, Zea Mays
atggatacagaactaacagggtcgtggtcgtatggaagggaaggtgtaaatcagggccctcacaggaaaggcacatgctatgggcaaaggcaccgcggagcacagcggcgtatgacgagatccacagaagaggcacatgctgtgataagcaaggatgaacggagaactggcttgaatttccaggttacaaggccatccagtttccaggatttctacatatatgcatttcgttattgcctcacagaggataagaagaaatgtatagaaataccagctgcttgtgagttgctgaatctagtattaggcttacagttccgccctcaggttgacaagcttaataattacctcatggcatggctatccttagtgacctctgaattgacaatgattgcaggcatggcagtggggttcaaccttgtgtttgaacacgacaatcttatcacagccatatgttttgcaagtgttgttgttaatctactaccatacacactctcccgactggtaaagtgttcagatggcatgtacaagcacttagctttgccaaaccatgttgaaagtgatccaacaacaacaaacctcagggtgttgaatgtaatgaaaagtgatgtctgggaaattgtggctggccatggggtgctgaatgttgttggcaaataa

SEQ ID NO: 121284 - DNA, 2210 bp, Zea Mays
ggtccttgcggtacggcttcggatacaagcgtgatggtgagaagcaacccggaatgctgatccaaaccgggggaccggcttctcggattcggcccattagttacgtccgttttaatctgtcgaggaggcccacaaagcccagaccaggcaggatcttcccgttcgcttccccatttcgccctccccctccattcaaatcccgctgcttccgccaccggctaccctcgcggcctcgcccgtggccacctcctttcctctttccatttccgttcctccgctcccgatccctaaaccctacctaccccaaacccgcggcggcggcggcgcgactgttgggtttccttggtcatgggctgcttcctctcctgcttccggggcggctccaacccgtcgggcgatctccgcgacccgctcgtgagggagagccgcatcggggacgcctttgtcaacgacgagaagaagcttgatgaagcgactggaaagctggatgtcgaggcggctactgaccacggagtcgacgacgagcttcggagagaggcaaattatctcaaatcatgtggcacaatatcacagaccccaccggaaattctagattcaatcccaatcaactcagaagatgctaacgagtgcggcgatacaccgaccaacgtgcagcagacgaaacatgtagtggtagttgaagagaactcatctgaactgctcaactccgatgatcacgatgtactacataagcaggacactgatgaagggaggactctcaggacgggatcagagactcaaccatccttagaagaagttaagccttcgtgccaccagaacgtggtgagagaccaaagcaccgactccagtgactcgccctatccaacccctctggtgctcaggggtgacatccagactcctggcaccgtatacgccgccgctcacaaggaggcttggaagcctgggaagcgcgcgagggcgttcatctaccctgtcctgcgccccatcgagaacaagatgcagtggatggaactgaaagccgccgagtctcctactgtgctatcacccaaccctccaaaaagaaggaacctgagcgcagcaggttccggcgacaaggctcaccagccgcctacacgttcagcgttcgccggatcttcagagcacggatccttcccaaatacttacagccgtgcagcgcaggacggagtgatgtcgcccgatgaacccaagtgccagaacggcttggaacagcaggacggacgcgaagagctatcgacgcgaagttctggacgcgggaagcgtggtgtcgcaagcctgtctcattggctgaagccatcgtcatcgtccgcggatgacggcagccccgacgacggcagcagcaattttgttggaacggaggaggagaagacacggtgtggggcgaacgtctctgatgtgcccttctttcctgcgttcgggttggactgggagggggagaccgacaagcctactcctgtgctgcccaaggcgtgggacggcaacggcatcccgaacaccacaaccaaatacaaggaggaccagaaggtaagctggcacgcgacgccgttcgaggagaggctgctgaaggttctgtctgacgagaagcctcggcatgaaaggtttgtttttttttctttctgttacgaccctgcgtgtccgtgcaggtgcagagagctgtctagggtgttcggtgttccggtttggagttctgctggttactggagcagctagatgtgttcgtacgaaatggaatcacgtaggtgtgctgatgcctgtatgtaattgtatggtggtccatcttgccaggaggatcagcgggaagcttatccacctcgacgaaaacgccgagtagaggggccttttgcgccgtcctctgcatcaagaaccgtctaaagaatggtccaggtggtggtggccgccagcccaccatatgaactccgtttttcagccgcatgtcacctgtagatagagtttctttcgctgagttatgctctgcactctgcagtgctgcgtggaatgttacaagcatatgtgatgacgtgtcaataaaaggacaaacatgccagtctcatagtctggtttcatgagaaacatgaacatcctcatatattaaaaaaaacctgtgcggtggttttcgtggcctcgtcggtctttttatgtattgagaccgttctctctgaaccgctaaacataacatcagttccttgtgtgcc

SEQ ID NO: 121285 - DNA, 2023 bp, Zea Mays
ggtccttgcggtacggcttcggatacaagcgtgatggtgagaagcaacccggaatgctgatccaaaccgggggaccggcttctcggattcggcccattagttacgtccgttttaatctgtcgaggaggcccacaaagcccagaccaggcaggatcttcccgttcgcttccccatttcgccctccccctccattcaaatcccgctgcttccgccaccggctaccctcgcggcctcgcccgtggccacctcctttcctctttccatttccgttcctccgctcccgatccctaaaccctacctaccccaaacccgcggcggcggcggcgcgactgttgggtttccttggtcatgggctgcttcctctcctgcttccggggcggctccaacccgtcgggcgatctccgcgacccgctcgtgagggagagccgcatcggggacgcctttgtcaacgacgagaagaagcttgatgaagcgactggaaagctggatgtcgaggcggctactgaccacggagtcgacgacgagcttcggagagaggcaaattatctcaaatcatgtggcacaatatcacagaccccaccggaaattctagattcaatcccaatcaactcagaagatgctaacgagtgcggcgatacaccgaccaacgtgcagcagacgaaacatgtagtggtagttgaagagaactcatctgaactgctcaactccgatgatcacgatgtactacataagcaggacactgatgaagggaggactctcaggacgggatcagagactcaaccatccttagaagaagttaagccttcgtgccaccagaacgtggtgagagaccaaagcaccgactccagtgactcgccctatccaacccctctggtgctcaggggtgacatccagactcctggcaccgtatacgccgccgctcacaaggaggcttggaagcctgggaagcgcgcgagggcgttcatctaccctgtcctgcgccccatcgagaacaagatgcagtggatggaactgaaagccgccgagtctcctactgtgctatcacccaaccctccaaaaagaaggaacctgagcgcagcaggttccggcgacaaggctcaccagccgcctacacgttcagcgttcgccggatcttcagagcacggatccttcccaaatacttacagccgtgcagcgcaggacggagtgatgtcgcccgatgaacccaagtgccagaacggcttggaacagcaggacggacgcgaagagctatcgacgcgaagttctggacgcgggaagcgtggtgtcgcaagcctgtctcattggctgaagccatcgtcatcgtccgcggatgacggcagccccgacgacggcagcagcaattttgttggaacggaggaggagaagacacggtgtggggcgaacgtctctgatgtgcccttctttcctgcgttcgggttggactgggagggggagaccgacaagcctactcctgtgctgcccaaggcgtgggacggcaacggcatcccgaacaccacaaccaaatacaaggaggaccagaaggtaagctggcacgcgacgccgttcgaggagaggctgctgaaggttctgtctgacgagaagcctcggcatgaaaggaggatcagcgggaagcttatccacctcgacgaaaacgccgagtagaggggccttttgcgccgtcctctgcatcaagaaccgtctaaagaatggtccaggtggtggtggccgccagcccaccatatgaactccgtttttcagccgcatgtcacctgtagatagagtttctttcgctgagttatgctctgcactctgcagtgctgcgtggaatgttacaagcatatgtgatgacgtgtcaataaaaggacaaacatgccagtctcatagtctggtttcatgagaaacatgaacatcctcatatattaaaaaaaacctgtgcggtggttttcgtggcctcgtcggtctttttatgtattgagaccgttctctctgaaccgctaaacataacatcagttccttgtgtgcc

SEQ ID NO: 121286 - DNA, 2017 bp, Zea Mays
ggtccttgcggtacggcttcggatacaagcgtgatggtgagaagcaacccggaatgctgatccaaaccgggggaccggcttctcggattcggcccattagttacgtccgttttaatctgtcgaggaggcccacaaagcccagaccaggcaggatcttcccgttcgcttccccatttcgccctccccctccattcaaatcccgctgcttccgccaccggctaccctcgcggcctcgcccgtggccacctcctttcctctttccatttccgttcctccgctcccgatccctaaaccctacctaccccaaacccgcggcggcggcggcgcgactgttgggtttccttggtcatgggctgcttcctctcctgcttccggggcggctccaacccgtcgggcgatctccgcgacccgctcgtgagggagagccgcatcggggacgcctttgtcaacgacgagaagaagcttgatgaagcgactggaaagctggatgtcgaggcggctactgaccacggagtcgacgacgagcttcggagagaggcaaattatctcaaatcatgtggcacaatatcacagaccccaccggaaattctagattcaatcccaatcaactcagaagatgctaacgagtgcggcgatacaccgaccaacgtgcagcagacgaaacatgtagtggtagttgaagagaactcatctgaactgctcaactccgatgatcacgatgtactacataagcaggacactgatgaagggaggactctcaggacgggatcagagactcaaccatccttagaagaagttaagccttcgtgccaccagaacgtggtgagagaccaaagcaccgactccagtgactcgccctatccaacccctctggtgctcaggggtgacatccagactcctggcaccgtatacgccgccgctcacaaggaggcttggaagcctgggaagcgcgcgagggcgttcatctaccctgtcctgcgccccatcgagaacaagatgcagtggatggaactgaaagccgccgagtctcctactgtgctatcacccaaccctccaaaaagaaggaacctgagcgcagcaggttccggcgacaaggctcaccagccgcctacacgttcagcgttcgccggatcttcagagcacggatccttcccaaatacttacagccgtgcagcgcaggacggagtgatgtcgcccgatgaacccaagtgccagaacggcttggaacagcaggacggacgcgaagagctatcgacgcgaagttctggacgcgggaagcgtggtgtcgcaagcctgtctcattggctgaagccatcgtcatcgtccgcggatgacggcagccccgacgacggcagcagcaattttgttggaacggaggaggagaagacacggtgtggggcgaacgtctctgatgtgcccttctttcctgcgttcgggttggactgggagggggagaccgacaagcctactcctgtgctgcccaaggcgtgggacggcaacggcatcccgaacaccacaaccaaatacaaggagaaggtaagctggcacgcgacgccgttcgaggagaggctgctgaaggttctgtctgacgagaagcctcggcatgaaaggaggatcagcgggaagcttatccacctcgacgaaaacgccgagtagaggggccttttgcgccgtcctctgcatcaagaaccgtctaaagaatggtccaggtggtggtggccgccagcccaccatatgaactccgtttttcagccgcatgtcacctgtagatagagtttctttcgctgagttatgctctgcactctgcagtgctgcgtggaatgttacaagcatatgtgatgacgtgtcaataaaaggacaaacatgccagtctcatagtctggtttcatgagaaacatgaacatcctcatatattaaaaaaaacctgtgcggtggttttcgtggcctcgtcggtctttttatgtattgagaccgttctctctgaaccgctaaacataacatcagttccttgtgtgcc

SEQ ID NO: 121287 - DNA, 968 bp, Zea Mays
gtgaattgcagagaacaaccaccaatggtcacgactgccgtcgcggcggtcgccggcgccgtgccgccagctcggaaagcccaagcggtaactgtggccacaaccacagcactacctcccaccctcactagaaggcagctcctcgccgcggtcgccaccgcctccaccctccccacggccgccgcctcagctgcggcccccaggttcgccgagattccgggctccggcggcgtgaaggccctggacctccgggaaggttcgggagagatcccggccgttggcgaccaggttgcggttcattattatgggagattagcagcgaagcaaggatggcgcttcgattcgacgtatgatcacaaggacgagaccggcgatcccatgccgtttgtcttcacccttggatccggcaaggttatacctggcatggaagcagcagtgaagtccatgagagtcggcggtcttcgccgagtgatcattccaccatcgcagggataccaaaacacgtcacaagaaccggttcctcctaatttctttgatcggcagaggctgttcaccactatattcaacccgacgcgcctcgcaaatggcgagggttccactctcggcacacttatcttcgacatcgagctaatcaacattaggcaacgtccataactgttctgctccatactcttgtgtctaaaaagttgttccgtgcaagaatctggttatgctttaagtaactgtcagcgctccttcggtcaatccccaattacatattgtaatgcatactgatcgctgacagacgatatatgaagaaaaatcaattgaatgcggatttgattccgttgttctacccctgaaatgtaactccttttatgcttaaaagtcgttgtgtactctatgccgctggaaaagcagccttggctttcacaccagcaaaaggttggattaagtgacagcatcctgtaatctatgtaactatgttt

SEQ ID NO: 121288 - DNA, 1394 bp, Zea Mays
gtgaattgcagagaacaaccaccaatggtcacgactgccgtcgcggcggtcgccggcgccgtgccgccagctcggaaagcccaagcggtaactgtggccacaaccacagcactacctcccaccctcactagaaggcagctcctcgccgcggtcgccaccgcctccaccctccccacggccgccgcctcagctgcggcccccaggttcgccgagattccgggctccggcggcgtgaaggccctggacctccgggaaggttcgggagagatcccggccgttggcgaccaggttgcggttcattattatgggagattagcagcgaagcaaggatggcgcttcgattcgacgtatgatcacaaggacgagaccggcgatcccatgccgtttgtcttcacccttggatccggcaaggtgagatacagatcccactgactcgtgcagaagaactgaactgtacatctatcatctatggtactcgtactgctgcggttctggataaagatcctaactgaactttgtgttcatccactctcaagtcccgttggtaaaagtttggtaccacagcgtagcattggtgtccctatgttcttcaaacatgcctgagaatcctagttggttttcgatacatggagctcagttgttctgaatgcagctgctatgcattgtgggagtataaaccgcctgttctgaattccttatgcatttcgaggttcctgaatactactattgattgtcttagcacccagcaaaagcaaattttatgggacgctagtttgtgggatcattacgaggctgatactcaggcggtcaagacatagcatgatacggatctttcaggttatacctggcatggaagcagcagtgaagtccatgagagtcggcggtcttcgccgagtgatcattccaccatcgcagggataccaaaacacgtcacaagaaccggttcctcctaatttctttgatcggcagaggctgttcaccactatattcaacccgacgcgcctcgcaaatggcgagggttccactctcggcacacttatcttcgacatcgagctaatcaacattaggcaacgtccataactgttctgctccatactcttgtgtctaaaaagttgttccgtgcaagaatctggttatgctttaagtaactgtcagcgctccttcggtcaatccccaattacatattgtaatgcatactgatcgctgacagacgatatatgaagaaaaatcaattgaatgcggatttgattccgttgttctacccctgaaatgtaactccttttatgcttaaaagtcgttgtgtactctatgccgctggaaaagcagccttggctttcacaccagcaaaaggttggattaagtgacagcatcctgtaatctatgtaactatgttt

SEQ ID NO: 121289 - DNA, 1066 bp, Zea Mays
gtgaattgcagagaacaaccaccaatggtcacgactgccgtcgcggcggtcgccggcgccgtgccgccagctcggaaagcccaagcggtaactgtggccacaaccacagcactacctcccaccctcactagaaggcagctcctcgccgcggtcgccaccgcctccaccctccccacggccgccgcctcagctgcggcccccaggttcgccgagattccgggctccggcggcgtgaaggccctggacctccgggaaggttcgggagagatcccggccgttggcgaccaggttgcggttcattattatgggagattagcagcgaagcaaggatggcgcttcgattcgacgtatgatcacaaggacgagaccggcgatcccatgccgtttgtcttcacccttggatccggcaagcacccagcaaaagcaaattttatgggacgctagtttgtgggatcattacgaggctgatactcaggcggtcaagacatagcatgatacggatctttcaggttatacctggcatggaagcagcagtgaagtccatgagagtcggcggtcttcgccgagtgatcattccaccatcgcagggataccaaaacacgtcacaagaaccggttcctcctaatttctttgatcggcagaggctgttcaccactatattcaacccgacgcgcctcgcaaatggcgagggttccactctcggcacacttatcttcgacatcgagctaatcaacattaggcaacgtccataactgttctgctccatactcttgtgtctaaaaagttgttccgtgcaagaatctggttatgctttaagtaactgtcagcgctccttcggtcaatccccaattacatattgtaatgcatactgatcgctgacagacgatatatgaagaaaaatcaattgaatgcggatttgattccgttgttctacccctgaaatgtaactccttttatgcttaaaagtcgttgtgtactctatgccgctggaaaagcagccttggctttcacaccagcaaaaggttggattaagtgacagcatcctgtaatctatgtaactatgttt

SEQ ID NO: 121290 - DNA, 195 bp, Zea Mays
atgcctacccccaatcaggtcatcgtcggcctcctgcagctgtccctccatcacctccttcaaggtttaggcgctccaccacctcagtccgggtgcactgtcttgccctcgactccagtgcctgtcacctcctcctgggccttggcgttaccgtggcccctcgcacagagaaccctcggtccaacaagcatctag

SEQ ID NO: 121291 - DNA, 94 bp, Zea Mays
atggacgtccatgctacacaatttaggcctccttgccattgtgcctcagcatggatgcactcgtttctcaaattggtggtgccaaagtatcaag

SEQ ID NO: 121292 - DNA, 3936 bp, Zea Mays
ccgccgccgtttcttgattctcccatctacatcttcctcgcagcgccggcgcggcggcgctccatcttccgctccctcccttacttgcgcttggcacgcaggcgacggcggcggcgcccagtctcgtactctcagcggcggcgtcagtggcttcccctcccgcctctcgccagtcgcctcgcgccctcgcctccggtcctgcgcacgccggcctgttaccctgcgacattgttgaattctctgaagtgtgtgctcttgtaaaggcttgctaaaatggcaaatttaaacataaccaacatcttggagaagatgacagggaaagataaagactacagatatatggcaacatcagatctgcttagtgaattgaataaagaaagcttcaaagctgatcaagaccttgagccaaagttaacgattactgttcttcaacaacttgaggatgcttcgggagatgtttctggtttagctgttaaatgcttggccccactcgtcaagaaggttggtgaggacagggttgtggagatgaccaataaactttgtgataagttgataaatggaaaggaccagcatcgggataccgctagtatagccctcaagacaatcattgctgaagttactacaccgtcacttgctgaaaagatcttgctttctcttgccccgcaactcatcaagggtgtcaatactgcaaaaagtgctgaaattaaatgcgaatgtcttgatatattggcggatgtgcttcatagatttggcaacttgatcacaaaagatcatgagtacatgctcaatgcacttttatcccaattgggttctaacccagcaagcgtcagaaagaaatctatttcttgcattgcatcacttgctccaagtttatcagatgatttgttagcaaaggcaactttgcaagttgtccagttgctgaaaaatagaggtgcaaaatctgaaattacccgaacaaatatccagatgattggttctctaagtcgttctgttgggtaccgttttgggccacaccttgctgaaactgttcctttgcttataagctattgtacaagtgcatctgaaaatgatgaagagctccgtgaatacagcttgcaggctcttgagagctttatgctcaggtgcccaagggatatatccccatattgtgagggcatcttgaatcttgctttggaatatgtgagctatgatcctaatttcactgatagcatggatgaggatactgatgaggaagcgaaggaagaggatgatgacgatgagagtgcaaatgagtacacagatgatgaggatgcaagctggaaagtccgtagggcatcagcaaagtgcctatctgcaattatagtgtctcgtcctgaaatgttgtcgaagatgtttctagaggcttgtccaaagttaattgaacgatttcgggaaagagaggagaatgtaaagatggatatatttaacaccttcattgagctgttacgccaaactggtaatgttacgaaaggacaaggcgacatcgatgagtccagccctcgctggttgctgaagcaagaggtcccaaaagttgtcaagtctatcaacaggcagttacgtgaaaaatcaatcaagacaaaggttggggcattttcagtactgaaggagcttgtggttgtattaccagactgtcttgctgatcatttcgggtcacttgttcctgggattgagaaggctttgaatgacaagtcttctacctccaacctgaagattgaagcccttgtattaacaaggcttgttatggcttcacattcaccatctgtgtttcatccatacatcaaggctctttctgcacctatactgtctgctatcagagatagatattataaagtcactgctgaggctttgcgggtgtgtggagagctagtccgtgtccttcgtccaaatctcgagacaacctcagttgattttaagccatacattggtccaatctataatgcaatactgggacgtttggccaatcaagatcaggatcaggaggtaaaagaatgcgccatatcttgcatgagtttggtggtctctacttttggtgatggtcttgaaagagaattaccagcatgccttcccatactcgttgacaggatgggtaatgaaattacaagacttacagctgtcaaggcattttcagttattgcgaattcacctctacgtattgatctctcgtgtgtcctggatcatgttgtttctgagctcacagctttccttcgcaaggccaacagagctcttaggcaggcgacgttgggaactctaaattctttggttgtcacatatggtggtcagattggctcttcttcgtatgagacaataatcgcggaactttcaaccctcataagtgacatggatttgcatatgaccgctcttgcattggaactttgttgcacaataatggttgacagaaaatctattcaaaacgttggtttagctgttagagataaagttttgcctcaggcccttgttttgatcaggagtgccctgttgcaagggcaggcactgcaggctcttcagaggttttttgcatcacttgttcaatctgcaaatactagctttgatgctttgttggagtcccttatttctgctgctaagccatcacattcaggtagtcttgctaagcaagcactgtcttctattgctaagtgtgttgctgttctatgcttagcagctggtgaccagaagtgtgcatctacaattgaaatgcttaaaggcattttgaaagacgacagcactactaactctgctaaacaacacatggccttattatgtctgggagaaattgggaggaggaaggacctcagcaatcatgttcaaattgagaacatcgtcattgaatcgtttcaatcaccttttgaggagattaagtccgcagcatcctatgcacttggaaacattgctgttggcaacctctccaagtatttaccatttattttggatcagattgacaatcaacagaagaagcaatatctgttgctccattcacttaaagaggtaatcgtgcgacaatctgttgatcatactggccagagtgagctacaggattcaaacattgagaagatattggcattgctcttcaatcactgtgaaagtgaggaggagggagttcggaatgttgttgcagagtgtttaggaaaaatttctctaattgaaccaaaaaaactagtccctgctttggaggtacgcacgtctagcccagcagcaaatacaagagctacggttgctattgctataaaatattcaattgttgaacgacctgagaaaatagatgaaatcatgtactccaagatatctactttcttgatgttgattaaagacagcgataggcatgtgagaagagcagcagttctggctttgagcacagcagcgcacaacaagccaaatttgattaaaggtcttcttccagagatattacctcttctatacgaccaaactgttattaagcaagagttaatcaggacagttgatcttgggcctttcaaacatgttgtagatgatggtcttgaactcaggaaagctgcctttgaatgtgtggatactttattggacagttgtcttgatcaagtgaatccatcgtccttcattgtacctttcctcttgtctggtttaggtgaccattacgacgtgaaaatgccttgccatttgattctatcaaagctagcagacaagtgcccttccgccgtccttgctgtcctggactccatagttgaaccaatcgagaaaactataagccacaaacccaagggggatgcagtgaagcaggaggttgatcggaacgaggacatgatccgcagcgctctcagggcaatatcttctctaagccgcataagcggcagcgactacagcatacggttcaagaatctgatgaacaagataacggccacccccgcgctcgccgagaagtacaactcggtgcgcggcgaatgagac

SEQ ID NO: 121293 - DNA, 4460 bp, Zea Mays
ccgccgccgtttcttgattctcccatctacatcttcctcgcagcgccggcgcggcggcgctccatcttccgctccctcccttacttgcgcttggcacgcaggcgacggcggcggcgcccagtctcgtactctcagcggcggcgtcagtggcttcccctcccgcctctcgccagtcgcctcgcgccctcgcctccggtcctgcgcacgccggcctgttaccctgcgtgcgtgcctctctctctcctcccgcctcctaatctcgttacctattttgttttccagcaggacattgttgaattctctgaagtgtgtgctcttgtaaaggcttgctaaaatggcaaatttaaacataaccaacatcttggagaagatgacagggaaagataaagactacagatatatggcaacatcagatctgcttagtgaattgaataaagaaagcttcaaagctgatcaagaccttgagccaaagttaacgattactgttcttcaacaacttgaggatgcttcgggagatgtttctggtttagctgttaaatgcttggccccactcgtcaagaaggttggtgaggacagggttgtggagatgaccaataaactttgtgataagttgataaatggaaaggaccagcatcgggataccgctagtatagccctcaagacaatcattgctgaagttactacaccgtcacttgctgaaaagatcttgctttctcttgccccgcaactcatcaagggtgtcaatactgcaaaaagtgctgaaattaaatgcgaatgtcttgatatattggcggatgtgcttcatagatttggcaacttgatcacaaaagatcatgagtacatgctcaatgcacttttatcccaattgggttctaacccagcaagcgtcagaaagaaatctatttcttgcattgcatcacttgctccaagtttatcagatgatttgttagcaaaggcaactttgcaagttgtccagttgctgaaaaatagaggtgcaaaatctgaaattacccgaacaaatatccagatgattggttctctaagtcgttctgttgggtaccgttttgggccacaccttgctgaaactgttcctttgcttataagctattgtacaagtgcatctgaaaatgatgaagagctccgtgaatacagcttgcaggctcttgagagctttatgctcaggtgcccaagggatatatccccatattgtgagggcatcttgaatcttgctttggaatatgtgagctatgatcctaatttcactgatagcatggatgaggatactgatgaggaagcgaaggaagaggatgatgacgatgagagtgcaaatgagtacacagatgatgaggatgcaagctggaaagtccgtagggcatcagcaaagtgcctatctgcaattatagtgtctcgtcctgaaatgttgtcgaagatgtttctagaggcttgtccaaagttaattgaacgatttcgggaaagagaggagaatgtaaagatggatatatttaacaccttcattgagctgttacgccaaactggtaatgttacgaaaggacaaggcgacatcgatgagtccagccctcgctggttgctgaagcaagaggtcccaaaagttgtcaagtctatcaacaggcagttacgtgaaaaatcaatcaagacaaaggttggggcattttcagtactgaaggagcttgtggttgtattaccagactgtcttgctgatcatttcgggtcacttgttcctgggattgagaaggctttgaatgacaagtcttctacctccaacctgaagattgaagcccttgtattaacaaggcttgttatggcttcacattcaccatctgtgtttcatccatacatcaaggctctttctgcacctatactgtctgctatcagagatagatattataaagtcactgctgaggctttgcgggtgtgtggagagctagtccgtgtccttcgtccaaatctcgagacaacctcagttgattttaagccatacattggtccaatctataatgcaatactgggacgtttggccaatcaagatcaggatcaggtttggcaaaattctcttttctcactccctctcttgtgtgcttgcagtgcactctcatttatcatgcaaatttgtgttctcccaggaggtaaaagaatgcgccatatcttgcatgagtttggtggtctctacttttggtgatggtcttgaaagagaattaccagcatgccttcccatactcgttgacaggatgggtaatgaaattacaagacttacagctgtcaagttattgcgaattcacctctacgtattgatctctcgtgtgtcctggatcatgttgtttctgagctcacagctttccttcgcaaggtacttgcatagttgcatggatctttgttgccttcatttgatttttattttctctgaaaagcatagcaaagagcaagataatgccttcattttctctctcttatgtaacaggccaacagagctcttaggcaggcgacgttgggaactctaaattctttggttgtcacatatggtggtcagattggctcttcttcgtatgagacaataatcgcggaactttcaaccctcataagtgacatggatttgcatatgaccgctcttgcattggaactttgttgcacaataatggttgacagaaaatctattcaaaacgttggtttagctgttagagataaagttttgcctcaggcccttgttttgatcaggagtgccctgttgcaagggcaggcactgcaggctcttcagaggttttttgcatcacttgttcaatctgcaaatactagctttgatgctttgttggagtcccttatttctgctgctaagccatcacattcaggtagtcttgctaagcaagcactgtcttctattgctaagtgtgttgctgttctatgcttagcagctggtgaccagaagtgtgcatctacaattgaaatgcttaaaggcattttgaaagacgacagcactactaactctgctaaacaacacatggccttattatgtctgggagaaattgggaggaggaaggacctcagcaatcatgttcaaattgagaacatcgtcattgaatcgtttcaatcaccttttgaggagattaagtccgcagcatcctatgcacttggaaacattgctgttggcaacctctccaagtatttaccatttattttggatcagattgacaatcaacagaagaagcaatatctgttgctccattcacttaaagaggtaatcgtgcgacaatctgttgatcatactggccagagtgagctacaggattcaaacattgagaagatattggcattgctcttcaatcactgtgaaagtgaggaggagggagttcggaatgttgttgcagagtgtttaggaaaaatttctctaattgaaccaaaaaaactagtccctgctttggaggtacgcacgtctagcccagcagcaaatacaagagctacggttgctattgctataaaatattcaattgttgaacgacctgagaaaatagatgaaatcatgtactccaagatatctactttcttgatgttgattaaagacagcgataggcatgtgagaagagcagcagttctggctttgagcacagcagcgcacaacaagccaaatttgattaaaggtcttcttccagagatattacctcttctatacgaccaaactgttattaagcaagagttaatcaggacagttgatcttgggcctttcaaacatgttgtagatgatggtcttgaactcaggaaagctgcctttgaatgtgtggatactttattggacagttgtcttgatcaagtgaatccatcgtccttcattgtacctttcctcttgtctggtttaggtgaccattacgacgtgaaaatgccttgccatttgattctatcaaagctagcagacaagtgcccttccgccgtccttgctgtcctggactccatagttgaaccaatcgagaaaactataagccacaaacccaagggggatgcagtgaagcaggaggttgatcggaacgaggacatgatccgcagcgctctcagggcaatatcttctctaagccgcataagcggcagcgactacagcatacggttcaagaatctgatgaacaagataacggccacccccgcgctcgccgagaagtacaactcggtgcgcggcgaatgagacctgggttcttgtacatggtagaggaataggttaaacacccagagttgtcgcgcgctcgtcaatcctgttgccgcttccccgcatggttgctgaggcaaaagtctgtactctgatgatgacggtggttgatttttgactgctggacatagttgtcttgtacaaaatctggtggtaaattcagtagaattgccgccgatacatttacctggtggttctcttgtcgcagttcagtttcagttgacctatgaagcgctgatgcagatcagactattctggc

SEQ ID NO: 121294 - DNA, 4275 bp, Zea Mays
ccgccgccgtttcttgattctcccatctacatcttcctcgcagcgccggcgcggcggcgctccatcttccgctccctcccttacttgcgcttggcacgcaggcgacggcggcggcgcccagtctcgtactctcagcggcggcgtcagtggcttcccctcccgcctctcgccagtcgcctcgcgccctcgcctccggtcctgcgcacgccggcctgttaccctgcgtgcgtgcctctctctctcctcccgcctcctaatctcgttacctattttgttttccagcaggacattgttgaattctctgaagtgtgtgctcttgtaaaggcttgctaaaatggcaaatttaaacataaccaacatcttggagaagatgacagggaaagataaagactacagatatatggcaacatcagatctgcttagtgaattgaataaagaaagcttcaaagctgatcaagaccttgagccaaagttaacgattactgttcttcaacaacttgaggatgcttcgggagatgtttctggtttagctgttaaatgcttggccccactcgtcaagaaggttggtgaggacagggttgtggagatgaccaataaactttgtgataagttgataaatggaaaggaccagcatcgggataccgctagtatagccctcaagacaatcattgctgaagttactacaccgtcacttgctgaaaagatcttgctttctcttgccccgcaactcatcaagggtgtcaatactgcaaaaagtgctgaaattaaatgcgaatgtcttgatatattggcggatgtgcttcatagatttggcaacttgatcacaaaagatcatgagtacatgctcaatgcacttttatcccaattgggttctaacccagcaagcgtcagaaagaaatctatttcttgcattgcatcacttgctccaagtttatcagatgatttgttagcaaaggcaactttgcaagttgtccagttgctgaaaaatagaggtgcaaaatctgaaattacccgaacaaatatccagatgattggttctctaagtcgttctgttgggtaccgttttgggccacaccttgctgaaactgttcctttgcttataagctattgtacaagtgcatctgaaaatgatgaagagctccgtgaatacagcttgcaggctcttgagagctttatgctcaggtgcccaagggatatatccccatattgtgagggcatcttgaatcttgctttggaatatgtgagctatgatcctaatttcactgatagcatggatgaggatactgatgaggaagcgaaggaagaggatgatgacgatgagagtgcaaatgagtacacagatgatgaggatgcaagctggaaagtccgtagggcatcagcaaagtgcctatctgcaattatagtgtctcgtcctgaaatgttgtcgaagatgtttctagaggcttgtccaaagttaattgaacgatttcgggaaagagaggagaatgtaaagatggatatatttaacaccttcattgagctgttacgccaaactggtaatgttacgaaaggacaaggcgacatcgatgagtccagccctcgctggttgctgaagcaagaggtcccaaaagttgtcaagtctatcaacaggcagttacgtgaaaaatcaatcaagacaaaggttggggcattttcagtactgaaggagcttgtggttgtattaccagactgtcttgctgatcatttcgggtcacttgttcctgggattgagaaggctttgaatgacaagtcttctacctccaacctgaagattgaagcccttgtattaacaaggcttgttatggcttcacattcaccatctgtgtttcatccatacatcaaggctctttctgcacctatactgtctgctatcagagatagatattataaagtcactgctgaggctttgcgggtgtgtggagagctagtccgtgtccttcgtccaaatctcgagacaacctcagttgattttaagccatacattggtccaatctataatgcaatactgggacgtttggccaatcaagatcaggatcaggaggtaaaagaatgcgccatatcttgcatgagtttggtggtctctacttttggtgatggtcttgaaagagaattaccagcatgccttcccatactcgttgacaggatgggtaatgaaattacaagacttacagctgtcaaggcattttcagttattgcgaattcacctctacgtattgatctctcgtgtgtcctggatcatgttgtttctgagctcacagctttccttcgcaaggccaacagagctcttaggcaggcgacgttgggaactctaaattctttggttgtcacatatggtggtcagattggctcttcttcgtatgagacaataatcgcggaactttcaaccctcataagtgacatggatttgcatatgaccgctcttgcattggaactttgttgcacaataatggttgacagaaaatctattcaaaacgttggtttagctgttagagataaagttttgcctcaggcccttgttttgatcaggagtgccctgttgcaagggcaggcactgcaggctcttcagaggttttttgcatcacttgttcaatctgcaaatactagctttgatgctttgttggagtcccttatttctgctgctaagccatcacattcaggtagtcttgctaagcaagcactgtcttctattgctaagtgtgttgctgttctatgcttagcagctggtgaccagaagtgtgcatctacaattgaaatgcttaaaggcattttgaaagacgacagcactactaactctgctaaacaacacatggccttattatgtctgggagaaattgggaggaggaaggacctcagcaatcatgttcaaattgagaacatcgtcattgaatcgtttcaatcaccttttgaggagattaagtccgcagcatcctatgcacttggaaacattgctgttggcaacctctccaagtatttaccatttattttggatcagattgacaatcaacagaagaagcaatatctgttgctccattcacttaaagaggtaatcgtgcgacaatctgttgatcatactggccagagtgagctacaggattcaaacattgagaagatattggcattgctcttcaatcactgtgaaagtgaggaggagggagttcggaatgttgttgcagagtgtttaggaaaaatttctctaattgaaccaaaaaaactagtccctgctttggaggtacgcacgtctagcccagcagcaaatacaagagctacggttgctattgctataaaatattcaattgttgaacgacctgagaaaatagatgaaatcatgtactccaagatatctactttcttgatgttgattaaagacagcgataggcatgtgagaagagcagcagttctggctttgagcacagcagcgcacaacaagccaaatttgattaaaggtcttcttccagagatattacctcttctatacgaccaaactgttattaagcaagagttaatcaggacagttgatcttgggcctttcaaacatgttgtagatgatggtcttgaactcaggaaagctgcctttgaatgtgtggatactttattggacagttgtcttgatcaagtgaatccatcgtccttcattgtacctttcctcttgtctggtttaggtgaccattacgacgtgaaaatgccttgccatttgattctatcaaagctagcagacaagtgcccttccgccgtccttgctgtcctggactccatagttgaaccaatcgagaaaactataagccacaaacccaagggggatgcagtgaagcaggaggttgatcggaacgaggacatgatccgcagcgctctcagggcaatatcttctctaagccgcataagcggcagcgactacagcatacggttcaagaatctgatgaacaagataacggccacccccgcgctcgccgagaagtacaactcggtgcgcggcgaatgagacctgggttcttgtacatggtagaggaataggttaaacacccagagttgtcgcgcgctcgtcaatcctgttgccgcttccccgcatggttgctgaggcaaaagtctgtactctgatgatgacggtggttgatttttgactgctggacatagttgtcttgtacaaaatctggtggtaaattcagtagaattgccgccgatacatttacctggtggttctcttgtcgcagttcagtttcagttgacctatgaagcgctgatgcagatcagactattctggca

SEQ ID NO: 121295 - DNA, 279 bp, Zea Mays
ctatgcgcggcgcgcgcaggagcgggagcgggagcagaggccgaagcagagacgggcgggtgtggttgcggctgcggcgcctgggggtgggagcggacaaggcggatgcggggacgtggggttgggtccacggagtcgagggagtggcgcgggaagtcgtcgtggtcgtgcccggacgacgacgacgacgacgagagcgagtagcgggaggacgtgagcgacagcgacgcctccgagtcggagctgtcgcgcagcaggagaggcgccgcggcgaggtcc

SEQ ID NO: 121296 - DNA, 978 bp, Zea Mays
atctccttcacgccttctcgctagctgttctttcctcctctctcaaccctaaccctagatctctgctaccttcctcctcccctccagctagcacaagtctgttcatcttgctgtctttgttgctcatcgtgctccagttctgttcctagctcgctacatatagcgttatactgcatgcccaaaacggaacacatgtttgtgctctcctggccggccagtctcttcattccttgcacagttgcaaatacagttgtgtgacagagataaacagagagtcaaatacgtacataaagaggtttgatcaaattcagatttgtgtgcgtgcctggctccctgtatgccacacatgtagcgcccaacccagatgctaaggttgcctgctgtgggtggcgtgcaaggggccaagcatgcatccatgcatgcatgcacttttgttcgattcattcttcatgccactttttgatggctagtaccatgtgtgtgtttccatatgttcatgtttcgatatgatgtaatttcatgtttggtatatatgcatgcatatatatacatctcctccattctttttgcacagggagccggcccaagggaggaagctatagccaaactggtgtgtggattacaattttgtgtgcttctcctcaccggccagtttgccagaataatggcagcagcttgctcagctccgagaagaaaccagctgtgaggttatcaggaacttgtatggtttcaatttgtttgtggtttttaacacatggcagatcgatcatcctttgcctcaaatgaagtacacatatcgctagtagctcgccttctgcatgctttgggatatgtatgcttcaatataccatcgtgcgtacgtcgtgtgatccctgaattccagaaacatacacacaacatttttttaccatcgatctttattttgatctagactgtattattaatctgaattgagtatatacattgtcatttgtcaac

SEQ ID NO: 121297 - DNA, 608 bp, Zea Mays
agcacaagtctgttcatcttgctgtctttgttgctcatcgtgctccagttctgttcctagctcgctacatatagcgttatactgcatgcccaaaacggaacacatgtttgtgctctcctggccggccagtctcttcattccttgcacagttgcaaatacagttgtgtgacagagataaacagagagtcaaatacgtacataaagagggagccggcccaagggaggaagctatagccaaactggtgtgtggattacaattttgtgtgcttctcctcaccggccagtttgccagaataatggcagcagcttgctcagctccgagaagaaaccagctgtgaggttatcaggaacttgtatggtttcaatttgtttgtggtttttaacacatggcagatcgatcatcctttgcctcaaatgaagtacacatatcgctagtagctcgccttctgcatgctttgggatatgtatgcttcaatataccatcgtgcgtacgtcgtgtgatccctgaattccagaaacatacacacaacatttttttaccatcgatctttattttgatctagactgtattattaatctgaattgagtatatacattgtcatttgtca

SEQ ID NO: 121298 - DNA, 1238 bp, Zea Mays
cacctgggtcccgtcttgcacggcgacgacctcgcataattgcggtgacagagacagggaacaggacggatggcagctgcttctgcttggacgatggacgaaccgcgaacgcctgtgcgtgcgacgatgttggacgcctacgggacaacgcatcagtgtctcagttatcgaaagtgatgtaactgaagctcgctggatcattgatgcatccgagtgttagcgacctagtcggaaacggggaagaggaggagatcggggcctcggcggcgacggccggcgaggacagtttcagtttcagtagagaagggaaattgtattagaaacccaatctgggccagatacattcttgttcttgggccggacgcggtaacctcttcttctgggcttgcttgtacttacaccgtggaaaaaagaatcgcgtcttcaatccaaaattgcacacaaagcagtttcctcacatgtacttgaaccttttgactcaacaatgatgttgcgcctacaaacgaagcaattaaatccatctgtgcctgcctgcctacactacacatgtcttccacacctccaaccaactcaggtcactaccagccagcctgaccagtctttgacgaagggatcaaggatcactcgcgatccgacaccccggtgaacgccatggaggcctgcgtggactcgttcgacagcaagggcgaggagtgcgccatgagggaggacaggaacgtcgaggaggacgtaggcggcgtggccacgttgtcgctcgctttcctcgtgctcctgaccttgaggtccatgaagtcgctgattatggcgggcttgctgaccgtctccggctcgacgtcccactcgcccgtcagcatggcgacgaccctcggcatgtcgggccggtgcctcgtcacgtcctgcgtgcacagcagcccgaccttcaggaacctgcaggcctgcgccacgtccaggtcgccgccgcccaaggacctgtctatgatcctctccagactcccctgctcgtagtgcatccatgtctgcaagaggagagccccgttggtgatctctgggaactgtggcagtaaagaacaaaaagctgtgtttagaaggtttgtgtcgtacgatgagttttcaggaaaaatccaaaaaaggtaactccttccgtctcaaaatatagttctttctatcccacttttttttccctgtccacattcattcaaatgataataatacaacattcatatgttacttaatgaata

SEQ ID NO: 121299 - DNA, 258 bp, Zea Mays
ctgacacttgaatgtagaatggcattgaaacaggtgagactatttcaagagttgtatgatacagcgctgtatgcaactatgcaaaaaatcacaacatcatgaaccaacaaaagtaaccagaaatacctacctcgaaaaatatggcgaaatttccagtcgttgccatgaagatcttttgcaatcaactcctgtgcgggaggttgctgattgaaatcctacagaattaacaaaggagcatttagaacacctaatggtttg

SEQ ID NO: 121300 - DNA, 1052 bp, Zea Mays
ggcagcagctgtccagaatcctctgctaacatttcggagttattgggtgacctgggattaaacgcagaaggtttgacaattttagagtgcttgacaattctcacgcgctcagtgcataactgtaaagtgtttagttattatggaggtgtgcagaaggtcactgcacttttgaaagccgcagttgtaaagctgaagaccttgaccagcttgcttgccgcagatgaacaactgtcaaataaaactgtagagaacatgaggacgatgcaaaaggttcttgtgtacattgttacaataatttcaaacttcatggatctggaaccaaatacaacaaggatttcacagtttatactaaacagctccaggcataccctatcgagcaactatttggccacagttgctccaaatacttccaaaagcatggtttttgatagaaattggcagaaaaaggccattgtttcagttatggaagctggtggtgtcaattggttagtagaacttctaagggttattcgaagattgaatttgaaagagcagtggactgacttgtcactccactttataactttgtactctctgaggtcaactatatctgaaaatgttcgtgcacaaaatcatttcagaagtatagggggactggaggttctattagatggactgggactgccatcaagcaaattttcagtctcgaagcagtcttttgttcccagtgatgaaaggtatgtgtttgatctgtggcaaaacgccaaaaccagacctttgatgtaggaggttctgaagtttggaacagagagctgtaataagaaaaaaactaaataagatatatttttctacactaatgtaccgttctcaaggattatagctcgccaaacaccttcatcattatcattgtcaagttatagtcattcaaccagaggaaatggaggtgtttcactctaagatactccctccaataaaaataagttcctatatggaatgtgtggtcaaaaatagtgctgtttttcttaaggatatccagattggatatgtgaaaataatatctgcatatttcccac

SEQ ID NO: 121301 - DNA, 6555 bp, Zea Mays
tgcaggtacacaaaagtaaatgaactaatgactcgctgtagtgttggtacagaattgatgcccatcggtgaagaaccttcttctcttggctttgagaacactcttgcttttactggtcaaatgggccctgtttatgcattttccgatgctctctcccctgaacaaataaggggcatttataacctaggaccaagttacatgtactctttccttggtgatcagaatttgcttacaaatgatgactcacggtacaagggaatacttgatgcaaaggatggcatttcatcgaaaatgatttttggcttgaatgcacaggctagtaacaatcggactttgtttaatgtatcatctgcactggatggtcttgacaagagtaagtttgaggcaaccaccatgggtgggacaaaattatgctcccggcgcctgctgcaagaaataatctattgtgttggtggcgtttctgtatttttccctcttctgatccactttgatgatgctgtggttcagaatggagagtttgccaccagagatcaattggctggtcaagttattgagcttgttgcatctgttctagatggaaatatagcaaatcagcaacagatgcatcttctttctggattttctattttagggttcctgttccagtctgtttcaccgcagctgctaaatatcaagactctttcagcatcgaaatacatgtttactattttgaagacctctagcatgtcagatattctattgagagatgctctttcacagttttacttgaatccacatatctgggcatatgcaacctatcaagtacagagagaactttttttgctaaaggtttctcaacatgatatcagagctcttgtttcctttcttgaacgaagtcaagatgttgcatgtgttgaggatatactccatatgattatccgcgccctttcacagaactcgcttgtaccatctttcttggagcaagtaaattcacttggtggttgttacattttcatcaatcttcttaagagggaatttgagccaatccgcctattgggccttcagcttcttggaaagcttttggttggggttccatctgagaaaagagggccaaaaatttttggcctccctgtaggacgacctagatccattgctgaagatataaggaaaggggcaacagcagcacctcaactgtttttttattcaatatctgatagacttttcaaatttccactttcagatcatttatgtgctagtctttttgatgttcttcttggtggagccagtcctaagcaggttttacagaaacgttcccaatctgatgctttaaaagataggagcatggctcctttttttgtccctcagattctggtttgcatttttaaatatattcaatcttgtcgagatgcttcagtgcgtacaaagattttaagtgatcttcttgatttgctggattcaaatcctgtgaatgttgaatcccttatggagtatggttggagctcttggcttgaaacatctgcgaagcttgatgtacttaggaactacaaatcgaattctgtagccaaggctgacggtttggagaccaatgagctgattcttgtgaggaacatgtattcgttggttctctcctattgcatattctctgtgaaaggtggctggcatcaactggaagatacaacaaatttccttctactgaaaattgagcaggggcagttaccaaattcctccatgctccgagacatttttgaagatctcattggaagccttcttgagacatcttctgaagaaagtgttttcaattctcagccatgccgtgataatatcttgtatcttttaaatcttagtcatgaactctttgttgaccaaattggaattaaactcttgtttccttcacctgacatgtctgcacatttgtcatctgatgacatcaactcggcagttctagaaattatgaatactgagggcaatggtctgcttacaagtcttccttggagtaatatattatttaatgatggagaaaagttgactgatgattggtggagcttttttgacaagatatggacgcttctgtgctatttgaatggcaaaggccaaaccagattaacaccaaagggtttaaatacagctggaccatctattgggcaacgggcccgcggattagtagagtccctcaatatcccagctgcagaaatggctgctgtagttgtaacaggaggcatcagtagcgcattaggtggaaagactaacaaagttgctgacaaagctatgatgctaagaggggagagatttccaagaattatcttccatctcatcattatgtatctctgcaaagctggcttagaaaacgcatccaaatgtgttcagcaatttatatcactgctccctaatattatctctgaagatgatcagtgcaaaaatagactgcatttcttgatttggtccttactaagggtaagatcccagtatgggcaacttgatgatggtgcacgtttccatgtcatgtcacacttgattcttgaaactgtgatctatggaaagtctatgcttacaactaatatagtaggcagagatgattctactgaagcaaataacagtaaggaggctgggttcattcttaatcttgtacagaaggaccgggttctcactgcggctactgatgaggcaaagtacatgaaggatgcaattgctgatcgcatgaagctggtccaggaactccattctaaacttgatgaacgctcaattcaagacgttgaacaactgcaaagttttgaggatgatgtacagtttgccaagactgctgctatagctgcggacgacagtagaaaagcagctttccagctagcatttgacgaggatcagcaaattgttgcagacaagtggattcatattctccgtgctctgagtgatgagagggggccatggtctgctgctccttttccaaataatattgtgacatactggaaacttgacaaaactgaagataaatggcggcgccgactgaagctcaagcggaactataagtttgatgagtgcctttgtcatccatcatccatcaaatctagtaacgataatgctgccccaactgttgacccatctgctaatgccaagataacagaaaaaatgaagcacttacttttgaaaggagtgcgtggaattacaggggatatcagttctgaatcatgtgaggatagcaacgacatgattgatcctccccagaatgtcccgccagagaaccacactgttagtgatacttctgattctgcagattcctcagattatcctgctattgttcaaaatagaaaagaaagttcatcaaccagtagtgataatgattatatcgaggtgctatcatcagttcactgtgttcttgtaacccccaaaagaaaactagctgggcaattgactatcacacgaaatgccctacatttttcttttgaatttctagttgaagggactgggggatcatctgttttcgacagatttcatgataaaaaagattcagactccaagaatgagatgggaggtgtggaaaaactgaagggcaatcttgatggaggacgaggcaatgctgctgaatctagcgacactcaaattaaaaatcaatctggtaaaatcaaacaccatagaaggtggaaaataactaggataaaagcagttcattggacacggtacctactacaatatactgccacagagatattctttgatgatgcaaacgcaccagtatttcttaacttttcatcccaaaatgatgctaaaagtgttgggtctcttttagtttccctgaggaatgatgctttgttccccaaaggaacaaccagagacaagaatagtttaatttcctttgttgacagaaaggttgcccttgaaatgtctgagagtgctagggaaagttggagaagaagagaaataagcaactttgagtaccttatgattctcaacactcttgctggacgatcttacaacgatttaactcaatatcctatatttccttggatattggctgactactcttcagaaaagcttgattttaacaaatcatctacattcagggacctttcaaaaccagtaggtgccttggatgcaaagcgctttaaggcttttgaagatagatatcttaattttgttgatccggatataccaagtttttactatggatcccactactctagcatgggaattgttctttattaccttctaaggcttgagccttttactgcgctgcaccgcaatcttcagggtggtaagtttgaccatgcagatcgtctatttcagagcattgaaagcacatacagcaactgcctatcaaatacaagtgatgtcaaagagcttatacctgaattcttttacatgcctgagtttcttgagaattcaaattcatatcaccttggcataaagcaggatggtgaaccattaggtgatgttggtctccctccatgggcaaagggttccccagaagaatttattcatatcagtcgagaagcccttgaaagtgaatatgtaagctctaatctacatcattggattgatctcatatttggttacaagcagcgaggcaagcctgcagttgaggcagcaaacatattttattatctgacatatgagggtgccgttgatttggagaacatggatgatatgttacaaaagtccgctattgaggaccaaattgcaaattttggacaaacaccaattcaaatttttcggaagaaacacccaaggagaggtcctcctataccaattgtgcatccactatattttgcgccacaatcgataacagtgacttctgttgtcccgaccatagtcacccctttatctgtattattcattggtttgttggactcaaacgttgtcatgatgaatgaggggctcatactctctgtaaagctttggctaacaacacagttgcagtctggtggaaacttcacattttctggatcactggaacctttcttcggaattggttctgatgttatttctccgaggaaaattggcacttctttggctgaaaatgttgagtttggaagacaatgcttagcaactgttcaaattcgtggtgacaattacttaattttgtgtggtaattgggagaatagtttccagatcatatctctaagtgatggaaaaattgtgcagagcatccggcagcataaagatgtagttagttgtgtggcagtttcatctgacggaagtgtgattgcaacgggaagctatgacacaactgttatgatctggtatgcatttcaagggagatcaaatgacaaaagatataggaatgcaaattacgatctatcaactaaggatcatgtcatcattgaaagcccttgccatatcttatgtggccatgatgatattatcacatgcttatttgtcagcacggaattagacattgttatcagtgggtcaaaggacgggacttgtatgttccatacactgcgtgaggggacatatgttcgatcgattcgacatccgtcaggtgctggtttgtcaaaaatggtaacatcacagcatggcaggttagtgatatactctgatagtgacctttctttgcatatgtattccataaatggaaagcatattgcttcttcggaatccaattgtcgtctcaattgcatggagctaagttgctgtggagagtttatggtatgtgctggtgatcatggtcaaattgttctccgctccatgcattctcttgatgttgtttggaggtacgagggagctgggaaaacaataacttccttagttgtgactcctgaggagtgcttcttggcgggaaccaaggatggtagcttgattgttttttcaatagaaaaccctttgcttcgtaaaaacgccatgcaacggcacaaggcaaaaccttccattggtggttagaggtgtagatcaaaacagtaccagaacttcttgctgcatttcaaataaaggttatcaatccgcaataattataacagagaagattctataactcctgtataaatgtacatacgtcatcagatcgagtttaccattctgaagagtgcatgtgccgatcacaatcaagaggataattcttctaactgcaaaacacatactatggtaactaaagtagattgatgtttcatgttcaagacaagagcaaggggataggaccttcaatatgatactcttgatatttgtagggtggtagctagttagtaatgggggtgcatttgagtgtaatataaacttattttgtgggggcattcttgctagataagagcgagccacagttttcctagatagaatttttaggtaaataggttgccactgacctgtaactattaatctgaacattgtaaatggaactgatgcgggttcataatagaaggcttgcaactttggaaaagatataattaaatcttatgagccgtctgaatttgtcactgaaaagctactaatgtgttgtatgagtgcacaacttgatgttgatttatcgttcgaacatggtagcgtcaatttcacaagcctaccaatatttcgagataacagttacaaaccgatactaatttttccctatttcccatctcgtcctactatgagctacttctgttcaaaaaaaaa

SEQ ID NO: 121302 - DNA, 257 bp, Zea Mays
ctaagagcatctccaacaatgcctcaaactagtgcctcaaattgaaatatggggctctacacaggaaaaactactccaacagtgccctatttcataaatttttatcaaaaaactatagggcaccctctcaagtgactcaaatatactacactgtagtgggctgccctataatctagatttgaggctttactgttggagcggagtgttttgttgatgccctaaattctataaaatatacttattttcaaattataggg

SEQ ID NO: 121303 - DNA, 1633 bp, Zea Mays
aattttagaggttagaccgccacgaaagcgtcactgcacacggcattcccctcccctagcgttatcgtcgcaccataaataaccatcctctcctcgcctttccccacatctcatcttcgtctgtgttcttgggcgtacgcggacacagccccgatccgaatcgtcgtccttgcgagcctcgccgatcccccactcccctcccctcgcttcaagatgcagatctttgtgaagaccctcaccggcaagactatcaccctcgaggtggagtcttctgacaccattgacaatgtcaaggctaagatccaggacaaggagggcatccctcctgaccagcagcggcttatcttcgccggcaagcagcttgaggacggacgcacacttgctgactacaacatccagaaggagtcaaccctccacttggtgctgcgccttaggggaggcatgcagatctttgtcaagaccttgactggcaagacaatcacccttgaggtggagtcctcagacaccattgacaatgtcaaggcaaagatccaggacaaggagggcatcccacctgaccagcaacgtctcatctttgccggcaagcagttggaggatgggaggacccttgctgactacaacatccagaaggagagcaccctccacttggtgctgcgtcttaggggtggtatgcagatctttgtgaaaacccttactggcaagaccatcactcttgaggtggagtcttcagataccattgacaatgtcaaggccaagatccaggacaaggagggcatcccgccggaccagcagcgtcttatctttgccggcaagcagctggaggatggacgcacccttgcggattacaacattcagaaggagagcaccctccacctggtgctgcgcctcaggggaggaatgcagatcttcgtgaagacattgactggcaagaccatcaccttggaggttgagagctccgacaccattgataatgtgaaggccaagatccaggacaaggagggtatccccccggaccagcagcggctgatcttcgccggcaagcagctggaggatggtcgcaccttggctgactacaacatccagaaggagagcaccctccatctggtgctccgcctgaggggcggtatgcagatctttgtgaagaccttgactggcaagaccataaccctggaggttgagagctctgacaccatcgacaacgtgaaggctaagatccaggacaaggaggggattcccccagaccagcagcgtctgatcttcgccggcaagcagctggaggatggtcgcacccttgcagactacaatatccagaaggagagcaccctccacctggtgctccgtcttcgcggtggttattaagccatcagtcgttgaagctgctgctgtatctgggttatctagtgtctctgccattgcccatggatggtgctgtctttcaaagtatttgtatggtttgtgtcgtgagtcgtgactgagctggtttcatggaccagttgtgttctcgttacccaaaactatcgtgcgaccgcatatggcttaatcatgaataaatgttgtttgaatttaaactattcgctgaatattgttgttttttgtcatgtcagttaatgttactaaattggttgccttctaa

SEQ ID NO: 121304 - DNA, 1704 bp, Zea Mays
ccttttcttttcctccttggtctactgttatatgcttacctttttttggtttccttgcagatgcagatctttgtgaagaccctcaccggcaagactatcaccctcgaggtggagtcttctgacaccattgacaatgtcaaggctaagatccaggacaaggagggcatccctcctgaccagcagcggcttatcttcgccggcaagcagcttgaggacggacgcacacttgctgactacaacatccagaaggagtcaaccctccacttggtgctgcgccttaggggaggcatgcagatctttgtcaagaccttgactggcaagacaatcacccttgaggtggagtcctcagacaccattgacaatgtcaaggcaaagatccaggacaaggagggcatcccacctgaccagcaacgtctcatctttgccggcaagcagttggaggatgggaggacccttgctgactacaacatccagaaggagagcaccctccacttggtgctgcgtcttaggggtggtatgcagatctttgtgaaaacccttactggcaagaccatcactcttgaggtggagtcttcagataccattgacaatgtcaaggccaagatccaggacaaggagggcatcccgccggaccagcagcgtcttatctttgccggcaagcagctggaggatggacgcacccttgcggattacaacattcagaaggagagcaccctccacctggtgctgcgcctcaggggaggaatgcagatcttcgtgaagacattgactggcaagaccatcaccttggaggttgagagctccgacaccattgataatgtgaaggccaagatccaggacaaggagggtatccccccggaccagcagcggctgatcttcgccggcaagcagctggaggatggtcgcaccttggctgactacaacatccagaaggagagcaccctccatctggtgctccgcctgaggggcggtatgcagatctttgtgaagaccttgactggcaagaccataaccctggaggttgagagctctgacaccatcgacaacgtgaaggctaagatccaggacaaggaggggattcccccagaccagcagcgtctgatcttcgccggcaagcagctggaggatggtcgcacccttgcagactacaatatccagaaggagagcaccctccacctggtgctccgtcttcgcggtggttattaagccatcagtcgttgaagctgctgctgtatctgggttatctagtgtctctgccattgcccatggatggtgctgtctttcaaagtatttgtatggtttgtgtcgtgagtcgtgactgagctggtttcatggaccagttgtgttctcgttacccaaaactatcgtgcgaccgcatatggcttaatcatgaataaatgttgtttgaatttaaactattcgctgaatattgttgttttttgtcatgtcagttaatgttactaaattggttgccttctaatttttgtttactggtgtttgtcgcaccttatctttttactgtatgtttacttcaggttctggcagtctcattttttgtgactagttaaaacttacagctaaaaaaatgcagtttttcattttcatttgaagtttgattagagctattgataccggaccatcaggttaggttagttgtgcatagaatcataaatattaatcatgttttctatgaattaagtcaaa

SEQ ID NO: 121305 - DNA, 894 bp, Zea Mays
atgcagatctttgtgaagaccctcaccggcaagactatcaccctcgaggtggagtcttctgacaccattgacaatgtcaaggctaagatccaggacaaggagggcatccctcctgaccagcagcggcttatcttcgccggcaagcagcttgaggacggacgcacacttgctgactacaacatccagaaggagtcaaccctccacttggtgctgcgccttaggggaggcatgcagatctttgtcaagaccttgactggcaagacaatcacccttgaggtggagtcctcagacaccattgacaatgtcaaggcaaagatccaggacaaggagggcatcccacctgaccagcaacgtctcatctttgccggcaagcagttggaggatgggaggacccttgctgactacaacatccagaaggagagcaccctccacttggtgctgcgtcttaggggtggtatgcagatctttgtgaaaacccttactggcaagaccatcactcttgaggtggagtcttcagataccattgacaatgtcaaggccaagatccaggacaaggagggcatcccgccggaccagcagcgtcttatctttgccggcaagcagctggaggatggacgcacccttgcggattacaacattcagaaggagagcaccctccacctggtgctgcgcctcaggggaggaatgcagatcttcgtgaagacattgactggcaagaccatcaccttggaggttgagagctccgacatccaggacaaggaggggattcccccagaccagcagcgtctgatcttcgccggcaagcagctggaggatggtcgcacccttgcagactacaatatccagaaggagagcaccctccacctggtgctccgtcttcgcggtggttattaa

SEQ ID NO: 121306 - DNA, 759 bp, Zea Mays
cagcagcggcttatcttcgccggcaagcagcttgaggacggacgcacacttgctgactacaacatccagaaggagtcaaccctccacttggtgctgcgccttaggggaggcatgcagatctttgtcaagaccttgactggcaagacaatcacccttgaggtggagtcttcagataccattgacaatgtcaaggccaagatccaggacaaggagggcatcccgccggaccagcagcgtcttatctttgccggcaagcagctggaggatggacgcacccttgcggattacaacattcagaaggagagcaccctccacctggtgctgcgcctcaggggaggaatgcagatcttcgtgaagacattgactggcaagaccatcaccttggaggttgagagctccgacaccattgataatgtgaaggccaagatccaggacaaggagggtatccccccggaccagcagcggctgatcttcgccggcaagcagctggaggatggtcgcaccttggctgactacaacatccagaaggagagcaccctccatctggtgctccgcctgaggggcggtatgcagatctttgtgaagaccttgactggcaagaccataaccctggaggttgagagctctgacaccatcgacaacgtgaaggctaagatccaggacaaggaggggattcccccagaccagcagcgtctgatcttcgccggcaagcagctggaggatggtcgcacccttgcagactacaatatccagaaggag

SEQ ID NO: 121307 - DNA, 1090 bp, Zea Mays
atgttcaacggttcgcccttggctccccctcccctaccactgtagctgttttaggggttacagtgcgcccctattctcttcaccggcttcctcctcctcctcctctcccctcccgattccttctctctcccgctaaatggatggacacgctactgcgccggatttctccccagccggttccttcggccacgcgaccgcgcgctcggaaaactccacggacagcgaaggaggcgaaccaagggcgacgtattcgccgccggagaaggtaagtgtcgatccgccgtgtcccgcgattcgtttgtcttgctccgagcggcgaacagcagtgggggtcgtcctcgcggatccgtcttcaagctttcgcggatccgccttcaagcttcgcggatcccacacgaaacctccgagttctctcgccaattcgatccgcctcaccgccgccgcccgtccgccggtcggccttgactgctccgtcgcacgtggcggttcgcagcacggaatctaccttgtgttgacagatccggggaaacccttgttcccggtcgttccggctcgaatcttctgcggactggcaatgtaagcgttctccattggagggcgacgatctacggggcggttgttggcagggttgcgggaatggagcacgtgttcggagggaagtttaagcttgggaagaagatcgggagcggatctttcggcgagctctatctcggttagcgtctcgccgggttcttcattgattctgtcacgcgtctctgcagattcctacgcgtcgttgtttttggctgcaggcgtcaacatacacagcggcgaggaggtggctatcaagttgttattagataatctgatactgttcgtgcaccatttttctctgtcgtggagttatatgcctggcattcggcatgagtttgttccatatgcaaacatatcatggtcaaccattgctagcaacggtttcgtgaagaatttgtgtgtagattatgggatgacagaaaatggatgatgttctgcatgtaattgctttaaaaaagactggcatggtcccgagctatatttttacatgagtaataacaagattttcaaacctttt

SEQ ID NO: 121308 - DNA, 898 bp, Zea Mays
gcgcccctattctcttcaccggcttcctcctcctcctcctctcccctcccgattccttctctctcccgctaaatggatggacacgctactgcgccggatttctccccagccggttccttcggccacgcgaccgcgcgctcggaaaactccacggacagcgaaggaggcgaaccaagggcgacgtattcgccgccggagaaggtaagtgtcgatccgccgtgtcccgcgattcgtttgtcttgctccgagcggcgaacagcagtgggggtcgtcctcgcggatccgtcttcaagctttcgcggatccgccttcaagcttcgcggatcccacacgaaacctccgagttctctcgccaattcgatccgcctcaccgccgccgcccgtccgccggtcggccttgactgctccgtcgcacgtggcggttcgcagcacggaatctaccttgtgttgacagatccggggaaacccttgttcccggtcgttccggctcgaatcttctgcggactggcaatgtaagcgttctccattggagggcgacgatctacggggcggttgttggcagggttgcgggaatggagcacgtgttcggagggaagtttaagcttgggaagaagatcgggagcggatctttcggcgagctctatctcggcgtcaacatacacagcggcgaggaggtggctatcaagttgttattagataatctgatactgttcgtgcaccatttttctctgtcgtggagttatatgcctggcattcggcatgagtttgttccatatgcaaacatatcatggtcaaccattgctagcaacggtttcgtgaagaatttgtgtgtagattatgggatgacagaaaatggatgatgttctgcatgtaattgctttaaaaaagactggcatgg

SEQ ID NO: 121309 - DNA, 636 bp, Zea Mays
ccttgcatacaatatttctgggagcaagatgagtctgatatcatcagtcgccaaacaaggatcagtctccactttcaaggcagaaagaaacagatgttgcgatatgctttcacataccattggcgcctatggtcgattccggagatcaaggactgcttggaggaggctggattcaagtgggtccacgtttggatgagggagatgccaaatacccagtcaggtggaaacgccaaggaatataacgccaaccgggacgtgaagtatgaagaatcacaccatttcaaccaaggagatgcttggaacgcctatgtcgttggagtagcaaatatctagccggtatgtgctgaattctgctacgaaaatgtggtggtggctcttagtttcccagaccaattaatgttttgtggacgcttccgctttgctcacgacttctgcatcgcattgctgcggactaagtatgcagggtggctattaccggacccagataacttttactccagaacacggcctcactgatgtttctgttttcaaaatgaaatgctggcaacgtgccatgcctttgaatgtatttcctacgtatacagtgtataggatatgatgggtgcttcgacggataccgatactacctttcatgat

SEQ ID NO: 121310 - DNA, 297 bp, Zea Mays
atggggtataatataaatggtaattgttgtcttgactattcatttttgcataaagttatttttttcctaaaggtgttagggttattcattggagttctgctggagaagcaaattgtggtaatatgcccaaatctgggtgtcctgtctgcaattgttttgttaattatactgatgacaaggtcgttccagtggcaaagtctattgcttctgaagacgatactaatatggatgttgatgttgtggctccgatttcaatcaaacatggtctccttgagattgaaatatattgctacttgc

SEQ ID NO: 121311 - DNA, 1169 bp, Zea Mays
gtcataaatagccagccccatccccagcttctttccccaacctcatcttctctccttttgctcggaacgcacacaccgcccggtctccgatctccgatccccgatcccctcgtcgatccaagatgcagatcttcgtcaagactctcactggaaagactatcaccctcgaggtggagtcctctgacaccattgacaacgtcaaggccaagatccaggacaaggaaggcattcccccggaccagcagcggctcatcttcgctggcaagcagctcgaggacgggcgcacacttgccgactacaacatccagaaggagagcaccctccaccttgttctccgcctcaggggaggcatgcagatcttcgtcaagaccctcactggaaagactatcaccctcgaggtggagtcttctgacaccatcgacaacgtcaaggccaagatccaggacaaggagggcatccctccggaccagcagcggctcatttttgctggcaagcagctcgaggacgggcgcacgctggccgactacaacattcagaaggagagcaccctccacttggtgttgcgtctcaggggcggcatgcagatcttcgtgaagactctgactggcaagactatcacccttgaggtcgagtcttctgataccattgacaatgtcaaggccaagatccagaaggagagcaccctccacttggtgctgcgtctcaggggtggcatgcagatcttcgtgaagactcttactggcaagacgatcacccttgaggtggagtcctcagacaccattgacaacgtcaaggccaagatccaggacaaggagggcattccaccggaccagcagcggctgatcttcgccggcaagcagctggaggatggtcgcaccttggctgactacaacatccagaaggagagcaccctccacttggtgctccgcctcaggggtggcatgcagatctttgtgaagacattgactggcaagaccatcaccttggaggtggagtcgtctgacacaatcgataatgtcaaagccaagatccaggacaaggagggcattccaccggaccagcagcgcctgatctttgctggcaagcagctggaggatggccgtaccctcgccgactacaacatccagaaggagagcaccctccacctggtgctccgcttgcgaggtggt

SEQ ID NO: 121312 - DNA, 1951 bp, Zea Mays
gtcataaatagccagccccatccccagcttctttccccaacctcatcttctctccttttgctcggaacgcacacaccgcccggtctccgatctccgatccccgatcccctcgtcgatccaagatcttcgtcaagactctcactggaaagactatcaccctcgaggtggagtcctctgacaccattgacaacgtcaaggccaagatccaggacaaggaaggcattcccccggaccagcagcggctcatcttcgctggcaagcagctcgaggacgggcgcacacttgccgactacaacatccagaaggagagcaccctccaccttgttctccgcctcaggggaggcatgcagatcttcgtcaagaccctcactggaaagactatcaccctcgaggtggagtcttctgacaccatcgacaacgtcaaggccaagatccaggacaaggagggcatccctccggaccagcagcggctcatttttgctggcaagcagctcgaggacgggcgcacgctggccgactacaacattcagaaggagagcaccctccacttggtgttgcgtctcaggggcggcatgcagatcttcgtgaagactctgactggcaagactatcacccttgaggtcgagtcttctgataccattgacaatgtcaaggccaagatccaggacaaggagggcatccctccggaccagcagcggctcatttttgccggcaagcagctcgaggacgggcgcacgcttgccgactacaacattcagaaggagagcaccctccacttggtgctgcgtctcaggggtggcatgcagatcttcgtgaagacacttactggcaagacgatcacccttgaggtggagtcctcggacaccatcgacaatgtcaaggccaagatccaggacaaggagggcattccaccggaccagcagcggctcatctttgctggcaagcagctggaggatggccgtacccttgcagattacaacatccagaaggagagcaccctccacttggtgctgcgtctcaggggtggcatgcagatcttcgtgaagactcttactggcaagacgatcacccttgaggtggagtcctcagacaccattgacaacgtcaaggccaagatccaggacaaggagggcattccaccggaccagcagcggctgatcttcgccggcaagcagctggaggatggtcgcaccttggctgactacaacatccagaaggagagcaccctccacttggtgctccgcctcaggggtggcatgcagatctttgtgaagacattgactggcaagaccatcaccttggaggtggagtcgtctgacacaatcgataatgtcaaagccaagatccaggacaaggagggcattccaccggaccagcagcgcctgatctttgctggcaagcagctggaggatggccgtaccctcgccgactacaacatccagaaggagagcaccctccacctggtgctccgcttgcgaggtggtatgcagatctttgtgaagaccttgactggcaagaccataaccctggaggttgagagctccgacaccatcgacaacgtgaaggcgaagatccaggacaaagagggcatccccccagaccagcagcgtctgatcttcgccggcaagcagctggaggatggccgcaccctagcagactacaacatccagaaggagagcactctccacctggtgctccgcctccgcggtggtcagtaagccatggttcatttaagctgctgctgtacctgggtatctgcgtcgtctggtgccctctggtgtacctctatatggatgtcgtcgtctaataaacatctgtggtttgtgtgtcatgaatcgtggttgtggcttcgttggtttaatggacctgttgtgtcctctgtgttgtacccaaaactcttctgcagcagtatggcttgaatccttatgaagtttgatatttgaacttaaaa

SEQ ID NO: 121313 - DNA, 1976 bp, Zea Mays
gtcataaatagccagccccatccccagcttctttccccaacctcatcttctctccttttgctcggaacgcacacaccgcccggtctccgatctccgatccccgatcccctcgtcgatccaagatgcagatcttcgtcaagactctcactggaaagactatcaccctcgaggtggagtcctctgacaccattgacaacgtcaaggccaagatccaggacaaggaaggcattcccccggaccagcagcggctcatcttcgctggcaagcagctcgaggacgggcgcacacttgccgactacaacatccagaaggagagcaccctccaccttgttctccgcctcaggggaggcatgcagatcttcgtcaagaccctcactggaaagactatcaccctcgaggtggagtcttctgacaccatcgacaacgtcaaggccaagatccaggacaaggagggcatccctccggaccagcagcggctcatttttgctggcaagcagctcgaggacgggcgcacgctggccgactacaacattcagaaggagagcaccctccacttggtgttgcgtctcaggggcggcatgcagatcttcgtgaagactctgactggcaagactatcacccttgaggtcgagtcttctgataccattgacaatgtcaaggccaagatccaggacaaggagggcatccctccggaccagcagcggctcatttttgccggcaagcagctcgaggacgggcgcacgcttgccgactacaacattcagaaggagagcaccctccacttggtgctgcgtctcaggggtggcatgcagatcttcgtgaagacacttactggcaagacgatcacccttgaggtggagtcctcggacaccatcgacaatgtcaaggccaagatccaggacaaggagggcattccaccggaccagcagcggctcatctttgctggcaagcagctggaggatggccgtacccttgcagattacaacatccagaaggagagcaccctccacttggtgctgcgtctcaggggtggcatgcagatcttcgtgaagactcttactggcaagacgatcacccttgaggtggagtcctcagacaccattgacaacgtcaaggccaagatccaggacaaggagggcattccaccggaccagcagcggctgatcttcgccggcaagcagctggaggatggtcgcaccttggctgactacaacatccagaaggagagcaccctccacttggtgctccgcctcaggggtggcatgcagatctttgtgaagacattgactggcaagaccatcaccttggaggtggagtcgtctgacacaatcgataatgtcaaagccaagatccaggacaaggagggcattccaccggaccagcagcgcctgatctttgctggcaagcagctggaggatggccgtaccctcgccgactacaacatccagaaggagagcaccctccacctggtgctccgcttgcgaggtggtatgcagatctttgtgaagaccttgactggcaagaccataaccctggaggttgagagctccgacaccatcgacaacgtgaaggcgaagatccaggacaaagagggcatccccccagaccagcagcgtctgatcttcgccggcaagcagctggaggatggccgcaccctagcagactacaacatccagaaggagagcactctccacctggtgctccgcctccgcggtggtcagtaagccatggttcatttaagctgctgctgtacctgggtatctgcgtcgtctggtgccctctggtgtacctctatatggatgtcgtcgtctaataaacatctgtggtttgtgtgtcatgaatcgtggttgtggcttcgttggtttaatggacctgttgtgtcctctgtgttgtacccaaaactcttctgcagcagtatggcttgaatccttatgaagtttgatatttgaacttaaaagtctgctcattatgttttt

SEQ ID NO: 121314 - DNA, 793 bp, Zea Mays
cagcttctttccccaacctcatcttctctccttttgctcggaacgcacacaccgcccggtctccgatctccgatccccgatcccctcgtcgatccaagatgcagatcttcgtcaagactctcactggaaagactatcaccctcgaggtggagtcctctgacaccattgacaacgtcaaggccaagatccaggacaaggaaggcattcccccggaccagcagcggctcatcttcgctggcaagcagctcgaggacgggcgcacacttgccgactacaacatccagaaggagagcaccctccaccttgttctccgcctcaggggaggcatgcagatcttcgtcaagaccctcactggaaagactatcaccctcgaggtggagtcttctgacaccatcgacaacgtcaaggcgaagatccaggacaaagagggcatccccccagaccagcagcgtctgatcttcgccggcaagcagctggaggatggccgcaccctagcagactacaacatccagaaggagagcactctccacctggtgctccgcctccgcggtggtcagtaagccatggttcatttaagctgctgctgtacctgggtatctgcgtcgtctggtgccctctggtgtacctctatatggatgtcgtcgtctaataaacatctgtggtttgtgtgtcatgaatcgtggttgtggcttcgttggtttaatggacctgttgtgtcctctgtgttgtacccaaaactcttctgcagcagtatggcttgaatccttatgaagtttgatatttgaacttaaaa

SEQ ID NO: 121315 - DNA, 228 bp, Zea Mays
gccgacgccgatgcctcaacctcaacaaccgcaaccatggacggtgaggactgcaaaagagaccgcacgaatcgcattcctggtgggcacacacgcacacgtgctgcctggctaggactagctaggagtgggcgggtgaaagcgctgcgaaacttaaccgggatgcagcttgcggcctctaccatcatagctcgattcgatctctactgctgctagctgctgctgcaa

SEQ ID NO: 121316 - DNA, 1585 bp, Zea Mays
agacctgtgtacactcgtactcgtctcttcttcgccacacacacacacggctgctagtgtacacagaggcacagcagcaggaggatggccgtagtgccggcggcgccggtggttcttggagtggccatggtgctcgtcgtcctggccgccagcgccggcgcggccgggcagctcaggatggggttctacgccgagagctgcccgggcgtggagcgcgtggtgggcgacttcgtccggcagcacgtccgccgcgtgcccaccgtcgccgccgcgttgctccggctgcacttccacgactgcttcgtcaggggctgcgacgcctccgtcctgctcaactccaccgccggcagcgtggccgagaaggacgcgccgccgaacctgacgctgcgcggcttcgacctcgtcgaccgcgtcaaggcgctcgtcgaggatgcctgccccggcgtcgtctcctgcgccgacgtcctcgcgctcgccgcccgggacgcggtcgtcgccatcggcgggccgtcgtggcgcgtggcgacggggaggagggacggcacggtgtccgccatgcaggaggcgctcgacgacatccccaagcacaccatgaccttcccgcagctggccagcctgttcgccagcaaaggcctcggcgttcgtgacctcgtctggctctcaggcgcgcacacgatcggcatcgcgcactgctcctccttcgcggaccgcctgtacggctaccccggcggcggcgttggcgcggccggcaacgacacggccgacccggccctggacgcgacctacgcggccaacctgcggaggcgcaagtgccgggcggcgggcggcgggtacgcggaggacggcgtggtggagatggacccaggcagccacctgacgttcgacctgggctactaccgcgcgctgctcaagcgcaggggcctgctccgctccgacgccgcgctgctcaccgacgcggcggcgcgcgccgacgtcgagggcgtcgcggccgggcccgaggaggtcttcttccagctgttcgcgcggtccatggccaggctggcggcgctgcaggtcaagaccggcgccgagggggaggtcaggaggaactgcgctgtcgtcaacggcggctaatgcatgtagcttcttgcctttcttcttctttcccttcatggccattactgctagcgaatactgtgattttgctcttgcattttgggtgcttcacgctcgggtgcaattatcatgtcaaagaaattgttaccctcttgctccttttgttagagacttaatagaattgtttggactggcactagcactaccttcccggtttttaagtggtgattcgttgaagatggtgggcattgttttttttctcaaaaatgctggcagataggtgtatctcctacatctggtttgttgaagattaatattgatggttcctttgtccaagctaacagcatgggtggggttttgtgtctcgtgatcacagaagagacagtgtgttggcgcaggggcgggcaagttgctggacatacttgatgctcttgtggctgagacattagcctgctggaaggcatttgcaaatgttgtgactcatgaatga

SEQ ID NO: 121317 - DNA, 363 bp, Zea Mays
atgtccagagatagatcacatggattacatgagcaaccattcacggaaaagaacatacaaccagacctccagatctacaacgaacgctacaccaccaggggatcccgatctcagaggttaaacattcgactgaaaagaaaagcgtacgagaggataatgggggcacgagagaaggctgtgtataccggcgcggggtgggaacgaggtgcgcgatccggggaaccggcggagctcggcgtgtccgtgcgcgaagctgcatgtgtcgcgggaacagccgccgcgctgccacagcgcgcacaacttcgtcttgtaatgccgtccgcaaccgcagcagccagcaggtgcacgcggcagttactttga

SEQ ID NO: 121318 - DNA, 895 bp, Zea Mays
tgcagtgcagtccagtccagtccactgggcccctacacgacgacggggcgggccggcgcctgtggacgatggatggctatataaaccggccggctcggtgtccatctgccaacggcgccacggcggcgacgagaagtggcgagccccgagagcgggtttagttagaggctacgggcggtcgggcgcggcggcggcggcggccatgagcagcgggagcgagagcactaccgccagcaggtggcccgagctggccacgctgcgcgcgctggcgcgcgacgccgcggagcagcttcggctgccgcgggccggcacgtcggcgtcggcgtcgtcgccgtggcgcgggcgcgaggaccacctccacggccacggcaagacggccaaggtgatgcacctgctgctctggggacccaagtgaagcggcgagaggccaccgtaccgccgggctctcccgctggcgttgctcgttttgctctgcctgcaatccgccccgcacggactgtactgtacctatatatacacctacatactacgacgtgcacctgtactacgacgtgctgctgtaccatactaaatactagtgcgctgctgctcccttgccttcttgcttgcaccagccactccgcttttttgctcgaacgatcgactgctcgtgtcgcgtcgggccacggccggtcgtcagtttgggtgtgtccactccactgtaaagctccttttttgggtactccctgcatgccaaagttagcggacgtgtactaggtgtggttcggagcagcaggttgtattacttaccaccccctctgtgatgtaagaacgcgtgctgaaattatcatgtcgataccaagttatggcatatggattggataagaatgggaaaaaatatgatagattttgactt

SEQ ID NO: 121319 - DNA, 414 bp, Zea Mays
atgatgacgttgatgccggtgagctgctggaagaaggggatgagcagcgcgaacgtgagctggggcttgtacttgccgccgaagaagagctcccgccaggggcactgcacggccttggcgtcctcgctcgcggcggccaggtcgtcgaactcctcgcgcacgtcgccgacgccccggatctgggacagcgtcttgcgcgccgtggccgtgtccccgcgctcgacgagcgacgccggggtgtccgggatggcgagcgcgcccagcgcgatgacggcggccgggatggcgccgaacgtcacggggatgcgccagccccagccgcccgagaccttggacgccaggtagttggtcatgttcgccgtcaggatgcccaccgtgatcatgagctggaacaggatgttgagcatcccgcgc

SEQ ID NO: 121320 - DNA, 210 bp, Zea Mays
catacctttctcggccttttggctaagatcaagtgtagtatctgttcttatcagtttaatatctgatatgtggaccatgtgttcacttcgatattaaatgtattttttgtggggagggaccacaacagtggcttgccactgggttcttcgagcgtcgctcggccgttgcactacaggctgagccaggcgcgccccaaccaaagcgaaatt

SEQ ID NO: 121321 - DNA, 2754 bp, Zea Mays
tcctctccgccaccaatgctctcctccactcagctccccatccgcggaagaatcagattcgattccgcgacagccgacagtgacagaccgcattccaagccccccaaaatcgcatttccctctccgatcaaatcaaactcaaaccgacacacgactcacacggcttctccgcctccgcagatcgccgtcgcctactcgcgcccctccacgcgtcgatggccgccgcggacccgccaccgcgcgagaaggtcgtgcccacgctgaagcgcagcgccagcatcgaccggataccggtggacgcgcgccgcatcctgcaccgcctcgccggggacctctggggcggcgacatggaccccggcgcgctggccgtgtcccagctcaggggcgccatgaccaatgaggtcttccggatcacctggctcggcggcgaggccgagggcaacggcccgcgcaaggtgctcgtgcgcatctacggccggggcgtcgaggtcttcttcgaccgtgccgacgaggtccgcaccttcgagtgcatgtcgcgccacggccaggggcccccgcctcctgggccgctttgccaacggccgcgtcgaggagttcatcaactccagtgtacactacgcctctaccaccctaaatgcgtgatgtgtctgctcggatccaatccgcgattggtttttgtcatggctcactcgcgtgttgctcgcgtcctggccttgccaaaccctctccgccgcggatctgcgcgacccggtaatgtccgtcgtgatctgctgccgccatcaacgccctactcccctcctagatcccgtgatctgctacgaagctgccatcaatgccctcctcccccttcgctcagctccccctcgcgccttcgatccgctaccgtgacccgctgcgaggcggccatcaacgcccatgtcctccttcgcgcagctaccttcccaggatctcgggcgctccttcgtcgccatactttttggttcagcgggacgcccagcccgtagggcctaagcttttgctgatcacttcaagatggctctggactgtttcttcgctgtatggtttgttgtgggaaatgtgtgggtgttcgatggacattcttccgcccatgacgcacccaacctgtacaggtgtcggtgagaggtattcaagttggaattggaattgtaggttatagtccactagaagaggttttttttgtgcagtggagcaaaactagctgactcgctgtcagagcaagacttccgcaaggggaactcaaactattacctatatgtgcataatacatggttcaactatccttgcttttaaacatctccttgatctttgatacattttttggattttgctcaagtatttgacatatacaagggtcccatccacgatgcttggagcaaactgcttgatatatgcaaaatggaactatgcatatacgagcaaaatggaactatgcatagttccagttttctctgtctaaaataaccattaactgtagttgattaatgggcttgttcaagtacagtgacgagataattatttctctgtctaatcgtagttgctgaatcaataaggaaaaacgcaacagaccatgataataatgaggcattgttcctttaaacctttaccaataaatgtcgtgcgtgcctaaaatattgatcttgcattgattagaaaagcataatgtattcttaatttctatcttttcaaatttccagttatcagatttaatcacccctgcgtgttgtatactcgtataataggggttgcctcatgggaaacttggctgggccattgatgaggattttggttcgtttgaggcacttgtgtaaagaagatgaatgcagatggcgctgctttacaagggtctagatgggtggtatgtatattatgctttgtttatgtttatcgagaatagttgaaggtgtgttctgttgaccattaacctcatgcttctctaaagtggttagctttggataaagaggcaaaaaagctttcagttaaaactactaaaactacaactaatcaggtgaaacatgtcgtccatatctgtttgttcttcatatgatacaacatggctattcccaattatcattcttgaatcttgatcgaagtcgtgttagtgacaacttccctgtacctaggtgcccataggcaagcttaatagacacatgtcatctttcatgttgcaattgttgttccagaatgtgtccatctttaaaaggtaaggaattggttaggcttttacttccatggaattttttacttgctaaaatgggaacaagtggttggtgatgaaatgtagatctgctcctaaaaacttcgaagcaatcctgaggacatacatcagtaagtcattcattttgactgtgttgatatttgtagtatgcctttttggatagatggtgttgcattcctcttataaccatacttgctattttcttatatgattgaataaatatgattgtagtttactgttgttctcccgttatctgaatcttgactctaatcccttggtgagctcatatgggatataatgttgtagcattgagggtttcatcccaagttgtttacttcagtgctcgtgcatgtaccgaataaaactagaacagctattgactcatttcaccttttagatgattgtgtgtgtatgtcgtttcactttttattcatttgtgatccaatttggtgcatgtactgattgaatttgatccgtctgttaataaaatactaatgttttactatcccgtttaacac

SEQ ID NO: 121322 - DNA, 2766 bp, Zea Mays
ccgcggaagaatcagattcgattccgcgacagccgacagtgacagaccgcattccaagccccccaaaatcgcatttccctctccgatcaaatcaaactcaaaccgacacacgactcacacggcttctccgcctccgcagatcgccgtcgcctactcgcgcccctccacgcgtcgatggccgccgcggacccgccaccgcgcgagaaggtcgtgcccacgctgaagcgcagcgccagcatcgaccggataccggtggacgcgcgccgcatcctgcaccgcctcgccggggacctctggggcggcgacatggaccccggcgcgctggccgtgtcccagctcaggggcgccatgaccaatgaggtcttccggatcacctggctcggcggcgaggccgagggcaacggcccgcgcaaggtgctcgtgcgcatctacggccggggcgtcgaggtcttcttcgaccgtgccgacgaggtccgcaccttcgagtgcatgtcgcgccacggccaggggcccccgcctcctgggccgctttgccaacggccgcgtcgaggagttcatcaactccagtgtacactacgcctctaccaccctaaatgcgtgatgtgtctgctcggatccaatccgcgattggtttttgtcatggctcactcgcgtgttgctcgcgtcctggccttgccaaaccctctccgccgcggatctgcgcgacccggtaatgtccgtcgtgatctgctgccgccatcaacgccctactcccctcctagatcccgtgatctgctacgaagctgccatcaatgccctcctcccccttcgctcagctccccctcgcgccttcgatccgctaccgtgacccgctgcgaggcggccatcaacgcccatgtcctccttcgcgcagctaccttcccaggatctcgggcgctccttcgtcgccatactttttggttcagcgggacgcccagcccgtagatcgttgccctcaagaagtaatagtccatacaatacctggactcggcgcatgaggcctaagcttttgctgatcacttcaagatggctctggactgtttcttcgctgtatggtttgttgtgggaaatgtgtgggtgttcgatggacattcttccgcccatgacgcacccaacctgtacaggtgtcggtgagaggtattcaagttggaattggaattgtaggttatagtccactagaagaggttttttttgtgcagtggagcaaaactagctgactcgctgtcagagcaagacttccgcaaggggaactcaaactattacctatatgtgcataatacatggttcaactatccttgcttttaaacatctccttgatctttgatacattttttggattttgctcaagtatttgacatatacaagggtcccatccacgatgcttggagcaaactgcttgatatatgcaaaatggaactatgcatatacgagcaaaatggaactatgcatagttccagttttctctgtctaaaataaccattaactgtagttgattaatgggcttgttcaagtacagtgacgagataattatttctctgtctaatcgtagttgctgaatcaataaggaaaaacgcaacagaccatgataataatgaggcattgttcctttaaacctttaccaataaatgtcgtgcgtgcctaaaatattgatcttgcattgattagaaaagcataatgtattcttaatttctatcttttcaaatttccagttatcagatttaatcacccctgcgtgttgtatactcgtataataggggttgcctcatgggaaacttggctgggccattgatgaggattttggttcgtttgaggcacttgtgtaaagaagatgaatgcagatggcgctgctttacaagggtctagatgggtggtatgtatattatgctttgtttatgtttatcgagaatagttgaaggtgtgttctgttgaccattaacctcatgcttctctaaagtggttagctttggataaagaggcaaaaaagctttcagttaaaactactaaaactacaactaatcaggtgaaacatgtcgtccatatctgtttgttcttcatatgatacaacatggctattcccaattatcattcttgaatcttgatcgaagtcgtgttagtgacaacttccctgtacctaggtgcccataggcaagcttaatagacacatgtcatctttcatgttgcaattgttgttccagaatgtgtccatctttaaaaggtaaggaattggttaggcttttacttccatggaattttttacttgctaaaatgggaacaagtggttggtgatgaaatgtagatctgctcctaaaaacttcgaagcaatcctgaggacatacatcagtaagtcattcattttgactgtgttgatatttgtagtatgcctttttggatagatggtgttgcattcctcttataaccatacttgctattttcttatatgattgaataaatatgattgtagtttactgttgttctcccgttatctgaatcttgactctaatcccttggtgagctcatatgggatataatgttgtagcattgagggtttcatcccaagttgtttacttcagtgctcgtgcatgtaccgaataaaactagaacagctattgactcatttcaccttttagatgattgtgtgtgtatgtcgtttcactttttattcatttgtgatccaatttggtgcatgtactgattgaatttgatccgtctgttaataaaatactaatgttttactatcccgtttaacac

SEQ ID NO: 121323 - DNA, 2883 bp, Zea Mays
ctcaaaccgacacacgactcacacggcttctccgcctccgcagatcgccgtcgcctactcgcgcccctccacgcgtcgatggccgccgcggacccgccaccgcgcgagaaggtcgtgcccacgctgaagcgcagcgccagcatcgaccggataccggtggacgcgcgccgcatcctgcaccgcctcgccggggacctctggggcggcgacatggaccccggcgcgctggccgtgtcccagctcaggggcgccatgaccaatgaggtcttccggatcacctggctcggcggcgaggccgagggcaacggcccgcgcaaggtgctcgtgcgcatctacggccggggcgtcgaggtcttcttcgaccgtgccgacgaggtccgcaccttcgagtgcatgtcgcgccacggccaggggcccccgcctcctgggccgctttgccaacggccgcgtcgaggagttcatcaactccagtgtacactacgcctctaccaccctaaatgcgtgatgtgtctgctcggatccaatccgcgattggtttttgtcatggctcactcgcgtgttgctcgcgtcctggccttgccaaaccctctccgccgcggatctgcgcgacccggtaatgtccgtcgtgatctgctgccgccatcaacgccctactcccctcctagatcccgtgatctgctacgaagctgccatcaatgccctcctcccccttcgctcagctccccctcgcgccttcgatccgctaccgtgacccgctgcgaggcggccatcaacgcccatgtcctccttcgcgcagctaccttcccaggatctcgggcgctccttcgtcgccatactttttggttcagcgggacgcccagcccgtagatcgttgccctcaagaagtaatagtccatacaatacctggactcggcgcatgagtatgactaatcttctcagatcagatctgttagataaaaaaataaatgggaattgcttggcacttggcataattaaaagaattcattgcagtaaccaatctaacgttttatgtcctactgttctcatttgatagcagcatatctatacatgtcatcagaatcataaatactttgttggcaagttttctctgagctgcattctcctcgttgtagggcctaagcttttgctgatcacttcaagatggctctggactgtttcttcgctgtatggtttgttgtgggaaatgtgtgggtgttcgatggacattcttccgcccatgacgcacccaacctgtacaggtgtcggtgagaggtattcaagttggaattggaattgtaggttatagtccactagaagaggttttttttgtgcagtggagcaaaactagctgactcgctgtcagagcaagacttccgcaaggggaactcaaactattacctatatgtgcataatacatggttcaactatccttgcttttaaacatctccttgatctttgatacattttttggattttgctcaagtatttgacatatacaagggtcccatccacgatgcttggagcaaactgcttgatatatgcaaaatggaactatgcatatacgagcaaaatggaactatgcatagttccagttttctctgtctaaaataaccattaactgtagttgattaatgggcttgttcaagtacagtgacgagataattatttctctgtctaatcgtagttgctgaatcaataaggaaaaacgcaacagaccatgataataatgaggcattgttcctttaaacctttaccaataaatgtcgtgcgtgcctaaaatattgatcttgcattgattagaaaagcataatgtattcttaatttctatcttttcaaatttccagttatcagatttaatcacccctgcgtgttgtatactcgtataataggggttgcctcatgggaaacttggctgggccattgatgaggattttggttcgtttgaggcacttgtgtaaagaagatgaatgcagatggcgctgctttacaagggtctagatgggtggtatgtatattatgctttgtttatgtttatcgagaatagttgaaggtgtgttctgttgaccattaacctcatgcttctctaaagtggttagctttggataaagaggcaaaaaagctttcagttaaaactactaaaactacaactaatcaggtgaaacatgtcgtccatatctgtttgttcttcatatgatacaacatggctattcccaattatcattcttgaatcttgatcgaagtcgtgttagtgacaacttccctgtacctaggtgcccataggcaagcttaatagacacatgtcatctttcatgttgcaattgttgttccagaatgtgtccatctttaaaaggtaaggaattggttaggcttttacttccatggaattttttacttgctaaaatgggaacaagtggttggtgatgaaatgtagatctgctcctaaaaacttcgaagcaatcctgaggacatacatcagtaagtcattcattttgactgtgttgatatttgtagtatgcctttttggatagatggtgttgcattcctcttataaccatacttgctattttcttatatgattgaataaatatgattgtagtttactgttgttctcccgttatctgaatcttgactctaatcccttggtgagctcatatgggatataatgttgtagcattgagggtttcatcccaagttgtttacttcagtgctcgtgcatgtaccgaataaaactagaacagctattgactcatttcaccttttagatgattgtgtgtgtatgtcgtttcactttttattcatttgtgatccaatttggtgcatgtactgattgaatttgatccgtctgttaataaaatactaatgttttactatcccgtttaacac

SEQ ID NO: 121324 - DNA, 2966 bp, Zea Mays
aaccgacacacgactcacacggcttctccgcctccgcagatcgccgtcgcctactcgcgcccctccacgcgtcgatggccgccgcggacccgccaccgcgcgagaaggtcgtgcccacgctgaagcgcagcgccagcatcgaccggataccggtggacgcgcgccgcatcctgcaccgcctcgccggggacctctggggcggcgacatggaccccggcgcgctggccgtgtcccagctcaggggcgccatgaccaatgaggtcttccggatcacctggctcggcggcgaggccgagggcaacggcccgcgcaaggtgctcgtgcgcatctacggccggggcgtcgaggtcttcttcgaccgtgccgacgaggtccgcaccttcgagtgcatgtcgcgccacggccaggggcccccgcctcctgggccgctttgccaacggccgcgtcgaggagttcatcaactccagtgtacactacgcctctaccaccctaaatgcgtgatgtgtctgctcggatccaatccgcgattggtttttgtcatggctcactcgcgtgttgctcgcgtcctggccttgccaaaccctctccgccgcggatctgcgcgacccggtaatgtccgtcgtgatctgctgccgccatcaacgccctactcccctcctagatcccgtgatctgctacgaagctgccatcaatgccctcctcccccttcgctcagctccccctcgcgccttcgatccgctaccgtgacccgctgcgaggcggccatcaacgcccatgtcctccttcgcgcagctaccttcccaggatctcgggcgctccttcgtcgccatactttttggttcagcgggacgcccagcccgtaggtactcaccccgaacactctgcctctcgttgtcctgagttgtattgcaaagagaattaatctggcgagatgtgtttcttgcattcagatcgttgccctcaagaagtaatagtccatacaatacctggactcggcgcatgagtatgactaatcttctcagatcagatctgttagataaaaaaataaatgggaattgcttggcacttggcataattaaaagaattcattgcagtaaccaatctaacgttttatgtcctactgttctcatttgatagcagcatatctatacatgtcatcagaatcataaatactttgttggcaagttttctctgagctgcattctcctcgttgtagggcctaagcttttgctgatcacttcaagatggctctggactgtttcttcgctgtatggtttgttgtgggaaatgtgtgggtgttcgatggacattcttccgcccatgacgcacccaacctgtacaggtgtcggtgagaggtattcaagttggaattggaattgtaggttatagtccactagaagaggttttttttgtgcagtggagcaaaactagctgactcgctgtcagagcaagacttccgcaaggggaactcaaactattacctatatgtgcataatacatggttcaactatccttgcttttaaacatctccttgatctttgatacattttttggattttgctcaagtatttgacatatacaagggtcccatccacgatgcttggagcaaactgcttgatatatgcaaaatggaactatgcatatacgagcaaaatggaactatgcatagttccagttttctctgtctaaaataaccattaactgtagttgattaatgggcttgttcaagtacagtgacgagataattatttctctgtctaatcgtagttgctgaatcaataaggaaaaacgcaacagaccatgataataatgaggcattgttcctttaaacctttaccaataaatgtcgtgcgtgcctaaaatattgatcttgcattgattagaaaagcataatgtattcttaatttctatcttttcaaatttccagttatcagatttaatcacccctgcgtgttgtatactcgtataataggggttgcctcatgggaaacttggctgggccattgatgaggattttggttcgtttgaggcacttgtgtaaagaagatgaatgcagatggcgctgctttacaagggtctagatgggtggtatgtatattatgctttgtttatgtttatcgagaatagttgaaggtgtgttctgttgaccattaacctcatgcttctctaaagtggttagctttggataaagaggcaaaaaagctttcagttaaaactactaaaactacaactaatcaggtgaaacatgtcgtccatatctgtttgttcttcatatgatacaacatggctattcccaattatcattcttgaatcttgatcgaagtcgtgttagtgacaacttccctgtacctaggtgcccataggcaagcttaatagacacatgtcatctttcatgttgcaattgttgttccagaatgtgtccatctttaaaaggtaaggaattggttaggcttttacttccatggaattttttacttgctaaaatgggaacaagtggttggtgatgaaatgtagatctgctcctaaaaacttcgaagcaatcctgaggacatacatcagtaagtcattcattttgactgtgttgatatttgtagtatgcctttttggatagatggtgttgcattcctcttataaccatacttgctattttcttatatgattgaataaatatgattgtagtttactgttgttctcccgttatctgaatcttgactctaatcccttggtgagctcatatgggatataatgttgtagcattgagggtttcatcccaagttgtttacttcagtgctcgtgcatgtaccgaataaaactagaacagctattgactcatttcaccttttagatgattgtgtgtgtatgtcgtttcactttttattcatttgtgatccaatttggtgcatgtactgattgaatttgatccgtctgttaataaaatactaatgttttactatcccgtttaacac

SEQ ID NO: 121325 - DNA, 1093 bp, Zea Mays
gatggctctggactgtttcttcgctgtatggtttgttgtgggaaatgtgtgggtgttcgatggacattcttccgcccatgacgcacccaacctgtacaggtgtcggtgagaggggttgcctcatgggaaacttggctgggccattgatgaggattttggttcgtttgaggcacttgtgtaaagaagatgaatgcagatggcgctgctttacaagggtctagatgggtggtatgtatattatgctttgtttatgtttatcgagaatagttgaaggtgtgttctgttgaccattaacctcatgcttctctaaagtggttagctttggataaagaggcaaaaaagctttcagttaaaactactaaaactacaactaatcaggtgaaacatgtcgtccatatctgtttgttcttcatatgatacaacatggctattcccaattatcattcttgaatcttgatcgaagtcgtgttagtgacaacttccctgtacctaggtgcccataggcaagcttaatagacacatgtcatctttcatgttgcaattgttgttccagaatgtgtccatctttaaaaggtaaggaattggttaggcttttacttccatggaattttttacttgctaaaatgggaacaagtggttggtgatgaaatgtagatctgctcctaaaaacttcgaagcaatcctgaggacatacatcagtaagtcattcattttgactgtgttgatatttgtagtatgcctttttggatagatggtgttgcattcctcttataaccatacttgctattttcttatatgattgaataaatatgattgtagtttactgttgttctcccgttatctgaatcttgactctaatcccttggtgagctcatatgggatataatgttgtagcattgagggtttcatcccaagttgtttacttcagtgctcgtgcatgtaccgaataaaactagaacagctattgactcatttcaccttttagatgattgtgtgtgtatgtcgtttcactttttattcatttgtgatccaatttggtgcatgtactgattgaatttgatccgtctgttaataaaatactaatgttttacta

SEQ ID NO: 121326 - DNA, 2163 bp, Zea Mays
atgtaagagaccatgcagccactccagtattcatacaacaatagaaaatcagaaatgctacacatacctttacttggtgttagtcttgtgctattgctcttcttggcctctcctgccagctcctgcaaagaagaggagaagacatccctcttcgagttcctcaatggtctctctcaagcctctggcctcaccagttcatggcagaatgacacaaactgctgtctatgggagggtgtcatttgcaatggagatagaactatcatagacatctcactagctgctatgggccttgaggggcacatatcaccctcacttggcaatctcaacggcctgttgaagctcaacctatctggcaacttgctctccggtggactcccatcgacactgttgctctccagcagcattactgtcctcgatgtcagctttaacaagctcagtggagaattccatgagctgcaatccacgcctaacagcgcgatgaaggtaatgaacatctcgagtaacttcctcacaggatattttccatccaccacattggagggcatgaagaatctggctgctctcaatatgagcaataatagctttgctggggaaattccgagcacaatttgtgttgacaaaccattctttgtggtccttgaccttagctacaaccagttcgttggtagaataccctcagagcttggtaattgctctggtttgaaagtgcttaaggctggccagaaccaactcaatgggacccttccatctgagatcttcaatgttacctcactagagcacctctctttccctaacaaccatttgcaaggaacacttgatcctgagtgtataggaaaactcagaaatttggtcatccttgatcttgggtggaatggactaaatggcaagatcccgaattctattgggcagctcaagaggctggaggagcttcacttagacaataacaacatgtctggagagctgccaccagcccttagcagttgctcaaatctcacaaccatcatccttaaagacaacaacttccaaggagatctcaaccatgtcaacttctccaccctgtctaatctaaaatttttagattgcaggtcaaacaaattcactggaacaattccagagagcctctactcctgcagcaaccttattgcgttgcgattatctttcaacaaccttcatggtcaattttcatcagggataaacaatctcaagtccctcagattcctagctctcgctcacaatagttttacaaatatcagaaatacacttcaaatcctcagtaagtccaggacactcactctcgtgctgattgggggcaacttcaagcatgagaccatgccagatgatgatgaatttcatggctttgagaatctcatgggtcttggcataaataaatgtccactgtatgggaagttacctaactggctggctaagctcaaaaacttgcgagctttactattagacgataacaaactcagtggaccaataccagcctggattaatagcttaaaccttcttttctatctagacatatccaataacaatctcactggtgacataccaacagcactgatggagatgccaacgcttgaggcagctcactctgccccaataatacttaagtttcctgtctacctggcaccgtttcttcaataccgtacaaccagtggcttccctaaaatgttgaatctaggaaacaacaaattcaacggtataattcctccagagattggccagctacaggcactccttacactcaacttgagcttcaacaacttacatggggagatcccacaatcagtcggcaacctcaccaatctgcaggtgctagacttatcctacaataatttgaccggtgaaatcccttctgtgctggagaggcttcacttcctttccaaattcaacatttccagcaacgatctagaagggcctgttccaactgggggccagtttagcacatttccagactctagcttttttggaaacccaaagctgtgcggcgctacgctgatgcgccactgtaattcagcagatgcagttccagtcaccgatgtctccacggaagagtacgccgataaggtcatctttgcggtggcctttggtatgttcttcggtgtcggagtgttgtacgaccagatgttcctgttcagatacatttattttggctga

SEQ ID NO: 121327 - DNA, 543 bp, Zea Mays
cgtcaatcagtaccgtccgtatcatctgacggctcacgtgcgtcgaccccgccccccgttctgcccactcctgagtcccctccaattctcaatttctcacgtgaggtaggcttttgtcgcctctgtgccgccgcctttgttcccgtccgcaccatcgtcggcccgaaggcatcatccatcggtcgtcgctgtcgcccccccaaccttcgaggcaaggacatgaacaagagagactcacgcaaattgacagggagggatcatccgtccatcatccatggacaaccttaaggagcagcgaggccatgaggatgcgagcgccaacaacgcctggatgactgtgccgacgttcggggactagaacacgaagaacagggcactgctggactactccatggacttctccaagatccgcgagatgcgcaagcgcaagcagaacaagagcctcggtggcagcaacgacctcctcgcccacgcgcaggcctacaagccatgacgcagcgaccagccgtaggccaacaacgcccagctcaagctcagccgccc

SEQ ID NO: 121328 - DNA, 1365 bp, Zea Mays
agcgtattcaaacacgcccgctagcatgatagcccatttcttaggtttcggcgcctcagtgggacgaaactcactggctccctctcctcccccagtccgcggcgctcgctccgttcacctcggccgcggcgaccttcgaggcgacgagacgatgctgcggctctcccgcttcctcccctccgcctgcaggaggggttttgatctaaaagaatctctttggagtggttcattgacattccaacaagctgtttccactgcagcaacaaatcttgatgggaacttgtctggcaaaaagtttgcaagttataccgtgttcaagggaaaggctgcactttctatacatcctatactgccaagtttcagcaaattagaatccggaggatctcgagtgagcaaaaatggatcagtaatgctgaccttctttcctgctgttggacaaaggaagtatgactatacaaagaaacagctctttgctctgtcacctactgaagttggaagcctgataagtcttgggcctgctgaatcctgtgaatttttccatgacccatccatgaaatcaagtaatgaaggaacggtgaaaaaatcgctgtcgatcactccacttggcagtgacagtggatactttgttaatataaccgttgtgaacagtgcagagaggactaatgatcgtctttcagtccctatcacaaaagctgagtttgctgtgatccgcacaactctgagttttgcattgccacatattatgggttgggaccaggctttaaccaatcaccatccagctccagctcctccagctagcagcaggcccacggtagagcgtccacacccggattccgaatgggagaggtgaagctccctgctagaggatggaggcctttggctttgggcaccagtacaagttgctgctgcaaagtatgtgtgcttgaacaatctcttagaacactgtctgccgaccgcattagatttctggaacttaaggctagatgaagcacgatgaaccattgtatttgttcagtgcatgtataactatatcacgcctactaaaggcatatttctagtcgagtcgagctgttttacgcttgcttgtcgacgatgtctgtgcttggttacgcatcggcattctacgcatcacacgccaggatgcattaagagaaaccaaggaaatgggcattttagattaaagtacaaaacgatagcattgataaacaaccaacagcagtgtaccatattcctcttatccaccactatacataagcgtacactgaagaggagtcgacagaaccacttgttgtatgaactgggtaagctggcacgtcagcttacagtccagcagaaggtgatggtgccacagaagtttacaggccg

SEQ ID NO: 121329 - DNA, 2209 bp, Zea Mays
aaaatcaaaaacttaaaagaaatcacgggtagcgcctccggtctcccactctcgctgaagtagggtcccccgtttcaaattgacaccccgtccaacgcaaacgagagggaaagccgaagcgagtgcgagtgcggccctcagctgctgcagttgctcctgctcgtttctgcctgctcgtttctgcggcggcggcggcggcggcggcctagcacctgagcggggcggcgagaggggacggagatggatatcgcgcgggcggctgctggcgtggcctgctgcaaggagcaccagaggatctacgccgagtggttcgccctggccgacccagatggcgacggccgcgtcacgggcgccgatgccaccagcttcttcgccatgtccgcgctttcacgcgccgatctcaagcaggtgtgggcgatcgcggattccaggcggcaggggtacctcggattcgccgagttcgtcacagcaatgcagctcgtgtctctggcccaagcagggaacgagatcacacaggacagtctgaaacgtgaagacctgagcaccttggatccgcctgtgatggaaggtgttgatgagctactggctagatccaaggctgttgtgaagagagttcacccagatgacaatggcaccactcaggcccaagcaccttccatatatcactggtttggttcaaaatcagcacagaaggtgcagatgcctctgactgctgttacctctgtaattgatggcttgaaaagactctatgttgaaaaactgaagcctttggaagtcgcctacagatacaatgatttttctcacccattattgacaaacagtgattttgaagcaaagccaatggttatgctcttgggtcagtattcaacagggaaaacaacattcattaagcatctgctaaagacaagctacccaggagctcacgtcggaccagagccaacaactgatagattcgtagttgtcatgtcaggatctgatggaaggaccattcctggcaatactattgccgttcaagccgacatgccattcactggtcttacaacctttgggggagcgtttctgtcgaagtttgaatgctctcagatgccacatcccctgctagagcatatcacctttgtggacactcctggtgttctctctggggaaaagcaacggacccaacgtagctatgatttcactggtgtgacctcatggtttgctgccaagtgtgaccttatccttcttctgtttgaccctcacaagcttgatataagtgatgagttcaaacgtgtcatttcatctttacgtgggcatgatgacaaaatacgcgtagtgttgaacaaggccgaccaagttgacacacaacagcttatgagagtgtatggtgcattgatgtggtctcttgggaaagtgctaaatactcctgaggttgtgcgtgtgtatatcggatcatttaatgataagccagtgaatgattcagctgttgggccaattggaaaagacttgtttgagagggagcaagatgacctcctctgtgacctgaaggacattcctaagaaagcctgtgatcgacgggtcaatgagtttgttaagcgtgcccgagctgccaagatccatgcttacataattggccatctgaagaaggagatgcctgcaatgatgggaaaagccaaggctcagcagcgactcatagacaacttagacgaggagtttgcaaaggtgcagagggaataccatctccccgccggagacttccccgacgtcgagcacttcaagcaggtgctgggcgggtacagcatcgacaagttcgagaagctgaagccgaagatggtgcaggcggtggacgacatgctcgctcacgacatcccggagctcctcaagaacttgcggaacccgtacgagtgaactgatctgacctctcgcgtccgtcggttgtaaaaagattatcttagctgtcacgtccggtgatggcggacggacgaggcagacgttcctgggagggagatgcctagacggttacgggtcactacttctagctgtccgcagctgtgccaaaaccgagaggacacatgagggttcagatcggacagccacagcgcatagcctgtgttggtttcggcgtcagtgctctctgcacgcgaaggagctgctgcggcaccgttgccgtgccgtctcgctgtgatacattttccctcgtgacgagatgaaaagagagttgcaggcggcagaa

SEQ ID NO: 121330 - DNA, 1414 bp, Zea Mays
gaccgacgcggcgcccgggtcgtggcgggcccggcgtgtcagcctccgcggggccgtgccgaccaaacaggcgcgggcgcgggaggaaaggtaaggaaaggccactcggggggcggggcggggcctggccaagccaagccaaacgcggagtcgccgaggaggaggaggaggacaaggcacaacaagccgcacgagaaggcaggcagggcagggcagggcagggcagaggggaagaaagaggaggaggagaagaagcgcgtggaggagcgggatgcggcgggcgaggctgccgccggtcccggtcccgacggcgccgggggacgcggggccggaggtgaagtaccgcggggtgaggcggcggccgtcggggcggtacgcggccgagatccgggacccggctaggaagaccccgatctggctgggcaccttcgactcggccgaggccgcggcccgcgcctacgacgccgcagccaggaccatccgcggcgccgccgcgcggaccaacttcccctccgcgcccacctccgccgcggtcgcgccgccgccgccactccccgcctcaaccgccgccgcggcgggcgcggcgacgtccagcctcagcagcaccgtggagtcctggagcggcggcggcggcggcggcgcgcccgccgggatcctccgcgccgcggccgccccggccgccgaggaggactgccgcagctactgcggctcctcgtcgtcggtcctctgcgaggacggcgcgtcgggtccgggctgcggcgacgaggccgccgcgccgccgccgttgccgttcgatctgaacgtgccggacccggcggccgacgacatggactggcgctgcgacacgctgctccgcctctagccgccgccgccgcaggcccgcaaccactcctccccagactggtgcccccaggatatctcgctcgcttcgcgtggccggccgacgctgatccggcggaacggagcggagcaatgcgtgcgtgcgtaccccaccccgccatgaagtgctatcgtgctattttgctattctctccatagaaattgataattttagtctctctctctttttttttaccactgccaagactcggtaattactctgtgataatgtgaataactcattatgtaatccgtggggagtggagggagcctggtctcgcgaaaccttcctgtctcctcctgctgtgtgtgtatctgtagcagcagcagcagcagcacgatgtaatactgtctgtcttgctgtaattctcaagagataatggaattaagagtgatttacagacaccttgcttctgtgtacttactggctgctacttacttcgattgtgatatagggcgtgttcggctggctgcaagccgacactgttgcagctgtttggattgctgcagctgcaatccatagagagaaaaatac

SEQ ID NO: 121331 - DNA, 235 bp, Zea Mays
caggaaagtgggtggggagtgggacacacacattgcctagctagtaccctacttgtagctagacagctgctgcgcggcctgccatcagacgtcctcctatcagtagcacacaacacaacacaggcaaggcaggcagtacagatccaactacagagtacagacacgctgcacaaccacgagtacacacacagactactacgagtacacatgcatcgaccctactaggctaccgtcc

SEQ ID NO: 121332 - DNA, 2283 bp, Zea Mays
atggccaccgccaccgcttcccgcctcgccgtcctcgcgccgcggccgtcgcgccccgcaccggggcgccggcgacatgctcctgctaccggtcgtggtcctcccctccctcgcagtctctacgcagcgccccgcggccgcgttctctgcctcgcggcccccgcgcccgctgctgcctccaccaccgacgccggccaggaccgcctccagaaggtgcccatttcgaatatcaggaacttctgcatcatcgcgcacattgaccatggcaagtccacactggcggataagctgctggagcttactggcacggtgcagaagagggagatgaaggagcagtttctggataacatggacctggagagggagagagggatcaccataaaattgcaggcagctcggatgcgctacgtcatgaataatgagccttactgcctgaatttaattgatacaccagggcatgttgatttctcgtacgaggtttcccgctctctagctgcctgtgagggcgcacttcttgttgttgatgcttctcagggtgttgaagctcagacgttagcgaatgtgtaccttgcattggaaaacaaccttgaaatcataccggttctaaataaaatagatcttcctggtgctgaacctgatcgtgtcgcacaggaaattgaagagataattggattggactgtcgtgatgcaattcggtgttcagcaaaggaaggtataggcatcactgaaatattagatgcccttgtgaccaaaatccccccaccaaaagatacatcaaaagatcctctcagggctcttatatttgacagctattatgatccatacagaggtgtaattgtgtacttccgtgttattgatggcagtatgaagaaaggggacaagatatgttttatggccaatggaaaggaatatgttgctgaagaaattggtgtactatccccaaatcagatgcaagtttctgaactatatgctggcgaggttggttatctctctgcttctataagatcagtagcagatgccagggttggtgatactattacacattattcaaaaaaagcacatcatgctttaccaggatattctgaagccactccaatggttttttgtggcttgttccctatagatgctgatcagtttgaggagttgcgggaagcgctggaaaaacttcagctaaatgatgctgccctaaagtttgaaccagaatcttctagtgccatggggtttggcttcagatgtgggttccttggtcttctccatatggaaatagttcaggaaaggcttgagagggaatacaacttgaacttaataattactgcaccaagcgtggtataccgtgtgaactgtgctgatggtgaaactgttgaatgttcaaatccatccttgcttccggagcctgggaagcggaggtctatagaagaaccatatgtgaagattgaaatgcttacaccaaaagattatattggttcaataatggagctgactcaagacagaagaggtgaattcaaggaaatgaacttcatcacagaaagcagggccaaacttatttatgagctaccactagcagagatggttggcgatttctttgatcaactgaaatcacgaagtaaaggatatgctagcatggaatattcagttgttgggtacagagaaagccaactagtaaagctggatatacaaatcaacggggatcctgttgaggcgttgtcaacaattgtgcacagggataaggcatatgctgttggaagggcacttactcaaaagctcaaggaacttatacctcggcaaatgtttagagttcctattcaagcatgtattggcacaaaggtgattgcaagcgaagccctgtctgccatcaggaaggatgtcttatcaaaatgctatgggggtgatatatcaaggaaaaagaagttgctgaagaagcaggctgaaggaaagaaaaggatgaaggcaataggaagggttgatgtccctcaagaagcattcatggccgtgttgagactggaaaaggaggtgctatgaaagtgctcatgaacctttgtgtctccgtaaattaaagacctcttcctgtgcgccactcacaagtatagtcagacgagagctttgagacaacaggcattcactatggttcaacctgtccgctctggaccataggaaccagtcaagcacagatcactcccagaacaaaagcaggtaaatctggcattcgttcgctattttttgcttttttatgtgtcaggctatgatggtaaaacaatcatgtcgccacagagttttgccaggcac

SEQ ID NO: 121333 - DNA, 1605 bp, Zea Mays
ctaccccatcttcgtcaaccttcataatccttgtgtatacggtataccgtacgtagaatgacatgctaagattattattcatttaaacaggaatatgttgctgaagaaattggtgtactatccccaaatcagatgcaagtttctgaactatatgctggcgaggttggttatctctctgcttctataagatcagtagcagatgccagggttggtgatactattacacattattcaaaaaaagcacatcatgctttaccaggatattctgaagccactccaatggttttttgtggcttgttccctatagatgctgatcagtttgaggagttgcgggaagcgctggaaaaacttcagctaaatgatgctgccctaaagtttgaaccagaatcttctagtgccatggggtttggcttcagatgtgggttccttggtcttctccatatggaaatagttcaggaaaggcttgagagggaatacaacttgaacttaataattactgcaccaagcgtggtataccgtgtgaactgtgctgatggtgaaactgttgaatgttcaaatccatccttgcttccggagcctgggaagcggaggtctatagaagaaccatatgtgaagattgaaatgcttacaccaaaagattatattggttcaataatggagctgactcaagacagaagaggtgaattcaaggaaatgaacttcatcacagaaagcagggccaaacttatttatgagctaccactagcagagatggttggcgatttctttgatcaactgaaatcacgaagtaaaggatatgctagcatggaatattcagttgttgggtacagagaaagccaactagtaaagctggatatacaaatcaacggggatcctgttgaggcgttgtcaacaattgtgcacagggataaggcatatgctgttggaagggcacttactcaaaagctcaaggaacttatacctcggcaaatgtttagagttcctattcaagcatgtattggcacaaaggtgattgcaagcgaagccctgtctgccatcaggaaggatgtcttatcaaaatgctatgggggtgatatatcaaggaaaaagaagttgctgaagaagcaggctgaaggaaagaaaaggatgaaggcaataggaagggttgatgtccctcaagaagcattcatggccgtgttgagactggaaaaggaggtgctatgaaagtgctcatgaacctttgtgtctccgtaaattaaagacctcttcctgtgcgccactcacaagtatagtcagacgagagctttgagacaacaggcattcactatggttcaacctgtccgctctggaccataggaaccagtcaagcacagatcactcccagaacaaaagcaggtaaatctggcattcgttcgctattttttgcttttttatgtgtcaggctatgatggtaaaacaatcatgtcgccacagagttttgccaggcacatataggaaattcatatgtcaaagtgcatcatgtagtccaattccttgtaacgcatgctacagagacttgtttctacagttgaatataccttgtaaggctgggaccaacagatcgtgcatatgcaaaacaagaggttt

SEQ ID NO: 121334 - DNA, 951 bp, Zea Mays
gtcgccggcgcctcgcctctccactctccttgcgccgctgtttcgcgagccacggccgagaagagaagcggggtggcgagttggagacttggagatgtccgccgggcccggtggagacagttttgtggcttttgtaaatgggccatggcccaatagaaacgaacggagtcctggtccgttttagtgccgaaaaccctaatccccgtggccattttgggcacgtagccgcctcgctttctcctcttccgccccaccccggtgaggcgctgatccatcgcctcggacagcggctccagaacctccgcgttgcaggtgagctcgcctccaaactcatctcctttgggcacgtacgcgtctgatagttgcagtggttggggttggcttcgtgctattcagaaacacagtagcgagaactattcggtggggccgaagatggtgtcgctgaaggtgccaaagcgcctcgccgcaagcgttctcaagtgtgggaaaggcaaagtgtggcttgaccccaatgaagttagtgagatctccatggcgaactcccgtaagacttatccgctagctccccccctccgattaattgctcactgggttggggttgtatggatctctgggtgaggtggatgctttatctggtttcatatattggatcaatggctgcattattcttttctactatcattttgcagtgtcgtttacctacggccaccattgaaaacactattggctgtagctgttccagtttgttacgtgtgtaccagtgcagtttctaatttgtatgtgatactagttaacctgacgcaattatagatatcttgaaataacaagcccagtttatgattatttcattttatgtactgcttgtattgtttatgtatatgtgattgtagtttttggctaggactggtatttgcacatgagcttatattttacatttacttgacacaatgg

SEQ ID NO: 121335 - DNA, 1356 bp, Zea Mays
gtcgccggcgcctcgcctctccactctccttgcgccgctgtttcgcgagccacggccgagaagagaagcggggtggcgagttggagacttggagatgtccgccgggcccggtggagacagttttgtggcttttgtaaatgggccatggcccaatagaaacgaacggagtcctggtccgttttagtgccgaaaaccctaatccccgtggccattttgggcacgtagccgcctcgctttctcctcttccgccccaccccggtgaggcgctgatccatcgcctcggacagcggctccagaacctccgcgttgcagttgcagtggttggggttggcttcgtgctattcagaaacacagtagcgagaactattcggtggggccgaagatggtgtcgctgaaggtgccaaagcgcctcgccgcaagcgttctcaagtgtgggaaaggcaaagtgtggcttgaccccaatgaagttagtgagatctccatggcgaactcccgccataacatccggaagttggttaaggatgggtttatcatcaagaagcctcagaaaatccactctagatctcgtgcaagaagggcgcacgaggctaagcagaagggacggcactcaggatatgggaagcgtagaggtaccagggaggctaggctccccaccaaggtactgtggatgaggaggatgcgcgtgctgaggcgcctgctccgcaagtaccgcgaggccaagaagatcgacaagcacatgtaccacgatatgtacatgaaggtcaaaggtaactcgttcaagaacaagagggtgcttatggagagcatccacaagtccaaggctgagaaggccagggagaagacgctctccgatcagttcgaggccaggcgcgccaagagcaaggcgagtcgcgagaggaagaatgctaggagggaagagaggctggcccagggcccaagagaaataccaccaccagtctcagccacagctcccactaccggggcaccgaagaaagcaaagaagtgaagtattgcaacaaagctgcagctttctagtccagtacttcgtaattttggagcgccctgatcaattttgctgttatacagcttcgtgtcttttattttccaaaagctaccgtacctggattgttagagatgtttacgcagagtttctttggaagaggatccgctcaaaaatgtttatttggatcagatggtctcaggaaatgtggttatgttttatggaaatttatcctgttgctatttgattgatcaattgacgatggtgccccattatttgaggtgatctctcttgattgaagggccggtagtgctaatggttcaggtccatggatttccagtttttcacacgataag

SEQ ID NO: 121336 - DNA, 1350 bp, Zea Mays
gtcgccggcgcctcgcctctccactctccttgcgccgctgtttcgcgagccacggccgagaagagaagcggggtggcgagttggagacttggagatgtccgccgggcccggtggagacagttttgtggcttttgtaaatgggccatggcccaatagaaacgaacggagtcctggtccgttttagtgccgaaaaccctaatccccgtggccattttgggcacgtagccgcctcgctttctcctcttccgccccaccccggtgaggcgctgatccatcgcctcggacagcggctccagaacctccgcgttgcagtggttggggttggcttcgtgctattcagaaacacagtagcgagaactattcggtggggccgaagatggtgtcgctgaaggtgccaaagcgcctcgccgcaagcgttctcaagtgtgggaaaggcaaagtgtggcttgaccccaatgaagttagtgagatctccatggcgaactcccgccataacatccggaagttggttaaggatgggtttatcatcaagaagcctcagaaaatccactctagatctcgtgcaagaagggcgcacgaggctaagcagaagggacggcactcaggatatgggaagcgtagaggtaccagggaggctaggctccccaccaaggtactgtggatgaggaggatgcgcgtgctgaggcgcctgctccgcaagtaccgcgaggccaagaagatcgacaagcacatgtaccacgatatgtacatgaaggtcaaaggtaactcgttcaagaacaagagggtgcttatggagagcatccacaagtccaaggctgagaaggccagggagaagacgctctccgatcagttcgaggccaggcgcgccaagagcaaggcgagtcgcgagaggaagaatgctaggagggaagagaggctggcccagggcccaagagaaataccaccaccagtctcagccacagctcccactaccggggcaccgaagaaagcaaagaagtgaagtattgcaacaaagctgcagctttctagtccagtacttcgtaattttggagcgccctgatcaattttgctgttatacagcttcgtgtcttttattttccaaaagctaccgtacctggattgttagagatgtttacgcagagtttctttggaagaggatccgctcaaaaatgtttatttggatcagatggtctcaggaaatgtggttatgttttatggaaatttatcctgttgctatttgattgatcaattgacgatggtgccccattatttgaggtgatctctcttgattgaagggccggtagtgctaatggttcaggtccatggatttccagtttttcacacgataag

SEQ ID NO: 121337 - DNA, 1322 bp, Zea Mays
gtcgccggcgcctcgcctctccactctccttgcgccgctgtttcgcgagccacggccgagaagagaagcggggtggcgagttggagacttggagatgtccgccgggcccggtggagacagttttgtggcttttgtaaatgggccatggcccaatagaaacgaacggagtcctggtccgttttagtgccgaaaaccctaatccccgtggccattttgggcacgtagccgcctcgctttctcctcttccgccccaccccggtgaggcgctgatccatcgcctcggacagcggctccagaacctccgcgttgcagaaacacagtagcgagaactattcggtggggccgaagatggtgtcgctgaaggtgccaaagcgcctcgccgcaagcgttctcaagtgtgggaaaggcaaagtgtggcttgaccccaatgaagttagtgagatctccatggcgaactcccgccataacatccggaagttggttaaggatgggtttatcatcaagaagcctcagaaaatccactctagatctcgtgcaagaagggcgcacgaggctaagcagaagggacggcactcaggatatgggaagcgtagaggtaccagggaggctaggctccccaccaaggtactgtggatgaggaggatgcgcgtgctgaggcgcctgctccgcaagtaccgcgaggccaagaagatcgacaagcacatgtaccacgatatgtacatgaaggtcaaaggtaactcgttcaagaacaagagggtgcttatggagagcatccacaagtccaaggctgagaaggccagggagaagacgctctccgatcagttcgaggccaggcgcgccaagagcaaggcgagtcgcgagaggaagaatgctaggagggaagagaggctggcccagggcccaagagaaataccaccaccagtctcagccacagctcccactaccggggcaccgaagaaagcaaagaagtgaagtattgcaacaaagctgcagctttctagtccagtacttcgtaattttggagcgccctgatcaattttgctgttatacagcttcgtgtcttttattttccaaaagctaccgtacctggattgttagagatgtttacgcagagtttctttggaagaggatccgctcaaaaatgtttatttggatcagatggtctcaggaaatgtggttatgttttatggaaatttatcctgttgctatttgattgatcaattgacgatggtgccccattatttgaggtgatctctcttgattgaagggccggtagtgctaatggttcaggtccatggatttccagtttttcacacgataag

SEQ ID NO: 121338 - DNA, 1674 bp, Zea Mays
gtcgccggcgcctcgcctctccactctccttgcgccgctgtttcgcgagccacggccgagaagagaagcggggtggcgagttggagacttggagatgtccgccgggcccggtggagacagttttgtggcttttgtaaatgggccatggcccaatagaaacgaacggagtcctggtccgttttagtgccgaaaaccctaatccccgtggccattttgggcacgtagccgcctcgctttctcctcttccgccccaccccggtgaggcgctgatccatcgcctcggacagcggctccagaacctccgcgttgcagtggttggggttggcttcgtgctattcagaaacacagtagcgagaactattcggtggggccgaagatggtgtcgctgaaggtgccaaagcgcctcgccgcaagcgttctcaagtgtgggaaaggcaaagtgtggcttgaccccaatgaagttagtgagatctccatggcgaactcccgccataacatccggaagttggttaaggatgggtttatcatcaagaagcctcagaaaatccactctagatctcgtgcaagaagggcgcacgaggctaagcagaagggacggcactcaggatatgggaagcgtagaggtaccagggaggctaggctccccaccaaggtactgtggatgaggaggatgcgcgtgctgaggcgcctgctccgcaagtaccgcgaggccaagaagatcgacaagcacatgtaccacgatatgtacatgaaggtcaaaggtaactcgttcaagaacaagagggtgcttatggagagcatccacaagtccaaggctgagaaggccagggagaagacgctctccgatcagttcgaggccaggcgcgccaagagcaaggcgagtcgcgagaggaagaatgctaggagggaagagaggctggcccaggtacgataatgttgtatcgcttgttacctgcatctttttctgagcatgggtgcagccactgcttcataatgttctgggagaacatctttaatttttttttctatgggcatgggctagtgaaatttgtcgattgctgcaatcttaatcggttgagaaaaaaatggcggatcgatgcgctaacgcgtcaattgctaggttgatttttaggcatgttttacatcgtccttggccgaattgttagtggctacacgtttggtatgtttatagataggttttacgaattcatttggaaatcttgtttacatgtacgctgttattgtatagggcccaagagaaataccaccaccagtctcagccacagctcccactaccggggcaccgaagaaagcaaagaagtgaagtattgcaacaaagctgcagctttctagtccagtacttcgtaattttggagcgccctgatcaattttgctgttatacagcttcgtgtcttttattttccaaaagctaccgtacctggattgttagagatgtttacgcagagtttctttggaagaggatccgctcaaaaatgtttatttggatcagatggtctcaggaaatgtggttatgttttatggaaatttatcctgttgctatttgattgatcaattgacgatggtgccccattatttgaggtgatctctcttgattgaagggccggtagtgctaatggttcaggtccatggatttccagtttttcacacgataag

SEQ ID NO: 121339 - DNA, 2970 bp, Zea Mays
atggtgtcgctgaaggtgccaaagcgcctcgccgcaagcgttctcaagtgtgggaaaggcaaagtgtggcttgaccccaatgaagttagtgagatctccatggcgaactcccgccataacatccggaagttggttaaggatgggtttatcatcaagaagcctcagaaaatccactctagatctcgtgcaagaagggcgcacgaggctaagcagaagggacggcactcaggatatgggaagcgtagaggtaccagggaggctaggctccccaccaaggtactgtggatgaggaggatgcgcgtgctgaggcgcctgctccgcaagtaccgcgaggccaagaagatcgacaagcacatgtaccacgatatgtacatgaaggtcaaaggtaactcgttcaagaacaagagggtgcttatggagagcatccacaagtccaaggctgagaaggccagggagaagacgctctccgatcagttcgaggccaggcgcgccaagagcaaggcgagtcgcgagaggaagaatgctaggagggaagagaggctggcccagggcccaagagaaataccaccaccagtctcagccacagctcccactaccggagactgcatccgcaatccagattcgacatcgatatccacgcttcagaaaaggtatccaataattgaaagaccaaccaacctgcttcgagatactggagctgatcaaagcattctgagctctgtgccggctggtccatggaagatagacaccatgcggccactccactgccactcctcacggaacaacagcagagcagcaggtggaccatggtcggcacgatcgcttgctcttgctctgctgccactgctctccctgctctctcccaccgggtgtgcgagcagcacggagcaggacggggtctccctcctcaagtttctccaggggctctcgcaggactccggcctcgccacttcttggaggaacggcacagactggtgcacgtggaagggcatcacctgcgacgccgacggcgccgtcacagaagtctcgctggcttccctgggcctcgagggccgcatctcgccggcgctcggcgagatgcctagcctgctgcgcctcaacctgtcgctcaactccctctccggcggcctccccgcggagctactgctgtccagaagcttactcgccctcgacgtcagcttcaacaacctgaacggtgatctccccgagctgccatctacgttcgccggacagggacggcagcctatcaagttactcaacgtctcaagcaaccagctcacagggcaaatcccgccgctcacactggcgggcatgaccaagctcgtcactctcaacgtgagcaacaacagcctcaccggagagatccccagcaccatctgcgccagaacgccgttcctgtcggcgctcgacctcagcttcaaccagctcaacggaagcgtgcccgtgaacctcggccgttgctccgcgctacgagtgctcaaggccggccacaatgaactccacgggactctgccggacgagctctacgacgcgacctctctcgagcacatctccttcccaaacaaccgtctgcagggagcgctcagcgccgagcgtctagccgagctcaggagtctggtcgtcctcgacctcgcggagaacggactcacgggcggcatcccggactctatcgggcggctcgagaggctggaggagcttcgcctagagcacaacagcatgtccggcgagctgccaccggctctgagcaggtgctcgagtctcagaaccgtcattctccggagcaacggtttccatggagacctgaacagcgtcgacttctcaaccttgcccaggctaaaagttctagatttcatggacaacaacttcacaggcacagtccctgagagcctgtactcgtgcagcgacctcaccgcgctccgactgtcctctaacggcttccatggccagctctcgccggggatcggcaggctcaagtcgctcaggttcctgtccctgacaaacaactcgttcacgaacgtcacgaacgcgctccaggtcctcaagagcgcgccgagcctcacgactctgctgatcggcgccaacttcagaggcgaggcgatgccggaggacgagacgatcgaaggctaccggagcctccaggtcctgtccctggcggactgctcgctgtcaggagaaatccctcgctgggtgtcagggctcgagaacctgcgagagctgttcctgtccagcaaccggctcaccggcccgatcccggcctggctcagcggcctgagcctcctgttcgttctggacgtgtccaacaacagcctcgcgggggagatcccgacagcgctggcggatctaccgatgctgaggtccgagacgaccgtggacgacgacgacgacgacggtgggtcttcgagccagtccgcgttcccgctgcccgtctacatggccgcgtcgctccagtaccacagggcgaactactgccccaagctgctgaacctcggcgacaacaggctcactggcgcggtgccgccggagatcggccgcctgaagggactcacgcagctcaacctgagcttcaacagcctgcgtggggaggttccgcaggccgtcggcaacctcacgaacctcgaggtgctggacctgtccagcaaccgcctgacgggcaagatccccagggcgctggagagcctccacttcctctcctacttcaacgtctccaacaacgacttggacgggcctgttccggcaggaggccagttctgcacgttcccgagctctagcttcgcggggaacccggggatgtgcggccctatgcttgttcgccggtgcagcgctgcttctgtagaggcaggtcttcctgcgcccgttcgcgacgcaggactgtgtggcggtgacgtcgtcgtcttcgctgtgacctttggtgtcttcgttggagtaggcgtgctgtatgatcagatggtactgtccagatattttgggtag

SEQ ID NO: 121340 - DNA, 3520 bp, Zea Mays
ggccacggctgtcaatggacgaccaccaagaggcgcctcctcctccttctacttctacggttctacccccattgcttgctcctccctgatcagacacagaccattggcacatacttcgtctagacgggagtagtgcagtgcaggacacacagcttcagcgcggcatctggttcgttcccatgctagttccaattccaacacgaagccatgcagccactccacgtttcatgcaagagaagccggagccggagccggaaccggaacacactgcacgtacctccttccaccggcctcgcgccctcgcccttgcgctgctgctcatctccatctcctgggagtcctgcgccagcgcctgcggggagccggagagggcgtccctgctccagttcctcgcggagctctcttacgacgccggcctcaccgggctctggcgaggcaccgactgctgcaagtgggaagggatcacctgcgacgaccaatacgggacagccgtcaccgtcagcgccatctcgctgcctggcaggggcctcgaggggcgcatctcgcagtccctcgctagcctcgccggcctgcggcgcctcaacctgtcctacaactcgctgtccggtgacctgccgctcggactggtgtcggcgtccggcagcgtcgccgtcctcgacgtcagcttcaaccagctcagcggagacctgccgtctccagcgccgggccagcggcctctccagctacaggtactcaacatctcgagcaactcgttcacggggcagctcacgtccacggcgtgggagaggatgcggagtctggtcgcgctgaacgccagcaacaacagcttgaccgggcagatcccggaccagttctgtgccacagcgccgtccttcgccgtgctcgaactcagctacaacaagttcagtggcggcgtgcccccagggcttgggaactgctccatgctcagagtactcagggctggccacaacaacctcagcgggactctcccccgtgagcttttcaacgctacatcgctggaacgcctctccttctccagcaactttttgcatggaacagtcgatggcgcacatgtagccaagctctccaatctggtcgtccttgacctaggagacaacagtttcggcggcaagatacctgataccataggtcagctcaagagattgcaagaacttcatctggactataacagcatgtatggggagctgccaccagccctgagcaactgcacggatctcataactctagaccttaggagcaacggtttcagtggcgaactctcccgggttgatttcagcaacatgcccagtctaagaaccatagatctcatgctgaataacttcagtggcacgattccggagagcatatactcctgtagaaacctgactgcgctgcggctagcttcgaataagttccatggacagttatcagaagggctaggcaacctgaagtccctctcgttcctgtcgcttacaaacaacagcctttcaaatataacaaacgcgcttcagatactgaggagctccaagaacctgaccacgcttcttcttggaatcaatttctttgaagaaaccataccggatgatgccgtgatctacggttttgagaatcttcaggttctggacatcggaaactgcctcctgtcaggagaaatacctctctggatatcgaagttagtaaatctggagatgttgttcttagatggcaatcgactcagtggacccataccaacctggatccacacactggagtaccttttctacttagacatatcaaacaacagccttacaggggaaattccgaaagaagtagtgagtataccaatgctaacttcagagaggactgcagctcatttggacgcaagcgttttcgatctgccagtctatgatggtccatcacgtcagtaccgcataccgattgcttttcctaaagttctaaatctaagcagcaacagattcacaggtcagattcccccagagattggtcagttgaaaggcctcctttcacttgatatcagctccaacagcttaaccggaccgatccccacatctatctgcaatctcacaaacctgctggtgcttgatttatccagcaatgatctcacgggtaaaatcccagttgcattggagaatctgcacttcctttccacattcaacgtttctaacaatgacctggaagggcctattccaaccggtggccaatttggtacatttcagaactccagctttctagggaatccgaagctgtgcggctttatgatcggtcgtcgatgcgattcagccgatgtgcctctggtatccacaggaggaagaaataagaaggccattctcgcaattgcatttggtgtgttctttgcaatgattgccattcttttgttgctgtggcgtctccttgtctccatcaggataaaccgtttaacggcccaaggtagaagggaggacaacggatatcttgaaacaagcacattcaactccagcttggagcatggagtgatcatggtgccacaaggaaagggaaatgaaaacaagctcacgttctctgacattgtaaaagccacaaataacttcaacaaggaaaacatcattgggtgtggtggttatggtctagtctataaggctgaactacctgatggctgcaagcttgctatcaagaagctcaatgatgaaatgtgcttgatggaaagggagttcactgcagaggttgaagcactgtccatggcacagcacgaccatcttgtgccactgtgggggtactgcatccaggggaactcgagattcctcatatactcctacatggagaatggcagcctagatgattggcttcacaacagggatgatgatgccagcacatttcttgactggccgacgaggctaaggattgcgcaaggagcaagccgtggcctttcttacatccataatgactgcaaacctcagattgtgcaccgtgacatcaaatgcagcaacatcctgctagacaaagaattaaaagcttacgttgcagactttggactgtcaaggttgatccttcccaacaaaacccatgttacaacagagttggttggcactctaggttacatcccccctgagtatgcgcacggatgggtggccactctgagaggtgatatatacagcttcggagttgtccttcttgagctgctcacaggcttgcgacctgttccggtcctgacaacatcaaaagaacttgtcccatgggtgctggagatgagctctcagggaaagctggttgatgtcctagatccaacactctgcggcacagggcatgaagagcaaatgcttaaggtgcttgggcttgcttgcaaatgtgtgaacaataaccctgccatgagaccacatatcatggaagtggttacatgcctggaaagcatcaacgttggcctgcaggcacaaaagtcagtcaagacaatacagttagcgagttatacatgagaatattgtaattaaatgcatagagcacacgtatctttaacaagaggtactgattttgcgtccaactagtgttt

SEQ ID NO: 121341 - DNA, 246 bp, Zea Mays
aatccaatccattgcagcgcgcagtgtcgacctgcggcatagcaggaggcttggagtgtccctcggcctgtccgatttcaacacgcccgccccccgtacgtacgaacctcaggagtcaggacagcctcccttgtcgcccaagggaggatccgattcaacggtggtatttcatcgaacagcctgagtgcgctgcttccgggacggcggctccttgttccgcgcccaagcccaaaggatcgatgctca

SEQ ID NO: 121342 - DNA, 987 bp, Zea Mays
gttgaccccttccttccatgggaggctgggcagggctaccaaaccgagtagccccccgatgaatggataagccccttcctcagccgctcgttgcttctcagtccgacagaacagcacgtgaaagcccaggcctccctccctccctctccccacctgctggaatccgcggccgctgcctgcaagggtgaccttgcttgagcccgtcttccttcttcctcagctaggcacccgtgcccatcttcagtccacctagccatgcctacgacgatggcggcggcggcggcagcgtctgctccaagctcgctccgcgtttcgcgccaggggacgatcgggggaggccatgtcctctacagcaggtctcagagggctgccactgtctccgccagagcttccatgaacataacgtgctgcgcgaaccagacgcagacggcgcagcgcaagtcgtattcggggacgacctctccgccgtcaggttcagtgaaagagaaggtgaagccgaggctcgacgacgggggcgtcgggtttccgccgttccggttcgggggaggcggaggaggaggcggcggcggcggcagcagctcgtccggcgggttcatcctcttcgtggtcgtcctgctcctggattacctcaaggagttcgagaggaacctgcagaacgggccacggaggagcggcggtggctacgacgacgggctggcgccacagtagattcctctctctttctcggtgtgtggtttgaattttggaagagaacgtgtgctacgactctacacgaccatgtgttgcagagatgcttcggtgttcgttggtgtgatctctctctctcttttttttttttcctacaaaagacagtttttctcgagggctcatgtgaggactagaaattttagccagtcgaacgaatgccttgagatcacacaatgaaactcattggcgcttcgaaagtttgaataaatttcaaagaatctcctcagtccctgtttggat

SEQ ID NO: 121343 - DNA, 1182 bp, Zea Mays
atggaacacactgatattgcggagttggaacatagtgatattgcggagatggaacacactgatattgctgagttgcaggctgacattgtggatgaggcaacttttcttgattgctcgagtattgtcaacctggttgctggagaggagaccgaggtggtcaatactgaagatggtcttggttgtgaggatgatggtgatgttgacaaagtgttgcatgactctgtggatgacaccattcttattgattgctcaagtgagaatgttgaaatggagaaggcaggaaacgtcacacgtgagatgcctgagaaccaagctgcattggatgaggatgttgataaaccgaatgaagtggttatcggtgacatgccccaagacacagtgacagataaagttgttcaggaggaaagggaagtactgataactgatgagatgcaacaggggacagctggaatgcatgatgagatcgaggatgatcagtttgaatctgtttttgttcaagctgatcgagtagtcactgttgacaacctactggaacaagtgatatatcgtgaaattactgtggatgagaacacaacacttatagttggtgagaggcaacagagcacgaatgcaatggatgaggatgttgtagaggaccattctgaaactgatggtgatcattccaatgaacacatagaagcggtaactactgacaaagttccagaactcaagctgattgaagatatttttgttcaatctgatcatgcagttgctgctgacaacctaccaaaacaagtgagagattgtgaaattaccttggagaccacatcactgatagttgatgagaagcaacagatcatggttacagtggatggagatcttgtcaaggatgattctgaaacagataatgttcatgacgatgaacatatggaagtggtaactgctgacgaagtgcttgaggacacagggataactgttgaagatgttgaggagaagcaaaagagcacagttacagtggataaagatatggaagcgtcaactactgatgaagtactagaactcacagaggcagattacgaagttgttgatgagaagcaacagagcacatatacaatgaatggatgcattgagaatgatcatttcaaaaaccatgttgctcatgctgatgaaaagaaggaagttgttgctactgatgtgccataa

SEQ ID NO: 121344 - DNA, 369 bp, Zea Mays
ctgcccccgcctctaccccgcccgcctgcatacgcccgtccgcccgccatccagccgcacgccgccatcgccgcgaacgccgcgaaccgccatcccgcccgcacgcaatcccagccgcgagatactacggagagcgcagcggcagcggcgatgccatcgcacgcggatctggaccgccagatctcgcagctgcgggattgcaagttcctgcctgaggcggaggtcaaaacgctatgcgagcaggccaaggcgatcctcatggaggagtggaacgtgcagcccgtgtgctgccccgtcactgtctgcggcgacatccactgccagttctacgacctcatcgagctcttccgcatcggtgagtccctcccg

SEQ ID NO: 121345 - DNA, 265 bp, Zea Mays
gacgggaggatcacggcggcccaaggagacggctagacggtcggtggacgccgccgagacgtggggcggcgccgtcgcgtattgaaatggaggaggatcactcggtgatactaatatctgaaggtgctattaaaagcatcaaacttagcctctctaccggagaagagatatgcacatactccataaacgagtgcccagtgacccatcctagccagcttggaaatccgttccttgggttgccacttgaagctgggaagtgtgaatc

SEQ ID NO: 121346 - DNA, 1665 bp, Zea Mays
atgcggacactgtttatcagcaaagggtcaggtttttcatctcgcagcgttctgacaggagatccatatattgggctaggtgttgtagggcttccttctgaagttgcaaagagaatgacattcgaagagcaggtaactgacataaacattaacagattgcaagacgtggtagacaagggactctgtttgacctacagagatggtcaagctacatatgccatcactgttggatcaaaagggtacacaacacttaaagttggtcagactatcagtcggaggatagttgatggggatgttgtgtttcttaacaggccacccagcacacataagcattctctccaagctttctacgcatatgtgcatgatgaccatacagtcaaaatcaatcctctcatgtgtggccccttttctgctgactttgacggggattgcgtacacatatattatccacaatcgcttgctgcaaaagctgaagccttggagctttttagtgttgagaggcaactcattagttcgcacagtgggaaggttaatctccagctaggtaacgactccttggtagctatgaaggctatgtctcatacaaccatgttacacaaggaattagcaaaccagttggcaatgtttgtgccattttcacttcttgctcctgctgtaatcaagccagttccatcttggacaatatcacagatagtgcaaggtgcatttccagctaacctgacttgccaaggggacacacacttggttagggacagcacaatcataaggctggaccttggcaaagaatctgttcaggactcattccctgatttggtgtcctccatccttcgtgagaagggtccaaaagaagctctgcaatttctgaatgtgttggagccattgttgatggagtttttacttcttgacggtttgagtataagtctgcgggattttaatgttcccaaggctttattggaggaagcacaaaaggacattcgaaatcagtcccttattcttgagcagtctaggtgctctacaagtcaattcgtagaattccgagtcgaaaacaatttgaaaaatgtcaaacagcagatttcagattctgttgggaaattctctgaccttggtctgctgattgatccgaaaaaggaagcctcaatgtcaaaagtagttcaacaagttggttttgttggcttgcaactgtatcgtgaaggcaagttgtattcaagacgcttggtagaggactgcttcacaaactttgttaataaacacttggccattggagatgagtatcctccagaagcgtatggtcttgtccaaagttcatattttcatggtctcaatccttatgaagagttgatacatgctatatccactagagaagctatgatccgctcctctagaggtctgtcagaacctggaactttgttcaagaatttaatggccatcttgagggatgtagttatatgttatgatggaactgtgagaaacatttgtagcaattctatcattcaacttaagtatggggaagatgatgaaactgattcttcaagtgttgtacctcctggtgaacctgtgggtgtcttagccgccacagctatctcgaaccctgcatacaaggctgtcttggattcctcccaaagtaacaatgcttcatgggagtcaatgaaggtagtaatgttataa

SEQ ID NO: 121347 - DNA, 828 bp, Zea Mays
gcacttgcagtacaaagttgtcttaagagagtcacacttggggattgtgctactgatatctgcattgagcatcagaagcaaataaatttagatggaacatctgaagctgccccaactcttgtaggacatattcaccttgacaaggggcatttagaaaggataaacattagtactcaagacattctccaaaaatgtcaagaagtttctgggagatttggaaagaagaaaggacacctttgccacatctttaaaaaaattacttttgctacttgtgattgttcattcactcagatgccaatcgatggaaagctacataaggttccatgtgtgcagtttgctttttctgatgacattgtactatccgagtctattgagagagcagtgaatgtgatagctgactctgtctgctcagtgcttttagatacaattattaaaggtgatcctcgaattcaagcggcaaaagttatctgggttgaatcagatgcagcatcttgggtaaaacacacacggaaggtatcaaagggcgagtcagcattagaaatcattgttgaaaaagatgatgctgtaagcaatggtgatgcctggagaacagcaattgatgcctgcttacctgtacttaacctcattgacacacggaggtctattccatatggcattcaacaagtgagggaacttattggcatctcatgtgccttcgatcaagtggtgcagcggctttcaacgactgtaaaaatggttaataaaggagttcttaaagaccatttgatacttgtggcaaacagcatgacatgcactggaaatttgattgggttcaacattgctggctac

SEQ ID NO: 121348 - DNA, 2558 bp, Zea Mays
gtcatcttttcaaattctctggaatgaaaatcagctgaaaagcaacaaggagtatggggatgggttgtacgatttcttagcattggtcaggactgaccaagaaaagacagactacatgttcttggacgatgttgactatcttgtagaggagaatgcagcagatgacatgtgcttatctcctgagccagatgggacccttggtaagcctacctttgaggataattttgaagagcaaaatattcagaaaggcagctcatgggaaattggcataacaacgaactcaagttgggaacagaatgctagtgttgcgaatgattctggtgactggggaggctggagtagtggaggtggagctgctgcaaagccagcagatcaagataattcatgggaagtgcatgctaaggtgcaggacaattccaccactgattggggaggctggagcgttgagaagccaacaggtgaggcaactgtatctggagaaccagctgaaacagatacttgggctgataagggtgctaaaatggaatcagatgcaggtgatggtaattgggaaaagtccagcactcctgaggcatcaaagaaaaatgactcatcagaaaatacatgggacaaaagaaaaggagatggaggtgatggtgcgtgggggaacaggtctgatgatggccatggcaattgggagcatcccagcaattggaatgggcagagtttggatgtagatcaggacacatggggaaacgccaggggaaaaaagaaggcagatggtaactactgtcaatgggaggagcagccaagcaattacaaacagaagaagacaaatgctgatcatgattcctcctataacaatgtgatgccgtcatcagaaattgcttggaatgctggagatggaactggaagaccaaatgccaagtctaatgcagaatccagttggggtgaggaagataagatggagtctgacgatcatccgaaagtcccaaaagaatcagacacatggaatacagggagatcaaatgaaagtccatgggataacactgatgcactgcaggattcctgggttaagagcgcagctcgcaataacaacactcaggatggttcatgggataaagtagtatctatgaaggatcttgattcactccaagattcatggagtaaggcgacaatccagacgaatgatgcacagaatgattcttgggacaatgtggcaaaaaatgccccggattctgccgcagaagactcctggggggctgcaacaccagcggagacaactgattctggtaacaaggagtggaaatcagatggatggggggcaaagtctggtaactggagcagccaaagaaataatcctgggagacccccaaggagaccagatgagaggggtccacctccaccaagacaacggttcgaactaacagttgcggagaagaacattcttctagaagttgaacctattaaattacgtgtgagaagcatcttccgtgaagcatgtgacggtgttagacttaatccagaagacgagaagtttatcctggagaaagttcttgagcaccacccggaaaagcaatccaaggtgtctggtgaaatcgactacctaacggtcaacaagcaccagactttccaggacactcggtgctttttcgtggtctccacagatggatcccaggcagatttctcctacctgaagtgcctggagaactttgtgaggaagagctacacggaggacgccgacacattctgcatgaagtacttaaggccccgtcgcaggcaggcaccaccagctgatgttgggacagcatcaggcgccccggatgaggttccaccgtcaaccgcagctgagacagagcaaggcactcctccagcccctcaggcagaggttccacaagagacttggggttctcccgcagtgcctctggaaggaggaactcacatcgccggaccagactcaacaggcgacgctgtgatcctaggggagcagcacgatctgactccggcttctccagctgtggcaccacaagtggcttctgagccagacacaaccgacggcacggggcttctaggaaaggctccgcaagctgactggggacccagattcgacgctgactgatatttaggctgtgtgaagctgccgcatgtaaaagccagacctgtgctctgagcaagggagcattcccttgctaagtcgtcagttaactccccttgacttcatctggagaggtggacaggtagtagcggcaaacattctagcccttagcggccgcttgctcgtcctcgtccgtttcgtctcgccctgatgggaaccatgtaaatccttgggaacaaagctaccccctgctgcctttaccgtatctagttggaccttccccactgttggaatctgtgagtccgtctgctgttaaatttttgatggtttctgggctgtggcttgccagcggtgatgccaaactctggaaacctagggatttgtttggtgcggtcgtttggttgtcaggtcgatcagcaaatgtatgcctttgtcctccagatatgtgcttgttgagctagtagatagtgttacattgcgtgcc

SEQ ID NO: 121349 - DNA, 1673 bp, Zea Mays
aagtctcagtgcgctctgcctcgccacttcgccagtcgtcactcgtcaccaccgtcccgcccccgcgccgtcccacccttgctcccactcgttgcgccgcgccgcgcgatgcaggcccgcgtcgtcgtcttccccgtcaagggccgcgcctggtgcttcgccctcccgcgcgcctccgccgcagcgcccgctgctgatggcgccctcccgcgcccgaccctgagggacctctggcgcggcatctcctccgggtcccgcacggcgccggagaaggccgaggcggtcgtcgacttcgtcgctgacaagatgaacagggcgtgggtcgggttcgggagcgcgccggaggggtcgatgaagagccggatccacagcttcgggctgaagctgctgtcccgggtgaggccgtcggaggtgctcctgaagtccgtcaccaaggacgtgagcgcgctcgagatcgtgcatccggcgagcataaattctcgtcttgtgcgtcgacgtttgcggcatattgctgttaggggtgcatcagttcacaagaaatttctgtatggctcggtttgtttgcttccagttactagtgttttcatggtaggtttacaatcattttttggggtggtggtttcatcgacaactaataattcaaaacaattctgtcagttgaagggtttgatattctcttcagatattatcattttagatttattgctaattttactgtgtcaagttttggctaagggtcaaagaatgtgactatattcttcactattccacagtttctattttacatacttgtataagtggtgttaacttatgagctataacacgatgcaaatgtcttctacttgtttttttttctcgattgcaggtactaccgttaccaaacattccattcttttgggtgctatttcgtgcttattctcattggagagctctacagggaagtgagaggctcgagttactagtttctgactgctcagataagtggaaagttcttgaggagaagattaattcagtaaaggatggcaaacccagtgaaaatgcaaggaattctccttggaagctgcggccatcagaaaagcttgacaggtttcttgagggtagaaacttggatgaaggtttggattgtgataccattttgagtatatgccaggagtacgatttggacaagatcgatgttctcaagtacagggatcttctgtagccacatccagattgtttctctgaggtttatacgtttaaattcttctgctagtgagatcaagatgaagggtacaagagttgcatgaacccactaaccattggcggtcaaatgagttcttttaaatagcttcagattttcttgttatgtaccaaaccggtctgccactagtgcaatgatctcagaaacaaagaggacatcttatgaaactatagaagcccagggcagttgttcccaccgtgcaaatagagattgctagctgccaactttcccccgtcagccatcacaaattttagttgggatcaatgaacgacaaatgcaaagagcagggttgaaaattgagattggccatccgtacatgcttctctctctctctctctctctctctcttgtttgtggctctcaatctatctttggttgtatttgaatcttgtactgggatccaatgcatagccttctcgatctggagggattc

SEQ ID NO: 121350 - DNA, 1378 bp, Zea Mays
cgccacttcgccagtcgtcactcgtcaccaccgtcccgcccccgcgccgtcccacccttgctcccactcgttgcgccgcgccgcgcgatgcaggcccgcgtcgtcgtcttccccgtcaagggccgcgcctggtgcttcgccctcccgcgcgcctccgccgcagcgcccgctgctgatggcgccctcccgcgcccgaccctgagggacctctggcgcggcatctcctccgggtcccgcacggcgccggagaaggccgaggcggtcgtcgacttcgtcgctgacaagatgaacagggcgtgggtcgggttcgggagcgcgccggaggggtcgatgaagagccggatccacagcttcgggctgaagctgctgtcccgggtgaggccgtcggaggtgctcctgaagtccgtcaccaaggacgtgagcgcgctcgagatcgtgcatccggcgagcataaattctcgtcttgtgcgtcgacgtttgcggcatattgctgttaggggtgcatcagttcacaagaaatttctgtatggctcggtttgtttgcttccagttactagtgttttcatggtactaccgttaccaaacattccattcttttgggtgctatttcgtgcttattctcattggagagctctacagggaagtgagaggctcgagttactagtttctgactgctcagataagtggaaagttcttgaggagaagattaattcagtaaaggatggcaaacccagtgaaaatgcaaggaattctccttggaagctgcggccatcagaaaagcttgacaggtttcttgagggtagaaacttggatgaaggtttggattgtgataccattttgagtatatgccaggagtacgatttggacaagatcgatgttctcaagtacagggatcttctgtagccacatccagattgtttctctgaggtttatacgtttaaattcttctgctagtgagatcaagatgaagggtacaagagttgcatgaacccactaaccattggcggtcaaatgagttcttttaaatagcttcagattttcttgttatgtaccaaaccggtctgccactagtgcaatgatctcagaaacaaagaggacatcttatgaaactatagaagcccagggcagttgttcccaccgtgcaaatagagattgctagctgccaactttcccccgtcagccatcacaaattttagttgggatcaatgaacgacaaatgcaaagagcagggttgaaaattgagattggccatccgtacatgcttctctctctctctctctctctctctcttgtttgtggctctcaatctatctttggttgtatttgaatcttgtactgggatccaatgcatagccttctcgatctggagggattctag

SEQ ID NO: 121351 - DNA, 1335 bp, Zea Mays
cgccacttcgccagtcgtcactcgtcaccaccgtcccgcccccgcgccgtcccacccttgctcccactcgttgcgccgcgccgcgcgatgcaggcccgcgtcgtcgtcttccccgtcaagggccgcgcctggtgcttcgccctcccgcgcgcctccgccgcagcgcccgctgctgatggcgccctcccgcgcccgaccctgagggacctctggcgcggcatctcctccgggtcccgcacggcgccggagaaggccgaggcggtcgtcgacttcgtcgctgacaagatgaacagggcgtgggtcgggttcgggagcgcgccggaggggtcgatgaagagccggatccacagcttcgggctgaagctgctgtcccgggtgaggccgtcggaggtgctcctgaagtccgtcaccaaggacgtgagcgcgctcgagatcgtgcatccggcgagcataaattctcgtcttgtgcgtcgacgtttgcggcatattgctgttaggggtgcatcagttcacaagaaatttctgtactaccgttaccaaacattccattcttttgggtgctatttcgtgcttattctcattggagagctctacagggaagtgagaggctcgagttactagtttctgactgctcagataagtggaaagttcttgaggagaagattaattcagtaaaggatggcaaacccagtgaaaatgcaaggaattctccttggaagctgcggccatcagaaaagcttgacaggtttcttgagggtagaaacttggatgaaggtttggattgtgataccattttgagtatatgccaggagtacgatttggacaagatcgatgttctcaagtacagggatcttctgtagccacatccagattgtttctctgaggtttatacgtttaaattcttctgctagtgagatcaagatgaagggtacaagagttgcatgaacccactaaccattggcggtcaaatgagttcttttaaatagcttcagattttcttgttatgtaccaaaccggtctgccactagtgcaatgatctcagaaacaaagaggacatcttatgaaactatagaagcccagggcagttgttcccaccgtgcaaatagagattgctagctgccaactttcccccgtcagccatcacaaattttagttgggatcaatgaacgacaaatgcaaagagcagggttgaaaattgagattggccatccgtacatgcttctctctctctctctctctctctctcttgtttgtggctctcaatctatctttggttgtatttgaatcttgtactgggatccaatgcatagccttctcgatctggagggattctag

SEQ ID NO: 121352 - DNA, 1959 bp, Zea Mays
cgccacttcgccagtcgtcactcgtcaccaccgtcccgcccccgcgccgtcccacccttgctcccactcgttgcgccgcgccgcgcgatgcaggcccgcgtcgtcgtcttccccgtcaagggccgcgcctggtgcttcgccctcccgcgcgcctccgccgcagcgcccgctgctgatggcgccctcccgcgcccgaccctgagggacctctggcgcggcatctcctccgggtcccgcacggcgccggagaaggccgaggcggtcgtcgacttcgtcgctgacaagatgaacagggcgtgggtcgggttcgggagcgcgccggaggggtcgatgaagagccggatccacagcttcgggctgaagctgctgtcccgggtgaggccgtcggaggtgctcctgaagtccgtcaccaaggacgtgagcgcgctcgagatcgtgcatccggcgagcataaattctcgtcttgtgcgtcgacgtttgcggcatattgctgttaggggtgcatcagttcacaagaaatttctgtatggctcggtttgtttgcttccagttactagtgttttcatggtactaccgttaccaaacattccattcttttgggtgctatttcgtgcttattctcattggagagctctacaggtttgtgaaattagtcctacatagcgaaagtgcctctagcgtaatggttaaggcttccgagtaccacctccaggtctcgggttcgatccccctcggggccaatttcgtgcatggttaaaaaaatcccctcgttgtgtcccgcccgctcctggttacgtcctgcgcgccatcctccggctgggccgttgcagagtggacggtgatggcccgctagtgatggagagccagggttcggggattttttttcggtcgagaccatgtttcggtctcttcttaatataataccgggtgggcggtctttccctccccgaccgagtttaaattagtcctacatgattttggtttcacttgtaaataatgcttgcgtgcattgtttttcattgtcattgttatggaagatcctaaattgcgcaaatcttttctgtttgaaacaatttcttcatttaccaatctaatatgtcaggtactatataaacgttcagatgatgacacaattgatatttgtttattgtttcttcatgggtttgcctgatgtttattttggtatagggaagtgagaggctcgagttactagtttctgactgctcagataagtggaaagttcttgaggagaagattaattcagtaaaggatggcaaacccagtgaaaatgcaaggaattctccttggaagctgcggccatcagaaaagcttgacaggtttcttgagggtagaaacttggatgaaggtttggattgtgataccattttgagtatatgccaggagtacgatttggacaagatcgatgttctcaagtacagggatcttctgtagccacatccagattgtttctctgaggtttatacgtttaaattcttctgctagtgagatcaagatgaagggtacaagagttgcatgaacccactaaccattggcggtcaaatgagttcttttaaatagcttcagattttcttgttatgtaccaaaccggtctgccactagtgcaatgatctcagaaacaaagaggacatcttatgaaactatagaagcccagggcagttgttcccaccgtgcaaatagagattgctagctgccaactttcccccgtcagccatcacaaattttagttgggatcaatgaacgacaaatgcaaagagcagggttgaaaattgagattggccatccgtacatgcttctctctctctctctctctctctctcttgtttgtggctctcaatctatctttggttgtatttgaatcttgtactgggatccaatgcatagccttctcgatctggagggattctagagctttgatctctcaggtgcctttttctgcac

SEQ ID NO: 121353 - DNA, 2447 bp, Zea Mays
ctcagaccggcaagcaccaagcacagaggatagccgcgctcacctcctcagtccccacacgccctaggcgctggcgctgcaagctcgggcagtcgagccgagcgctccctgctcggcggacgctggccgtggctcgccctcgctgtgccgacacgccggcaaccatctcccctccagatccgccactgatggttggctcaaacttatgaaaagagctagctaaggaaacagggccaaagtgagctccagggaaaaaaaaagagcaccatggagaaaggggacgtgctggtggacctggacaagctccctatgaagcgccttgaggccatcgacgagactggcaacgagcactacccaccggacactagcaacgaggagcagcggctcgcggccatccgccggattgacttctcttgggtcatagagaaggatgcaaagaaggccaagaaggcggctgaggctgatactacccagcaggcatggccctggcagggccttatggagagcctgcagcaggcacatcaggagctctccgtcgtcatagacctcatcggcacggttgaggctaatgacgccatggcagtcgcctcgacaacgaagcccaagtcacagccaaacgaaatactagttgacatggcagtgtgtgctgccaccaagctccagtgccttaggcatttgtcacggtacttcaaacaatctgctacgacaatggagcaacagttccaaaaggagactaggttctacagctccttaataagattacagcagaactggaaagtgaagcggcagcggtctgttgggagtccaggaagtgagggcttcatgtttgatctagttgatacttctcagctagacacaacaacaatgcctcgattatcaccattatctttgattccaattgatcaagactcttcaggcactttgtctgtacaaattccacagaagtgtttccattccttgagccttcgatttcatggagacatagccaataatgcagaaagcagtgctgtcaaaaggaaagaaggcacattaaccaacactactaccggagccgaaaatgatgttttggagaacgatgatgtcaataagtctactgaacatgcacattccatcttgcgcgacatccataagtccatatttgaggagcaggtttttgatatggtgatccaggagacatttatccaatctcaaggcatcaatgttactggaatgtgcgaagattttctccaattagcgattggtcaggaatgttctttgtgcctttcgcatgatctctctgggcagaataataactcggggacagtagggcaggaagatcatatggatatagatcatactggaaatcttgcagtagccactgtaaatgggaaggagtcttcaaataaggatgtgagagggtttcctaaccccaaaagcttagaaatttacctgctacatgtgttccatgaaggcatccttagaaaactcagggagaaatctcgtcatgtggttcggtaccagagttctgctcagggtacacctgacgagtgtggcctgctaagtcatttttgcatgacagtgtctcacaggatattttctagcaaagtacatttggagcttgaaagtgtggttagtagggttccttatctccatctgtgttcccttcctacatggcattctcgaacgtcctcctggtctctctgcctgaaagttcctcagcctatcctggccactgatcgagtcagaaggccttcagactacagtgagttgaagtgcaaatccaggtcacagttcggtacaaaggtgatcttgaaagatggacagattagtttaatgggcgagggctctccaagcattgctggatcgttagctgggaagccatccgatggacgcctggtaaatagttacaattgtgacttggaagatctcccaatgatgcttctgcagcaggttgccagccaagtaatccactggctccacgatgaagcggtggtccttgggatgaacgcgacaatagatttcctgtgcctgtacttggaccttgaccaaggtgaaacactaggcctggtggcacacgttgacccggatgacacctacggctgcgtctcatggtacctcactcttgatcatcacccaacggaggaagggaagatgtcagcgggtagtccggagctagaggagcgcaggtttttggggtacctttccccggaattgctttactctaccctgatggacctggtaaaactgtgcagcacaggtgtccaacgctgagactctgcccacggagtagtgggagtctcatgcgcggtaagtctcacggataggggtagtaatgggccttaaaattttgcactgtgaaatttaagaattagatcagattaggatataatcatcaaactctatctttatccattttaaactaaattagttaagaagtcaaacactttggatctgggatccgttaccaa

SEQ ID NO: 121354 - DNA, 2411 bp, Zea Mays
ctcagaccggcaagcaccaagcacagaggatagccgcgctcacctcctcagtccccacacgccctaggcgctggcgctgcaagctcgggcagtcgagccgagcgctccctgctcggcggacgctggccgtggctcgccctcgctgtgccgacacgccggcaaccatctcccctccagagctagctaaggaaacagggccaaagtgagctccagggaaaaaaaaagagcaccatggagaaaggggacgtgctggtggacctggacaagctccctatgaagcgccttgaggccatcgacgagactggcaacgagcactacccaccggacactagcaacgaggagcagcggctcgcggccatccgccggattgacttctcttgggtcatagagaaggatgcaaagaaggccaagaaggcggctgaggctgatactacccagcaggcatggccctggcagggccttatggagagcctgcagcaggcacatcaggagctctccgtcgtcatagacctcatcggcacggttgaggctaatgacgccatggcagtcgcctcgacaacgaagcccaagtcacagccaaacgaaatactagttgacatggcagtgtgtgctgccaccaagctccagtgccttaggcatttgtcacggtacttcaaacaatctgctacgacaatggagcaacagttccaaaaggagactaggttctacagctccttaataagattacagcagaactggaaagtgaagcggcagcggtctgttgggagtccaggaagtgagggcttcatgtttgatctagttgatacttctcagctagacacaacaacaatgcctcgattatcaccattatctttgattccaattgatcaagactcttcaggcactttgtctgtacaaattccacagaagtgtttccattccttgagccttcgatttcatggagacatagccaataatgcagaaagcagtgctgtcaaaaggaaagaaggcacattaaccaacactactaccggagccgaaaatgatgttttggagaacgatgatgtcaataagtctactgaacatgcacattccatcttgcgcgacatccataagtccatatttgaggagcaggtttttgatatggtgatccaggagacatttatccaatctcaaggcatcaatgttactggaatgtgcgaagattttctccaattagcgattggtcaggaatgttctttgtgcctttcgcatgatctctctgggcagaataataactcggggacagtagggcaggaagatcatatggatatagatcatactggaaatcttgcagtagccactgtaaatgggaaggagtcttcaaataaggatgtgagagggtttcctaaccccaaaagcttagaaatttacctgctacatgtgttccatgaaggcatccttagaaaactcagggagaaatctcgtcatgtggttcggtaccagagttctgctcagggtacacctgacgagtgtggcctgctaagtcatttttgcatgacagtgtctcacaggatattttctagcaaagtacatttggagcttgaaagtgtggttagtagggttccttatctccatctgtgttcccttcctacatggcattctcgaacgtcctcctggtctctctgcctgaaagttcctcagcctatcctggccactgatcgagtcagaaggccttcagactacagtgagttgaagtgcaaatccaggtcacagttcggtacaaaggtgatcttgaaagatggacagattagtttaatgggcgagggctctccaagcattgctggatcgttagctgggaagccatccgatggacgcctggtaaatagttacaattgtgacttggaagatctcccaatgatgcttctgcagcaggttgccagccaagtaatccactggctccacgatgaagcggtggtccttgggatgaacgcgacaatagatttcctgtgcctgtacttggaccttgaccaaggtgaaacactaggcctggtggcacacgttgacccggatgacacctacggctgcgtctcatggtacctcactcttgatcatcacccaacggaggaagggaagatgtcagcgggtagtccggagctagaggagcgcaggtttttggggtacctttccccggaattgctttactctaccctgatggacctggtaaaactgtgcagcacaggtgtccaacgctgagactctgcccacggagtagtgggagtctcatgcgcggtaagtctcacggataggggtagtaatgggccttaaaattttgcactgtgaaatttaagaattagatcagattaggatataatcatcaaactctatctttatccattttaaactaaattagttaagaagtcaaacactttggatctgggatccgttaccaa

SEQ ID NO: 121355 - DNA, 2885 bp, Zea Mays
cgacacctctccccccccccccccccaccccatcctcctcccctcagcctctccggtgggcgggcgggcgggcgggcaattcggccatggatcccccacgcggaggaccagtgattgatcctgctaaatgtcgattgatgagtgtggatgaaaagcgagaactcgttcgtgatttatcaaagagcccagaaagtgctcctgacaggctccagtcatggacccggcgagaaattgtagagattctttgttctgatcttggaagggagaggaaatatactggtttatccaagcagagaatgctagattatctatttaggttggtgtctggaaaatcatctggtccagtggaacatgtgcaagagaaagagaaagggagagagaaagggaaagagagagaaaaagaatcaattcctgagcccaatacaactaaccaccatcagtcccctgccaaacgaccaagaaagagtgataacccatcacgattaccgattatcacaaacaactcagcagcatctgatgtaactgggccaactaataattcacggttctgtcaaaatgtagcttgcagagctattctcagggacaatttttgcagacgctgttcatgctgcatttgtttcagttatgatgataacaaggacccaagcctctggttgtcctgtagttcagaccaacacttacaaaaggatacctgtggtttctcatgccatcttgaatgtgctctaaaggatgaaagaacaggtattctgcagagtggacaatgcaagaaacttgatggtggctattattgcactcgctgttggaaacagaatgatttgcttgggtcctggaagaaacaactggtgatagcaaaagatgctcggcgattggatgtgttgtgtcatcggatttatctcagtcacaagatcctcgtctccacagaaaagtacttggtattgcatgagattgttgatacagcattgaagaaactggaggctgaggtcggtcctatatctggagctccaaatatgagtcgtggaattgtcagtcgacttactgttggtgccgaagttcagaaactttgtgctcaagcaatagatgctatggaatcattgttctcgggtgtatctcctgctggttcaagaatcccgcgaccatgtatggtaccaccaaattttgtgaagtttgaagctataacccaaacatctgtcatggtatttttggatttggttcactatcctatgcttgcccaagaggcaacttcatttaatatatggcaccgaatggctgttactgaagcttacctgacaaatccgactggcataatacttcccccatcgaaaaaattacctgtcactgggcttgcaccggctacaagctatatctttaagattattgctttcaaaaactcaatcgagttgggttcatgggaaattagaacgaagacaagctatcaaaaggatgatccaaggggttcaatgccaggtggtactagactaggacataatagtgagagcctgaaggcaaacagtgatggccagtctgatccttcctcagagggtgtggactcaaacaataatactgctgtttatgctgatctaaacaagtcccctgaaagtgattttgagtactgtgaaaatcctgagatcctagattcagataaagcgtctcgtcgcctcagcgaacacatcgatgacttgcaaaatatacagatggctgcagatagggtaacagaagtcactgagctggaagaatcgcctgggctctcagcctcagccttggatgaggaacccaacgcttgtgttcaagcagtgcttctcagggagccaaacccactaggacacaatcaaagaactgtagttcctagatcacagcatgcatctaatgtactgggtggaaatgagttggtgattgttggacctcgatatgctggttctgtgccacccattgcaacaagaggtctggaaaacagcaaggagagcggtggaaggggcttcaaacccaaaccttgtaacaacattttccaaaatggctcttcaaagcctgaaagggaaccgggcaattcgtcaaacaaaagaacagctggtaaaacggaggaccttggtcacaaggatagttcatctgaagtgtcctacgagtactgtgtaagggtggtcaggtggctggagtgcgagggctacatcgagacaaacttcagggtgaagtttctcacatggtttagcctgcgtgccaccccgcaggagagaaagatagtcggtgtctatgtggatacccttattgaggaccctgtcagcctttctggccagctcgttgacagcttctcggaggcggtatatagcaaaaagcggacgccttctggtttctgcatggacctgtggcattgaagcaccacaagcacctaccgtttgctttgtagggagcacacattcgggcccattcttttgttgcagatcgttgcattgattcttcattggaaatttcgctgaagtatttgacttgcacatcttcattgaaacttaacttttcaatgacagtaggttaagttaatgggcaatttctttttttctttttccgttctttacatttgctccatagtaggttaccgtgctatcatctgtaccgtccatgttaaccttagagcatcaatgagccgcatcgttcggtcagcctggggcatagtggattttgtggcgtgtggctgctcgaaggatgattgtcaggctggaccaggaatgcgcctttctgtgggatgaagcagattcgtatggacgttgtcagtgaaatggttgtgctgtacctggggttttgcattttcttgctgactttgttgggaatgggaggaatgacgtttaagatgcagaatgtctgccttattaattaatcttatgttgactcatacttctcta

SEQ ID NO: 121356 - DNA, 978 bp, Zea Mays
gagaaatatgacaaggcagattggtcatccatgaatactagaactttttgtgaaatatgtgttgaagaggttgaagctggtaacagaccaaatggaacactaactactgcagcgtataaaaatatttgtgttaagtatcgacaaagaactggtttgcttcacagcaaaactcaattgaagaataagtgggatttactgaaagggctttacagtttttggcttggtctaaacaaagatacaggacttggatgggattctaagctagggactgtgattgcaagtgatgaatactggaagaaaaatacaaaggggcatcctgattggaagaaactgaaatatggccctctagaaaatgaagatttcatgacacaaatgtttgaacatattgcagtggatggatctacatcatgcgctccaggtgaattttatgatgtggaaaatcatgagactgaggttgatggtattgatggagttgattttggcacatttgaggcagactgtgatgctcaatatgatgaatttgcgtctccttttgctagtgccagcaagtcaactcagtcgaagagaggcggctcaactcagtcaaagaaaagagctagtcctactgttgttaatagcccactgaagcgctcaaagaatcccatggttaaggtcatgaataagattcataatactttggagatcaattgcaatatttcaaacaaagtaatgcttggagagtataggtatgaatcaatcaagcaatgcatggaatgggctgttgagtgtggagcaactgaaggatcacttgagcatttcatggctactcagctttttgttaaggcggagcacagggatgtatttaagtcattcaaaacaaatgaaggaagacttctatggttgaagaggcactgcgctaaggatggcttatgttaggaacatctatttattttcgtgtgttaggagcatctatttactttcatgtctggaacatgtatt

SEQ ID NO: 121357 - DNA, 1835 bp, Zea Mays
tatttttttataatttatgattaaaatacagatgcctaaatttttagcaaaattctaaatttaaatggttgcttgtcaaacttaatataactgaaccaccggcaaccgcgtgctctcctccacaggaccaccgccgcctcctcctcctcctctctgctgcggccgctgtaccgtcggtcgcctggacgggtgcggcggccacgtcttcgtcttcatcgtgacccacgacggagaggacacacacacacacagagagagagagaggcctggcgtcagggaggaagacgtctcgcctcgtctcgtcgtcttctgcggcgtccgttcttcaagccctcccccgtcgcccaccagtagcccgcccgcccgctccccaaggaggacgcagcggtttgccatgagaagacagctttggttgtgccaaagccaaacacgaacaccagcctaggaattccagcatgggttcagggaatctggtaacgaagaaggtggtaaggaggcccagctccatcgaccaggacataaagttcgatcaaagctgggtggaggatgtcgcgtgcccaatctgtctcgattccccccacaatgcagtgttgctcaggtgcgcctcgtatgagaagggctgtaggcctttcatatgcgacaccgaccagactcgctccaactgtctcgagaggttcagaggcgctcatggactgccactgccagtgccagccaacgccagagcctcctcccgtaccgtggctcctctcaacagcatccataccattaccatctcttcgtcgaatgcaaacaacaaccgcccggcttgcccgctgtgtagaggcgatgtgatggggtggttcgtcatcggcgaggctcgctcgcaccttaaccagaagagaagatgctgcgaagagagccgctgctcgtacgtcggcagcttccacgagctccagaggcacacccagcaaaagcatccggactcgcgcccttccgcgatcgaccctgctcgccgggccgattgggagaacctgcagcggtcttccgacgtggtagatgtcctgagcacaatacacgcgcaggttccaaacggtgtggttcttggagactatgtcatcgagtacggggacggtgacgaagctggagacgacgactacgaggtttaccacggggttagagcaagctggtggacgtcctgtatcttctgcaaagcgttctgtaggtcttcccccccaggaggagtccggagaaggacgagaacaggggaaaggagaagcagtggtggaagtggaacaaggagcagcagcaacaggtctagctctagtcaagaaaggttcactcttgatgaagttgacgatggatatgtagttgcaggggccatggccagggctgccgtgtcagggacaatggatgctcgttacaggtctgtttggtaactgtgctgttgtttcctgctttctgttattcatcagagatcatatggttaaatgccatgcacacatacagaatcgaagatatcatgagaaatgactttgttttatttaagttctccatttgtacgcatttttttttttgtttcgtcgatgtaaaagtgtgtccaattttagtaccctgtctctgatatatatgaactatttcatccattcatcaattcagggatccaacacttggacaccgacgttcgcattcctaggaacattaaccggggaggaaaataaggaaagctgtgctggtgtaggatgcaacaaaaaatcagatccgttctacctctgctcatttttattcttttttttctcttgggagcttcatgtacatatatatataaatatataaagattgtagggaactttttttta

SEQ ID NO: 121358 - DNA, 1709 bp, Zea Mays
gtccctccctgcacgcctggcctgggctggccgcctccgaccaccgtacgtcctccaccgcgtcgccgccggccggcctctgcccagcccgggctgcctgcgagggcttctgatggccctcgacgccgtcctttcctcctagtgcccagctttattgcagatccagccctctgatcctcgtcttctttcacctctccaacatgaaggtcaacaccaagatcaagctggagccggtcatggcgccgtcgtcgtccctgccgcggagcgccagcgagctacccgacccgccgtcaccgttcagctccaacacggcgcaccaccccgtctccgtgcccaccacacctaggttgtccttatcgtgctcgtcgttcggccacatggtgaccccgcccaccgacacaccgccgatcacgcccaccaagaagcaggacgacaagccgaagccgacgccggaggccgccaccgcggcgaactacgcgtcgttgtggtcgcccaagcgcctcatgcagcgcgctgcccgcgctttccgccgcagcaggtcgcgcgcccgcgtcaggacggtcaaggacctcgccgaggaacgggcctcagtgctcgccgccagcagcaaggtctctgatgaggcggcggcggcggctaccgcggtgccgcctgcaggtgccaagacctccagcagcaacgatgcccgcgacggcgccatgggcagcgtgcaggacgagccgcggcagcagcgccacgatgactatcaccaccccgagatcgtccccgagaagatcatacacgaggacgcgttgccggtcgttgctgcggagaaggagactgccgccgccgccgcaacctcgaaggaggaggaggaggtggagtcgcccaagaaaggagcggctctgtcgccggtgccggaggctatcgtcatcgccacagccgcaacctcgaaggaggaggaggaggaggtggagtcgcccaagaaagaagcggctctgtcgccggcgccggagcctatcgtcatcgccgccgccttaacctcgaaggacgaggaggaggtggaatcgcccaagaaagaagcggctctgtcgccggcgccggcgccggaggccatcgttgccgtagcagcagtggaagacgtggtggcggacaagttcgtgacggttgtgaaggaggcgatcaagaagcaggaggcggaggaggacgagaaggaggaggcaatgcggaggttccagggcagccgtgtgaggacggcgttggaggcgcgagcggagtcggagcagccgcgtcgccgagaggtggcgcggagcaacgacgtgatcgaggaggcgcgcacgaagctgctggagaagcgtcggagcaaggtcaaggcgctcgtcggcgccttcgagactgtcatcgacaccaagaaggacagcgacgacgcggccgccggcaagccggagcaccacaaccgcaacaagtcggcttaaatgattaaacgtatacgcttcgtgtcttctccttaattattataattattactggccagcccatcgccgcatggatgcatgcacggcgctaattaatccttcttgctactaattaactccggttaattggtggcacaccatgtatagcgtcgtggagttctctatattacaccatagagggaaatgtggagaccggtgttgcattctatacaatttcttcttataattatatgattcatcggttttattctcccc

SEQ ID NO: 121359 - DNA, 2531 bp, Zea Mays
ctcccacttgcaatccaaacgaaagcaagaagccgccgccgcttacagctagaggagaggagagagaggggagggaagggagggcccgagagggaggctccaggggccctgcattgcgtcgggctcgggactgtcgattgggccgccgggatggatcacggcggcgaggaccgcgtcgtggcggcgagcctcgcggcggcgcggcgcacgctgcgcgccggcttggacaagtcgcgcgcgctgggccacgcgctagcccgcgcggggccccgcctgaaggagatccaagcggcgctgccggtgctggaggccgcagtgcgcccgatccgcgcgccgcgggccgagctcgccgccgccgggccccacatcgaccgcgccgtgggccccgccgccgccgtgctcaaggtgttcgatgccgtgcacggtctcgagccgccgctcctggcgcccggcgccgcgggctctggcgcggctggggacttgccggggtacctcgccgtcctggcgcagctcgaggaggcgcacaggttcctcgccgacaactgcgggctcgccgcgcagtggctcgccgacattgtcgagtacctcggcgaccgtttcctcgtcgacccgcgcttcctcgccgacatcgaggtcacgctcgacgagctcaaggcaccccctaccggcgacctcgacggagggctcctggccgccgccctcggtatcctcgaggccgagttccgccgcctcctcgccgaccattccgcgccgctcgcgatgccgcagcccggcgccgccgctggctcaaccgcgccatcccgcgtgcctgccgctgccgtccacaaactcaccctcattctcgatcgcctcgtggccaacggcaggcaagaccgctgcgtggccgtttatatcgacgcgcgcgggggtgtggtcagtgccagtcttcgcgctcttggcctagactacctgcgtgagccgtctcaggatgcacaggcattgggacctgctcttgagctgtgggggcggcatctagagtttgtggtccgccgtctcctcgagtcggagcggcagctctgtgccaaggtgtttggcctgcataaggatgtcgcgtccgcatgctttgcagaggtggcggcacaagctggggttcttgaattcttgaggttgttcggtggcaaagcatgtgcggagattcagagccagacaagggaccttgtcaagttgttgatagacggtgctgtcgagatctttgaggagttgatcgtgcaggtggagctacagcggcacatgcctcccccagtcgatgggggcgtgccacgcttagttacctttgttgtcgagtactgcaaccgtctgcttggtgagcaatacaggcccatgcttgggcaggtgctaactatccatcgcagctggcgcaaagaggtgttcaatgacaggatgcttgttgatgtggtgctaaacattgtcaaggcccttgaagctaattttgatgtttggtccaaggcatatgacaatgctacgctctcgtatctcttcatgatgaatactcattggcatttctttaggcatttgaaggctactaagttaggagagatcttgggtgatgtgtggctgcgagagcatgaacaatacaaggactactatttgtcaatgttcatcagggagagctggggagcactttcgccactactgaaccgggagggattaatactgttctccaagggccaggctacggcaagggacctggtgaagcagcgcctcaaaacattcaattcaagcttcgatgagatgcattgcaggcaatcatcatgggttataccagacaaggatttgcgggagaggacatgtaatcttgtggtgcagactattgttcctgcctatcggagctacttgcagaactatgggccacttgttgagcaagatggaaacaccagcaagtatgtaaggtacactgttgatggtttggagaagatgctcagtgccctttacatgccccggcccaggagggctgggagcttccagatcaaacactcgagtggtaagattgccagtgcaatgaccagcttgcatcggagtgcttctgcagtgaaatagcctccatggaataacccaaagattggatcaaaatgatgcaataaccgctatgtggcaaatgattcatttgacccagtcggcaaagaggcccgcactagataggtgacccaataaggcaataatgaacccatggtcagagtagtggtgtcattatatgaacataagttactatttaattagcatggagaatagaaggtggcgatcatttccttagctcctgttagtgtccctgaacataagttacccatggtctgagatgttacatctttctgagctatcttctctcggtttgtacttctgttagtgtccctggcaccatatcattcatttggagatattcaatcagctgtgtggctatgtaaaattggttgtattttaggtgatctgtgagcattaactttcaatgtaccaaaaatcgatcttaatatatgagatggattatatggggaaaaaaa

SEQ ID NO: 121360 - DNA, 679 bp, Zea Mays
caggatttccacacccataacattggacatacttcttgatgaatacctcaaggagaccagccagctttgcagtatcatgagccccgttaaccaaggaaatccctgtcttctcatcaaatttggactgtgcaccaagctcacatccaaagtacttggttgtgtaggaagctggcctggcaagtgcttttgctatgtcaaccatgttcacaacatttgtcttgataccattaccacggccttctatcttggtaatcattctgggcatcttgtacctgtagaaggcatcatccctgtttgaagcaccaatgttttgcagcgccatcttggataaagatttatgaagttgatatcagatgcgacaaagtccacaatcaagagtagatgctgatccttcgaggaaaccaagccggctttgagcaccagcaaatgacaaatcagaacaagaaaaccagacagtctcttgacgcatgcagtgggacggaaccttgtgccttttcctagttgcacgagagtactctcccaacaatcccaaataaagcaaagattgttcagacataaaagaagcagaagctcctaagccctccactttgtcagactgcagcagaacagtttctgctacctgagggcgacggagatctggaggggacgacgcgccgggtcggacgagattgggtcgata

SEQ ID NO: 121361 - DNA, 103 bp, Zea Mays
gtttgattcacaaactgttgagatgatgtattatttgagctgtatggctgtatgcatgaacatgcaaaaggccggaatgatatttccatttccaaaaaaaaaa

SEQ ID NO: 121362 - DNA, 1833 bp, Zea Mays
tccaaacaaaggcctcgcccccaaacggccaacccaatcgatcgtccccaatccgttcaggcagtccccgacatcgccatcgccgccgccgctctccatcataaacaatctactcctcgtcgcctcgcgtccgtatacttgaccgcccccttctcctacttgtaattcccctcctgcttgtgtggcaggggcctctcccgcgcgatggggaagcacgagttcctgacgccgaaggcgatcgcgaaccggatcaaggcgaaggggctgcagaagctgcggtggtactgccagatgtgtcagaagcagtgccgcgacgagaacgggttcaagtgccactgcatgtcggagtcgcaccagcggcagatgcaggtgttcggcatggcgcccgaccgcgtcgtcgagggcttctccgaggaattcctcgagtccttcctctccctcatccgccgcgcgcaccgccactcccgcgtcgccgccaccgttgtctacaacgagtacatcgccgaccggcaccacgtccacatgaactctacgcggtgggccacgctcaccgagttcgtcaagctcctggggcgcgaagggtactgcaaggttgaggacacgcccaaggggtggttcatgacctacatcgaccgtgactcggagcaggccgtcaaggaccgcctcaagcgcaagaggatcaagtcagacatggctgaggacgagcgccaggagcgcatgatcgcccgccagattgagcgtgcgcacaagtccttagccaaacctaacgatggtgatgctgccgagggcgagcccgagtctggtggtgaagaagagtattcaggttcggatgatgatggggaggagctggaggatgtctcgaaagaggcaaacaaggcaacagggaagattgcgattgcgcttcagacggctgtgcgagggcctaaggttaatccttttgaagataagccggaggtgaaatttcgtttcgacgaggagggcgacttgggtaccggagaggagaaggatgagctggccaagaagaagggaaaggatgtgaaggcagcagatgcaaggaggtcagcattggacgagctgatgaaggaggaggagatggccaaggagaggagcaataggaaggactactggctgtgccctgggatcgtggtcaaggtgatgagcaagtcattggcagagaaggggtactacaagcagaaaggggtggtaaggaaagttatggataaatatgttggggagatagagatgttggagagcaagcatgttctcagggttgaccaagatgagctcgagaccgtgatccctcagatcggtgggctggtgcggatattgaatggtgcttatcggggatcaaatgccaggttgctctcagtggacactgagaaattctgtgcaaaagtgcaggttgagaaaggtctctatgatgggaaggttcttagggctgtcaaatacgaggacatttgcaagatatcctcatgatatacagtgatccattccattttcctggatcatcaccgaagcaaacaagcactatgcaacccagtgtactagctctgccagttacatatctgatagtgtttgtgcttgttactgcttgtgatggaatatcttctgttgaagcagtgttcaatatgttgttgtttctagttcattgtagctgctgaaaggctatgtgtggggaaacggtgtcatgtatatttgcttgttactagaccctgataattttgcaatatttggttaacttctatatttctgtctctagttaacctttaaccagatttattcttggtagtttgagcattacttttcaatcagttcttttgatcatgttgtcat

SEQ ID NO: 121363 - DNA, 399 bp, Zea Mays
atgggggagcaaggcaggccaagcagcaacaggatcagagacatcgtgaggctgcgacagcttctcaagaagtggaagcagattgcgctctcaccgaaagccggcaagagcggcggcggcggcggcagccacggtgtcccgaaggggttcttcacggtgtgcgtcggcaaggagatggagaggttcgtgatccccacggagtacctgggccactgggcgttcgaggagctcctgaaggaggcggaggaggagttcgggttccagcacgagggggctctcaggatcccctgcgacgtgaaggcgttcgagggcatcctgaggctggtgggcaggaaggatgcggcggctgcggatcgctactgttcttcgcagcatgggatgatgatcttgtgcagatga

SEQ ID NO: 121364 - DNA, 1649 bp, Zea Mays
ggaatctgcggccagttagttcgcaccgaatttttctccagccgtccctcaaaacaaggatgcaaatctgaccccacctgcaagcgaccaagtggtccagggctcgagaccaccgcgtttttctggaaccaaccatccttccttctcaagagtccagagtccagacctccacacaacgcgaaccaagccaaccaactaaccgagcaagcaacccaaccacacgagcggaggagcgtgcgaaacccaaagcgcgaaaaccctcctcgcccaaggatccctcccgcggcgcgcggaagcaaacccccccgaccggccgccgtcgggggccgcggcagggacagcggaagcagcatcactccggagcggcggggctcagccagccctcgaccggagcggggggttccgtaatactctccgaatctgcggaatccgtggcgggatttcgcggggccttctagtttcgggcgagacaatggtggggttcgcggggaagaggaaggagttggagcaggtgatggacggcctctctgacttctccctctccggccccgctgccaagagccgcagattggatgccgagctcccaccaattatggaagaagaaccacctgctccttcaatgccattccagatgctgggagagaaaatcaataactgtgttgacatacccagtatggaattcatgatggaaggtctaacaacacatcatgtgcctagtgaggacatggcacttgttttatacaaaccagtagataattccgcaccatttggtcgtggcatctcaagttcttcattcatagtgagttcagacttgatacgtggtctaaagaaccatgcttttgcgaactatcacgaggtggaggatgaatctcctgaacgtaggaacagcttggctttagttccttggagaccaccacaagtgtctataagatctgactgggttgccgttgagccagagcgcacacggatttttgaagtacctatggacgctgatgagactgaagtaacttctatggatgtcgaggaaacgccagaagcagtttcgggcggattcaatggcgagaaccttggccagtggctacattgtgtgaccccgccctcgttaccaaatccatccgcccatgttatgtggtcaaggtgacaactgggaggccctgcgtgctgactactgaatcataccaaggatgaagaaatcctctaataatcctcccctagctgtgtggtagctgtctgtttagttgaaaacaaaaaaaactggttatgcttagcatgatgtttcctggtgtagtgctgatcgtccccagtaatatcagtgtgagtagactccatgttagaacctggttagattgggattcaattaattgaggtaacctgttggatttaaaacatcttaaattcgatgctggttcttttttttattcatttcagaatttaacgaaggtgttcttgaatcgagattattcgaacaaaccctcaatgcgctgggtgggttcgtgctgaaatttttatcagcaaaaaacgtagtgcgtagggtaagtatgggttacaattttcatctagcaacaatcactgagttagggcgttaggcctcctttgggaacgcaggatcgaaaaaaacataggaatatgaaaagtacaacaataagata

SEQ ID NO: 121365 - DNA, 823 bp, Zea Mays
ctccacacaacgcgaaccaagccaaccaactaaccgagcaagcaacccaaccacacgagcggaggagcgtgcgaaacccaaagcgcgaaaaccctcctcgcccaaggatccctcccgcggcgcgcggaagcaaacccccccgaccggccgccgtcgggggccgcggcagggacagcggaagcagcatcactccggagcggcggggctcagccagccctcgaccggagcggggggttccgtaatactctccgaatctgcggaatccgtggcgggatttcgcggggccttctagtttcgggcgagacaatggtggggttcgcggggaagaggaaggagttggagcaggtgatggacggcctctctgacttctccctctccggccccgctgccaagagccgcagattggatgccgagctcccaccaattatggaagaagaaccacctgctccttcaatgccattccagatgctgggagagaaaatcaataactgtgttgacatacccagtatggaattcatgatggaaggtctaacaacacatcatgtgcctagtgaggacatggcacttgttttatacaaaccagtagataattccgcaccatttggtcgtggcatctcaagttcttcattcatagtgagttcagacttgatacgtggtctaaagagtaagtacatcgtgatcaaccttctttagtcaccgtttatatttaaattcaccattcctacgagtctttgctattttggtcctgcattttgttagggggcttgctgaaatcagggtgcctgaattttagttattgcatatattttatattaaaattgca

SEQ ID NO: 121366 - DNA, 2643 bp, Zea Mays
gaattcttgctcagactccccggatactgccctatgcctgctttccgtgatgtcattgatgttcctctggtggtcagaagattgcacagatctagaactgaggtgagaaaggaactagggatcgcaaatgatgttaaggtggtcattttcaactttggaggacagcctgccggatgggaactgaagaaagagtggttgcctgacggttggctatgtttggtatgtggtgcatctgatactcaagagctccctctaaatttcattaagcttgcaaaggatgcctacacacctgatttgatggcggcatctgactgcatgcttgggaaaatcggatatggcactgtgagtgaggctttggcttacaatctgccatttgtatttgttcgaagagattatttcaatgaggaaccatttttgcggaatatgcttgagcattatcaatgtggcattgagatgatacggagggatttacttactggccattggaaaccttatcttcaacgtgctatcacacttcaaccctgctatgatggtcccataaatggtggcaaggtagctgcacatatcctccaagatactgctgttgggaagaagtatatttctggaaagttgagcggagcaagacggttgcgtgatgccattgtgcttggctatcagcttcaaagggctcctgggagagatgtaggaattccttactggtattctcactctgagaaagaaattagtgttggcccagcgcccacatctcatgatatgaatggaagtgatgagtcatcgttcgaggactttgagatactccatggtgacatgcaaggcttaactgatactatgtcctttttgaagagtttatcagggcttgttggaaatgacttaagaagccctgagaagcaaactcgagagagggctgctgcttctgtgctctttgactgggaggaggaaatatatgttgcaagagcacctgggcgattagacgttatgggtggtatcgcagattactctggaagtcttgtattgcagatgcccatccgagaggcatgccatgttgctgttcagagaagtgaccctaccaaacagaagcaatggaagcatacacaggctagacaactagcaaatggaggagcagtaccagtgttacaaattgtatcctttggttctgaattaagtaatcgtgcacctacgtttgacatggacctttctgattttatggatggcgacaaaccaatatcttatgataatgtgaaggaatacttttctcgggatccatcccaaaaatgggctgcctatgttgctggaactatttttgtattgatggctgaactaggggtgcgctttaaagacagcatgagcattttggtttcttcatctgtccctgaaggcaaaggtgtctcctcttctgcatctgtggaggttgcttctatgtctgctatcgccgctgcctatggtttaaacattgctccaagggatcttgctttgctctgtcaaaaggttgagaatcgtgtcgtcggagctccttgtggagtaatggaccaaatgacatctgcttgtggagaagctaacaaactcctagcaatggtttgccagcctgcagaagtgaaggagttggttaacattccaactcatataagattttggggtcttgactctgggatacgtcatagtgttggtgggactgattatgggtctgtaagagtaggcacttacatgggccgcaagatgatcaagtgtgctgcatccaacctactttcagaattgttgctctcgtgtacgtctacgcaaccaggcgactcaagtcccgacgaatatgaaggacatggcgtcgacctcctgaaatctgaagcgtcaatggagtatctatgcaacttaccaccacataggtatgaagctgttttcgcgaaagaaattccggagacgatcactggcgatgcgtttttagagaagtatggagaccacaacgatgcggtaacagaagttgacccaaagcggtcttactgtgtcaaggctcctactagacatcccatatacgagaacttccgagtcgaggccttcaaagcgttgctaacagctgccaaaacagacgagcagctctcagcccttggagagctgatgttccagtgccactacagctacaacgcttgcgggctcggctctgacggcacagacaggctagtgaatctagttcaagaaatccggcacaggaagagctcgcgcgccggagggcccagcctgttcggcgcgaagatcaccggcggagggtccggcggctcggtctgcgtgatggggaagaactgcctgaaaagcagcgaggagatcctcgagatccagaagaggtacaaagcggcgactgggtacctcccgactgttttcgacggctcgtctcccggcgccggcaagtttgggtacctgaagattcggcgccggtccacgtcgccgtctgattgaagaagaagaagaaggaagagctctgctcggtcggccgtaccctcacggtcgtattgatcgtatcgtatcccacgcactacgcccaagatgccaataaatgggacagattgatcggcaataataatactagtagccatagaaaactctagtgataagctgcgaaacaacttgtatgtcgaagaaaatatttgaaaccatggtatc

SEQ ID NO: 121367 - DNA, 3407 bp, Zea Mays
gggaccgggagccacgccacgcaggcacgcacgcggaggggagcgccggccgtccgcggcggattgggatctccctcgcccgcccgtccactcgagactcgacggcacccgccgcatttgagctgagctgaggaggcgtgggggacggcgcggggatgtggcgcctgcggatcgcggaggggggcggggacccctggctccgcacgaagaacgcccacgtcggccgccaggtctgggagttcgacgcctccgccgaccccgaccccgccgtcgacgccgcgcgccgcgccttcgccggcagcaggggccacctcaagcacagcgccgacctcctcatgcgcatccagttcgccaaagaaaatcctcttgagcttgaccttccagcgatcaagctcggtgagcacgaagacgtaaccgaggaagccgtgtctactactttgagaagggcaatcagccgtctttctactctccaggcacatgatggacactggcctggggattatggtggccctatgttccttatgccaggcttgatcataacattgtatgtgactggagcactaaacactgtcttgtcatcagaacaccagaaggagatccgtcggtatctttataatcatcagaatgaagatggtggctggggcttgcacattgagggtccaagcaccatgtttggctcagcactgacctacgttactttgagattgcttggagagggaccagatagtggagatggagcaatggagaaaggccgaaactggatcttagaccatggcggagcaacatatataacatcctgggggaagttttggctctcggtacttggtgtatttgaatggtctggtaacaacccggtaccaccagaagtatggctactgccatatctcctgccatttcacccagggaggatgtggtgtcattgtcgaatggtgtatttgccaatgtgctacatctatgggaagaggtttgttggtcgaatcacaccactcgtgttggaattaagaaaggaacttttcaaagacccttacagcaagattgattgggacaaggcccgcaatctatgtgctaaggaagatctgtactatccacatccatttgttcaagatgtcttatgggccactctccataaatttgttgaaccagttatgatgagttggcctggcagtaaattgagggagaaagctctggagacagccatgcaacatgttcactatgaggatgagaacactcggtacatttgcattggtcctgtaaacaaggtattaaatatgcttgcttgctggattgaagatccaaactcagaggccttcaaactccacatcccacgagtctatgactacttgtggcttgctgaagatggcatgaagatgcagggttataatggtagccaactttgggatacagctttcatagttcaagccattgtggctaccaaccttaccgaagagtttggtcccacccttaaactagcacacaactatatcaagaaatcacaggttcttgacgactgccctggtgatctgaatgactggtaccgccacacatctaaaggcgcatggccattctccaccgcggatcatggttggcctatatctgattgcactgctgaaggactaaaggcttcattattgttatcaaagatttctcctgaaattgttggtggaccgatagaagctaatagattttatgatgctgtcagttgtctgatgtcttatatgaatgataatggtggttttgcgacttatgaactcacaagatcctatgcctggctggagctgatcaatcctgctgagacctttggggatattgtgattgattacccgtatgttgaatgtacatcagcagcaatccaggccctgacatcattcagaaaactataccctgggcaccgcaggaaagaggtggacagctgtatcagcaaagctgctaatttcattgagagcattcagaaaagtgacggttcatggtatggctcttgggctgtttgtttcacgtacggcacttggtttggtgtgaagggactaattgctgctggtagaacatttgagagcagtcctgcaatcagaaaggcatgcggctttctgttatcaaaagagcttccttccggtggctggggagaaagctatttatcgtctcaagaccaggtttacaccaatctcaaaggcaaccgagctcatgcagcgaacactggttgggccatgctggcgctgattgatgcaggacaggcccagagagatcccgcgcctctacaccgagcagcaaaggttttgatcaacttgcagtcagaggacggagaatttccccagcaagagatcataggagtgttcaacaagaactgcatgatcagttactcccagtacaggaacaccttcccgatctgggctctgggagagtaccggtgccgagtcctgggagctggcaagcggtagtgacccggcctggccccgtcaacttgactgaaaggcgctttgttgtcttggtgttcttggtgttctatcttggcacgccgagggctgtcttgccggccgcctagctgtctcatgaatcaatcagcttttttgtgagtagctagctatgtgcggtggttggaataatgcagctatgcttttttttagggttgcgctcctagttctaataatgtactacgtatattggaagcagaataaatgttagattgaactaatggtgccattaaagatgacaatagaactcttccgaagcaaccaagttattacattgcacaaatcaatagaacttcaactgctagcgtcacaaaaccgtggattattcaagcgcgcgcagctctaccggcgacctccacgagttcccatggcgacaaggccttcttcttttttattattttctgttcgttcagaacacaagcaaaatcccgctcccgcgttgcagagacgacgccacagaagccacgtctgactgatttccacgcgccaaccgggggcacggcggcgctcccgctccatctccagttctccaccacaatccacaaggaaggaagcatcagcgcatcaggtcgtagtgggacgaggagccgccgtacgatggcggcggcctggggagctggaggagctcctgcgccgtcgccatggcggcgtcgagagcctggagccgcgcgtgcgcgtggtggcccagggccgcgctgccgccgccgtcctgccacagccccggcgacgaggcctcctgcagcacggagacggagccggcggcgaggcagctgctcggggcagcgcggtggtggtgcagctcagccgccggcggcggcggcgggtggttggtgttggtgccgccgccaccggccggactgtttgacagaagagagagagcacgctgaaggtccggggcgccgtccgggctggagacggccgcacaggcttcaacgcctgcgcctg

SEQ ID NO: 121368 - DNA, 4185 bp, Zea Mays
atgggcgcgcaagaggaggcagtggacgagatgctgcgcgccgccgccgccgaggtttcaacctcctcggtgaagcgccgcctccgcatcttccaccacaccctacctcctctcatcgcgaaggccatagagtcaccgtcagatactgtattgttagtcgatctcattttccagacattgccaatatatgacgatcgagcatcacgaaaagcagtagacgatttggttattcaggctcttggtgaacccaccttcatgaagccctttgctgcggtacttgtacaatctatggaaaagaatctaaaggttacaaacccccttacaagcttaaagcttctcagatggtcacactatcttctgaaatggagtcagtttgccacacttacaaaaggcgcctttaccagactggccaatgcacaagcagtcttatgtcaagtccttatggatgggtccttccgtcggcgccggacttgcaaacagttattcattcatctcttctccgagcacagtggaatatataagatgtacatagaggagctcagagatttaaggatttccatgagagattctcctgcatttttgaatctaatactggattttaccattacctctccatcattatccactcagtaccagtcagtattccttgatttgtatgtcaaaatcatcttgagttcaaaagatcggccaccgaaagcagccactgaagcttttaagcctcttttcttgaacattgggcatgaggattttaagaatactattataccatcatgcataaagatgctgaaaagaaatcctgaaatcgtactacagtctattggatatcttcttaagacagtccatttagacctaagcaagtattccatggagtttatgccagttgttctgcatcaagctcggcattcagatgaagagaggaggattaatgctttgagtattataggaacactaagtgagaagtcaagtgatccagatgctctaccttccatggtcaatgctatcaaagctgttttaggaggctcagaaggaaaactatcacttctataccagagaattggaatgataaatgctttagagcagctatcaagatctcctccaaagcaaataggcagacttgccccctcagtatcaactttccttctaacgtgttacaaggatgatggtatcgaggaagtgaaattggcgattctatcagcaatagggtcctgggctttggtatcagctgaagctgtccaaccagatgttgtttcatttattgctgcaggcttgaaagagaaagacactttaaggaaggggcatctgaaatttttacgagttatatgcaaaaactctgagtctttaacaaaggttgcttctttattggatcatttgattcagttgtcaaaaactggcttcagcaaggcaacacagcggttggatggaatctatgcactctttgcagtatcaaggcttgctgctgttgatacaaaagcagatggtgccattctgaaggagaaactgtggacattgattgctcaaaatgaaccctcattgatctctttacagttgcttcccaaactagcagatgatgattgcttagccgtcctggatcttgttcaatcactgtttgtagaacagttcttcagggttcgagaatatttttcaatccattcattgctgcagctgctaatatatctactttgccatccaagctgggaagttagaaaggtagcttacgatgttaccaagaaaattttctcaagctccagtggtctagccgaagatattctatttttattcacagactggttgtcactggttggagagagactgtcaatattgaaacaaggtgatatggatagcccttcggattctcagctaccattctttccatctaccgaggtccttgtcaagtgtttgtttttgattgcaccttatgctgttgtgcatagtctgagatcatattctcgaattattttgtgctcccaccacccttgccttaccagctcctcaagcccagctggcgtatataagaggttgcaaagaaggcttagacaagaacagatcttttttgttgacttaattactcccaacatctctgttatctgcaagcacttcataggactccaggagcgcaccttgcacgattccttctctgagagtgatattaagatattctatactccagaggggcagttgtcaaccgagcaaggagtttacattgctgaggctgttgctaacaaaaatacaaaacttgcaaaggggcgtttccgtgcatatgatgatcagatgcaggagacagctcggtctattgtccctgcaaagaatgagaagaaagaatcctcaggcattggcaagcgagaaactgggaaatctacaaaaaggactgctcctatagacaaggctaagactgctaaagaggaggccagagagttgctcttgaaggaggaagcatctgtgcgtatgaaggttgggcaagtgcagaaggatctctccttaatgttggatgctcttggcaagttggctattgctaatcctatatttactcatggtcaactgccgtcactggtaaactatgttgaacctttgctaagttctccaatagtaagcgatgctgcattttgtacaatgttgaggctagcacgttgcacagcccctcctctttgcaattgggcgctcgacattgctgctgcgattcgtgtgatatctgttggtgattttgaaatggttttggatcttacacctgtgatcatggaagatgatagtaagaagccatcatctggcatctttgaacaaatagtaaatgggctgactattgcgtgcaaagcgggtcctcttccagcagattcatttactttcgtctttccggttctttatcatgtgctaagcactgttcctgcctatcaaccttcagttgggcctatgctgaatgagctatgcctaggtctaagaggccatgagttagcacaggctcttgtcggtgtatatgcaaaagaactgcatgttaggcttgcctgcttaactgctataaaatgtgttcctgtgcactctgtgcaacgagatttgcaggtgtcaacaagcctctggattgctgctcatgatccggagaaggtggttgctgaattagcagaggaattatgggaccgctttggttttgatgccatcactgattactctggtattttcaatgcactttcccataaaaattacaatgttcgtgctgcatctgctgaggctctggctgcggcattggatgaaaatcaagacaaaatgcaagatgcactttctacccttttctctctgtacattcgtgatattggcactagtgttgaatttggagatgcacactggctcggaaggcagggtattgcattagcactccactctatcgctgacgttttggcctctaaagatcttcctgttgtcatgacatttctcatctcacgcgccctggctgatccaaacgtcgatgttcgtggtagaatgattaatgctggcatccttattattgacaggcatggaaaggaaaatgttcctttgctatttcctatttttgagagctacttgaataaaagggcaagtactactttcctattaataattgtactagcatcagatgagaaaacatatgatcttgtgagggaaggtgttgttatttttactggtgctctggcgaaacatctatcaaaggatgatcccaaagttcacagtgtcattgaaaagttgttagatgtccttaacaccccatcagaggcagttcaacgtgctgtctcagattgtttgtccccacttatggtatccaaacaggaagagggtcaggctcttgtttctagactcttggatcggatgatgaaatgtgaaaagtatggtgagcgacgaggtgcagcctttggccttgctggtgtggttaaaggatttggaatttcttccttgaaaaaatatggcatcgctgtgacattgcagaaaaatttggaagacagaatgtctgcaaaatctcgtgaaggagctttacttggatttgagtgcctgtgtgagaagcttggcaaactatttgagccgtatgtcattcaaatgcttccgttcctacttgtgtgtttctctgatcaagtcctagcagtgcgcgaagctgctgagtgtgctgctcgggcaatgatgtctcagctcactggtcctggtgtgaagcttgttcttccgtcacttcttaag

SEQ ID NO: 121369 - DNA, 2403 bp, Zea Mays
ttcctgtaaaaattctgcttgtccaaaccttttgtgttttggtttatttattttggactgaacatttatttgtttaatatgaaatcattgaaatgatctacatactttagtactcttgcttttcagggagtttgcattggtttgagtgaggtcatgggcagtgcaggaaaacaccagctattaagttttatggatgaacttattcctaccattcgtactgctctatgtgacagcacccaagaggtccgtgaatctgctgggttagcgtttagtactctgtacaagagtgctggactgcaagccattgatgagattgtccccacattgctacgagctttggaagatgatgatacatctgcaacagctcttgacggtctaaagcagattttaagtgtcagaacagcagctgttttgccccatatattgcccaaattagtccagcctcccctctcttcattcaatgcacatgcattaggtgctctagcagaggttgctgggccaggtttgaattcacatatcggaactgttctcccagcattgattcttgctatggatgatgaagatgcggatgtacaaaactcagccaggaaagctgctgaaactgttctgttggttattgatgaggaaggagtggaaactttgatacctgagcttctaagagggatcaatgacagtcaggcatcaatgaggcggggttcagcctatctaattggtttcctctttaaaaacactaaattatatttggctgatgaggcttctgatatgatgtcaaccctaataattttgttgagtgatacagacaaggctactgtatcggctgctttagaagcattttcaagagttgttgcatctgttccaaaggaacagctcccgacgcatataaaactagtgcgcgatgctgtctctacagccagagataaagagcgtagaaggcgaaagggtgtgcctattcttgtgcctggcttatgtcttcctaaagcactgcagccttttcttcctatatatcagcagggtttaattagtgggtcggccgagacaaaagaacaggcagctgaaggtctaggagagttaattgacgtaacaagtgagaagactcttaaggaagttgtagtgccaattacaggacctcttattcgcatccttggtgatcggtttccatggcaagttaagtcagctatcctatcaaccctgacaatcatcatcatgaaaggtggaattgcacttaagcccttccttccacaacttcaaactacatttgtaaaatgtctacaggataataataggtctgtccgggcgagggctgcagctgctctgggaaagcttagtgctctcagcacacgggtggatcctttagttagcgatcttctgtccatgttgcagtcaggagatgaatctgtcaaagaaagtgtgctttctgcgcttaaaggtgttatcaaacatgctggtaaaagtgtcagctctgcaataaggtcacgtggatgtgctcttcttgaagatctgctgcaggctgaagctgatgatgtccgcagttgtgctgcaaaagtgattggcacattgtctcagtacatggaggagacagagatttcagatttggtgcaaatcctattgaacatgagcacttcatcagactggtgtaccagacatggtgctttgttatcgttctcatacatatcaatgcattctccatcaaaattgtgtcatttggcatcctttccatctctggtcgatcttttgaaaggttctctcaaagacgacaagttccctgttcgtgaagttgctacaagaactctgggaaagatactctgttttgagctacagccagaagctggcaccttgcaacttgttcagctgcttatcttggccttgcgtgatgattcaagtgaagttaggagaagatctttgtcgtgtatcaaagctgctgcaaagacaaatcattcagctcttgctacacatcactctatattgggcccggcaattgctgaagctttgaaggactctagcatgcctgtacgtctagctgcggaacgctgcgcccttcatgttttccagttaacgaaagggccagataatgttacagcagcacaaaagtacctcgggatgactggcttggaagtgaagaaaatcgcaaagcttgacgtggacagtgatggtagtgagagcagcgatgatgacaagaggacatagactctactcaacagcaatcttttttcggttcagttgttatgatctttacatatagttagctacattgatagcggaatgtggggtcattttttctgtctggcccattttgtgtacatcctttttgacaacaaacaggtaaaagtgacaacgtttgcaaatcgacaaacaatggtgagttattcaatctaagaagtctgtctacccagtttttcccagata

SEQ ID NO: 121370 - DNA, 2757 bp, Zea Mays
ttcctgtaaaaattctgcttgtccaaaccttttgtgttttggtttatttattttggactgaacatttatttgtttaatatgaaatcattgaaatgatctacatactttagtactcttgcttttcagggagtttgcattggtttgagtgaggtcatgggcagtgcaggaaaacaccagctattaagttttatggatgaacttattcctaccattcgtactgctctatgtgacagcacccaagaggtccgtgaatctgctgggttagcgtttagtactctgtacaagagtgctggactgcaagccattgatgagattgtccccacattgctacgagctttggaagatgatgatacatctgcaacagctcttgacggtctaaagcagattttaagtgtcagaacagcagctgttttgccccatatattgcccaaattagtccagcctcccctctcttcattcaatgcacatgcattaggtgctctagcagaggttgctgggccaggtttgaattcacatatcggaactgttctcccagcattgattcttgctatggatgatgaagatgcggatgtacaaaactcagccaggaaagctgctgaaactgttctgttggttattgatgaggaaggagtggaaactttgatacctgagcttctaagagggatcaatgacagtcaggcatcaatgaggcggggttcagcctatctaattggtttcctctttaaaaacactaaattatatttggctgatgaggcttctgatatgatgtcaaccctaataattttgttgagtgatacagacaaggctactgtatcggctgctttagaagcattttcaagagttgttgcatctgttccaaaggaacagctcccgacgcatataaaactagtgcgcgatgctgtctctacagccagagataaagagcgtagaaggcgaaagggtgtgcctattcttgtgcctggcttatgtcttcctaaagcactgcagccttttcttcctatatatcagcagggtttaattagtgggtcggccgagacaaaagaacaggcagctgaaggtctaggagagttaattgacgtaacaagtgagaagactcttaaggaagttgtagtgccaattacaggacctcttattcgcatccttggtgatcggtttccatggcaagttaagtcagctatcctatcaaccctgacaatcatcatcatgaaaggtggaattgcacttaagcccttccttccacaacttcaaactacatttgtaaaatgtctacaggataataataggtctgtccgggcgagggctgcagctgctctgggaaagcttagtgctctcagcacacgggtggatcctttagttagcgatcttctgtccatgttgcagtcaggagatgaatctgtcaaagaaagtgtgctttctgcgcttaaaggtgttatcaaacatgctggtaaaagtgtcagctctgcaataaggtcacgtggatgtgctcttcttgaagatctgctgcaggctgaagctgatgatgtccgcagttgtgctgcaaaagtgattggcacattgtctcagtacatggaggagacagagatttcagatttggtgcaaatcctattgaacatgagcacttcatcagactggtgtaccagacatggtgctttgttatcgttctcatacatatcaatgcattctccatcaaaattgtgtcatttggcatcctttccatctctggtcgatcttttgaaaggttctctcaaagacgacaagttccctgttcgtgaagttgctacaagaactctgggaaagatactctgttttgagctacagccagaagctggcaccttgcaacttgttcagctgcttatcttggccttgcgtgatgattcaagtgaagttaggagaagatctttgtcgtgtatcaaagctgctgcaaagacaaatcattcagctcttgctacacatcactctatattgggcccggcaattgctgaagctttgaaggactctagcatgcctgtacgtctagctgcggaacgctgcgcccttcatgttttccagttaacgaaagggccagataatgttacagcagcacaaaagtacctcgggatgactggcttggaagtgaagaaaatcgcaaagcttgacgtggacagtgatggtagtgagagcagcgatgatgacaagaggacatagactctactcaacagcaatcttttttcggttcagttgttatgatctttacatatagttagctacattgatagcggaatgtggggtcattttttctgtctggcccattttgtgtacatcctttttgacaacaaacaggtaaaagtgacaacgtttgcaaatcgacaaacaatggacacaagttgtattgcaaccaaggactgattcgttagtttgagcacagcacaaccacccagttcaacgataacgcatgtcaatgtaagccacgcataccatatagtatcatatcgtcgagtattgttcgtaccacatcttcctcccagttgatctccttgggcaaggtaggcccttccctggacagctcgttgggcatcttgttgagcatgctctctgctctgtacctgaacgctggagtccacgaacagactgctctgagcggcgtcaatgtggataggaatgtaatcggacgtatattactggttccatgtttgttttcatattttctcattggatattaatgcaaatattatcgagttgggcatcggatattaatgcaaatattatcgagttgggatt

SEQ ID NO: 121371 - DNA, 1653 bp, Zea Mays
atgcttcacgtcggcgatgccgctgccgctcatccccacgggcggcgccgacgacgaccatacgccgtacggctcccgcatcacctccagcagcgagtccctcagtctgtccgcctgcactgccacctcattgtcccgcctggcggcgcggaagacgttgaggacgaggctctcgtgggaggtgacgttgacgttggtgacctccagtcccaggtcggcgatggagtccatgatctggacgaagcgcccgggccggcgctcgcacagcatctgcaggaagaactcgttggcctccacctgccgcacctccacctgcggctccatgtcattccccttctcctcctcctcctcctccgccgccgcacgggccctcttggtcccggcgagcgggtgctggtggctcgtgggcggcgactcgtcgttctccagccccaccaggctcgccggcggcgggtggtccaggaggacgtcgggggcgccggcgccgtccgccgggtcctccagctcgtcctgcagcgccttcacctggttctgcaggcccacgatgtagtcgatggcgtccccgaggatcgccgcgcggtccatcttggagatgttcgggacgagcgacctgagcttgtagagccgctcgttgagcttcttccgccgcttccgctccgcctcgaggttcttgcactgctgccgcttcccgccgcccttgccgccgccacgcccctgcgcgtcgccgtcgccgtcgtcctctgggtccccctgcatgtcgctgacctcggaccccgagtccgcatcgcgcggctgctgctcctgctgcagctgcaccgcctccagctcgctcccagccgcagcagcatactgccacccggcgacgtcgtccaccccaccaccaccggcgcccggcgcctgctgcaccgcctggaacgggtccgccgcgacgctgccggcggcgtcgaacaggctgagcgacggcggcaccgcatcgccgtacatcccacgcgacgcgtccgaggcgccgccgtcccacgcgaatcccggcggccacgcgcccccctcaccgccgctcggcaccccgcactgcgccatcaccagctccgccatctgctcctcctccgccatgcacgtatctcgccgcgaagagctcgacgaggccgccggcgacgggcaccagcagccgcgtcctcgggccgccgctggacccgggctcctgcaccatgccactggagtaacctgtttggagctctggcacgcggctgctctgccagatcggctggttggacaccattgcctcggcgtgcatccctgcagacgaggagtcgagctggattgatggaggcaggtcgcccagcgctggaagctgtgcctcgaactgactgctgcagcagaacccagccatctccaagaacctctgatcaggagacagcctccagtagacgcagtagtcccaggcgtcgacgccgacaagaggcctcaacgcggcctccacgctggccggcccgggcccggccccggccccatctccatcagcagccacgcacgggtggtggtggtggactccccctcccatggcgccggcgacgatcgcctcacccgaggactggaggactgtgcccgctgccgcctgcacatcgcactcgcagcaataagcagcagcagccatga

SEQ ID NO: 121372 - DNA, 922 bp, Zea Mays
gcaaatcctcggtggttttgcagcttccagagcttgagattgagaccagcgcggcagttctttcttggtcgtcgatggcgctgaggaggatcatcaaggagctcaaggacctgcagagggatccacccacgtcctgcagcgcagggcctgtgtccgacgacatgttccactggcaagcgacgatcatggggcccagcgacagcccctactcggggggcgtgttcctggtcgccatccacttccctccggactacccgttcaagcctcccaaggtggcgttcaagacgaaggtgttccaccccaacatcaacagcaacggcagcatctgcctggacatcctcaaggagcagtggagccccgcgctgacggtctccaaggtgctgctctccgtctgctccctgctcaccgaccccaacccggacgacccgctcgtcccggagatcgcccacatgtgcaagaccgaccgcctcaggtacgagtccaccgccaggggatggacgcacaagtacgccatgggataacctgatgtgagccgtaacaacaacgacgctttggccgagtggttaaggcgtgtgcctgctaagtacatggggtttccccgcgagagttcgaatctctcaggcgtcgtctttttttttcctttttttttctattttgcctacccacatggacacatggttcccttcttcacaagctctggtactgtaacattcagaaatgcaaatggttatcatatcgtgagaattctccggttacaacgtgagtgcaagctgtaacccaagggaatcgctgctgtattatacatttgtacaaggttcaccaaaccgattggtgcccaaaaactggccgagattcatgttcgatttatcggtgtaaaccgatagaaaccggccagatctgaatgcaaaccatttttttgatt

SEQ ID NO: 121373 - DNA, 1941 bp, Zea Mays
atgggaggaaattactgcctgcaaaatgctgttgaagtataccttggaacgccggcggtgagcagaaaattgcgggcggcacaccggaggttgggaacggggctccttcttcgtcgccggcagcggcacagtggcgcgacacttggagagagcaccgatgacagttgtggacgcggactgcggctaatttggagaaaggaaggggcaggattgcctaggcaaccttcatatactactggatttgggactgctttaaatatagaggcacttgttgctgccgcggaacaaagagatacaccaattgaggacaagattctttttatgatcaacaatatatccatctcaaatatggaagctaaggcaaaggaatttaacgaggtcatacaggaacagtattatccttggtttgcacaatacatggtcatgaaaagggcaagcattgaaccaaatttccatgatctgtatctgaagttctttgataaagtaaactcaaaatccttgaacaaggaaatactgaaagccacatatgagaactgcaaggtcttgttaagatcaaaccttatcaaatctagttccgaggagcgctccttgctaaaaaacctaggcagttggttgggaaagttcaccattggtaggaatcaggcactaagggctaaggagattgatccaaaatctcttatcgtggaggtcttgttaagatcagaccttatcaaatctagttccgaggagcgctccttgctaaaaaacctaggcagttggttgggaaagttcaccattggtaggaatcaggcactaagggctaaggagattgatccaaaatctcttatcgtggaggcatatgagaaaggattgatgattgcggtcataccattcacttcaaagatccttgaaccttgccagtcaagtatcgcatatcgacctccaaatccctggaccatgggaattctaagtctacttgctgaaatttataatcttccaaacctcaagatgaatctgaaatttgatattgaggtcctcaacattcctttttttgatagtttctttattgactttgtatctgccctagctacccatggccatgctaaatgttcttttgggatttcaggtgctattaagaaccttactgttgacataaaggatgtgaaaccaacttccctgctcaaagatcgtctgcgcgaagtcgagggaaatccagatttttcaaataaagatgttactgcatctcaaacccctgtggttgcagaagtcccttcagggaccatcccttcactaactcatatggaacaacaacctgaggtcaatatcacatcccgagctatgagccttccaaatatacttaatcagtatgctgctcctgtccgtctacctacaaacagcacggtagaagatgacaaagttgctctgatgatgcctgagcaagtgccctcgttgacccaggtttcgccagcacaaacacaatcaacatcaccatctccattttctgttaaccagcttatggcagctattccacgagaagagatacgtttcaaaataaatccaaaggattatgcactggagtctgataacaatacgataactcgatccgcacatttgatggttggaacattagccggaagtctggcacatgttacttgcaaggaacctcttcgtgttgcactatattctaatcttcggaatctcattcagaaccttatgagcggcagtgaaactatcgagcaacttattcacacgctaatcaatgataacttggatcttggctgtgccatcattgaggctgtggcaacatgtcaggcaaggatcatcaagtttgacgtcggctacgtggtcatggtgactggcgggaggaacaccgggcgtgtaggagtcatcaagaacagggagaagcacaagggcagctttgagaccatccacgtgcttcttggagctttttgctatgtctag

SEQ ID NO: 121374 - DNA, 361 bp, Zea Mays
atgggcatgcatgatgagcagaaagcaaccgatcgaacaaggcaggaaagataccttcccaagggtcctcactctctgccagctaaccaggccactgaagctggccgtagacagcgagcagagcactgcgtcatcgcagacctgaccagaccccgctccccccgcctccactttgctatccatgtcgcccttgcttggtctccacttgaagcacttggccttcttgagtctcttctgtctcagcgctgccctgtgctcctcacctctcatctccttcccgctatatcctgcggcagccgttggaggaggaggcgaggagggggtggagccactccctatcgcgtgtctccttgcttgctga

SEQ ID NO: 121375 - DNA, 573 bp, Zea Mays
atgggcatgcatgatgagcagaaagcaaccgatcgaacaaggcaggaaagataccttcccaagggtcctcactctctgccagctaaccaggccactgaagctggccgtagacagcgagcagagcactgcgtcatcgcagacctgaccagaccccgctccccccgcctccactttgctatccatgtcgcccttgcttggtctccacttgaagcacttggccttcttgagtctcttctgtctcagcgctgccctgtgctcctcacctctcatctccttcccgctatatcctccgatctgcatcgcctcgagtcgagccgttgtcgcggcggcggcggcggcggggaggacggcagcgcgcgggcagcggcggagcaagccgccggcggcgccggagggcgagagcggcatgcggcgccaagagccgcgcgcgggtggtggggcggcgggcgaccttgctctgcgtccgtcggtgcgatgcgatgcgatgcgagcgaaggagagtacgagatcgagatggaaggaggaagaaggcgagggggtgaagggcagagcgagcgagtgagtgagtggtaa

SEQ ID NO: 121376 - DNA, 783 bp, Zea Mays
agagatgcttccccctcccgtgccggcttgggcagcagttgggctctctcggcccgcctccttcccgagcacgcacgccgcctcgcttccaattcttccccccctctcctcgtccgctccgctccgctcctgcgttgccgtggagtgccgcccggggctccattccattccacccgtagcccggtccccccgcgccgccggcgcgccggttccttcggttcccgggatcaagatgattggttcattcattaccggaatgctaacgcttgttctcggatacgcgtaccctgcatacgactgctacaagacagtggagctgaacaggcctgaggtcgagcagctgcggttctggtgtcagtactggattttactcgcgtttctcaccgtactggagagagttggggaaagtttcgtatcatggttgccaatgtatagtgaagcaaagctcgcatttatcgtgtacttgtggtatccaaagacacgggggactgcctatgtatacgagtcattcttcaagccatacattgcaaaacatgaaactgagattgatcgaaatctgcttgagttgaggacaagggccggtgacatggcagttctttatttccagagggttacaaactatgctcagacaaggtcttatgaaatcttgcagtatattgcctcacagtcaccgactcaaagacaggtattgcttccttgcatgctctttctctctgctattacagctatttcagcaagtggagatacaattcatgctgcatagttaatgtctgtacttaatta

SEQ ID NO: 121377 - DNA, 1411 bp, Zea Mays
agagatgcttccccctcccgtgccggcttgggcagcagttgggctctctcggcccgcctccttcccgagcacgcacgccgcctcgcttccaattcttccccccctctcctcgtccgctccgctccgctcctgcgttgccgtggagtgccgcccggggctccattccattccacccgtagcccggtccccccgcgccgccggcgcgccggttccttcggttcccgggatcaagatgattggttcattcattaccggaatgctaacgcttgttctcggatacgcgtaccctgcatacgactgctacaagacagtggagctgaacaggcctgaggtcgagcagctgcggttctggtgtcagtactggattttactcgcgtttctcaccgtactggagagagttggggaaagtttcgtatcatggttgccaatgtatagtgaagcaaagctcgcatttatcgtgtacttgtggtatccaaagacacgggggactgcctatgtatacgagtcattcttcaagccatacattgcaaaacatgaaactgagattgatcgaaatctgcttgagttgaggacaagggccggtgacatggcagttctttatttccagagggttacaaactatgctcagacaaggtcttatgaaatcttgcagtatattgcctcacagtcaccgactcaaagacaggcacatcagcagcagcaacgcccaccaccgccacggactcggcaggtcaaccctgcacctccacctattcccgcaccctccgcgcctccgatgccaccacagcctgcccaagcccaagttcctcccactccaccaaggcccctagttccagtggttcctcctggcgcagtgcctcctgccccgccaccaactgctcctgaagccaccgccaccaacggtcttcaggacaccgaaaccatgcaggtcgacccacctcgtgcttcactgagcggcccaccactaccacctgaggagacgctcatcgaggaggcgatccggctgacccggggccggctcaggaggcgcttggctgggggatctggaccaccgcaaaattagcgtcgatcaagatttccatctcacgcgaattgcaccacactggtctggttcttggtgattgactgagaagagggggaatgctgagttggttgaacagagtttgggtttcctcgcatgcgttctccgttgtacgaactggaaccggtttggtctcgaattgtgaatagtatcccagaaacagaagtggatgatcaattcaattcacagtgtagcgctaggaaatatggttgggaaccatcttctgcaagacgcgaaggcgcgacatgtcatgagcatttagcaacgatgatactactggtcacagtagtgtagtctggaatccaaatgcgaagaacaaaaaagaacagc

SEQ ID NO: 121378 - DNA, 1514 bp, Zea Mays
agagatgcttccccctcccgtgccggcttgggcagcagttgggctctctcggcccgcctccttcccgagcacgcacgccgcctcgcttccaattcttccccccctctcctcgtccgctccgctccgctcctgcgttgccgtggagtgccgcccggggctccattccattccacccgtagcccggtccccccgcgccgccggcgcgccggttccttcggttcccgggatcaagatgattggttcattcattaccggaatgctaacgtaagtaacaacaccgacctcgtttttttcttcctttgctatggagcattgttggtgtctccagatctgtcatctgttccatctgtgttctcctgtgtggcaggcttgttctcggatacgcgtaccctgcatacgactgctacaagacagtggagctgaacaggcctgaggtcgagcagctgcggttctggtgtcagtactggattttactcgcgtttctcaccgtactggagagagttggggaaagtttcgtatcatggttgccaatgtatagtgaagcaaagctcgcatttatcgtgtacttgtggtatccaaagacacgggggactgcctatgtatacgagtcattcttcaagccatacattgcaaaacatgaaactgagattgatcgaaatctgcttgagttgaggacaagggccggtgacatggcagttctttatttccagagggttacaaactatgctcagacaaggtcttatgaaatcttgcagtatattgcctcacagtcaccgactcaaagacaggcacatcagcagcagcaacgcccaccaccgccacggactcggcaggtcaaccctgcacctccacctattcccgcaccctccgcgcctccgatgccaccacagcctgcccaagcccaagttcctcccactccaccaaggcccctagttccagtggttcctcctggcgcagtgcctcctgccccgccaccaactgctcctgaagccaccgccaccaacggtcttcaggacaccgaaaccatgcaggtcgacccacctcgtgcttcactgagcggcccaccactaccacctgaggagacgctcatcgaggaggcgatccggctgacccggggccggctcaggaggcgcttggctgggggatctggaccaccgcaaaattagcgtcgatcaagatttccatctcacgcgaattgcaccacactggtctggttcttggtgattgactgagaagagggggaatgctgagttggttgaacagagtttgggtttcctcgcatgcgttctccgttgtacgaactggaaccggtttggtctcgaattgtgaatagtatcccagaaacagaagtggatgatcaattcaattcacagtgtagcgctaggaaatatggttgggaaccatcttctgcaagacgcgaaggcgcgacatgtcatgagcatttagcaacgatgatactactggtcacagtagtgtagtctggaatccaaatgcgaagaacaaaaaagaacagc

SEQ ID NO: 121379 - DNA, 1392 bp, Zea Mays
ataaacaagtttcggttgctgcgaacgcgggcaaccccagttcgaatgcttccccctccggtcgcgcgggtttctctgcttcgctgggatcaagatgattggttcattcattaccggaatgctaacgcttgttctcggatacgcgtaccctgcatacgactgctacaagacagtggagctgaacaggcctgaggtcgagcagctgcggttctggtgtcagtactggattttactcgcgtttctcaccgtactggagagagttggggaaagtttcgtatcatggttgccaatgtatagtgaagcaaagctcgcatttatcgtgtacttgtggtatccaaagacacgggggactgcctatgtatacgagtcattcttcaagccatacattgcaaaacatgaaactgagattgatcgaaatctgcttgagttgaggacaagggccggtgacatggcagttctttatttccagagggttacaaactatgctcagacaaggtcttatgaaatcttgcagtatattgcctcacagtcaccgactcaaagacaggcacatcagcagcagcaacgcccaccaccgccacggactcggcaggtcaaccctgcacctccacctattcccgcaccctccgcgcctccgatgccaccacagcctgcccaagcccaagttcctcccactccaccaaggcccctagttccagtggttcctcctggcgcagtgcctcctgccccgccaccaactgctcctgaagccaccgccaccaacggtcttcaggacaccgaaaccatgcaggtcgacccacctcgtgcttcactgagcggcccaccactaccacctgaggagacgctcatcgaggaggcgatccggctgacccggggccggctcaggaggcgcttggctgggggatctggaccaccgcaaaattagcgtcgatcaagatttccatctcacgcgaattgcaccacactggtctggttcttggtgattgactgagaagagggggaatgctgagttggttgaacagagtttgggtttcctcgcatgcgttctccgttgtacgaactggaaccggtttggtctcgaattgtgaatagtatcccagaaacagaagtggatgatcaattcaattcacagtgtagcgctaggaaatatggttgggaaccatcttctgcaagacgcgaaggcgcgacatgtcatgagcatttagcaacgatgatactactggtcacagtagtgtagtctggaatccaaatgcgaagaacaaaaaagaacagcgccatgtatgtgctgcgtacatgtagttaacgactactatgcaattagtccttatatgcaatcagctatactcctgatttgttagatcataattcaatcatatatcacaattaactttt

SEQ ID NO: 121380 - DNA, 860 bp, Zea Mays
gtcatgttcattaaggcacatcagcagcagcaacgcccaccaccgccacggactcggcaggtcaaccctgcacctccacctattcccgcaccctccgcgcctccgatgccaccacagcctgcccaagcccaagttcctcccactccaccaaggcccctagttccagtggttcctcctggcgcagtgcctcctgccccgccaccaactgctcctgaagccaccgccaccaacggtcttcaggacaccgaaaccatgcaggtcgacccacctcgtgcttcactgagcggcccaccactaccacctgaggagacgctcatcgaggaggcgatccggctgacccggggccggctcaggaggcgcttggctgggggatctggaccaccgcaaaattagcgtcgatcaagatttccatctcacgcgaattgcaccacactggtctggttcttggtgattgactgagaagagggggaatgctgagttggttgaacagagtttgggtttcctcgcatgcgttctccgttgtacgaactggaaccggtttggtctcgaattgtgaatagtatcccagaaacagaagtggatgatcaattcaattcacagtgtagcgctaggaaatatggttgggaaccatcttctgcaagacgcgaaggcgcgacatgtcatgagcatttagcaacgatgatactactggtcacagtagtgtagtctggaatccaaatgcgaagaacaaaaaagaacagcgccatgtatgtgctgcgtacatgtagttaacgactactatgcaattagtccttatatgcaatcagctatactcctgatttgttagatcataattcaatcatatatcacaattaactttt

SEQ ID NO: 121381 - DNA, 285 bp, Zea Mays
atgggagaagagaagagaaggatggctccacagcagcgcaccaaggagagcccgagcagagggggagagatggcgtgggcggggaagagaagggagagggcaggggctgccatttatagggccaagctctggacatgtcagactgcaccagcaggtggcaggtgctgcagtgacgaccttggacgacgtgttttggcattttccgcttggaatcggatcttggttgctgcacaaaatatcttccttgatctataccctacaattgttgtacaggacttgaggtga

SEQ ID NO: 121382 - DNA, 220 bp, Zea Mays
ttatgactatgtatgagatattgtctcttattagtactggatgatgagatgtgtcttattatgactatggatgagacttttgtgatgtaattgatgagactatggatttaaatattgttatgtgattgtgtgtgagatgttttatgtaaaaatatgttgtgctatatagctgttgatatatttgttatgttgttcaatgtggtgtaaaataaaaataaac

SEQ ID NO: 121383 - DNA, 861 bp, Zea Mays
atgccacagggcactcttccttgttatgaatgccgcgtgctgaaatggtacatgtggtccatgacagccctccaaggaagttccttctccagattccgggttgagatgaccaagataatctcgcttgtctacgttgtggacgacatatttgactttgttggcacactggaggagctctccctcttcactgaagcagtcaaaatgtgggatactgtggctgctgattcactccctagttacatgagatcatgctataatgctctttacaccattacaaatgagatagcggaaatggcagaaaagaagcatggattgaattctattaatcatctcagaaaagcgtgggcaacgttgtttgatggatttatggttgaggcaagatggctagcaattgatcaggtccctactgcggaggactacttgagaaatggtgttgtcacatcaggagtgcctcttacatttgtacacatattcaccctcatggggtgtgaacaaagtatcgaagcactcattgaccagatgccctctgtcatctcgtgcccagccaagatcctccgacttcaggatgacatgggcagtgctaaagatgaagctcaagaaggatttgacggatcctatagggatttctacctcaaggagaaccctagatgcaaccgtaatgatgcggaagcacatatgcgtagcttgatcgcaagggagtgggaggagctcaatagggagtgtttatacacgaggaccttctcctctaactgcacacgtgtctgcttgaacaccgcgagaatgatcggtgtcatgtactcatacaacaaggaacagaggcttcttgtccttgaggactatgcaaagatgttgatactttga

SEQ ID NO: 121384 - DNA, 222 bp, Zea Mays
atgaaatgcaggcctttcaacataataaactgtttcttaccttcatttaagcagatcaccttttgccagaatcattccagaacaagtagaccggaaaccggattaagttgcttcccctttatgaaactaattaaccaaggcttgtgtttaactaaaacttcactatttaatcatttgtttcacactcaaataattatactgttagctacgcaatcatcttaa

SEQ ID NO: 121385 - DNA, 267 bp, Zea Mays
cggtggatctgcgcttctgcggagatcccggtgctccggcttactccctccggtctccctctcctatcttcttctccccctccggcctccggtgtgatctacgcttctgcggagatcccggtgctccggcttactccgttgaggaaccgggactccggggtccggtacggcggcactggcactggcactggtactctcctctctcctagctccggtctccctctcctctctcctagctctggtctccctctcctatcttcttctccc

SEQ ID NO: 121386 - DNA, 2279 bp, Zea Mays
atggccgtctccgacgatgaaactattgagatcgactgcaacgatgagcgacggttgtgcgggttggccggagatgacgatgaggatgatctccgggaggatgctgcagcgctctttggccatagcagcgagcatcctgtccatgtcggtgatgaacaacaagtcggtggtcaggataacgaaggtgaaggggacgaacacagtgccaagcgatgtcgtccttctacttctgcagtgtggttcgatttcgagaaacttttcaaattcgtgaacggtaagaaggttaggtttgcagctaagtgtatacattgctctaagcaatattctgctctctctagtggtggcactggccacttgtcccttcataaagacaaatgtcccaggaggcgtgagaaaacccgcatgtctcagtctcagatatcttttaatcctgatggtagtatgcgtaactgggagtactgtcctatggttgcacgtaatgaattggtttgattgcttgctaggctagaaattcctattagtttgggtgaaaatgctgcatttgaacactacattagaactgctcataatcctaaatttgtgcctgtctctaggcaaaccaccaccagagacatggttaaatacttcactgataaaaaggctaagcttgttgagactctttcttcttctaatgttaattgtgtgtgtttgacctctgacatttggtctggtaatgccaaagaggactaccttagtgttgttgcccattacataaaccctgattggcaactagagaaaagggtgcttgctttagtgcttattgatgtgtcacacaatggacaaaacattgctgatcgtgttgctggtgtgcttgctgattatggcttgactaataaggtgtttgcttttaccctagacaatgcatcatctaatgctgctgccatgaggttgcttagacctataatgtcaccatatcttggtattgataatggggcagattctgaaatgttcttgcatcagcgttgtgcatgtcatataatcaatttgatagttaaagaggccctagattctcttaagaacttgattgaaacatttagaactgcaatatcatttttaaactcatctaatcagagaattgctgcatataaaagttattgcattgctactaatattaggcctagaaaattccagttagacatggaggttagatggaactctacatatctgatgcttaagcatttgtttcctcataggatacctttcactactttcattcatgcaaactatcctagggctgaaggtgatcaatttattttaactgatgaacattgggttattggagacaaagtacttaaatttcttgagctattttatgattctacagttgcattgtctggtgtttattatcctacatctccacttatgcttcattttcttgttaagattgctatacatctaaagaactatgctaatgacactcacatcagaggtgtcattcaacctatggtagataaatataataaatattggaggaacatccctttactttactcttttgcattcatcttggaccctagagctaaaatgaaaggttttagtagagtgcttagaagattaatgaacctgacaagtacagattatgctgtttatcaggttaccactagagctaagcttactgatgtttataataaatatgaagagaaatatggatctgttagattgaatagggttgtccctcctaacttgtctggtaagaaacggtctgcttgggatgaaatttatgatgatgctgatgatgtgggtacttctgttggtatgcattcttttgcttctactctaaacattgctagagatacctctgcaactgctctactgcatgctgcaagctcttcagcttctactgcttctgaactcatttcttacttagattgtgacactgtcaaccagttaactgatgatttcaacatcttgcactggtggcatcagcacaaactcacttatccagtactgtcaattatggctaaagatattttaactgttcctgtgtctaccatctcttcagaatccacttttagtttaactggcaggatcatcgacgagcggaggaggagattgaagtctgatgtggttgagatgttgacatgcattaaagattgggaggatgctgaagcaaggatgcaacacatggtggatgacaaagagtttgaagaaacatttgaaaatctttatcttgattagtcttactctctttgtgaccatttctgtaatgggactgtaatattatgcacctggacaccgga

SEQ ID NO: 121387 - DNA, 748 bp, Zea Mays
tataattttggcgattcggcttaactaaagactgtgtactgcagaacgaactcttgtcatgtacagtgtaaaggaacttgtgattggcattctcagcatcacagctttgtgaacatggatcgacttcgacaggtcaagaaaacaacgacctgcagacggagattgaacctaacactaccaagcaatacatgggtcatgggatgggacgaaagagaagagaagggtgaagggacatgcaggatgcgcatagcagagcagacacgcacgcacaaggacgtcgtctcatggccaggtggtgaactcgaagaccttgccgacgatctcgagcccggtggggatctgccagacgaagagcaggacgttgacggcgttgagcgcgatgtgcaggctgcgggccgtctcgtcccccttctgcatcgccgggacgagcgcggccgcggcggcccacagcacggtgatggcggcgcccgcgaagaggtgcgggcccgggaacagcttgccggtgcggaaccaggtgttgagcgcgccgccgacggactcgagcacgccgaggccgaggaggagggagcccgcgttgaagtggcggtcccggaacgaccccttgagcagcgccttccgctcgtcggtgagctcctcgatccgggcccggacggccgtgagcggcgcggccatggcgctgctgcttcttcccttggcgtgtggtcggtgaggcggtgacagacactgactgggtggtgggggatggggc

SEQ ID NO: 121388 - DNA, 1337 bp, Zea Mays
tataattttggcgattcggcttaactaaagactgtgtactgcagaacgaactcttgtcatgtacagtgtaaaggaacttgtgattggcattctcagcatcacagctttgtgaacatggatcgacttcgacaggtcaagaaaacaacgacctgcagacggagattgaacctaacactaccaagcaatacatgggtcatgggatgggacgaaagagaagagaagggtgaagggacatgcaggatgcgcatagcagagcagacacgcacgcacaaggacgtcgtctcatggccaggtggtgaactcgaagaccttgccgacgatctcgagcccggtggggatctgccagacgaagagcaggacgttgacggcgttgagcgcgatgtgcaggctgcgggccgtctcgtcccccttctgcatcgccgggacgagcgcggccgcggcggcccacagcacggtgatggcggcgcccgcgaagaggtgcgggcccgggaacagcttgccggtgcggaaccaggtgttgagcgcgccgccgacggactcgagcacgccgaggccgaggaggagggagcccgcgttgaagtggcggtcccggaacgaccccttgagcagcgccttccgctcgtcggtgagctcctcgatccgggcctccgccggcgacggcgacttgctggccgcagcgggcggcggggttgtggtggaggaggagtccgcgccggcgccgaccgccgcgggagtggccgcggcggcgggcttgagctgcttcttgagcgcgttgatctcgtcctggacggtgcgcacccggcgccactgccagccgaggtaccccgcccagagcgtgtacgcgaagagcccgcccatgatgagcgggtgcagcagcgcgaagctgcggccctcgaggatccccaactcgccgcccaccgccagcgccgcgtccgccggcagcagcagcagcgccgccaccgccgccgcggacaccggcgccaccgcctccatgggaggcctggagcaccggcaccgggtggtgcctggtggtagtagacgcggcctgctgctcttggacggaggggccggccggccggtggtaccggctgccgtgcaggtcactgggaggaggaggaggcgggcccggacggccgtgagcggcgcggccatggcgctgctgcttcttcccttggcgtgtggtcggtgaggcggtgacagacactgactgggtggtgggggatggggcgaggggcgggaggactgggagaggaggagataaggcgatcgaccgagtggacgagacgacaagtgtcctctgtgttgctctgaaggcacaggaagcagccagcgtgtgc

SEQ ID NO: 121389 - DNA, 486 bp, Zea Mays
atgcgtagcggctccacgggcggaggtggtcggagatgtgctcctggactcggtgcccaccatgcagaggtctccggacgacggtggactagtggagtagtagccctccaggccaaaggtgatagatatgtgccgccccatgaggcgcgagcggaagtgttgcatgtggccgtcgcgatcgtgaaacgggtggcgcccgtcggagacggtgagagtggcgaaggcgtggaggagcgaggcactggtggtggggggggcaacgatggaggggagcagcgagaaggagcactgctgagaggaggagtcagggccgaagatgtgtggtcctcatcgacaaagtacctggtggatacctcgaggatggggacccgagcgccgaacctccgccgatgggcaggtcgagcgcgaaggggaggttggaaggcaccgaggacggggtgtggcactgaggctgattcacaggcaaaagcgggcgtcgagacgtag

SEQ ID NO: 121390 - DNA, 1334 bp, Zea Mays
gacgacacccgcgagccgagacagccacccagttgctcaagtgattccaggcccacgccacgccaaccccgggctcaactcgagtccacacgccccagcaccacccctgcctctcagtccagtcccccacccaccaccaccactcctcccctcgccgccgcccgttcccgaccgatccggccggatcgccccgccatggaccagtacgagaaggtggagaagatcggggagggcacgtacggggtggtgtacaagggcaaggaccgccacaccaacgagacgatcgcgctcaagaagatccgcctcgagcaggaggacgagggcgtcccctccaccgccatccgcgagatctccctcctcaaggagatgcagcaccgcaacatcgtcaggctgcaggacgtcgtgcacaacgacaagtgcatctacctcgtcttcgagtacctcgacctcgacctcaagaagcacatggactcctccacggacttcaagaaccaccgcatagtcaaatccttcctctaccagattctgcggggcatcgcctactgccactcgcaccgcgtgctccaccgcgacctgaagccgcagaacctgctgattgaccgccgcaacaacctcttgaagctcgcggactttggactggcgagggcgttcggcatccctgtccggacgttcactcatgaggtggtgacgctttggtatagagcgcctgaaatccttctcggtgcaaggcattattccacccctgttgatgtgtggtcagttggttgcattttcgctgaaatggtgaaccagaaggcgctttttcctggcgactctgagatcgatgagctgtttaagattttcagaattttgggcactccaactaaagaaacatggccaggcgttgcttcgttgcctgattacaagtcaactttcccaaagtggccacctgtggatcttgcaacggtggtcccgacactcgaaccgtcgggaatcgatctcctatctaagatgctgcgtctagatcccagcaagaggatcaccgcccgcgccgccctcgagcacgactacttcagggacctcgagcacgcctagcaggatatggatggatggatgaaccgtttcccctcccctgctccctctgtaaattacggtagcagccgcgatgcttggggccggcgagtacccccgtctgggcggccgttgagttatgtgtgttactctatagtatgactaagctggagtgcctcatgtccaccatgcagtgcagcttttttctccgacttttttttgctgcgtagagaaatgagatgagaaatgtgatccagagatccttgtgccatgggagacctagt

SEQ ID NO: 121391 - DNA, 1650 bp, Zea Mays
gacgacacccgcgagccgagacagccacccagttgctcaagtgattccaggcccacgccacgccaaccccgggctcaactcgagtccacacgccccagcaccacccctgcctctcagtccagtcccccacccaccaccaccactcctcccctcgccgccgcccgttcccgaccgatccggccggatcgccccgccatggaccagtacgagaaggtggagaagatcggggagggcacgtacggggtggtgtacaagggcaaggaccgccacaccaacgagacgatcgcgctcaagaagatccgcctcgagcaggaggacgagggcgtcccctccaccgccatccgcgagatctccctcctcaaggagatgcagcaccgcaacatcgtcaggctgcaggacgtcgtgcacaacgacaagtgcatctacctcgtcttcgagtacctcgacctcgacctcaagaagcacatggactcctccacggacttcaagaaccaccgcatagtcaaatccttcctctaccagattctgcggggcatcgcctactgccactcgcaccgcgtgctccaccgcgacctgaagccgcagaacctgctgattgaccgccgcaacaacctcttgaagctcgcggactttggactggcgagggcgttcggcatccctgtccggacgttcactcatgaggtggtgacgctttggtatagagcgcctgaaatccttctcggtgcaaggcattattccacccctgttgatgtgtggtcagttggttgcattttcgctgaaatggtgaaccagaaggcgctttttcctggcgactctgagatcgatgagctgtttaagattttcagaattttgggcactccaactaaagaaacatggccaggcgttgcttcgttgcctgattacaagtcaactttcccaaagtggccacctgtggatcttgcaacggtggtcccgacactcgaaccgtcgggaatcgatctcctatctaagatgctgcgtctagatcccagcaagaggatcaccgcccgcgccgccctcgagcacgactacttcagggacctcgagcacgcctagcaggatatggatggatggatgaaccgtttcccctcccctgctccctctgtaaattacggtagcagccgcgatgcttggggccggcgagtacccccgtctgggcggccgttgagttatgtgtgttactctatagtatgactaagctggagtgcctcatgtccaccatgcagtgcagcttttttctccgacttttttttgctgcgtagagaaatgagatgagaaatgtgatccagagatccttgtgccatgggagacctagtagtagactagtagctatgtaggtgtcggcactggcctctcttgaacctgtatgatggctggagagagaggagagacggcggcttctctggttgataagttggtcctggtatggtgtgcttgccgccgatgcacgtcatggtctttcttcctttctgatgaggacttggggtggacgccgagtgagttcgtgctcatgcacggtttgttggccatgcaagctgaagcagctgcagcagagattttggatgcctggttctattgccgaattttttactatttagttttttaaaaaagaaaatatgccaacaaaatata

SEQ ID NO: 121392 - DNA, 1667 bp, Zea Mays
cagccacccagttgctcaagtgattccaggcccacgccacgccaaccccgggctcaactcgagtccacacgccccagcaccacccctgcctctcagtccagtcccccacccaccaccaccactcctcccctcgccgccgcccgttcccgaccgatccggccggatcgccccgccatggaccagtacgagaaggtggagaagatcggggagggcacgtacggggtggtgtacaagggcaaggaccgccacaccaacgagacgatcgcgctcaagaagatccgcctcgagcaggaggacgagggcgtcccctccaccgccatccgcgagatctccctcctcaaggagatgcagcaccgcaacatcgtcaggctgcaggacgtcgtgcacaacgacaagtgcatctacctcgtcttcgagtacctcgacctcgacctcaagaagcacatggactcctccacggacttcaagaaccaccgcatagtcaaatccttcctctaccagattctgcggggcatcgcctactgccactcgcaccgcgtgctccaccgcgacctgaagccgcagaacctgctgattgaccgccgcaacaacctcttgaagctcgcggactttggactggcgagggcgttcggcatccctgtccggacgttcactcatgaggggcgttcggcattcatgtcctgacttttactcataaggtggtgacgctttggtatagagcgcctgaaatccttctcggtgcaaggcattattccacccctgttgatgtgtggtcagttggttgcattttcgctgaaatggtgaaccagaaggcgctttttcctggcgactctgagatcgatgagctgtttaagattttcagaattttgggcactccaactaaagaaacatggccaggcgttgcttcgttgcctgattacaagtcaactttcccaaagtggccacctgtggatcttgcaacggtggtcccgacactcgaaccgtcgggaatcgatctcctatctaagatgctgcgtctagatcccagcaagaggatcaccgcccgcgccgccctcgagcacgactacttcagggacctcgagcacgcctagcaggatatggatggatggatgaaccgtttcccctcccctgctccctctgtaaattacggtagcagccgcgatgcttggggccggcgagtacccccgtctgggcggccgttgagttatgtgtgttactctatagtatgactaagctggagtgcctcatgtccaccatgcagtgcagcttttttctccgacttttttttgctgcgtagagaaatgagatgagaaatgtgatccagagatccttgtgccatgggagacctagtagtagactagtagctatgtaggtgtcggcactggcctctcttgaacctgtatgatggctggagagagaggagagacggcggcttctctggttgataagttggtcctggtatggtgtgcttgccgccgatgcacgtcatggtctttcttcctttctgatgaggacttggggtggacgccgagtgagttcgtgctcatgcacggtttgttggccatgcaagctgaagcagctgcagcagagattttggatgcctggttctattgccgaattttttactatttagttttttaaaaaagaaaatatgccaacaaaatata

SEQ ID NO: 121393 - DNA, 1756 bp, Zea Mays
aggctaaccagtttaccaatctgacgccgtcacaggtcacaccgtctttactagagagagcgccaatcctccccatcccgaccgccgcccccacctcctccgcggccgcctcgcggcgattccgtccgcatctgaccccgatcccaggggcatcgtcctcacctcctccgccagctgccgctcttccgtcctcttccgcagcttctgcgtggggaagaggcggtggcggccgaaccagcgtagtcgtcgccgacgccgctgccagccgccatggaggcgtacaagctctgggtgcgcaggaacagggacctcgtccgatccctcgagtccctcgccaacgggctcacatggatactccccgagcgcttcgccaactctgagatcgcaccggaagcagtatatgcactactgggtattgtgagttctgtcaatcagcacataattgatgcgcccactgagaatcactcatttgcctccaaggaacaatctatcccatggggtcttgttgtctctgtactaaaggatgtggaggcggttgttgaggttgctgcccagcactttgttggcgatgatcgcaagtggagctttcttgctgttacagaagcagtgaaagcaggtgtcaggttagctgcttttcgggagagtggatacaagatgctcttacaaggaggggaggtggtaaatgaagaagaggtgaccgttcttgaaaatagttatggagtaaatggtaatggagtaccagccatctatccgatggatggacatgcagaaaatggtcacaaaactatggccaagggtctggatggtaaaaatggatttgtatctaagagtcttgagaaaagagcagtagctgctttgaacaaatttggtgagaacgcaaagatgatgtctgatcctatgtggattcggaggctccaacctactcctgagccaactgtgatggttgccgagaagccaactttggcaagtatttggtctgctaaaggcggtactgggcgcttgtttgttttaggggaggttgttcacatattcaggccacttgtatatgtacttctgatcagaaagtttggaataaaatcgtggaccccgtggctagtgtcgctagctgtggaactcacaagtctaggcgtccattcccatgcaaccgatatgaatcacagattaggaaaagtgcatcagctcagttctgctgagagggatgagttgaaaaggcgaaagatgatgtgggctctttatgtgatgagagatcctttctttgccagttacagcaagcgtcacctcctgaaggctgaacaggttctgaatccggtgccattgattggcttccttacagggaaacttgtagagctactggaggggattcagacgagatacacgtacacatcaggttcatagagatggccaatctgagcctgctgctcgcctctcgatttgccctggcggacatgtgctttgtgcgagttggttgatggttaatggttaatggctaggaactggtgcttaatcctgaaacccgtactgctgtttttcttgccaactgtggcatcgtcgtcttgtggctgcgaagctgcagccacctcgttcgtgtatggcggcagatgagacaattcataatctaagtatatagatataaatagtagtattaccggtttgtttgtatttacgatttatcgtgaactgatggaacataatgtgtatacagcgaaaatttatctgattccaaacatttgttgtttaacagcgaaaattggatgcc

SEQ ID NO: 121394 - DNA, 5098 bp, Zea Mays
gctgaacaacggagagaaaaagtgaggcggaagacgagggacatacttcaagcgcccgcggcccgcagcctgctcgcccaggtcttcgccggcgacgagcacccaccaggtccgctcagtccatctctccagaaatccccagatgttccacagcaagtcgctccctaggcccaaggacacatcggtggtggtggtcgtccttgagacgacagaagtgtacattgtgatcagcttgtcgacgaggagagacacccaggtcgtatacgtcgatccgaccaccggcgccctgcgctacctggggaagcatggggaggacgtctttgattcggaggcggcggcgctgaaccacatcaccaacggatcaagggttctatccaagagcactacatatgccaaggcagtgctgggatacgcggtgttaggaagccatgctctgctcttggtcgcgacacagttgagcgcgtcggtccccaatctgccgggaggcgggtgcatatacacattggcagagagccagtggataaagatccagctgcagaatcctcagccccaggggactggagaacagaagaacatacgtgagctggccaatctagacattgatggcaagttcttcttttgcgagacaagggatgttaccaggcccttcccgagtcctattacactacgggaaccagatgaggaatttgtttggaacgagtggctgtcaaagccctttaaggacattggtttgccaggacactgtgtcattcttctgcaggggttcgctgagtgccggaactttggaggtgctgggcagcaaggtgggttagtcgcccttattgcacgccgaagtcggttgcatcctggaactcgctatttggcccgtggactgaacgcatgttcaggcacaggcaatgaggtagagtgcgagcaactcgtttgggttccacggaagggcggacagcgcatcccttttagctcgtatatctggcgccgtggaactattccaatatggtggggcgcagaaataaaaaacgcggtgtcagtggaggctgaaatttacgttgccaacgatccttacaacggaagcttacagtactaccaacggttgggtaaaagatatgggaataaatcatctgaagcgaacgtgtccaggcaaaaaagttctggaagggttcccattatttgtgttaacttgctaagatacggcgaaggaaaaacagagtcagttcttgttgatcatttcaaagaatctatacggtacatgaactctactggaaagctgggaagcacgtggattcagttaataaattatgactggcatgccactgtgaagttaaaagggcagcagcagacagttgagggcctatggaggcatcttaaaccacctacaatggtcattggcttcagtgaagggaattactatgatgcaagacagcagcttaatgaatgtaaaggatcagttatctgcaatgacgatgtaaatggtgggttttgcatggaatctattcaaaatggggtgatacgattcaactgtgcagactctcttgatcgaaccaatgctgctagttactttggtgcacttcaagtttttgttgaacagtgtagtcgattgagcatctcgcttgacatagatgcaatgtttgggttgtcaagtagatattctgaatatgatggtagaaacactcgttctttgccccctggatgggaggagcgctttgactctgtaacagggaaatcattttatattgatcataatacacgtactaccacatgggaacatccatgccaggaggctccacagaagccctggaagagatttgatatgacatttgatcagttcaaaggctcaacaatgcttgctccagtgaaccagcttgctgaactttttcttttggcaggcgatatccatgctacgttgtacactggctcaaaagctatgcacagtgatattctgaacatattcaaggaggaaacaggaaagtttagtaaattctcagctgttgagaatgtgaaaattacggtgctaagaaggtaccaaaattttatgaatgatagttcccgtcaaaagcagttagagatgtttcttggtttgaggctatataggcatctcccgtccatccctatgttccctctcaaagtgctatcaaggccatctggatgcatgttaaaaccagttcctagtatcatcccaatggctgatggtggttccagtcttctgagcttcaaaaggaaggatcttatttgggtgtgtcagcaaggtgcagactatgttgaactttttatataccttggggaaccttgtcacgtttgtcaactgcttcttactgtctcccacggtgctgaagattcttcatatccagcaaccgtagatgttagagttggctcaagcatcgactccctcaaactcgtggttgagggtgcttgcattccacaatgctctaatgggacaaatttactgattccagtcactgggagaactgatccagaggacttggctgttacagggaaaagtgcgaggcccaatgttcaagagagctcctatcttcctttgttatatgactttgaagagctagaaggagaattaaactttttgaatcgggttgttgcattatcttttcatccatctgctgtatcaagaacacccattactcttggcgagattgaagtacttggagtttcccttccatgggcagacatgttaaccaatagtgaacgtgctcctgaatttatggagtttatcaataaaaaatcatcaagtgctcactgtaatctaggttccaagtcttttggaaattcttccatgcctgggaatgattctcatggtattgatgagtcttatactaaaagttcatcattagttcaaccgtgtggttcggaaaatttgttggattttctcacaggtgattttgacatgtcggagtcccatataactcaaaatacttttggtgctggagaacaaacaaacttcttagatgatggatttgatgttaatcctttcgcccctgcattggaagtgcctgttcctgttgctaaagtaaacaaggaggttgaagaatgtggcagcacccagctttatattaaattttttgaatccctttctggctataataagggaaagggtcttgactttgagcaaacgatgaagcttgaaataaaacgtctccgtcttggtctttcagccgctgaaagggaccaggcgttgttatcaattggtgtaattcctgccacattagatccaaaccgtttaattgattattcttacctattgaagttatccagcttagctgataatctagcactgctgggccatacagtccttgaggatcgcgctaatgcttcaatagggcttgaaaagggcagtgaacatgctatagacttttggaacatcagtgaaaatgatgaattctgctatggtggggcatgtgaagtccgtgctctgtcttcattacaagctttagcatctagagaaaatcaatcggtattcatggaatgtttccagtgtgaaaagacagtttgcaaagcttgctgtgctgggaaaggggccttccttttgcttaacacctacagggagttgaagatatatggtgggagtcaaagtggtggctactcagcactcacagatagttttgtgtgcaaatcgtgctgcagtgaaattatcaaacgtgcattgtatgtggattatgtccgggttcttcatagtttgcgcagaaaagatcgttcagagaaagcagcactgagtgctgtgaatcaggtctgccaactggagtacaagaaagcatctgatttatctcaaagtattcaatttggtcagagacaattgaagcagatccttgatggtgaagaatcccttgcagaatttccatatgcaaactttttacaaatggttgaaactgccaatgactctgaaccactgctttcattactggcgccttttggtactggagagtatacgtcttactggaaagctccacaaggtatcacttcagtggaattctcaattgttcttggtggtttatcagatattgcaggagtttccataattgtcagttcttgcggttactcagcatctgactgcccaattgtagagatatgggcgagtaataaaatacaccgagaagatcgtacatttataggaaagtgggatgtacaggatataatatcttcatctccacagcttcgtggacctgaaaaatctagtagattgagtgaagaaccaagacacattaaatttcacttcccaaatcctatccgttgtcgtataatttcaataaaaatgacactttcccatagaggttctcattcaaccaagtttagtgaggagtttgatcttctatcattgaatgatagctcatcttatgaatcgaagccaaccaatttacataattcatttatccatgcaaaaagaattgtagtttttggcagtttgttgagaaaggagatggagcctgacacatcaggggggataatgagaatgaaaagttatttagacagatcaccggccttggggagatttaggatcccagttgaagctgagaggctgagagataatgatcttgttcttgagcaatatctcttagctaattcacctggaatagctggattccggcttgattctttcagtgttataagacctcgtgtgacccattcaccttcttcatcagagttggacatgagggagttttcattgacacgaatggaagatagatttataaacccagcaattctgtatatacaggtcacagttgttaaggagtccggcaagttggttgtagaggaataccgtttaccagaagtaaaagcaaacacgccactatattttgatttcccagatctacaacaggatgcgcgctgtgttatctttagattgcttggtgacgtcactgcctttgtcgacgacatttctgagcttgagaacttaaacttgcggaatcttcctttggcgtcgggactgtctttgtcaaataagatcaagttgtactactatgctgatacatatgagatgggaaagatcggcagtctctcagctgtataatgtatgtgaggtatgaagtcctgatgttctaactaaatcctctcaaacgatgttacagagttcttaacttgagtttttgac

SEQ ID NO: 121395 - DNA, 5468 bp, Zea Mays
gctgaacaacggagagaaaaagtgaggcggaagacgagggacatacttcaagcgcccgcggcccgcagcctgctcgcccaggtcttcgccggcgacgagcacccaccaggtccgctcagtccatctctccagaaatccccagatgttccacagcaagtcgctccctaggcccaaggacacatcggtggtggtggtcgtccttgagacgacagaagtgtacattgtgatcagcttgtcgacgaggagagacacccaggtcgtatacgtcgatccgaccaccggcgccctgcgctacctggggaagcatggggaggacgtctttgattcggaggcggcggcgctgaaccacatcaccaacggatcaagggttctatccaagagcactacatatgccaaggcagtgctgggatacgcggtgttaggaagccatgctctgctcttggtcgcgacacagttgagcgcgtcggtccccaatctgccgggaggcgggtgcatatacacattggcagagagccagtggataaagatccagctgcagaatcctcagccccaggggactggagaacagaagaacatacgtgagctggccaatctagacattgatggcaagttcttcttttgcgagacaagggatgttaccaggcccttcccgagtcctattacactacgggaaccagatgaggaatttgtttggaacgagtggctgtcaaagccctttaaggacattggtttgccaggacactgtgtcattcttctgcaggggttcgctgagtgccggaactttggaggtgctgggcagcaaggtgggttagtcgcccttattgcacgccgaagtcggttgcatcctggaactcgctatttggcccgtggactgaacgcatgttcaggcacaggcaatgaggtagagtgcgagcaactcgtttgggttccacggaagggcggacagcgcatcccttttagctcgtatatctggcgccgtggaactattccaatatggtggggcgcagaaataaaaaacgcggtgtcagtggaggctgaaatttacgttgccaacgatccttacaacggaagcttacagtactaccaacggttgggtaaaagatatgggaataaatcatctgaagcgaacgtgtccaggcaaaaaagttctggaagggttcccattatttgtgttaacttgctaagatacggcgaaggaaaaacagagtcagttcttgttgatcatttcaaagaatctatacggtacatgaactctactggaaagctgggaagcacgtggattcagttaataaattatgactggcatgccactgtgaagttaaaagggcagcagcagacagttgagggcctatggaggcatcttaaaccacctacaatggtcattggcttcagtgaagggaattactatgatgcaagacagcagcttaatgaatgtaaaggatcagttatctgcaatgacgatgtaaatggtgggttttgcatggaatctattcaaaatggggtgatacgattcaactgtgcagactctcttgatcgaaccaatgctgctagttactttggtgcacttcaagtttttgttgaacagtgtagtcgattgagcatctcgcttgacatagatgcaatgtttgggttgtcaagtagatattctgaatatgatggtagaaacactcgttctttgccccctggatgggaggagcgctttgactctgtaacagggaaatcattttatattgatcataatacacgtactaccacatgggaacatccatgccaggaggctccacagaagccctggaagagatttgatatgacatttgatcagttcaaaggctcaacaatgcttgctccagtgaaccagcttgctgaactttttcttttggcaggcgatatccatgctacgttgtacactggctcaaaagctatgcacagtgatattctgaacatattcaaggaggaaacaggaaagtttagtaaattctcagctgttgagaatgtgaaaattacggtgctaagaaggtaccaaaattttatgaatgatagttcccgtcaaaagcagttagagatgtttcttggtttgaggctatataggcatctcccgtccatccctatgttccctctcaaagtgctatcaaggccatctggatgcatgttaaaaccagttcctagtatcatcccaatggctgatggtggttccagtcttctgagcttcaaaaggaaggatcttatttgggtgtgtcagcaaggtgcagactatgttgaactttttatataccttggggaaccttgtcacgtttgtcaactgcttcttactgtctcccacggtgctgaagattcttcatatccagcaaccgtagatgttagagttggctcaagcatcgactccctcaaactcgtggttgagggtgcttgcattccacaatgctctaatgggacaaatttactgattccagtcactgggagaactgatccagaggacttggctgttacagggaaaagtgcgaggcccaatgttcaagagagctcctatcttcctttgttatatgactttgaagagctagaaggagaattaaactttttgaatcgggttgttgcattatcttttcatccatctgctgtatcaagaacacccattactcttggcgagattgaagtacttggagtttcccttccatgggcagacatgttaaccaatagtgaacgtgctcctgaatttatggagtttatcaataaaaaatcatcaagtgctcactgtaatctaggttccaagtcttttggaaattcttccatgcctgggaatgattctcatggtattgatgagtcttatactaaaagttcatcattagttcaaccgtgtggttcggaaaatttgttggattttctcacaggtgattttgacatgtcggagtcccatataactcaaaatacttttggtgctggagaacaaacaaacttcttagatgatggatttgatgttaatcctttcgcccctgcattggaagtgcctgttcctgttgctaaagtaaacaaggaggttgaagaatgtggcagcacccagctttatattaaattttttgaatccctttctggctataataagggaaagggtcttgactttgagcaaacgatgaagcttgaaataaaacgtctccgtcttggtctttcagccgctgaaagggaccaggcgttgttatcaattggtgtaattcctgccacattagatccaaaccgtttaattgattattcttacctattgaagttatccagcttagctgataatctagcactgctgggccatacagtccttgaggatcgcgctaatgcttcaatagggcttgaaaagggcagtgaacatgctatagacttttggaacatcagtgaaaatgatgaattctgctatggtggggcatgtgaagtccgtgctctgtcttcattacaagctttagcatctagagaaaatcaatcggtattcatggaatgtttccagtgtgaaaagacagtttgcaaagcttgctgtgctgggaaaggggccttccttttgcttaacacctacagggagttgaagatatatggtgggagtcaaagtggtggctactcagcactcacagatagttttgtgtgcaaatcgtgctgcagtgaaattatcaaacgtgcattgtatgtggattatgtccgggttcttcatagtttgcgcagaaaagatcgttcagagaaagcagcactgagtgctgtgaatcaggtctgccaactggagtacaagaaagcatctgatttatctcaaagtattcaatttggtcagagacaattgaagcagatccttgatggtgaagaatcccttgcagaatttccatatgcaaactttttacaaatggttgaaactgccaatgactctgaaccactgctttcattactggcgccttttggtactggagagtatacgtcttactggaaagctccacaaggtatcacttcagtggaattctcaattgttcttggtggtttatcagatattgcaggagtttccataattgtcagttcttgcggttactcagcatctgactgcccaattgtagagatatgggcgagtaataaaatacaccgagaagatcgtacatttataggaaagtgggatgtacaggatataatatcttcatctccacagcttcgtggacctgaaaaatctagtagattgagtgaagaaccaagacacattaaatttcacttcccaaatcctatccgttgtcgtataatttcaataaaaatgacactttcccatagaggttctcattcaaccaagtttagtgaggagtttgatcttctatcattgaatgatagctcatcttatgaatcgaagccaaccaatttacataattcatttatccatgcaaaaagaattgtagtttttggcagtttgttgagaaaggagatggagcctgacacatcaggggggataatgagaatgaaaagttatttagacagatcaccggccttggggagatttaggatcccagttgaagctgagaggctgagagataatgatcttgttcttgagcaatatctcttagctaattcacctggaatagctggattccggcttgattctttcagtgttataagacctcgtgtgacccattcaccttcttcatcagagttggacatgagggagttttcattgacacgaatggaagatagatttataaacccagcaattctgtatatacaggtcacagttgttaaggagtccggcaagttggttgtagaggaataccgtttaccagaagtaaaagcaaacacgccactatattttgatttcccagatctacaacaggatgcgcgctgtgttatctttagattgcttggtgacgtcactgcctttgtcgacgacatttctgagcttgagaacttaaacttgcggaatcttcctttggcgtcgggactgtctttgtcaaataagatcaagttgtactactatgctgatacatatgagatgggaaagatcggcagtctctcagctgtataatgtatgtgaggtcgtcgtacatgccaacctgggatggtaacccgtccctagaagattgttgtaacctactgtttctacgtgttgttgtggaagtaagagctgctgctacagatacatgatgctttttttttactgcttctgtattcttgcttctttttgcttttgattagatgaccccagtttgagggatgtagggattttgcctgtagaatttctggaaattcatctctttttttaatgtagaatagccggaaattcaattcgatcgcagtccacgaaactgccagctacgtttgtcgatacctgtattgggacctggattattgtatagagccaagaacttgcattgatattttttgtttgtttgtttgtttcataccatattttaagcgctggctgcaccagatgttcgttcgtatggtatggtacgtggccatgctgcggctgtaag

SEQ ID NO: 121396 - DNA, 1484 bp, Zea Mays
gcctgttgagctgttttcatttttttccattcctttgatttattttttccttttaatgttcataatcatgctgcttgtgcaggtagagatatgggcgagtaataaaatacaccgagaagatcgtacatttataggaaagtgggatgtacaggatataatatcttcatctccacagcttcgtggacctgaaaaatctagtagattgagtgaagaaccaagacacattaaatttcacttcccaaatcctatccgttgtcgtataatttcaataaaaatgacactttcccatagaggttctcattcaaccaagtttagtgaggagtttgatcttctatcattgaatgatagctcatcttatgaatcgaagccaaccaatttacataattcatttatccatgcaaaaagaattgtagtttttggcagtttgttgagaaaggagatggagcctgacacatcaggggggataatgagaatgaaaagttatttagacagatcaccggccttggggagatttaggatcccagttgaagctgagaggctgagagataatgatcttgttcttgagcaatatctcttagctaattcacctggaatagctggattccggcttgattctttcagtgttataagacctcgtgtgacccattcaccttcttcatcagagttggacatgagggagttttcattgacacgaatggaagatagatttataaacccagcaattctgtatatacaggtcacagttgttaaggagtccggcaagttggttgtagaggaataccgtttaccagaagtaaaagcaaacacgccactatattttgatttcccagatctacaacaggatgcgcgctgtgttatctttagattgcttggtgacgtcactgcctttgtcgacgacatttctgagcttgagaacttaaacttgcggaatcttcctttggcgtcgggactgtctttgtcaaataagatcaagttgtactactatgctgatacatatgagatgggaaagatcggcagtctctcagctgtataatgtatgtgaggtcgtcgtacatgccaacctgggatggtaacccgtccctagaagattgttgtaacctactgtttctacgtgttgttgtggaagtaagagctgctgctacagatacatgatgctttttttttactgcttctgtattcttgcttctttttgcttttgattagatgaccccagtttgagggatgtagggattttgcctgtagaatttctggaaattcatctctttttttaatgtagaatagccggaaattcaattcgatcgcagtccacgaaactgccagctacgtttgtcgatacctgtattgggacctggattattgtatagagccaagaacttgcattgatattttttgtttgtttgtttgtttcataccatattttaagcgctggctgcaccagatgttcgttcgtatggtatggtacgtggccatgctgcggctgtaag

SEQ ID NO: 121397 - DNA, 885 bp, Zea Mays
atggtcacgggaaagaagaggacgttcgtgctctacccgtcgctgggcgtgggccacctgatcccgatggtggagctggccaagcacctcttgcgccacggccacggcgcgctcatcgctgtggtcaacccgccggacaccgacgccgtgtcggtcgccgcggtggagcgcctcgcggcggccaacccggccatcgcgttccgcctcctgccggtcccggccagcccggacgccggcgcggactgggtgaagcgcgacctggacacgctccggctcgccaaccccgtgctccgggacttcctgctccggtcccagcccgccaccgcgctcatcctcgacatgttctgcgtcgacgcgctcgacgtcgcggcggagctcggcgtcccggcctacttcttcttcgcctccgcggcgggggacctcgccatgttcctcaacctgccgtacctctaccccaccctgccgtcgttcagggacatgagcgaggcgctggtgcgctgccccggcatgccgccggttcgggcgatggacatgccgctgacggtgcaggacagggacagcgaccggatcaaggtccggatgtaccagttccgccgcatcccggaggggaggggcgtgctggtcaacagcttcgcctggctggagcccatggcactgagagcgctcggcgacggcgtctgcgtgcccggccgcccgacgccgagggtcttctgcgtcgggccactggtcaacgacggcagcagcacggcggggagcggcgggaggcacgagtgcctggcgtggctggacacgcagcccaagcggagcgtcgtgttcctctgcttcggcagcaaggacgcttgttcggtactgattgcattgttcttatatcaccagttctattga

SEQ ID NO: 121398 - DNA, 417 bp, Zea Mays
gctatcaatccagtattccagatttccagcgctgcttccttttctccgccgtgctctccccagtcccctccgcctccggtcaccattaacctagccgcaactctcctcggtgcggcggtgcccgcctgcccggagctcggacaccggagcgacctcaagtgttccacaggcgtcacgggacacgacgctcaccgctcgctatcgctggcggactacggacggctggagctggattgctgactgctgtggagaattcggactttgaagcctcaagtctgaaccatatgtgaagtctgaactgtatttttctcgtggatttgtgatgcaatgcaatggcacttggcggctgtcactggcaggcagcagcagcaccgcagcaggcttaatgccttacagccttgcacttttgtatctttt

SEQ ID NO: 121399 - DNA, 700 bp, Zea Mays
aatctaacctaacaacctaacaaggcatcagctatcaatccagtattccagatttccagcgccgcttccttttctccatcgtgctctcctccgcctccggtcaccattaacctagccgccactctcctcggtgcggcggagcccgcctgcccggatcccggacaccggggcgacctcaagtgttccacatgcatcatgggacacgacgctcaccgctcgctatcgctggcggactacggacgactggagctggatttctgtggagaagtggattgctgactgctgtggagaatttcggactttgaagcctgaagtgtgaagtctgaaccatctgtgaagtccgaactgtatttttcttgtggatttgtgatgcaatgcaatggcacttggcggctgtcactggcaggcagcagcagcaccgcagcaggcttaatgccttgcagctttgcacttttgtatcttgtcgtcgtcgagtactcagtacattagtgtagtagtaggtagtacctgtcggctgtattggttcttgaattctcgctcctctgcataaggtttgttatctatactagattatgatcttaagatgttctgttagtagtaattcattaatctgcgttttgttcagtgagctgttgctttatgtatatgcattttgttcttgttacaatgtgcattcatatacggaggtacttgtgctttt

SEQ ID NO: 121400 - DNA, 1422 bp, Zea Mays
cacataaacacaaaagcaccacaattatatattcacaaaagcatcacaattataatatcattcacaactagatcatttacagatagctcacaactaccagctcttcttttaaatcaacgttgaaacagcagataggaactaagtaagctatgctgaatatgcatttcaacagtggaagcatgaacatggctacatcagttcttctcgtcttctgttttgcttaacgtagtggcggcctggctgcttgacgtggggtgtgctttcaactgtggtgtgcttgacgtagtggcggcctgggtgctaagtgatctactagcaggacaaaggccagcaccattgagagaacgagcaggctgtgcccttgataaagaatgaatatactcaattgcagcctgaaagaaagttaaaagtgaggggcatgccaacgaatcatagtagtctgggaaataacatattgttaggaaaaagtgctttttacactattcaaaaaaaggaaaaagaagagacagtgactagataagaactagaacatcacaaccaatttttttacagttttctacaagatctggttgtagcagaaaaattactgaatgacacgaagataaggattgtacatgaatcaggagaaaacagtaaaattaatgatatggtttcaggatctcagatcagttcatatttccatacaagaaatgaatgtgcaagtcacaacatatctgaaaaaatccacttctgcccgtactttctccactgatacccatcaaagtttggtgcttgtgtcacaactgaactcactacgtgttttgcattcttcctaccattaccaagagaaagcaatcaagattttcataaataaaagcatgcttcttctaccgcttattattaatgatcaattaccttctcctgtttccacggcaaagcaattcgattatctgctggccaggcccaactcgcgcgcgggattccgaatctcccggctactgaatccaaccgaacaaaatgtcaaggatacggagaagagggggggaggaggggggtcggaccttgcgttcgaaagaggtctctgccgatctgaggagcgcccgtcgcagcgtcgtgcggaggtagtagccacagtccgcctcgtccggccatagatctgaacgaaacaaaaaacgttaagcagacagcaccttcgaggccggtgcccgggcttgcagtgccaccctctcctcctgctgctacagcggcgacggcctgctcagcgtgcgacggcgacggcctgctcggcgtgcggcggctccatggcgtcgcgggggcggggagggaacagggaagctcggcgatcggtcgggcgatcggagtgggaggaggagatcggggggcctggggcggtagagagagaagagagagaaagggggagggagaaggagtggcggcggcttg

SEQ ID NO: 121401 - DNA, 111 bp, Zea Mays
tattttttttcaattagtcaagagactctatattaaatgaggttacacatgtccttaattgtagctgtttttgctaaatatatctatgtagcaaactgtgttgtattgcta

SEQ ID NO: 121402 - DNA, 441 bp, Zea Mays
agctatcaatccagtattccagatttccagcgccgcttccttttctccgtcgtgctctcctccgcctccggtcaccattaacctagccgccactctcctcggtgcggcggagcccgcctgcccggatcccggacaccggggcgacctcaagtgttccacatgcatcatgggacacgacgctcaccgctcgctatcgctggtgagaagcctgcccttactcctcgcacctctgtcctctgtctctcacatcctcactcacctcaccggtaggcggactacggacggctggagctggatttctgtggagaagtggattgctgactgctgtggagaatttcggactttgaagcctgaagtgtgaagtatgaaccatctgtgaagtccaaactgtatttttcttgtggatttgtgatgcaatgcaatggcacttggcggctgtca

SEQ ID NO: 121403 - DNA, 557 bp, Zea Mays
agctatcaatccagtattccagatttccagcgccgcttccttttctccgtcgtgctctcctccgcctccggtcaccattaacctagccgccactctcctcggtgcggcggagcccgcctgcccggatcccggacaccggggcgacctcaagtgttccacatgcatcatgggacacgacgctcaccgctcgctatcgctggcggactacggacggctggagctggatttctgtggagaagtggattgctgactgctgtggagaatttcggactttgaagcctgaagtgtgaagtatgaaccatctgtgaagtccaaactgtatttttcttgtggatttgtgatgcaatgcaatggcacttggcggctgtcactggcaggcaacagcagcaccgcagcaggcttaatgccttgcagccttgcacttttgtatcttttgtcgtcgtcgagcactcactacattagtactagtaggtagtacctgtcggctgtattggttcttgaattctcgctcctctacataaggtttgttatctatactagattatgatcttaagatg

SEQ ID NO: 121404 - DNA, 1148 bp, Zea Mays
gccatagccacccacgacacgactcgattcccagatccaaatccatccatccatccgcagcgggcaggcacacacacacaggctttgcgttggcagggatggacgcgttctactcgaccaccgcctcctccacgtcgtcggcgccgtacggcggctacggcggcggcggcgaaggctggggctacgactcgatgaagaacttccgccagatcagccccgccgtccagacccacctcaagctcgtttacctcaccctatgcgtggcgctggcctcgtcggcggtgggcgcgtacctgcacgtcgtctggaacatcggcgggatgctgaccatgctcggctgcgtcggcagcatcgcctggctcttctcggtgcccgtctacgaggagaggaagaggtacgggctgctgatggcggctgccctcctggaaggggcgtcggttggacccctcatcaagctcgccgtggaatttgacccaagcatcctggtgacagcgttcgtggggactgccattgcgttcgcgtgcttctcttgcgcggccgtggtggccaagcgcagggagtacctctacctgggcggactgctatcttctggcctctccatcctgctctggctgcagttcgccgcctccatcttcggccaatccactagcagcttcatgtttgaggtctactttgggctgctcatcttcctgggctacatggtgtacgacacgcaggaggtcatcgagagggcgcaccacggcgacatggactacatcaagcacgccctcaccctcttcaccgacttcgtggctgtccttgtccgcatccttgtcatcatgctcaagaacgcggctgacaagtcggaggacaagaggaggaagaggaggaggtggtgaaaatctgtgtgcgaacacagcactcaagggaagggaaggccactggtgcgtctgaaatgaagctcccacataactaggtgtatacatacatatataggagcgaggagttactttggggtggaactgaactgtgcaagtgtcgttcctttgttttctcttgctctgtcatcagtgagcctgttgatagttttgtcctgtcctgtgaatgaatgtgacaaatctccaccagtttagcgtctggcattctgaccaaatgggaggcactgttcc

SEQ ID NO: 121405 - DNA, 1038 bp, Zea Mays
ggcctggccgcacactctcctctcctgtctatccactttccactccttcactgccctccgtccccccctttgctcgccatggccatggcgacctccaccttctccccgcgtcccgccagcctcaggcccctgcgggcgggcggaaagcccgtcggactcctccccttcccgcgccgcctcgcctgcgccaccgcctccggggaggcgccgcccgtggagcagcgggacgaggcggagccggcccttgccgcggcctccaacggggccgccgtcaagtccgaggccccgccgccgccgcccgcgccagcgccggtcccggccttccgggacgccaggtgggtcaacggcacctgggacctcgccaagttcgacaagggcagcggcgtcgactgggacgccgtcatcgacgccgaggccaggagaaggagatggctcgaagactatccggaggcgactaacacagacgaggctgtcgtcttcgccacttccattattccatggtgggcttggatgaaacgcttccaccttcccgaagccgagaagctaaatggtcgcgccgccatggtcggcttcttcatggcctatttcgtggacagcttgacgggcgcgggcctcgtcgaccagatgggcaacttcttctgcaagacgctgctgttcgccgccgtcgccggcgtgctgctggtcaggaaaaacgaggacgtcgagtcgctgaagaagctcgtcgacgagaccacgttctatgacaggcagtggcaggcgacctggcaagatgactccgctgggggaccaaacaactagttcagcgttgtggtacaaaaaaaatgcaaaacgctttcttgttacgtagcttatctatttcctcggccttcttgttttccctgtgtagtgagaatttttttgtttttgtttttgacaaacgcaatgatctacgtcatgttgtaaaattgtatggaaaataattctgcagtttcagttttttttaaaaaaaaaccgataatattcagacatggaaattgattcacatatcgaccaaagaaa

SEQ ID NO: 121406 - DNA, 192 bp, Zea Mays
ccaattgcagcactactaatattttatggcatgcaacattacctgtcaatagctggttcacttgtctttgttcctttgatactcgtacctgcaatgggtggttctgatgtatgaagctttccttcttttcttaattgcacttatttacactgaaaaccatgttattagtctctggtcttactacaatactac

SEQ ID NO: 121407 - DNA, 1692 bp, Zea Mays
ccaattgcagcactactaatattttatggcatgcaacattacctgtcaatagctggttcacttgtctttgttcctttgatactcgtacctgcaatgggtggttctgatgaggataccgcaacagtcatatccaccatgttattagtctctggtcttactacaatactacatacttttttgggttctcggcttccactgattcaaggaagctcctttgtatatttggctccagcgttggtaattgcgaactccgaggagttcagaaatcttagtgacaataaattcaagcacataatgagggaactacagggggctatacttgttggttcagtattccagataatattaggatacactggtcttatgtcactgtttctgaggttaataaatccagtagtggtggcaccaactattgctgcagtgggtttggcattttttagttatggtttccctcaggctggcagctgtgtagaaatcagcatgcccctcattctgttggttcttctgtgcactctgtacatgagaaaaatatccttgtttggcaaccatatcttccttgtctatgcggtgcccctcagtgttgcaattgtatgggcttatgcattctttctaactgctggtggagcatataacttcaaaggctgccgctcaaacatacccagttcaaacatattgttggattcatgcagaaggcatttagagaccatgaggcgctgccgtaccgatgtttctactgcgtggaaaactgctgcctgggtgagggttccctatccgttccaatggggccctccaacattccatttcaagacaggtatcatcatgataatagtttctctggttgctccagttgattcggtgtgtagtttctctcagcagaacagacactcatctgcaagtgtaaaaaaatgctttggatgcttgatggctagcgtgccttgacatggttgtgcatatgcagctttcatcgtaccatgccgcttcactgctggtaaatctaagcccaccaacacgtggagttgtcagcagagcgattgggcttgaaggggtttcaacgtttattgctggagaacgttaacagagaacatacacaccctcgaaacaaccaaaatgggcagcaggagggctttgcagcttggggcagccgtgttagtcatcttctccttctttggtaaaatcggagctctcctagcctctatacctcttgccttggccgcctctgttctgtgcttcacctgggcgctaattgtcgcgcttggtttgtccacattgcgatacacccaagcagcacgctccaggaacatgataatagttggatttaccctgttcatctccttgtcgatacccgcatactttcagcagtatgaacccagctgcaacctaatcttgcccagctatcttcttccatatgctgcagcgtcaagtgggccagttcgcacagccagcagcgggctgaactatgcagtgaacgtgctcctatccatcaacgttgtggtggctctccttgtcgcgttgatccttgacaacacagtgccaggcagcagacaagagcgcggtgtgtacatttggacagatcccaaatccctcgaggtggatcctgcgacattggaaccctaccgattgccggagaaggtttcgtgctggctcaggtgggcaaagtgtgacaaggttttgctctttctcacacaacattga

SEQ ID NO: 121408 - DNA, 473 bp, Zea Mays
ggagttctaccaccatcaccgcctcgtgtgcagcgtgctcgcccacctcctctgtcgacactcagggtactgacgcaccaccccgaagccctcccgccgcgctcgcagggtgttcgacccttcgcccgcgcgccctcacgacatggcctcctccgtctccgccgccgccaaggccgccgcggcgttcgcgcacaaggtccaggtccgccctctcccggccggtctccccacttccgtccctccttctctcgcgccacgttactgaccgaccgaccccacttctcttccctttcccgccagcagaaggagctggccgcgccggcgcagcgccgcgcgggcttgacccgccggaccaagccgtgcagcgtgcgcgccgtcgcttcgcccgcgcgcgccctgtcgtccaccggctcggtacgccccggcccgccttgctgctctgggcgccgcgtttgattcacataccaacacgc

SEQ ID NO: 121409 - DNA, 1900 bp, Zea Mays
ggagttctaccaccatcaccgcctcgtgtgcagcgtgctcgcccacctcctctgtcgacactcagggtactgacgcaccaccccgaagccctcccgccgcgctcgcagggtgttcgacccttcgcccgcgcgccctcacgacatggcctcctccgtctccgccgccgccaaggccgccgcggcgttcgcgcacaagaaggagctggccgcgccggcgcagcgccgcgcgggcttgacccgccggaccaagccgtgcagcgtgcgcgccgtcgcttcgcccgcgcgcgccctgtcgtccaccggctcggtgaagagcgcgatgacgatgacggagaagatactggcgcgggcgtcggagcgcgcggcgctggagcccggggagaacgtgtgggtcgacgtcgacgtgctcatgacgcacgacgtctgcgggcccggcgccttcgacatcttcaagaaggagttcggggaggacgccagggtctgggaccgcgagaagctcgtcgtcatcccggaccactacatcttcaccagcgacggccgtgccaaacgcaacgtcgacatcctcagggacttctgtgcggagcagaacatcaagtacttctatgacatcaaggacctcagcgatttcagggctaatccggactacaaaggcgtctgccacatcgcacttgctcaggaaggccactgccgaccaggcgaggttctcttgggcactgattctcatacatgcaatgctggagcttttggtcagtttgcaactggaatcggaaacactgatgcaggttttgtgttgggcactggaaaggctcttctcaaggtgccacctactatcaggtttatattagatggagagatgccgccttatttacttgcgaaggatctgattttgcaaattattggagagatttcagtatctggtgcgacctacaaatcaatggagtttgttggatcaactgtagaaagtctaaccatggaagagcgtatgacactatgcaacatggttattgaagctggtggaaagaacggtgttgtgcctgctgatgaaactacatttaaataccttgagggtaagacatcagtcgattatgaacctgtctacagtgatgctcaagccagattttttagcgactaccggtttgatgtatcaaaactggagccagtagttgccaagccacattcgcctgacaaccgtgctccagcaagagaatgcaaagatgtgaagatcgaccgagtctatattggttcttgcactggtggtaagaccgaggatttccttgctgctgcaaaggtgttcttagcctcgggaaagaaggttaaagttcccacatttcttgtccctgccacacaaaaggtgtggttggacatatatagcctccctgtaccaggatctggtggcaaaacttgctcccagatatttgaggaggctggttgtgacacaccagcaagtcctaattgtggtgcttgtttgggtggccctcgtgatacatatgcacggatgaatgaacctactgtctgcgtgtccaccacgaacaggaactttccgggcaggatgggccacaaggaagggcaaatctacctggcgtctccctacactgcggctgcctcagccctgacggggtatgttacggaccccagggacttcctcatgtaaccgtcttgaaacaacaacagatttcatgatgtaacagagtggttgtactgctgtttttcgtgctgaacttttgtctaggcatgtccttcgttgagaaataaactgcactagaataagcagcgacttctcgggagccatagcagatgtgacctcatatttatttgtgcaactttttttgtttttggctctgaagtcatgcaaggaaaccacataaaagagtgatttatgtatgtgtcagaatcaaacaat

SEQ ID NO: 121410 - DNA, 1959 bp, Zea Mays
ggagttctaccaccatcaccgcctcgtgtgcagcgtgctcgcccacctcctctgtcgacactcagggtactgacgcaccaccccgaagccctcccgccgcgctcgcagggtgttcgacccttcgcccgcgcgccctcacgacatggcctcctccgtctccgccgccgccaaggccgccgcggcgttcgcgcacaaggtccagcagaaggagctggccgcgccggcgcagcgccgcgcgggcttgacccgccggaccaagccgtgcagcgtgcgcgccgtcgcttcgcccgcgcgcgccctgtcgtccaccggctcggtgaagagcgcgatgacgatgacggagaagatactggcgcgggcgtcggagcgcgcggcgctggagcccggggagaacgtgtgggtcgacgtcgacgtgctcatgacgcacgacgtctgcgggcccggcgccttcgacatcttcaagaaggagttcggggaggacgccagggtctgggaccgcgagaagctcgtcgtcatcccggaccactacatcttcaccagcgacggccgtgccaaacgcaacgtcgacatcctcagggacttctgtgcggagcagaacatcaagtacttctatgacatcaaggacctcagcgatttcagggctaatccggactacaaaggcgtctgccacatcgcacttgctcaggaaggccactgccgaccaggcgaggttctcttgggcactgattctcatacatgcaatgctggagcttttggtcagtttgcaactggaatcggaaacactgatgcaggttttgtgttgggcactggaaaggctcttctcaaggtgccacctactatcaggtttatattagatggagagatgccgccttatttacttgcgaaggatctgattttgcaaattattggagagatttcagtatctggtgcgacctacaaatcaatggagtttgttggatcaactgtagaaagtctaaccatggaagagcgtatgacactatgcaacatggttattgaagctggtggaaagaacggtgttgtgcctgctgatgaaactacatttaaataccttgagggtaagacatcagtcgattatgaacctgtctacagtgatgctcaagccagattttttagcgactaccggtttgatgtatcaaaactggagccagtagttgccaagccacattcgcctgacaaccgtgctccagcaagagaatgcaaagatgtgaagatcgaccgagtctatattggttcttgcactggtggtaagaccgaggatttccttgctgctgcaaaggtgttcttagcctcgggaaagaaggttaaagttcccacatttcttgtccctgccacacaaaaggtgtggttggacatatatagcctccctgtaccaggatctggtggcaaaacttgctcccagatatttgaggaggctggttgtgacacaccagcaagtcctaattgtggtgcttgtttgggtggccctcgtgatacatatgcacggatgaatgaacctactgtctgcgtgtccaccacgaacaggaactttccgggcaggatgggccacaaggaagggcaaatctacctggcgtctccctacactgcggctgcctcagccctgacggggtatgttacggaccccagggacttcctcatgtaaccgtcttgaaacaacaacagatttcatgatgtaacagagtggttgtactgctgtttttcgtgctgaacttttgtctaggcatgtccttcgttgagaaataaactgcactagaataagcagcgacttctcgggagccatagcagatgtgacctcatatttatttgtgcaactttttttgtttttggctctgaagtcatgcaaggaaaccacataaaagagtgatttatgtatgtgtcagaatcaaacaataatttgatgtcaaaagctcaagatagacatagttctgtaataagaacaca

SEQ ID NO: 121411 - DNA, 1956 bp, Zea Mays
ggagttctaccaccatcaccgcctcgtgtgcagcgtgctcgcccacctcctctgtcgacactcagggtactgacgcaccaccccgaagccctcccgccgcgctcgcagggtgttcgacccttcgcccgcgcgccctcacgacatggcctcctccgtctccgccgccgccaaggccgccgcggcgttcgcgcacaaggtccagaaggagctggccgcgccggcgcagcgccgcgcgggcttgacccgccggaccaagccgtgcagcgtgcgcgccgtcgcttcgcccgcgcgcgccctgtcgtccaccggctcggtgaagagcgcgatgacgatgacggagaagatactggcgcgggcgtcggagcgcgcggcgctggagcccggggagaacgtgtgggtcgacgtcgacgtgctcatgacgcacgacgtctgcgggcccggcgccttcgacatcttcaagaaggagttcggggaggacgccagggtctgggaccgcgagaagctcgtcgtcatcccggaccactacatcttcaccagcgacggccgtgccaaacgcaacgtcgacatcctcagggacttctgtgcggagcagaacatcaagtacttctatgacatcaaggacctcagcgatttcagggctaatccggactacaaaggcgtctgccacatcgcacttgctcaggaaggccactgccgaccaggcgaggttctcttgggcactgattctcatacatgcaatgctggagcttttggtcagtttgcaactggaatcggaaacactgatgcaggttttgtgttgggcactggaaaggctcttctcaaggtgccacctactatcaggtttatattagatggagagatgccgccttatttacttgcgaaggatctgattttgcaaattattggagagatttcagtatctggtgcgacctacaaatcaatggagtttgttggatcaactgtagaaagtctaaccatggaagagcgtatgacactatgcaacatggttattgaagctggtggaaagaacggtgttgtgcctgctgatgaaactacatttaaataccttgagggtaagacatcagtcgattatgaacctgtctacagtgatgctcaagccagattttttagcgactaccggtttgatgtatcaaaactggagccagtagttgccaagccacattcgcctgacaaccgtgctccagcaagagaatgcaaagatgtgaagatcgaccgagtctatattggttcttgcactggtggtaagaccgaggatttccttgctgctgcaaaggtgttcttagcctcgggaaagaaggttaaagttcccacatttcttgtccctgccacacaaaaggtgtggttggacatatatagcctccctgtaccaggatctggtggcaaaacttgctcccagatatttgaggaggctggttgtgacacaccagcaagtcctaattgtggtgcttgtttgggtggccctcgtgatacatatgcacggatgaatgaacctactgtctgcgtgtccaccacgaacaggaactttccgggcaggatgggccacaaggaagggcaaatctacctggcgtctccctacactgcggctgcctcagccctgacggggtatgttacggaccccagggacttcctcatgtaaccgtcttgaaacaacaacagatttcatgatgtaacagagtggttgtactgctgtttttcgtgctgaacttttgtctaggcatgtccttcgttgagaaataaactgcactagaataagcagcgacttctcgggagccatagcagatgtgacctcatatttatttgtgcaactttttttgtttttggctctgaagtcatgcaaggaaaccacataaaagagtgatttatgtatgtgtcagaatcaaacaataatttgatgtcaaaagctcaagatagacatagttctgtaataagaacaca

SEQ ID NO: 121412 - DNA, 560 bp, Zea Mays
cctcatttgaatcaccacctcaaaataaggcaacgcaataataatcagcgattggccccgcctggcgtcagcatcattaccatcgccgcgcccgcctgctggctcgccggcgatcgaatttgaccgccggtcggcgagcggagcatacgtgcatacatggtttgcttgacgccggcggcggcggcgctgctgctgctcgtcgtcgtcctagcggcggccgtgtccgcgctcccggcgatcaacgtgacgacgatggcgttcgaggacgggtacgcgccgctgttcgggcacggcaacatcctccgctccgccgaccaccgcaccgtcagcctcctcctcgaccgttccaccggtggttttacttacatacatgctatatatgcttcgtttgtttgttttcatatttgcgtggacgacgccttgtccatgcatcgcgttcatcgatcagtacaaactacatatattcaaatttgaaaacatgcatgcaatgagagcgagccattgaaaatggattggatttgctttatttattagggtccggtttcatctcgtcgtccatg

SEQ ID NO: 121413 - DNA, 1389 bp, Zea Mays
cctcatttgaatcaccacctcaaaataaggcaacgcaataataatcagcgattggccccgcctggcgtcagcatcattaccatcgccgcgcccgcctgctggctcgccggcgatcgaatttgaccgccggtcggcgagcggagcatacgtgcatacatggtttgcttgacgccggcggcggcggcgctgctgctgctcgtcgtcgtcctagcggcggccgtgtccgcgctcccggcgatcaacgtgacgacgatggcgttcgaggacgggtacgcgccgctgttcgggcacggcaacatcctccgctccgccgaccaccgcaccgtcagcctcctcctcgaccgttccaccgggtccggtttcatctcgtcgtccatgtaccagcacggcttcttcagcgcgtccatcaagctcccctccgactacaccgccggcgtcgtcgtcgccttctacgcgtccaacggcgacgtgttcgagaagcggcacgacgagctggacttcgagttcctgggcaacatccggggcaagccatggcgggtgcagaccaacgtgtacggaaacggcagcgtgggccggggccgggaggagcggtacgtgctccccttcgacccaaccacggagttccaccgctactccatcctgtggacgcccgccgccgtggccttctacgtggacgacgtgccggtgcgcgaggtgcggcagtcggccgccatgggcggggacttcccctccaagcccatgtccgtgtacgccaccgtgtgggacgcctccacctgggccaccgccgggggccggtaccgcgtcaactaccgctacgggcccttcgtcgcctccttcaccgacctggccctcctcggctgccgcgtcgacgggcccatccagcagacgacggcggagcggtgcgccgcagccgccgaggcactcagggcgtcggacgtggccgtcatgacggtggagaagcagcaggccatgcgcaggttccgggagcgcaacatggtctactcctactgctacgacacgctgcgctaccccgccgcgttccccgagtgcgacgtcgtcgagtcggagcgcaggcggttcaaggacaccggacacctccgcttcgcgctgcggcggcggatgagcccgcgacgctcccacggcagggcggccagcagggacagggtcagggagctcaagaagcgcgcggcggacatgtagcattcgtgtagactgtagtagcggtcggcgatggtaatggatattcacgcctgccgctgttaatctattggatacgaatacgatacgcatcgtacagcatcacagttcacaggagtagcggaatggcgagggcgaaaaaaaataccttttgtcttcaacttttaaatttaaagaatatatctagcacat

SEQ ID NO: 121414 - DNA, 1393 bp, Zea Mays
cctcatttgaatcaccacctcaaaataaggcaacgcaataataatcagcgattggccccgcctggcgtcagcatcattaccatcgccgcgcccgcctgctggctcgccggcgatcgaatttgaccgccggtcggcgagcggagcatacgtgcatacatggtttgcttgacgccggcggcggcggcgctgctgctgctcgtcgtcgtcctagcggcggccgtgtccgcgctcccggcgatcaacgtgacgacgatggcgttcgaggacgggtacgcgccgctgttcgggcacggcaacatcctccgctccgccgaccaccgcaccgtcagcctcctcctcgaccgttccaccgggtccggtttcatctcgtcgtccatgtaccagcacggcttcttcagcgcgtccatcaagctcccctccgactacaccgccggcgtcgtcgtcgccttctacgtgcgcgtccaacggcgacgtgttcgagaagcggcacgacgagctggacttcgagttcctgggcaacatccggggcaagccatggcgggtgcagaccaacgtgtacggaaacggcagcgtgggccggggccgggaggagcggtacgtgctccccttcgacccaaccacggagttccaccgctactccatcctgtggacgcccgccgccgtggccttctacgtggacgacgtgccggtgcgcgaggtgcggcagtcggccgccatgggcggggacttcccctccaagcccatgtccgtgtacgccaccgtgtgggacgcctccacctgggccaccgccgggggccggtaccgcgtcaactaccgctacgggcccttcgtcgcctccttcaccgacctggccctcctcggctgccgcgtcgacgggcccatccagcagacgacggcggagcggtgcgccgcagccgccgaggcactcagggcgtcggacgtggccgtcatgacggtggagaagcagcaggccatgcgcaggttccgggagcgcaacatggtctactcctactgctacgacacgctgcgctaccccgccgcgttccccgagtgcgacgtcgtcgagtcggagcgcaggcggttcaaggacaccggacacctccgcttcgcgctgcggcggcggatgagcccgcgacgctcccacggcagggcggccagcagggacagggtcagggagctcaagaagcgcgcggcggacatgtagcattcgtgtagactgtagtagcggtcggcgatggtaatggatattcacgcctgccgctgttaatctattggatacgaatacgatacgcatcgtacagcatcacagttcacaggagtagcggaatggcgagggcgaaaaaaaataccttttgtcttcaacttttaaatttaaagaatatatctagcacat

SEQ ID NO: 121415 - DNA, 1240 bp, Zea Mays
cgtcgtctgtctccgtcatttctatcagacgcaagcagcagtgacgccgcgctacccgaccaaaatccgccgccggtgcccagaactcgacgggaaaaccggggctttggtcgccggacgccggctgcctcgagatgctcgtgtgggcggccaccgcgtcaccacccagcactccatccgccgtgccatttgctcctccccaccgcgccgccgctccccgccctccaccgcctctctgccgctcgctcccggggctgctgtgcgcgggcctgatccctccgccgcgcgccgccgcttctgacggcgacgtcttctgggaggagccagacgacggctccgggagcgactacgaggacgacggcccggagcaaaggagggccttgcgtttcccatcttcctcgccgtcctacaggctcgaggcgtcggcgcagcaagaacaggacctccggagagagatcgagcttctcctaacgcctgaagaaaaggctactttggaccagcatgagacccctgacgtcactagaatatcatcacccaagtggcacccacttcatagctacgcgttggcactgcagatacccctcatggacaagcttctgaacagcggtgttgacatcaacttagttgatagagatggcttcacctctcttcacaaggctgtcatagggaaaaaagaggctgtcattagccatctcctaagaaaaggggcaaatccccatgttagagatagggatggagccacaccattacattatgctgttcaagctggtgccctgcaaaccgtgaagttactgattaagtacaaggttgatgtcaatgttgccgataatgatggatggacaccactccatttagccatacagagtaggaatagagatatagctaaggtcttgcttgtcaatggtgcggataagacaagaagaaccaaggatgggaggactgcgctggatctaagtctatgctttggaagggatttcaagtcatatgatcttgcaaagcttgtcaagcttattccagcaaacagagattgctctacaattgtgccgttagatttcagtgtccatggtctgtagcctgttcgacgtgactcgaaaaatgatgatgtacatgcaacagtcctccagctgttgtgttcagttgttttgttcaatatgggccagggccaccaaaacaagatctgaattgtaactgttattaaccttcagcatatgtgtacacattatcgttttggccaaacagt

SEQ ID NO: 121416 - DNA, 1437 bp, Zea Mays
cgtcgtctgtctccgtcatttctatcagacgcaagcagcagtgacgccgcgctacccgaccaaaatccgccgccggtgcccagaactcgacgggaaaaccggggctttggtcgccggacgccggctgcctcgagatgctcgtgtgggcggccaccgcgtcaccacccagcactccatccgccgtgccatttgctcctccccaccgcgccgccgctccccgccctccaccgcctctctgccgctcgctcccggggctgctgtgcgcgggcctgatccctccgccgcgcgccgccgcttctgacggcgacgtcttctgggaggagccagacgacggctccgggagcgactacgaggacgacggcccggagcaaaggagggccttgcgtttcccatcttcctcgccgtcctacaggctcgaggcgtcggcgcagcaagaacaggacctccggagagagatcgagcttctcctaacgcctgaagaaaaggctactttggaccagcatgagacccctgacgtcactagaatatcatcacccaagtggcacccacttcatagctacgcgttggcactgcagatacccctcatggacaagcttctgaacagcggtgttgacatcaacttagttgatagagatggcttcacctctcttcacaaggctgtcatagggaaaaaagaggctgtcattagccatctcctaagaaaaggggcaaatccccatgttagagatagggatggagccacaccattacattatgctgttcaagctggtgccctgcaaaccgtgaagttactgattaagtacaaggttgatgtcaatgttgccgataatgatggatggacaccactccatttagccatacagagtaggaatagagatatagctaaggtcttgcttgtcaatggtgcggataagacaagaagaaccaaggatgggaggactgcgctggatctaagtctatgctttggaagggatttcaagtcatatgatcttgcaaagcttgtcaagcttattccagcaaacagaggtgcgtgatttcgctctgccatgaatctgagggaaagaaagtccaaaagttagccaatgcagcagcctcatacgacccatgcatagcttatgaagaagggtccaggagccgcgtgccgccgtgccagtcatcattcattttttttttcttgaccgccaactcaaacgatctgacagattgctctacaattgtgccgttagatttcagtgtccatggtctgtagcctgttcgacgtgactcgaaaaatgatgatgtacatgcaacagtcctccagctgttgtgttcagttgttttgttcaatatgggccagggccaccaaaacaagatctgaattgtaactgttattaaccttcagcatatgtgtacacattatcgttttggccaaacagtatcacccagtccattgatctc

SEQ ID NO: 121417 - DNA, 1140 bp, Zea Mays
acacggcatctactagtagtactagaagatgcgccacgatgccctctccttcccccttccccgcttcgacaagtctcgtcccccgcccccttattccattacgagcaactccgccgccgccgtaaagccatctcccccatccgccgccgccgccaccgctgctggtgggacgggccgtgcgtccgttccagcgaagaggagcagcgggtcggaggagccgccggcgaggtcgggccgcgggggatcgagatggtgctgtgggagctcacggccatcaccgcctacttcctcgggctgaggcgcacctaccgcctcgcgctccgcatccagcgccgcctcatcccgcccaaccaccccaggatccgggacttcgtctacaggcgcacacgggatgtcttcaacgtcgcagtgtcggtccacaagaacattcagcagagagacatagaggtcggccggaacctcggaaacgcgatccttcgctggcttgatcgcatgaagccatcagcggagatccgcccccgtcttccaggcccaccaaacggcagcacggccgagcagttcagacatgtatcgagcgcgagcaggggcgcgggggcacagaagacctcctcctcctccaaagcttcgccccacgactccagcgggaagatgctgttctcgcgcctcaacattgggcccaagcacttcccggttctgcccacgctagcacagcccaacaggatcagcgcgagcagccagtgcaggcgcttctcctactcctacgccccgttcccgtcggtcactgccaggaggaagggtgtcttccgcgaggacattgcacagctgatggtgtaaggatctaaaatacttgccagcgatctcgtgtactgttttttttgtttttggaacactggacttagtgatttgcccagatcagatgtctgatgtgtcttggtttaataataaagaagcgagcgagcgcaggggaaattgtcactgctgctgcggtttaggccattagatttgtaaccaaatgctcagatgaacagcatttcgtgtttggtaatgaacaccagaacatgtgcactcgtttatgtgctaccctttgtctgtttcttttgaaattcttgtatttccggtgcgttgcattgcattgcatct

SEQ ID NO: 121418 - DNA, 793 bp, Zea Mays
atagagaaggtagcatggacgcactggaccacgccaagcagaagcgaggacactacacagcgcgctactgacatgtcgatgctcaccagcatactgggccgcaagcatcagccgccgccgcagcagcagcagcagcagaagggcggcggcgcgcgcactggcaccggcgccggcgccggcacggaggcggcggcagtggagccggtgagcatcgacatcgcggagcaggggccgctagtggacgccatcacgctggcggcgttcgcggcgccggcgctaggcctgccgccgttcgcgacggccagcatggactggaaggagacgccgacggcgcacgtgttcatggcggacctccccgggctgcgccgcgacgaggtgaaggtggaggtggaggaggagaggctgctccggatcagcgggcagcggcagcgcgccgccgaggagaagggcgaccgctggcaccgcgtcgagcgcagctccgaccgcttcgtgcgcaccgtgcgcctcccgcccaacgccaacaccgacggcgcgcaggccgcgctccaggacggcgtgctcaccgtcaccgtgcccaaggacaacgaccgcaaggcctacggcaggctcatcaccatcaccaattaattaattattaatcatatatatgatgtcattatatatgtaagcggcatgtgtatcgttatcatcaccgaataaaaaaatgattatgccaaggacgatagggatcaaaatattccaactttattgggtatgatggtagtatagatggcaacgcatgcatatgctgccc

SEQ ID NO: 121419 - DNA, 1145 bp, Zea Mays
gacaaaatatcgattttttccacccccacaggccacacccaacccaacccagagcccgaactcttcacgtcgcgtcggccggcaattggcattcccactgcgccgccgtcggatcgactgggtcctcgccgccgatgggcttcttccgccggatcgccggcttcctaggcatctcgcgggacgacgccgaccacccggactccccgacctccgtcggcggcgccgcggcggcggcggaactccctcatgacagggcggcggcgcacggggtgaggcaggggttcagcgtcaaggttcctgtccatgtcgagcggcaggtgcccgtgcccgtgctggtgccctgcccgcagggggacggcggcgtgcagggttttaggtggtacacaaggaggcttaggatcgatgaagacggcgacgtggctgacgagttcttggatgaaattatcccggaaggctcaatcagcaacgacaaaagcgcaaggttccaagtgaaatataacaataaacctgctgctgtagcgctgaggaagcaggtcatcgctgtcgacggtgacatccgccatagcttggaacaccaggggcaactgcggtgggtgtgactgagttggagcagataagtgaatcctgagctctgctccatcagtgtgcgttgagcagagggcgggcacacacaggagcggagcgaatgactcaggttcttcatctctgaagtggacctagaagtagttcgttgctgatgtatccattgttcttcgttcagtgtgttggtatgcttgatctcatggcgattgagacgccttgtaccactagcagttgtacattattgaaacagctcccgctgtacatgttgaatgtgcttgcttggcaatggatctgccagactggtgaaaaattggaatgtgacacttcagccttcagcctttaagcatggctacaaatttagagctagaatttgtcatgctaaggaatagtttttttttactctgtaatatataaaggccatatctggtagtgctcttgtggctctcgctcctttcatttagtaactgttatatgaccaattagtgttatttttttaaaaaagaacaagggtaaacttgcactactatatttcgttctttttttttagaaaaaaaaaatcaaaa

SEQ ID NO: 121420 - DNA, 1869 bp, Zea Mays
atcttcctcctcctcccctactctgacctctcgtcgtcgacgaaggaaggattccgcccccgccccggccgccttcgccctcgccgctgcattttccggtggcctctccacgtgcggccgcgagacgcctcgcctgcctagttgtctcccggggggggggggggggggggggctgggacttgtgaggcgagaagccttacacctgttctgttcaagacggcaggtgttggtgtttcggttgcaatagagtgattggggaaactgatcagccagaattgttggtcaaccgatgggaagcaatgaccctaacacaccctcgaaggcttcaaaggcgtcagaacaagatcaacctccagctaccaccacatccagtggaacagcttcagtgtaccctgaatggcccagctttcaggcctactcagcaattccaccgcatgcgttcttcccccctaccgttgctgcaaatccacaggcccatccatacatgtggggggctcagcccatagtgccaccttacgggacaccgccaccaccaccttatgtgatgtatccacctggaacagtatatgcccatccctctacacctcctgccatgcatccatttggccattatcctatgccaacaaatgggcatgctgaaactcatggagctgcgccaagcgctccggaaatgaatgggaaaagcgagcctggcagaacgtctgctccatccgccaacgggattacctcgcacagtgagagtggaagcgagagtgagagcgaaggaagtgacgacaattctcaaaacgattcacactcaaaggacaatgatgggaaggaagatggcaattctcagaacggcatgtcttattcaggatcgcaaggagtggtaaaccaaaccatggcgatgcttccaatgcaaccgggtgcaatggtcggaggagttcctagctccacggcagctaacctgaatatcggagtggactactgggcagctccgggttctgcggctgtccccgcagcgcacggcaaagcgccagctggttcagctcgaggagaccaatgggatgaaagggagctcaagaagcagaagcggaagcagtcaaacagagagtccgctcgcagatcccggctgcgcaaacaggctgagtgtgaggagcttgggcaacgtgctgaggctctgaggtcggagaactcgtcgctgagggccgagctcgagcggatcagaaaggagtacgaacagctactttcacagaacgcttccctaaaggaaaagctgggggctgccagtagtgattcgcttcctgatatgaacgaacagaacgacggcgacggagacggcggctacaggaagcagcctgattccgatggccaccagcctgggagcgagtcctgacccgtttttagctcaggattcttttggaatgcacattgcttatatattcattctcttgaacgttgtggaacgcagcataggaaggaaatccaactttaattagaatcgattcgctgtcatccctcatgcatggccggagaggggagagggttctcttcttccttggatgttggatacaccgacagtcacgtgcatggcaagagcagaagctagcagctgcggcgactcagggcagcgagcgtttgactggctggggtgcttgctgatatgctcaacacatgaagcagcagcagcctggagcgccagacattcctgactgagtgactgctcatcacgaccagagccaaatccaaatggaataaaaaaaacacacacacactacgtgcagcaatatcagctctccttttctttgtccatgaaaggaaaaacaacgtcacgggaacaattgcggtcagcttttctggaccgtccaccatgccttcatttcaaattcg

SEQ ID NO: 121421 - DNA, 1593 bp, Zea Mays
atgaagcacccgctgcaccgcgacggggagtcgtacccgtcacctccgccgcagcggcggccgcgcgggttcgcctccgctcccgctcccgcggcgggggcttcgccgcggaggcgaggtgtgcaggagcgggagcgggagcgggagaaggagcggacgaagctgcgggagcggcaccggcgcgccatcactggccgcatgctggccgggctccggcagcacggcaacttcccgctccccgcgcgcgccgacatgaacgacgtcctcgccgccctcgcccgcgccgccggctggaccgtgcaacccgatggcaccaccttccgctcctccaaccaaccactcctgcctcctcctccccagctgcacggagcattccaggttgcttctgtggaaaccccagctttgatcaacactctgagcagttatgccatcgggacaccattagattctcaggcatcagccctacaaacagatgacagtctgtcaccatcatcactggactcagttgtggcagaccgacgcataaagactgagaaccacgggaattccagttcagtcagctctctcaactgtatggacaatgatcagcagttaacgagatcagtattattccccgatgattacacgaaaactccatatataccagtttatgcttctttgcctatgggtattattaatagtcactgtcaattagtggacccagagagtgtacgcgctgagctaaggcaactgaagtctctgaacgtggacggggttgttgttgactgttggtgggggattgtagaagcctggactcctcggaaatatgaatggtctggttacagggacctttttggtataattaaagagttcaagctgaaagttcaggttgtattgtcatttcatgggtctggagagactggatctggtgatgtgttaatctctctcccaaagtggatcatggaaattgcaaaagagaaccaggatatattttttacagaccgcgaaggtagaagaaacacagaatgcctttcctgggggattgacaaagaacgagtccttcgtgggagaactggcattgaggtattgggtcacacttggtctgttttgatttcatgaggagtttccatatggaattcagaaacttatctgaagagggccttgtttcttctatcgaaattggattgggtgcttcaggggagctaagatatccttcatgtccagaaacaatgggctggaaatatcctggtattggtgagtttcaggtacatgcaaaagaatctacggcaatcagcattgtcccggggtcatttgttttgggcacgagggcctgataacgctggctattataattcaagaccacatgaaactggctttttttgtgatggaggcgactatgacagctactatggacgttttttccttaactggtactctggagtcctcatggatcatgtcgatcaggtgctgtcgcttgctactcttgcatttgatggtgcagaaatagttgtgaaggtgtgtaatgctggtctgtatagttactatttgatggacaagtttgctagtacttactacatgaagaagctaattagaacgctctgcatagattaaagg

SEQ ID NO: 121422 - DNA, 1576 bp, Zea Mays
atgaagcacccgctgcaccgcgacggggagtcgtacccgtcacctccgccgcagcggcggccgcgcgggttcgcctccgctcccgctcccgcggcgggggcttcgccgcggaggcgaggtgtgcaggagcgggagcgggagcgggagaaggagcggacgaagctgcgggagcggcaccggcgcgccatcactggccgcatgctggccgggctccggcagcacggcaacttcccgctccccgcgcgcgccgacatgaacgacgtcctcgccgccctcgcccgcgccgccggctggaccgtgcaacccgatggcaccaccttccgctcctccaaccaaccactcctgcctcctcctccccagctgcacggagcattccaggttgcttctgtggaaaccccagctttgatcaacactctgagcagttatgccatcgggacaccattagattctcaggcatcagccctacaaacagatgacagtctgtcaccatcatcactggactcagttgtggcagaccgacgcataaagactgagaaccacgggaattccagttcagtcagctctctcaactgtatggacaatgatcagcagttaacgagatcagtattattccccgatgattacacgaaaactccatatataccagtttatgcttctttgcctatgggtattattaatagtcactgtcaattagtggacccagagagtgtacgcgctgagctaaggcaactgaagtctctgaacgtggacggggttgttgttgactgttggtgggggattgtagaagcctggactcctcggaaatatgaatggtctggttacagggacctttttggtataattaaagagttcaagctgaaagttcaggttgtattgtcatttcatgggtctggagagactggatctggtgatgtgttaatctctctcccaaagtggatcatggaaattgcaaaagagaaccaggatatattttttacagaccgcgaaggtagaagaaacacagaatgcctttcctgggggattgacaaagaacgagtccttcgtgggagaactggcattgaggtctgttttgatttcatgaggagtttccatatggaattcagaaacttatctgaagagggccttgtttcttctatcgaaattggattgggtgcttcaggggagctaagatatccttcatgtccagaaacaatgggctggaaatatcctggtattggtgagtttcaggtacatgcaaaagaatctacggcaatcagcattgtcccggggtcatttgttttgggcacgagggcctgataacgctggctattataattcaagaccacatgaaactggctttttttgtgatggaggcgactatgacagctactatggacgttttttccttaactggtactctggagtcctcatggatcatgtcgatcaggtgctgtcgcttgctactcttgcatttgatggtgcagaaatagttgtgaaggtgtgtaatgctggtctgtatagttactatttgatggacaagtttgctagtacttactacatgaagaagctaattagaacgctctgcatagattaaagg

SEQ ID NO: 121423 - DNA, 402 bp, Zea Mays
gctaccgccatactcctgtacgtctgcaacctacagtttgctctcgtgtacgccatcggattgagctatgcgttgatgatgttgcacgcctcgcttcggaagttgactccctcgagtctaccagatcccagcagcaagcagaacaggagggcgcagccgagacggatctaggttaacatgccggacagtacagatgttcatcaggacataaactggagtattatacgcacacactgaagctccgcccttggatttaatcctcagctttcttttgcaatataattttagctgatcgttgatcaaaattaataaaatttgtgctttgccttgtcaaactcaaatacagttatcctctctggacaaatcccagatacccataaaccactcaacggaacggataaa

SEQ ID NO: 121424 - DNA, 528 bp, Zea Mays
atgcgggcggctagtgggctagcgggctcctggctagcccaggaagcgagagatcgtgaggaatacgtcggcatgttgggctgggccgtatctagtcattggacaaggctcaagggaagtgggacaggctcaccggggctcgggaacaacacgggcgactacgcgcggctcgccgcggcgctgcgggacgaccacggcctccccgcggccgtcgtggcgcgggtcacccgccccgactggctccgcaacgccgcgggcctcgccgacgccagctactggcggggcaccctccgcccgcgccccgtgctcgactggtacctgaagagggtggacgacgcggtgtccgaggcgagggagctatgcgcgccaggagggaagatatcactgatagggcattcagctgggggctggctcgcgcgcgtgtacatggcagagtttgatgcttccgacataagtctactcctcacccttggcactcctcacctgtatggttcctcaatcatgactcaaaagtggactaatgtatga

SEQ ID NO: 121425 - DNA, 454 bp, Zea Mays
cgcgaccccgcgccagcgccaccgtctccgccaccgccaaggccgggccgtcatcctcccagggctcgggaacaacacgggcgactacgcgcggctcgccgcggcgctgcgggacgaccacggcctccccgcggccgtcgtggcgcgggtcacccgccccgactggctccgcaacgccgcgggcctcgccgacgccagctactggcggggcaccctccgcccgcgccccgtgctcgactggtacctgaagagggtggacgacgcggtgtccgaggcgagggagctatgcgcgccaggagggaagatatcactgatagggcattcagctgggggctggctcgcgcgcgtgtacatggcagagtttgatgcttccgacataagtctactcctcacccttggcactcctcacctgtatggttcctcaatcatgactcaaaagtggactaatgtatga

SEQ ID NO: 121426 - DNA, 1344 bp, Zea Mays
atgaactctctactgcggccgccgctgccggggccgacgcctagactgagcgcgaggcgtcgggtctcgtcgccagcgccggtgcgggtcggctcggcggtgctggccggcggcgagcgcagatgccaacgggggctagcagtggcgacgtcggtggctccgtcgtggatggaggaggccggggtggcggtgctggaggagggcgggcggaggaacccgtcagtgtcggactcgtaccgcgcggcggggctgccgcagcccaacgccacggtgctggatgcgcaggcgcgggtgtgcacagggcccgcacagacgcgcccgctcggggaggagcaggccatgcgcgtcctcgacactatcctccgctccgcaattggagaactcaaagaggagccagtctctagtgcacagttaggtgcattcttcgcaggcatgacaataagagctaactcgtttccagaggccacccaatggagtgagggcgagcgacgcgccatgagcatattttggccacgccttgtgcaggtccttcctcctgaggtgaagtttatagcagaccctgaaggcacgatcttgggtgcgaatggtttagcagagcctcggtatgttggccaaggaactggagagatgagactcgtcggtgctctgagggaagtgcttgctggtggccatttaggttatgaggaggttcaatgcgtactaaaggatatcctaccaattggatcgagttcagattcgacagtggttagtcaagcactgctagcggcatttttgattggacagcggatgaatagagaaactgatcgtgagctcaaagcgtattgcctagcctttgatgatgaactaggtcctcctccggttgctgacgtcaagtcgttgacacactatggtgaaccatatgatggcaatacacgtttttttaagagtactctatttgttgcagcggttcgagcctgctatggtgaatcctgcctcctccacggtgttgaatggatgccacccaagttgttgtttgaggaaccatttgtattgcttaatgataaaggttttcagggtggaataacagaaggacaaatgcttaaattcatgggtgcaaacatacacttatccccaacacaagccaagatattgttggaggatgaaactgctggttttgcatacttgaatcttcaggaagcttgtccaccattatattcgattattggactcagggagcatattaagaaacggccaccgttggctacctctgagaaagttcaacaatttgtgaggttatgcctatggatacctttaaagattgaaaactttaccttgaaagaattttcagagcctcctgatctttga

SEQ ID NO: 121427 - DNA, 161 bp, Zea Mays
cgccctgcgcttccatagaatcacggttcgaattgccaatcgggagtcggtcaccatccttcagtaaacggcattccagccccgccaatccccactttgagatcgggtgctgcatgagcccataaccggcggaacatcaataccacccgcgagcgccagaa

SEQ ID NO: 121428 - DNA, 899 bp, Zea Mays
caggcacgggggagagaatcaatggttgcaggattttatcatgaaggctatgaagatccgttgcttatgctgatgagaaggagaactgttcatgctggactagttgtaaagggtgaggaaggtgcgctctcaatgacaaccaaggaaagatcagctcatgcatcaaaaggacttcctgttaaccactgttcagggttccggacacccaacagcataaattcctctaaaactgatggtattcctagagaaagcttcagggtcattgtgaatgcccaggaacttggttttgaatccaccgaaactcccagaactgatagatcaattctaaagaacttggagttcggcctggcagcactaggtggcgagaaaggagcagcctacgaccggatagtcctcaacgcagctatggctgaccacttgctaggctgcagcggagccgaggacatcgacgctgcgctcgaccgtgcgagggaggccattgatagcggcgaagctctgagaaggctcatgagctacataaagatctcgcacagagtctcctaggctagcgctgaccccgtggcttactgattgatcctacaatttcggcttcgagccacgactcgggtatcttcttcgcggagcccgagtgcctttgccactcggtgtcggtgtttacaagccagcgtgaaatgttccctcgcctcaacgacctgtcaaaaaaaaaaaaaacagttgcaatggaacagtgccttgttgtttttgttttgccctgagatagagaagttcatgttgagtaacacgtgcagattctcctcggatcagatttatagcggcattttgaatgaaatactgtgcatggtctcgtcatggttgaaaccatgatcagatttatagagaacctggaagtttacaattag

SEQ ID NO: 121429 - DNA, 462 bp, Zea Mays
atggcttattccggtacaaccgaacagggcctaaatttaccgccctttaacgccaggatggttcagtttgcattgatcaaagtgaagaacccgcaaaagctgacgcagtttagaccgaagaagggaaagtctcatgcctgcgcggttaacctggacatggcaaaagcatatgacagagttgagtggaattatctacgtcgcatcatgatcaaactgggcttcaatgtgaaccgggcaagccaggcagagcccaagaggtcagaattcagaagtgacttacgaccgccacctgaggttgacgatgccgctgaggggagcgacagcctcgttgcaatgttgttcgcagtcaccaccacaggtatgtctgaagagagcccagtgatgcccatgaccaaacctgccgaactcgtcatactcattagtgagtgccaacaactagtgcacttctttcctgaagaatga

SEQ ID NO: 121430 - DNA, 210 bp, Zea Mays
atggagtcaaattgtttcgtgcgtccagtccagtcacaggccatcatcttcactggctgctctgctggtctcttccagatgcctgcaaagcgcagtggagcactggctgtgactgtgagggtcgcttctactactactactcgtccttccagagcagaatgtatgcaggacggatccagctacttccggttcaaaggcaagaagatgtga

SEQ ID NO: 121431 - DNA, 2017 bp, Zea Mays
tcttctcgaaatgaagctccatcttctgtggctggtgagtacgatccgaagagcgatcctacccggaagccacggaagtctactgatccagggtggaagtatggattttggccagatcttcaaaataaagataaggtggaatgcaccctatgtggccaggttgttagtggagggataaagaggttaaagcaacatttggcaggggcatatggagatgcaaagttatgtcccaaggctaccagtggaataaggaaggagatgacaagttatttggaggcaaacaagagaaaaagaccaatgtttctagatgaagatgaagaagatgatgaagtggtggaggtggcagcagcagatgggacgaatgatacatctgctgtggagtctcaagcatccaaggtgcagcctagttctggtacagcagccaaaaaaagacaatcgaccttgcaatttaaggcaaacaatgttgcggaaacaccagaggaggtggtggatgagagactttcaggctcttatcagcccacaatcttggctagtgcaaaaagcaaggaggacaaacactatgtggacatgcagtgggctttgttcttctatgagtgcggtgtacctttcaatgccgcagcagctaggcagtttcagattgcaattgaggccacagcacagtttggttcagggtataagcccccaacaccttaccaactaggcgagccattgctacaagaggctgtgaagacaacaaatacaatgagggaggaacatgagcgtgcatggaaacactatggttgcacactcatgtctgatggatggtctgataggaggggacgccatctcattaacttcttagtgaacagcccagagggcacttattttttagagtccgttgatgcatctagtgaagtacatgatgcatacatgcttgctgatttgcttgagaaaaaagttgatgagattgggagagacaaggttgtacaagttgttactgataatggtgccaattacaaagctgcaggcaagcttctaatggagaggattcctactttattttggagtccatgtgctgcacattgcttggacctaatgttggaggacataggaaacttgaaggaattcaagaaaccaattgcacgtgcaaggcgtgtgacaactttcatataccgacacgggagaattcttgctgccatgagagagaaaactggtggggctgatcttgtgaggcctgcagccactcgttttgctacttcctttctcacattgaagagcttgtacaagcacaatggatgctttgaatgctttatttgcaagcacagcttgcactgatatctcattgtcaaaaactagtgctggattggatgtgtataacattgtcttctccacaccgttttggaattcattacaaaattgccttatagcttcggggccactacttattgtacttagggtggtagatggagatgataggccacctatgccagaggtccaagcattgatgaaatgtgcaaaggaaaacatccctctgagctttgctgtccacagcaagaagactttactcgagaaaatcataactataattgaacggcgttgggagaaacaaatggatcacccattgtatggggctgcaatgtatttgaacccagaaaagttgcatcctctcataagaaatgatgatgatgctactgttggtcagctaagaggttgctttcttgatgtgcttgcaagaatgtcagatgatgaggaaactacagacaagatcaattctcaagccatggattacgagtttcttataggagcatctttttcaaataacatggccaaagataacctacaaactatgaccccacgcaagtgtttgtggttgttactagtttactacttactagttgttgctagtaccttgctaaattgttgtgatgttattgcagttgagtggtggcgttcgtatggtggtcgtgctattgagttacagagatttgctagacgtttggagagtctttgtgcgtcttcatcatgttgtgaacgcaat

SEQ ID NO: 121432 - DNA, 287 bp, Zea Mays
cccgttatgtgagcttttggatggtcgatgctttctaagctgttacgttctcttctgtgttatgtggatttccttaaaacagggctaggtttcaactattttgtggtctctgttttaacagtggctttcaaaagtgccctcgaattcattgactcagggttgataagtaggacctgctcgtcatagagttgcacaaggccaaaactactcggccaaaagaaaggacatcaagtgccaccaccggtagagagaagacagagccgaaacttgcttgactgcatcgacga

SEQ ID NO: 121433 - DNA, 596 bp, Zea Mays
atggagtcaaattgtttcgtgcgtccagtccagtcacaggccatcatcttcactggctgctctgctggtctcttccagatgcctgcaaagcgcagtggagcactggctgtgactgtgagggtcgcttctactactactactcgtccttccagtttgcagaaaaaaggttgttgatccaagaacaaggataaataaagccggccgaccatgcacgcatataaaatttctctgccgccgccgccgccgccgatggttacctggaacatggaatccagtgcaggggaagcagatcgacaagtgtaatcggattctgccaattgtctatacagtttcttaggtagaaccgaatggtccggtcctcaagcgaatttttaatcctgttgatttatgcttttttgcgggggggaaagtctggaattcgtcagagctgagttaacgaatccttctcaggccatatctgcgcgtgatagattgtgcgcgcgcgaatcgccatggcagcccaccagtccaccaccattctctgataggatcttctgagctcctgatacactgttaacgaatccttatcattgccaatgaacagacttttaatagcg

SEQ ID NO: 121434 - DNA, 2257 bp, Zea Mays
gcacagcgtctggctatatatattattctcatcttctcgattctattctattcccgccataaaattgagcacaggccagttattccatcttctcgattctattcccgccataaaagactggttcttgtcactctgcttattcccactggcttcaagaggaactctccgctcgcttgctcgtgcaccacttgcagggggcagcgtcaggaaaatgtaccaccagctgttaaaattaaaaccctgatgctcgctcacagtcacagctaggcagacagacagcacccagagccggctctggagactggcagtatttatatgtagcactgtcgcacagcatggtttaattttcagatgcacagggaaaaaggtagatcttgctcgaagtagagctgtcaaaaattcaaaaattcagagagagagagagagagaaactgacagaacattaagactgatgcaaggcgcaggtagggtggttaaaatgtagattgtatggtgcacttcctttgtttgaaaggagatactagtaaggttactgctctgattgctacacagttggagtggagtgacacagtacacgaaagcagatcagacctcgagttacacttgcacctggtaattagtagtaagtagtagttcattaaccataaccccagcatcatctagctagctaattaggtgcagtgacccagcccccagttgggttttttttcccacccccagttgatagcacagtacagtgacggtagtttcatggctcaccgccacgtctgatctgcccttcagttccatctcactagcagatcactaacctgaaacaccagcagcaaaaaaaaaagatgtttttttccctcctctcgatgctttgtgctgccatggcgacttcggtcccgagctagcagagctggtactcgaacatcatgctgtcggggcaggatctgaggaggtcgtccaaggcggtggcggcgccgtcgaaggcgaggtaggggtcggagaaagcggcggcggcggcggcgttggtggtgttcatgcaggcgaggatgtcgttgagggagccgaggcgcgcggcgagctcggcggcctgggtgcggaggacggcgttgtcggcgtcgacggccaggaggccctgcgcggtgagcccgagcgcggtggccacgtgcgcgttctcgcggcgcaggtgcgcggcctgcgccgtgagctcgtccaggtggcgctgcttgcgcatccgcgaccgccgcgccgactcgcggttcgacagcatccgcttggcgcggcgctgcgccatgagcgcgcgcagctcctcctccgttcccgccgccgccaagtccagcgccgccgagaggaagcccgagctcccgctcccgctcccgctggaggaagccattgttcctgcgttccgtccgcgcaagaaccgccctttcttgcaagagagggggaaaaaagaacagaacagctctctgcttcttgatcccttttttctttctttctttctgcttcttgttggtaataacttaacactactaataactaataaaggtcttcgctagcagcagcagtagtagggaagtgcatgcaaggtaaagttttaggaaacgactgaaaccgagacgacgacgacgaagaagaaggcagagacggggaggaggagaggggcgtggcggtgacgggggcgagtagtttatgagaagacatagaaccagtagaggaagacgacggagaaggactggacgaggtgggtgcggcgccggagtgtggagttgatcataaaccccgagaggaggatctcactgatcacaggcgacatcaatgaggaactctagggcgcgcgaacggcagcatgtgcttccccctgatgttggctccgattggcactccagcccaatcggagcaaccggcctgcgcggcagcggggggtggggggtgcggcggcggcggcgaggccgggggttgaggggggtgctggctggtggcaaggcgggcgggcgggcgtggacggatacggggatatggagatgacgatcgggcggggctgggtggctggcttataaagcgagcgagcgagcgggcggccggccgggcggagcagcacgcacccgattcgatcggtggtggcggtggtggtgggcggttgctagctagtgtaggcgctgtgctggtctccctctctctctaacttgtcgctcctcctcctgctgccggtgggcggtgggagcgatgctggcgcatctgctgcttccgaggaaggaagaggagaggcggg

SEQ ID NO: 121435 - DNA, 895 bp, Zea Mays
accaaacaacctaataatgaagggcaacataagttgataggcaagggagacactgaggacgttgcagcaaacaaaacaaatgccgcaaacctgactgaaggcgataggtgcagtgagaagcatgaaaaatcaaatggacctgttatagaaatttcagttgattgcaacatgcccgataaaattactgggcatgtggaggcttcgagagagatagaaaaggcagcaatcggtttacctaatcaatctcacgaggatgatttgacaagagacagtgaagtgatcagcaaaccaaagaactcagagctcactaaagagaaatcctgcagtgacaaaccatcaacaagcagcaaagacccgaaaggagacaaaccaaaccgtgcagctgaaggtggagatgatccgaagaaaaggccgcgtgatcaagccggtaaaaatacgtcagatgcctcaaactcgacatataagaaggttgaaatgttcgtgaaagagcagatcaggccactttgcaagagtgccgtgatcacggtcgatcaatataagtgggctgtcgcgaaaacaactgacaaggtaatgagcttccaccgcgacgccaaaaatgcaaactttttgatcaaggagggtgacaaggtgaggaagctcgcgctgcagtacgtcgaggcatctcagcagaagatcagttgagaccctttaccggatttgtaaaatgtgttcacaatagctgccattgtttcctcatgctggaagcaagcaatccatgtaaatgactgggtgtgcggatcacatggtcaaccgtgtacaggccacccttcccgtaaatacatctgcttatgcattttgacatgatgaacaagtgcttcaggtgaaattgaagaacaaaaccactgacaaaaaaaaa

SEQ ID NO: 121436 - DNA, 2246 bp, Zea Mays
cactcttcctcgaggccaccacaacacccccgggacacacacacagtcacacacacataaaaaaaaaaaaatcccccctcgcctcggattcgctcgcgcccccgcccgccgacgcaacagcgaggtcgttccgttccaggcttcggacggaggcggggtgacgtaaggaggtgcgcgggaggatccgttcgcgcccggaggaccgggatccggcgcccgtcgtcgtcgacgcccatgtcgggccacctcgatcgcttcgcgcggccatgttttgaagggtgctcaagtcacgatgaacgtagagaccataagtcagactttgaagtctctgaagatgaaaagaagacaagaataagctctttgaagaaaaaagcaatagatgcatcaacaaagattaggcactcattaaaaaagactagaaggaagagtggtagtagggtcctttctgtgtctattgaggatgtgcgcgatctagaggagctgcaagctgttgaagcatttagacaagcattactcttggatgagctgttgcctgcaaggcatgacgactatcatatgatgctgagatttctgaaggcaaggaaatttgatatcgataaagccaagcaaatgtggattgatatgcttcagtggcggagggagtatggcactgatacaattgtggaggacttcgaatacactgagttgagcaccgttttgcaatattatcctcatggttatcatggagttgacaaagaggggagacctgtttacattgaaaggcttggaaaggttgaccctagcaaacttatgaatgtcacaacgatggatcgatacgtgcgataccatgtgaaggagtttgagaggagcttcttgattaaatttccagcttgctctcttgctgcaaaaaggcacattgattccagcacgacaattctggatgtccacggagtggggttgaaaaatttcagcaaaactgcacgcgaattaattcaacgactgcagaaaattgacaatgataactacccagagactctataccaaatgtttatcgtcaatgctggtccgggcttccggttactatggaacactgtgaagtccttccttgatcccaaaacgaccgccaagatacatgttcttgggaacaaataccaaagtaagctgcttgaaacaattgacgctagtgaattgccagaattccttggtggcacttgtacctgtcctgaatacggaggttgccttaaggctgaaaagggaccgtggaaggacccaaacatacttaagatagtccaaagtggtggggttcattgtgctcgtcaaattgtaactatttccaatggtgaggaaaaatttattacttacgccaaaccgaagcgccacgcaatgagagggagtgacacatcaactgctgagtctggttcagaagctgatgatgctgtgtcccccaaagctctcagaagttacatatcacatcctaagttgaccccagttcgtgaagaggtcaaaatggtcagggctactagcttttctactcgtgtccctgaatatgatgtacctgttgttgacaaggccgtggatgctacatggaagagagagcaaccacgaaaggcaccatccgtgccccaagatgcagactcatctgtgaaaactgcatccaagccatctggccgcccctgggataagatcgctgcaaatctgatggcttgtcttatggctattgtaatgttggttcgatcaatcaaagatcttgccacaatgagattgtcatctaaaggcgggtcagaagaaagctactgtacattgtacccggactccgtccagaaagaggaattccgtcctccttcgccattccctgggttcgctgaagccgacctattcgccgtggtcttgcaaaggctgggagagcttgaagagaaggtccagatgcttcaagaaaagccttctgaaatgccttgcgagaaagaagagttgcttaacgctgctgtgcgtcgtgtggatgcattggaagctgaactaattgtaacaaagaaggctttgcacgaggctcttatcaggcaagaggaactgctcgcgaacatcgacagcaaggagattgccagggctcagagaaagaagaaaacaatgttctgctactaggacaacacctgcttccgtgaggagatgacaaacgcggcggaccccttcatttttctgacacttgtgaatcaacaggtttccgttgtaaatcaacaaaattctggcataaataaaatgttttttttttaaaa

SEQ ID NO: 121437 - DNA, 2240 bp, Zea Mays
cactcttcctcgaggccaccacaacacccccgggacacacacacagtcacacacacataaaaaaaaaaaaatcccccctcgcctcggattcgctcgcgcccccgcccgccgacgcaacagcgaggtcgttccgttccaggcttcggacggaggcggggtgacgtaaggaggtgcgcgggaggatccgttcgcgcccggaggaccgggatccggcgcccgtcgtcgtcgacgcccatgtcgggccacctcgatcgcttcgcgcggccatgttttgaagggtgctcaagtcacgatgaacgtagagaccataagtcagactttgaagtctctgaagatgaaaagaagacaagaataagctctttgaagaaaaaagcaatagatgcatcaacaaagattaggcactcattaaaaaagactagaaggaagagtggtagtagggtcctttctgtgtctattgaggatgtgcgcgatctagaggagctgcaagctgttgaagcatttagacaagcattactcttggatgagctgttgcctgcaaggcatgacgactatcatatgatgctgagatttctgaaggcaaggaaatttgatatcgataaagccaagcaaatgtggattgatatgcttcagtggcggagggagtatggcactgatacaattgtggaggacttcgaatacactgagttgagcaccgttttgcaatattatcctcatggttatcatggagttgacaaagaggggagacctgtttacattgaaaggcttggaaaggttgaccctagcaaacttatgaatgtcacaacgatggatcgatacgtgcgataccatgtgaaggagtttgagaggagcttcttgattaaatttccagcttgctctcttgctgcaaaaaggcacattgattccagcacgacaattctggatgtccacggagtggggttgaaaaatttcagcaaaactgcacgcgaattaattcaacgactgcagaaaattgacaatgataactacccagagactctataccaaatgtttatcgtcaatgctggtccgggcttccggttactatggaacactgtgaagtccttccttgatcccaaaacgaccgccaagatacatgttcttgggaacaaataccaaagtaagctgcttgaaacaattgacgctagtgaattgccagaattccttggtggcacttgtacctgtcctgaatacggaggttgccttaaggctgaaaagggaccgtggaaggacccaaacatacttaagatagtccaaagtggtggggttcattgtgctcgtcaaattgtaactatttccaatggtgaggaaaaatttattacttacgccaaaccgaagcgccacgcaatgagagggagtgacacatcaactgctgagtctggttcagaagctgatgatgctgtgtcccccaaagctctcagaagttacatatcacatcctaagttgaccccagttcgtgaagaggtcaaaatggtcagggctactagcttttctactcgtgtccctgaatatgatgtacctgttgttgacaaggccgtggatgctacatggaagagagagcaaccacgaaaggcaccatccgtgccccaagactcatctgtgaaaactgcatccaagccatctggccgcccctgggataagatcgctgcaaatctgatggcttgtcttatggctattgtaatgttggttcgatcaatcaaagatcttgccacaatgagattgtcatctaaaggcgggtcagaagaaagctactgtacattgtacccggactccgtccagaaagaggaattccgtcctccttcgccattccctgggttcgctgaagccgacctattcgccgtggtcttgcaaaggctgggagagcttgaagagaaggtccagatgcttcaagaaaagccttctgaaatgccttgcgagaaagaagagttgcttaacgctgctgtgcgtcgtgtggatgcattggaagctgaactaattgtaacaaagaaggctttgcacgaggctcttatcaggcaagaggaactgctcgcgaacatcgacagcaaggagattgccagggctcagagaaagaagaaaacaatgttctgctactaggacaacacctgcttccgtgaggagatgacaaacgcggcggaccccttcatttttctgacacttgtgaatcaacaggtttccgttgtaaatcaacaaaattctggcataaataaaatgttttttttttaaaa

SEQ ID NO: 121438 - DNA, 2496 bp, Zea Mays
atgtcgggccacctcgatcgcttcgcgcggccatgttttgaagggtgctcaagtcacgatgaacgtagagaccataagtcagactttgaagtctctgaagatgaaaagaagacaagaataagctctttgaagaaaaaagcaatagatgcatcaacaaagattaggcactcattaaaaaagactagaaggaagagtggtagtagggtcctttctgtgtctattgaggatgtgcgcgatctagaggagctgcaagctgttgaagcatttagacaagcattactcttggatgagctgttgcctgcaaggcatgacgactatcatatgatgctgagatttctgaaggcaaggaaatttgatatcgataaagccaagcaaatgtggattgatatgcttcagtggcggagggagtatggcactgatacaattgtggaggacttcgaatacactgagttgagcaccgttttgcaatattatcctcatggttatcatggagttgacaaagaggggagacctgtttacattgaaaggcttggaaaggttgaccctagcaaacttatgaatgtcacaacgatggatcgatacgtgcgataccatgtgaaggagtttgagaggagcttcttgattaaatttccagcttgctctcttgctgcaaaaaggcacattgattccagcacgacaattctggatgtccacggagtggggttgaaaaatttcagcaaaactgcacgcgaattaattcaacgactgcagaaaattgacaatgataactacccagagactctataccaaatgtttatcgtcaatgctggtccgggcttccggttactatggaacactgtgaagtccttccttgatcccaaaacgaccgccaagatacatatagtccaaagtggtggggttcattgtgctcgtcaaattgtaactatttccaatggtgaggaaaaatttattacttacgccaaaccgaagcgccacgcaatgagagggagtgacacatcaactgctgagtctggttcagaagctgatgatgctgtgtcccccaaagctctcagaagttacatatcacatcctaagttgaccccagttcgtgaagaggtcaaaatggtcagggctactagcttttctactcgtgtccctgaatatgatgtacctgttgttgacaaggccgtggatgctacatggaagagagagcaaccacgaaaggcaccatccgtgccccaagatgcagactcatctgtgaaaactgcatccaagccatctggccgcccctgggataagatcgctgcaaatctgatggcttgtcttatggctattgtaatgttggttcgatcaatcaaagatcttgccacaatgagattgtcatctaaaggcgggtcagaagaaagctactgtacattgtacccggactccgtccagaaagaggaattccgtcctccttcgccattccctgggttcgctgaagccgacctattcgccgtggtcttgcaaaggctgggagagcttgaagagaaggtccagatgcttcaagaaaagccttctgaaatgccttgcgagaaagaagagttgcttaacgctgctgtgcgtcgtgtggatgcattggaagctgaactaattgtaacaaagaaggctttgcacgaggctcttatcaggcaagaggaactgctcgcgaacatcgacagcaaggagattgccagggctcagctaaatcatattagaaattcagcaaagctgatttcaggaaaatatagctcaactgctcaaccaataaaagcacaaaagaagttaaatactagttacaattactggaagatgattcaaggattaagaatcatggttttcacagtctgcacgcagcggtcatggaagaggccctacggcgtgggcctcctcgttgccggactggacgagtcaggagcccacctgtactacaactgccccagcgggaactacttcgagtaccaggcgttcgccatcggctcccgctcccaagccgccaagacgttcctggaacgcaggttccaggggtacgacgactacaccccggagcagctcgtcagggacgccctctccgccgtgaaggagacgctgcagggcgagaagctgtccggatccaactgcaccgtggccatcgtcggcaggaaggacgacggcaccgtcgagccgttcgaggtgatcggcgcggcgagggtccaggaacttatcgactccatggagatggaggtcgccgagcaggcaccgcctctggaggctgctgctgctagctcctccatgcaggaggagggggagaggggctcggatgacgctgctgcacccatggacatctagagggctgggatagggggagactcatatgaaacccgtacactgcattccgagttccaaaagactaagaccacttctttaaaaaaaagtaaattatgttgctttggtttggactgacaatgtatcacgtgatgcgaacacataacgtgttggttttggaggccagcttgccac

SEQ ID NO: 121439 - DNA, 2151 bp, Zea Mays
acaacaaaaaacacaaaagtttcttttaaacatgaacttgcccgtcctttatgacaagacaaattgcttatttgattacataaatatttgatacaaatatcaacattgttctcctgctttaaatagaaaagacatcaatgctctaatccacagtactcagcacataaaagttccaggtactcagaaacatacaagcaaggatctggaatcacatgataatgtccttcctttgcgattaccaagagcatggttattataagagcaccgtcgttactattacatcgttctcgtggatgcacatctgctacacagggagcgctgccactatccgatgcattagtggggatgcctgtacaataatttggataaaagagcttttcgtgcaatttaaatcgatggaacaaaggttagagcactttcgtccgtgctgtatatatactccagaattacatttaaaattatgctctctattgtgcataattttagaataataaattatgcataagtttttagcactcttttagtcatagaagaaatcaattttaaaggtataaccacgtgttatcttattaaatgtcaaaagggttcaagtaaagctctctattgtccattggtttagtagaaaaacgtgtgccatcatttactgaaccaatcgacaaaagagatcacatggacgagtccaaagcttcacccaataacgatggacgtggatatgatgtgtactgtttacagggacaatgcttccgaatacagcgtcctattttttgatttagtgtgcccaaatgttttacaagaaacgatgcagaaacaagacattgatggatcagaattctggcttgggatcctttctccgcggagaaggcatcgcaattgcgcacagtgtaatcgtagtcgatcagctggggaaagggtcatcatttccatcgtcaaagagaccaaaaaaattttccaagatccaaagtcaagaacatgcggaaggaatgatgtgttgaagaggaaactgagtgttgttgtttcgatcagaacatctggcttaagatcccatctccgaggagacggaactcgaaaaatcgcacagtataatcaaagtcggtaatttggggaaaggatcatcacatcaaaaaacaacacccaataacgatgaagagctggacaataagagaaattttggctcagacatccaaggaaggattcaacagcacaagctctcgagcctggcaaggcgaaagctcttaggcggctactgcgaatgttgagaaacaagccttatctttcatcatcattgccataatatgaatgaagtatagatttaaaaaataagtacagatatcaaaaataagtaaaaataggcaaagcactaatcatatcatagtattgatgaatgaatgtgatcacagaaaccggctctgtgggacagatggagaagccgtccccaggttcctatcaacatgcgaaacaaatttgtatcggcctgatcatagcatctcgggtaaaagcatgtagctaccagagacgtggcatcaggcccaaacaacttcagcaatgagaacagcacgacggttctgaagagtccctcagagacccgatcttaatcacacaccacagctgaaacacagagcagatgcagatgggagatccagcctgaccaaaccacaaaggttatggtcgagagatggaacacctgcagctgagtgcagcagctgctgcttacagtgtcaaacggcacttcctatcggtaggtcttgtgatcttcacgggggctacgtagctgaactatctcacgagttcgcagatgcagcaaagtaaaattacttgaaagtagaaaaaaaaattacgctggaaatacaaagaagaaaatcaacaggaatcattaccaaccaaaatgtactcaagaaagagaccgctagggaggagctcagagagttgctggatctgctcaacggagggaacgaaatccctgctcatacaagaggtgtcagaagaaagcggtgctcgtcacagctaccatatccctgtatgatcaatatgaatgaatgaacaaaacaaaacacagaacgaatcgcaggcattcaggaaaccatgacgacggacgcgaggagctcgcaacgagaccggatgcatcgtcgtcacaaggcgaagcgcgagcgctag

SEQ ID NO: 121440 - DNA, 114 bp, Zea Mays
ggggggaaatcctgcatttcaaaccggaccttagattattatcttataatcactctcttgaccggcctgtttcgaatattcgaactcaatccatagtactagaaaagtattcac

SEQ ID NO: 121441 - DNA, 810 bp, Zea Mays
gtaggggtggtgcgagcggccgagcgcgtgcgcggtggcgaagaagccgacgatgccggggcggtaggggaggtacgactgctgctgcggctgcctcgtcctgtccccggcgagcgcggcggcgccgggcttgccgtagaagagcctgtgcgcggtggccatgtccatctcggcggcgccggccttcttcttattcttcttattcttcgtgcccgcatgcttctgcggaggcgccgcagccttggcgctggcgtgcttgctgccgtcgccgtcgccgccggacggcttcgacggcgcggcggggctggcgctggagctgggttgcaggaaggcgaacttttccttgccgtcgctgcgggagcggccgccgcctgccaccacgaggtcgcgcaggcgccaggagcggcgggcctccgtccccgtggaggcggacttggggaacgccgccggggcgtcccgcggcgcccacgcgcagtacgtgtccggcgacggcggcggcggcggcgcggcggcggaggaggaggtgggtgccggcgaggaggccagcgcctcgtcgtggccgtggcccgcgagcgggtaggccgggacgatgcggccgtgcgcgaagaggtcgtcggccggcgcgagcgcgtgggcgccggcgcgcggcgacagcagcggcggcggcgcgaacgcgaactccaagtcggagtcggagtcggagtcggaggaggcgggctcggccgcggcgtgcgaggccaaggcgctgaagcttaggacggagtcgaggtgcggggctgggggaggcgcggccgccatcgcggacatggg

SEQ ID NO: 121442 - DNA, 2266 bp, Zea Mays
taggaagcagcagaagatgataggagggtcagcgtgactgcgtgagcggccgtggtcagacacgagacgcggtccaagagtcccgcagccgcagggcccaactaatcggccgtcagtcctttgtcccccacctgctcagtgcataatcaacgggccctacccgcgtctcttcttgcctcgcctgctgctgctcgctcctgccgcgacggccgccggcgaccctcccggcacccgtgtagctggttggcccttcggcatcgccgtccgcgcgccggtcaaccgctccgcgctcgtgctccccttccctccccaccaactataccagcacctatagatccagctcggcacggcagcttaagaccagtctccctctgcttcctccctcccttgtcccttgtcccttccttgtttcttcgcctggcgttcccgttccctgccacctcgcccgctctcctccccctctctcgaccacctcctcgggagtagaggggggctgctctgggcgtggtgcggcccccagatctgggccggcgggcggagggcgggatgaagtcgtcgctgagaagccggcaggagtcgcggcgggtcagcaacggcgtcatcatcggcgccatgctgctgtccctctgcgtcctcagtttcgtcaaggccagatactgcgccacccccctcggcaaggccgaggaccagctcgaggagcagatgaacgccagcatccggatggagccggaggagtcgtcgccggccaggacgcccggagaggaggaggacgagcaggaagcggaagaagagaatgtggtgaccaagccgccgcctccgccgccggccgtcacggctaacaggggcagcaagaagaagaagggcaagggcaagccgacgtgctacatgacgagcaagcggtcggagcggtgcgacgcgtccggcgacatccgggtggacgggaaccgctccaccatctacgtcggcgggatagagagggagtggaggacgaagccgtacgcgcgctaccacgaccccgtggccatggcccacgtccgcgagtacacgctgaaggcgctcccggagccgggggcggcggcggcgcccgcgtgcaccaggaaccacagcgtccccggcttcctcttctccaacggcgggttctccggcaacctgtaccacgactacacggacgtgctggtgccgctgttcatcagcacgcaccagttccgtgggcgcgtgcagttcctggtgagcgggatgaagccgtggtgggtgggcaagttcacgcccttcttccggcagctcacgcggcacgacgtgatcgacgtggacaaggacggggaggtgcactgcttcccgcggatcgtggtgggcgccaccttccacagggacatgggcgtggacccgcggcgcgcgccgggccacgtctccgcggtggacttcaagcgcgccctgcgcgccgccttcgggctgaagcgcgaggcggcgtcccgcggcggcggcggcggcgccacgggggacgggaaaccgcggctgctcatcatctcccggcgtgggtcgcgccggttcctgaactcgcgggagatggcggtcgccgcgggcgacgccgggttcgaggtgcgggtggcggagcccgaccagcgcacggacatggcggcgttcgcggcgctggtgaactccgcggacgccatggtgggcgtgcacggcgccgggctgaccaacatggtgttcctgccccgcggcgccgtgctggtccaggtggtgccgttcggcgggctggagtggctgacgggcgtcacgttcaaggagcccgcggcggacatggaggtgagctacatggactaccacgtgcggctggaggagagctcgctggtggaccagtacccgaggggccaccaggtgctcaccgacccctacgccgtgcaccggcaggggtgggacgcgctcaagacggcgtatctggacaagcagaacatccggatggatctcgacaggttcagggccacgctgcgggaggtcatggcccggttgccgtctccatgaccggccggcggccgccgtcagctccaaccgcccaaccgtccggtctggaggtagataggttggtgtatctaaatctgtcgtccccgctgcatgctcaaactagcttaatcttccttcctttttttccttccttttttttaactagcaagattctttcgatccctccattgttttgctgtgttattactgctacataaggaacctcatgggaaaacgatgagcaagcaaagcaagaagaccaagc

SEQ ID NO: 121443 - DNA, 1653 bp, Zea Mays
ccgcaggcccattgaggacaccagagtgtatggatcgctgccgcgtgctcccgtcgcggctcccgcacgcggacgctgtcgaccaactactcgttgtccttttcccgaacgccgagccctagcgtcaacgcggccaggcggcggtcagggccgggcgtcaggcggcagcagtggagcacgcagcccagcagctctaagttctattcagattggtgttttgctggtaccatgtccagtccgtggagccctctgagtattgaggaagacgaagagatacaagagcttggtgccgaggagcagcaggttggtgagcagctgcggcagggtgatgggcagcagcaggagttgacagctgatgcaagagcacaagagaccggaatgaaacgtgcaagatcagtgtccagttcatctactaatccatcaaattctcgtaaatctgagggaaagataaaggttgaggaaaatgcaccaggagctgcaacaggagtgattttgtctcttcgtgaaagtttacaggactgtaaacaaagccttgcatcttgccaggtggaactggaagctgcaaaatcagaaatcgagaagtggcattcagcatttcagagcattccagctgtaccttctggtaccattccagatcctgtttcagtggtgtcttacctcagtaccctgaagtcatcagaggaatcattgaaggagcagctggagaaagcaaagaaaagggaggcagcttttatagtaacatttgcaaaacgagagcaggagattgcagaactgaagtctgcagttagagatttaaaaacacaattaaggccaccatcaatgcagacaaggagattattgcttgatccagcaattcatgaggaatttacacgtttaaagaatcttgtggaggagaaagagaaaaaaataaaggagctacaggacaatgttgctgctgtcaattttactccatccagcaaactggggaaaatgctaatggctaaatgtagaacattgcaagaggaaaatgaagagattgggacgatggcatcagaaggaaaaatccatgagcttggaatgaaaattgcagttctgaagtctcagaacaatgagctcaggaatcaatttgatgttttgtacaaacacatggatggtgtaacaaatgatgtggagagatcaaacgaactggtgtccatcctgcaagaggagttagaagctaaggatctagagctgactagattgaaggaggtgcttgcccagaaaggagctactcaggacgcaccggtggagaccagtgacgacgctggaaacggtcaggaggcagattcagatacactgcaagtgaaggcggaaagctaagggagtttaggctttgaagtgtgtttgttgggacttgtgggaaaagtaatatcatgttatgcggtctcatagcatgtctaggttattatatagtaggggaatcactgcacaaaaacatcggcaaacttttatctatgatcgtacatatggctttacaaaagattattttgcattgtagacaacactattatagtgtggattttgaaattagatatataataataatatagatgagtaagctgtgagtaagaaagcctcaaactgattcgctacagatttgcgctggctgaaccagtaatgatctccaacaattca

SEQ ID NO: 121444 - DNA, 2364 bp, Zea Mays
aaccagaagcagtcgtcaaagggccaaagtcccctgctccccgcccggcgcccgcggcccgccgctcaaacccctaaaccctagccgcaccagcgccctattccctccttcggcggctccggcagcgagcggtcactagcaaccagcatcgtacggcgaagaagcgccgtttacacccatctggcggagatgccgctggggcagcgtccgggggacaagagtgacgcccgctactgcggggtggaggtgctcgacttccctgccggcgaggacctccccgccgttctcaaccactccctcgcctccgccttcgacttcatcctcgtccctctggttgaccccaactaccggccggcgcccggctccgttctgcccgtgtcggcgtcggacctcatccttggcccggcccagtggagcaaccacgtcgtcgggaagatcagcgagtggattgatttggactctgaggacgagcggctccgccttgactccgagctcacgctgaagcaggagattgcgtgggcgtctcacgtctcgttgcaggcatgtgttcttcctgcccccaggagatctttttgtggcaattatgccagagtcgtgaatcaaattttgcaaggcctgaccaatatgcatttgtggctcaggttgcctctggagaagtccgagcctatggatgatgatcttgataaaataaagaataacagccacacgagtgaaattgtagactcatgggaattatggaattcattcagattgctatgtgaccatagtagccaactatgtgtggcacttgatattttgagcactctgccatcaataaactcattagcaaggtggtttggagagcctgtaagggctgctattctgcaaaccgaggcttttcttacaaatgcaaaaggatatccttgtttatcaaagcgccatcagagtctgctaactggattttttaaacattctgttcaggtgataatatctggaagatcaaatcacaatgttttcccagtatctgaaggagtgctctcaggtgacgagagctacgcagaagattcccgtgttcgacatgcattaactccttaccttgaatacattgcgtacctatatcggaagatggatccgcttcctgagcaggaacgcattgagcctctaatggacaatttggaagctcaaacttatgagacatttgagaaggatgttgtgaagtacactcagtatcgaagagcagttgctaaggccttggttgatagggttgctgatgatgcagtctccacaactaggacggtgctgatggttgtgggagcaggacggggacctctagtacgagcttcattgcaggccgctgaagaaactggtcgcaaattaaaagtatatgctgttgaaaaaaatcctaacgctgttattactcttcatagtttgatcaaattggagggttgggaaagcctggttactgtaatttctagtgacatgcggtgttgggacgcccctgaaaaggcagatgttttggtcagtgaattgcttgggtcctttggtgacaatgaactatctcctgagtgtcttgatggtgctcagagattcttgaagcctgatgggatttccattccttcatcatacaccagcttcatccaaccaataacagcatcaaaattgcacaacgatatcaaagcacacaaagacattgcacattttgaaaccgcatatgttgtcaaactacaccgcatagcgacacttgcacctccacaacaggtttttactttcacccatccaaatttctcaccaaatgctagcaaccaaaggtacaccaagttgcaatttgaaatgctgccagatatgggttcatgccttgtgcatggatttgctggttattttgactctgtactttataaagatgttcatcttggaatcgagccaaacacagctacaccaaacatgtttagctggttccccatcttcttcccattgagaaaacccatctatgtgccggaagggtctcctatagaagtgcacttctggcggtgctgtgcccccacaaaggtgtggtacgagtgggctgtgactacaccgaccctgtcgccgatccacaacagcaatggccggtcctattgggttggtctatagtaactagtaaggcaatcaagatggtcgctttgtgttgtaacagagaagaaaaaaaaacagagagatgatagggtccaccggtccagttctatttgagccgggtgctactggtttctgcctggaggagcagatcaaaggatctgtaacgcgttgctatctgaaaggtgcttgacctccaacgttgcctactcgattttgatagttgtagcagtaaaatttcttgtcttgcaaatgtttcttgtttcgtcaaatatc

SEQ ID NO: 121445 - DNA, 2859 bp, Zea Mays
aaccagaagcagtcgtcaaagggccaaagtcccctgctccccgcccggcgcccgcggcccgccgctcaaacccctaaaccctagccgcaccagcgccctattccctccttcggcggctccggcagcgagcggtcactagcaaccagcatcgtacggcgaagaagcgccgtttacacccatctggcggagatgccgctggggcagcgtccgggggacaagagtgacgcccgctactgcggggtggaggtgctcgacttccctgccggcgaggacctccccgccgttctcaaccactccctcgcctccgccttcgacttcatcctcgtccctctggttgaccccaactaccggccggcgcccggctccgttctgcccgtgtcggcgtcggacctcatccttggcccggcccagtggagcaaccacgtcgtcgggaagatcagcgagtggattgatttggactctgaggacgagcggctccgccttgactccgagctcacgctgaagcaggagattgcgtgggcgtctcacgtctcgttgcaggcatgtgttcttcctgcccccaggagatctttttgtggcaattatgccagagtcgtgaatcaaattttgcaaggcctgaccaatatgcatttgtggctcaggttgcctctggagaagtccgagcctatggatgatgatcttgataaaataaagaataacagccacacgagtgaaattgtagactcatgggaattatggaattcattcagattgctatgtgaccatagtagccaactatgtgtggcacttgatattttgagcactctgccatcaataaactcattagcaaggtggtttggagagcctgtaagggctgctattctgcaaaccgaggcttttcttacaaatgcaaaaggatatccttgtttatcaaagcgccatcagagtctgctaactggattttttaaacattctgttcaggtgataatatctggaagatcaaatcacaatgttttcccagtatctgaaggagtgctctcaggtgacgagagctacgcagaagattcccgtgttcgacatgcattaactccttaccttgaatacattgcgtacctatatcggaagatggatccgcttcctgagcaggaacgcattgagattaattacagggactttttgcagtctcctctgcagcctctaatggacaatttggaagctcaaacttatgagacatttgagaaggatgttgtgaagtacactcagtatcgaagagcagttgctaaggccttggttgatagggttgctgatgatgcagtctccacaactaggacggtgctgatggttgtgggagcaggacggggacctctagtacgagcttcattgcaggccgctgaagaaactggtcgcaaattaaaagtatatgctgttgaaaaaaatcctaacgctgttattactcttcatagtttgatcaaattggagggttgggaaagcctggttactgtaatttctagtgacatgcggtgttgggacgcccctgaaaaggcagatgttttggtcagtgaattgcttgggtcctttggtgacaatgaactatctcctgagtgtcttgatggtgctcagagattcttgaagcctgatgggatttccattccttcatcatacaccagcttcatccaaccaataacagcatcaaaattgcacaacgatatcaaagcacacaaagacattgcacattttgaaaccgcatatgttgtcaaactacaccgcatagcgacacttgcacctccacaacaggtttttactttcacccatccaaatttctcaccaaatgctagcaaccaaaggtacaccaagttgcaatttgaaatgctgccagatatgggttcatgccttgtgcatggatttgctggttattttgactctgtactttataaagatgttcatcttggaatcgagccaaacacagctacaccaaacatgtttagctggttccccatcttcttcccattgagaaaacccatctatgtgccggaagggtctcctatagaagtgcacttctggcggtgctgtgcccccacaaaggtgtggtacgagtgggctgtgactacaccgaccctgtcgccgatccacaacagcaatggccggtcctattgggttggtctatagtaactagtaaggcaatcaagatggtcgctttgtgttgtaacagagaagaaaaaaaaacagagagatgatagggtccaccggtccagttctatttgagccgggtgctactggtttctgcctggaggagcagatcaaaggatctgtaacgcgttgctatctgaaaggcatttcaggtcattgtccgcaacaagaagagagtaggatataactatgaactaagcttgagatttagcggtgaatggttaatcaaagaagaaaacaagaagatcaaagggcatctagacattcccgagttttcattcggcgagatcgatgacttggaggtacaagtaaggctcggcgatgacaagggcctcgcctctgatgatagaacacggatctgcaaggatctcaagtcctttttggcgccgatccaggagaaaatgcgcatgtttgaagaagagctcaaaggtagatagcgagtattagcaagagttcgcagtgctaggcaagtgacttggcagttggcaccgccgtgctagctgtgatgtgtgtgtcgcaacgctctcaaagctgagactgtatgtgtactggtgtaatacacttgtcaagatgagcacgtacgaactgttctcttggtatccctcattttcagcatgtgatagtaaaaggaattcaagatgtttttgcatgaatggtatggatataggctctgtttggcacagcttattttca

SEQ ID NO: 121446 - DNA, 2370 bp, Zea Mays
agggccaaagtcccctgctccccgcccggcgcccgcggcccgccgctcaaacccctaaaccctagccgcaccagcgccctattccctccttcggcggctccggcagcgagcggtcactagcaaccagcatcgtacggcgaagaagcgccgtttacacccatctggcggagatgccgctggggcagcgtccgggggacaagagtgacgcccgctactgcggggtggaggtgctcgacttccctgccggcgaggacctccccgccgttctcaaccactccctcgcctccgccttcgacttcatcctcgtccctctggttgaccccaactaccggccggcgcccggctccgttctgcccgtgtcggcgtcggacctcatccttggcccggcccagtggagcaaccacgtcgtcgggaagatcagcgagtggattgatttggactctgaggacgagcggctccgccttgactccgagctcacgctgaagcaggagattgcgtgggcgtctcacgtctcgttgcaggcatgtgttcttcctgcccccaggagatctttttgtggcaattatgccagagtcgtgaatcaaattttgcaaggcctgaccaatatgcatgttgcctctggagaagtccgagcctatggatgatgatcttgataaaataaagaataacagccacacgagtgaaattgtagactcatgggaattatggaattcattcagattgctatgtgaccatagtagccaactatgtgtggcacttgatattttgagcactctgccatcaataaactcattagcaaggtggtttggagagcctgtaagggctgctattctgcaaaccgaggcttttcttacaaatgcaaaaggatatccttgtttatcaaagcgccatcagagtctgctaactggattttttaaacattctgttcaggtgataatatctggaagatcaaatcacaatgttttcccagtatctgaaggagtgctctcaggtgacgagagctacgcagaagattcccgtgttcgacatgcattaactccttaccttgaatacattgcgtacctatatcggaagatggatccgcttcctgagcaggaacgcattgagattaattacagggactttttgcagtctcctctgcagcctctaatggacaatttggaagctcaaacttatgagacatttgagaaggatgttgtgaagtacactcagtatcgaagagcagttgctaaggccttggttgatagggttgctgatgatgcagtctccacaactaggacggtgctgatggttgtgggagcaggacggggacctctagtacgagcttcattgcaggccgctgaagaaactggtcgcaaattaaaagtatatgctgttgaaaaaaatcctaacgctgttattactcttcatagtttgatcaaattggagggttgggaaagcctggttactgtaatttctagtgacatgcggtgttgggacgcccctgaaaaggcagatgttttggtcagtgaattgcttgggtcctttggtgacaatgaactatctcctgagtgtcttgatggtgctcagagattcttgaagcctgatgggatttccattccttcatcatacaccagcttcatccaaccaataacagcatcaaaattgcacaacgatatcaaagcacacaaagacattgcacattttgaaaccgcatatgttgtcaaactacaccgcatagcgacacttgcacctccacaacaggtttttactttcacccatccaaatttctcaccaaatgctagcaaccaaaggtacaccaagttgcaatttgaaatgctgccagatatgggttcatgccttgtgcatggatttgctggttattttgactctgtactttataaagatgttcatcttggaatcgagccaaacacagctacaccaaacatgtttagctggttccccatcttcttcccattgagaaaacccatctatgtgccggaagggtctcctatagaagtgcacttctggcggtgctgtgcccccacaaaggtgtggtacgagtgggctgtgactacaccgaccctgtcgccgatccacaacagcaatggccggtcctattgggttggtctatagtaactagtaaggcaatcaagatggtcgctttgtgttgtaacagagaagaaaaaaaaacagagagatgatagggtccaccggtccagttctatttgagccgggtgctactggtttctgcctggaggagcagatcaaaggatctgtaacgcgttgctatctgaaaggtgcttgacctccaacgttgcctactcgattttgatagttgtagcagtaaaatttcttgtcttgcaaatgtttcttgtttcgtcaaatatc

SEQ ID NO: 121447 - DNA, 1154 bp, Zea Mays
ccggactctcgaagagaagctctgcagtctgcaccgcatcgaccatcgccggtaagcaacaagagagccccaccgatggcggaggaagctgcatccctggaggcgccgccgccgctccacaatccctcactgcgaaaatcctcccttgacgatgagacccgcgccctcgtcgtccccgacgccgccgccctcccggcgtctcccccctccgccgtcgaggctaacttcgcgcgctacttcgtcgcagattttctgaatccagggtatgatcagtatgtgtatcgccatcctaacggattgtgtgtggttggtttagctccagcccatgttgtgtttaaagaggaaggagtcatatccactgttgacttcaatgtcggcaagtcagatcgcagtgagatgaaagtcacaggaaaacggaaaaggaatgcacaacacttgcaagaaaattcggcattgtgcaaagtttgtgtaaatgataaatcttttattgtgagatgctgtgtgaaaggttcccttttggagatcaatgaaagattgatcaaacaaccagatcttcttaataccgctgctgacagggaaggatatatagcagtcttccagccgaaaccagctgactggctcaaaattaaggataaattccttagttatgaggactacaagaacttgagaggagtatgctgacacccaaaagaagatgtttcgaacatgaaggcagcgcttaggttcgactcaaccattcgtgtgatgaaatctttactgctccagatattcgcagttcgatagaagcttcatcacatagctcctgagacgcaaacatgtgcgctggactcacttgaacctcgtgcactgggctggactcattttgctttagttatgagtggatgaatggatgtcggcctatacaagatgctaaggtcctgaagatgttgctttgtttattctgtcagaaatttgatgtataagtactgattcacacattacctcccagtgtaataactgatgaactggaatctaattatcaaagattttgttgtcctccaaattatcaaagtaaaagtggaacttaaaacaaaaacaacgatgaccattgcgtcgactgaatattgttcacagttgggagttgggatcaaagagcaggtacaggattgggccac

SEQ ID NO: 121448 - DNA, 1703 bp, Zea Mays
ggccttcccccctcattcacttctgcctttcctcatctgcccgtcgtcgtatcccccggtccgccggtcacctcgacaaacggcgaagggcggcaaaatgctgcagtgcatctttctcctctccgattccggggaggtgatggtggagaagcagatggcggcgcactgcgtggaccgcgctatctgcgcctggttctgggactacgtcgtcgcccacgccgccggcgatccttccaaagtcttacaggttgtggtgtcaccaacgcattacttgtttcaaatctatcgcaatggtgtaacgttcttggcatgcacccaagtggagatggccccactgatggcagttgagtttctctctcgcgtggctgatgtcttgacagattatcttggagatctgaatgaagatataatcaaggacaactttgtaattgtgtatcagattttggatgagatgatggataatggttttccactcacaactgagccaaacatcttgaaagagatgatcaccccacctaatattgtgaacaaaatgttgaatgttgttactggcaagagttctacccttggcagcaaacttccagatgcagctgcttcttttgtaccttggcgaagaacaacagtcaaggatgcaagcaatgaagtctatgttaacatagtcgaggaacttgatgcatgtgtgaacagagagggggttctcgtgaaatgcgaagcatacggtgaagtccaagtaaactgcagcctcccaggtgtgccagagctgaccatgtcctttgctaaccctgcaattatcaatgatgttaccttccacccctgcgtccgattcaggccttgggaatcaaatcagatcctatcatttgttcctcccgacgggcagttcaagctcatgagttacagggttcagaaactgaagaagacaccgatctatgtgaaaccacaattaacatcagattccgggaactgccgcgttagtgtgatggtcgggattcgaaatgatcctgggaaacctattgattcgataacagtgcagttccagttgccccctcttattgtttctgctgatctgactgcaaactatggcacggttgacatccttgccgacaagacctgtttgtggacaatcgggcagataccaaaagacaaagcaccggcactctctggaaatttacgactggaggaagggctcgcacaactgcatgcattgccgacatttcaggtgaaattcaggattatgggagttgccctatctggccttcaaattgataagctggacgtgaagaacacaccgaacgctccgtacaaaggttttagagcccagactcaagctgggaagtatgaggtcagatcgtaggtgcttgcaggggggcagctgttagttcattcttgtagaaaacgaatgatgctgcggacctggctcatggcctgttaacacattgttatgatcatcagttgagggttcacggccagctgcatttgggtcgttgcatttgatgggaggtgccattgttctttgttcaggtcaataggtgtcctgtacctgtacctgaatcagattatcctctgttgtgtgaaagcaacagaatactgcgaccctaggcctatctagataaaggttttggattctggcaccttgggttataaaattcacttgagtatagaatctcttttttttgttataagaaaaaaaatctcttttttgttag

SEQ ID NO: 121449 - DNA, 1696 bp, Zea Mays
ggccttcccccctcattcacttctgcctttcctcatctgcccgtcgtcgtatcccccggtccgccggtcacctcgacaaacggcgaagggcggcaaaatgctgcagtgcatctttctcctctccgattccggggaggtgatggtggagaagcagatggcggcgcactgcgtggaccgcgctatctgcgcctggttctgggactacgtcgtcgcccacgccgccggcgatccttccaaagtcttacaggttgtggtgtcaccaacgcattacttgtttcaaatctatcgcaatggtgtaacgttcttggcatgcacccaagtggagatggccccactgatggcagttgagtttctctctcgcgtggctgatgtcttgacagattatcttggagatctgaatgaagatataatcaaggacaactttgtaattgtgtatcagattttggatgagatgatggataatggttttccactcacaactgagccaaacatcttgaaagagatgatcaccccacctaatattgtgaacaaaatgttgaatgttgttactggcaagagttctacccttggcagcaaacttccagatgcagctgcttcttttgtaccttggcgaagaacaacagtcaaggatgcaagcaatgaagtctatgttaacatagtcgaggaacttgatgcatgtgtgaacagagagggggttctcgtgaaatgcgaagcatacggtgaagtccaagtaaactgcagcctcccaggtgtgccagagctgaccatgtcctttgctaaccctgcaattatcaatgatgttaccttccacccctgcgtccgattcaggccttgggaatcaaatcagatcctatcatttgttcctcccgacgggcagttcaagctcatgagttacagaaactgaagaagacaccgatctatgtgaaaccacaattaacatcagattccgggaactgccgcgttagtgtgatggtcgggattcgaaatgatcctgggaaacctattgattcgataacagtgcagttccagttgccccctcttattgtttctgctgatctgactgcaaactatggcacggttgacatccttgccgacaagacctgtttgtggacaatcgggcagataccaaaagacaaagcaccggcactctctggaaatttacgactggaggaagggctcgcacaactgcatgcattgccgacatttcaggtgaaattcaggattatgggagttgccctatctggccttcaaattgataagctggacgtgaagaacacaccgaacgctccgtacaaaggttttagagcccagactcaagctgggaagtatgaggtcagatcgtaggtgcttgcaggggggcagctgttagttcattcttgtagaaaacgaatgatgctgcggacctggctcatggcctgttaacacattgttatgatcatcagttgagggttcacggccagctgcatttgggtcgttgcatttgatgggaggtgccattgttctttgttcaggtcaataggtgtcctgtacctgtacctgaatcagattatcctctgttgtgtgaaagcaacagaatactgcgaccctaggcctatctagataaaggttttggattctggcaccttgggttataaaattcacttgagtatagaatctcttttttttgttataagaaaaaaaatctcttttttgttag

SEQ ID NO: 121450 - DNA, 697 bp, Zea Mays
tcccccctcattcacttctgcctttcctcatctgcccgtcgtcgtatcccccggtccgccggtcacctcgacaaacggcgaagggcggcaaaatgctgcagtgcatctttctcctctccgattccggggaggtgatggtggagaagcagatggcggcgcactgcgtggaccgcgctatctgcgcctggttctgggactacgtcgtcgcccacgccgccggcgatccttccaaagtcttacaggttgtggtgtcaccaacgcattacttgtttcaaatctatcgcaatggtgtaacgttcttggcatgcacccaagtggagatggccccactgatggcagttgaggtgtgtgcttcatctctttgtgactttgttttcttttcgcttagccgttacttgttctttttaatgtcttgtactctcgtaaggctgtagcaggaaaaggtcaaaaatgcaacacattgggggtaaatactgcttgttatttggtacagagcatgatgggtgctttggtacagtggcgtatgtcaagggcgtagtgatcaagggtaggcagccctcgactacggagttcgtagtctcctgccgtgtcttccaggaccgaaggttatgccccttacggcggctgggcttgagaggagatagagagagatggataattgttttctccctttctcaagtgctgattacatctatat

SEQ ID NO: 121451 - DNA, 770 bp, Zea Mays
tgctttccttatccaaaaatctgctgccgtccgtcggggtgccggtgacacgcgatggcactggcgtcctcgcctgcggcggttagctcaagcacccgtcatcacacgcctcgcatctccgtctcctcgtgcttcttctgcccaccgtcgggtgcgccatgtcctcctcttcgtgttgccactgccagcaccagcagcagaagtcgaggtcgagggcatctgccgcctccagccgccctgcctgacccccaagccgccgcggcgctgctcctcgccgccgccggtacagtcggcgccgccagcctcctgcttcgctcctcctcgtccggcgccgcctcgcagcagcagcggcggcaggagggacgagaagagcaggtagagggagaggagtgcccggactgcggcgggactgggctctgcggccgctgcaaaggagagggcttcgtcttcaagcagctctcggaggagacggccaccagggcacgcaaggccgccaagaacatggccactagatacacttcggggctgcccaccaagtggacctactgcaacaagtgctcctccacccgctcctgcacaacctgcggaggctccggcagaatcgtcaccgcaccacctgtcacctagctagcactcaaggctatctatggaatttgcagctatatgtgtagcactgcatgtacctctcagagagtctgataaaaagggtcactcagattttttttcccttgtaaagaggattaccaagaatttgtataccatgtcatttg

SEQ ID NO: 121452 - DNA, 1560 bp, Zea Mays
cttctacagctcaacgaagccgccgcacaaacccacccgcactcccgccctcgtcgccgccgttgcccgccccgcgggaagcggccgaggggacgcgcagcatggggaaggcgcggcacgccgcgaagctctccctcgccctcatccccaaaacaaagcttagatcccatgccgcttctccctccacgcagccgccgtctgctcatccgcccgccaatcctaccaagcccggcaagaacccccacgggagctccaaaaacttcacagccgtggcccccgtggcggccgtgcacgaggagcggaagcccatccggacgccggccgacctcgcggccgccatccgcgcggcggcggacgccgacatcgacgcggcggccgcactggccctgtccgcgcccccggacgtgccgctaccgacacactccctcgcgctcctgctccgccgtctgttcaccacccgctccgtcgccgccgcgcggagcctcctcgacaagctccacccctccggcgaggacggctgcccgcgccccaacccggccccgcgcggggcgctgctggcgctcgcggacgccgtgtgccgccgcggcgagccgcgcgagatctcccgcgtcctcccggttctcagggaccacggcgtccgcgccgacgcgcacctctacaacgcgctgatgaaggcgaacgtcgcggcggacgaccccggggccgtcctcagggtgttccggcagatgaggagcgacggcgtggaccccgacctcgtcacctacaacacgctcatcttcgggctcgcgcgcgccgggatggtcgccaaggccagggctttcctcgacgccatggccgcggagggccacctccccgacgtcgtcacctacacctcgctcatgaacgggatgtgcgtcaagggcgacgcgctcggggcgctgaagctgctcgaggagatgcagggcaaggggtgccagcccaacgagcgcacctacagcacgctgctcatgggcctctgcaagaacaagaagctggacaaggccgtcgaggtgtacaagtccatggcggcggctgggacgaagctcgagtcgccagcgtacgcctccttcgtcagggcgctgtgccgatcgggcagcgtcgcggacgcgtatgaggtgtttgattatgcgatccagaccaagagtttcgccgaggtgacggcgtattctgagctcgagaactccctcaagtggctgcgcaggatgagttcatgacgcaaactgcctgcaaggagagtatgcgtacgccagtgtcttcaatgcaataagctggttcctgcaatcctgtggagcgctggtgatcttctttttttctctcgttttttttactaatggtatggatggagtagtaatggatcatccaaagaattgaagctcaggaagtcatttagatctagaaatggcgcaaatgtctttgtcggcgccaagcctttcttgtctgctatgctactatgctgttgtcacgcagtgccttgttgtaaacaagcacagattacgaatctttatgaaatgactttttttttcctctcgaaattatgagaaa

SEQ ID NO: 121453 - DNA, 1934 bp, Zea Mays
ggcaggcaactgaaacggggcggagacttcgccgaggccgagcggcgagagctcggtttcttgtcggtcagctgcactctcttcgtcagtcactctccctgcatatacttatatatccccctccttgacttcgccatccccctctgctacgctttgttctgggctcttcctggctgcctcctcttcctcctcccctgtacagagagagaacccagagagagggtccagagggagcgggctctgagagaaccggagatggggaacatctgcggtggctccgggaaggatcgggtggccgaggatttcaggccgtctagcccagggacaacaatgacctccaagacgagcggcagcataaccaccagcctgagcaccacggggaagctctcctccgtgggcagcagcttcatggcgtccgccagcagccgcagcaccagcggcgggttcgacgagggggccaagtactccgacggccagatcctcgaggcgcccaacctccgcaccttcacattcgtagagctcaagacggccaccaagaacttccggccggacagcgtccttggcgaaggagggttcgggagagtctacaaagggtgggtggatgagaagaccatggcgccgaccaggaacagcaccggcatggttgttgcggtcaagaagctcaactcggagagcatgcaggggtttgaggaatggcagtcggagataaattttctaggaaggctctcccatccgaacctagtgaagctcttgggctactgttgggaggacaaggaacttcttctcgtgtacgaattcatggccaaagggagcttggaaaaccacctattcaggagaggatgtgcccccctgtcctgggagctgaggctgaagatagccattggtgcagctcgaggactcgcgttcttgcatgcatcggaaaaacaagtaatctaccgtgatttcaaggcgtctaacatccttttagacgcgaactataacgcaaagctctctgatttcggccttgctaagctggggccaactggtagcaactcgcacatcacaaccagggtgatggggacatatgggtatgcagctccagagtacgtagccaccgggcatctgtacgtgaagagcgacgtgtacggtttcggcgtggtgatgctggagatgctgtcggggcagcgagcgctggacccgaaccggccgagcgggcagctgagcctggccgactgggcgaagccgtacctggcggaccgccggaggctggcgcggctcatggacccgcggttcgagggccagtacaactccaggcaggcgttccaggcggcgcagctgacgctcggctgcctggccggcgacccccgcagccggccctcgatgaaggaggtggtggagacgctggagcgggtggaggcggtgaagagccgggcgcgcggcggcgggtccgggtccgggtctggccgcgccggtgccgcggcgcaccaccggtcgccgcgcgtcggtggcggtgcccgtgccgcgtccaggcccgccgccaacggccacaacgccaggcccgcgcgatgacgctccggcagggtggtgacgattcttcatgtaaatggcgtctttttttttttggcctggttcgcgtgctgttcttgcatggcggccgctgttgttgtaagttgtagccaatagtgtaatagttaaaaaaaagtgctagaagaaaggaataaccattcaatcaaaaacgtgtttttcttttcgcaaaaggaacaaaggaagaggacggtttttgtgtatgtgttgttgtttttctgttaaccattggtggggggaaaaggacgacgagtttatactgaagaagatcttgtgctgaacgtgttgactttatcgttgctggatctatcaaaaatctgaagcggatcatcgtgacatgccctaacaagtgcatcgagtcaaagtggcga

SEQ ID NO: 121454 - DNA, 1185 bp, Zea Mays
ccggattgcagaactgatgtgtttcatactcttaactgctagtagtagaaggggagggagcagagtcgatttgctgtcactgaattcctagagtagtggggcactagtaaaaacgacctgcaccagcagttgctgcggccaagtggataaatatcgcacaagaatcatgaacggccattccagtgccttgtcactttccaagagaaaatgggcaacctgtttttttttatatatatactcctatatagttgaagcacatctggaattctgaattcctagaaatagctgctgatgtttgctgactgaccgcgaaagaaaccgccatgtccatccatattggcgaacagggcatctgtacgtgaagagcgacgtgtacggtttcggcgtggtgatgctggagatgctgtcggggcagcgagcgctggacccgaaccggccgagcgggcagctgagcctggccgactgggcgaagccgtacctggcggaccgccggaggctggcgcggctcatggacccgcggttcgagggccagtacaactccaggcaggcgttccaggcggcgcagctgacgctcggctgcctggccggcgacccccgcagccggccctcgatgaaggaggtggtggagacgctggagcgggtggaggcggtgaagagccgggcgcgcggcggcgggtccgggtccgggtctggccgcgccggtgccgcggcgcaccaccggtcgccgcgcgtcggtggcggtgcccgtgccgcgtccaggcccgccgccaacggccacaacgccaggcccgcgcgatgacgctccggcagggtggtgacgattcttcatgtaaatggcgtctttttttttttggcctggttcgcgtgctgttcttgcatggcggccgctgttgttgtaagttgtagccaatagtgtaatagttaaaaaaaagtgctagaagaaaggaataaccattcaatcaaaaacgtgtttttcttttcgcaaaaggaacaaaggaagaggacggtttttgtgtatgtgttgttgtttttctgttaaccattggtggggggaaaaggacgacgagtttatactgaagaagatcttgtgctgaacgtgttgactttatcgttgctggatctatcaaaaatctgaagcggatcatcgtgacatgccctaacaagtgcatcgagtcaaagtggcga

SEQ ID NO: 121455 - DNA, 207 bp, Zea Mays
aaaaaaataattcattttccatgtaacctgggccgagtcacctacctaaacgcaaaaatacagtgcttgcggactaacagccgacgtctacctttgatacagctgccatttcgatcacctgccacagtttaatctaacattacactgcgttacatgatataaacagcttacatttgctgacccaaatatccaacaccacaaaaaaaa

SEQ ID NO: 121456 - DNA, 119 bp, Zea Mays
caaacaaacattttgaaaggaaatttgaaattcattttgaatttagagcaagtttgagaaaattccaagatttgaatttttgggatgctacaagtacctcatcccatttgatcaagtga

SEQ ID NO: 121457 - DNA, 1164 bp, Zea Mays
atgaaagctgacgagggacacactgatggagccaatctcggtggcgcccgagaacgcctcatcagcatgcgcaccactgtcgaagaccaccagagcggtagagttgtctgcccagacctccttgacaggcccgaatcggaggaagatcgtggccaggtgacgcgcggaaggcacgacatgtgcgttgctgaagttgagcacgagcccgaccccgacttcgtggtcaccattgtcgtccttgcgtgccggcggaagctgctcgtgtgctaccgctaccgcgcacctcaccatgtgtggtgctggcagtacggccgtcggaggtggaggagtagagcagttgtcgtcgtaggccgtcgtggccctgaggatcaccggcgagagcgacatgttctgcgcggcgcgactcatgagcttcccgatcctcgtgggcgtgggcgtctgctaggccggtgtgcgcagcgggagatcctcaagctccagcgcttcgtagtcgctggtgtcacaggctgcattcccttttgttgcagtgatgcgagtgttcttgcccaccctccgtttggcaggagcaggaccgtcaactccggtcgacggtggcctccttcgcttggctttggctctcccaggggtggtgacaacggcaccatcgatgccgtggacgatcgtgtactcaggaaggcccctcgtcgagaccttccatcggccaagcgccccgagctgtgccgtggcgacggcgaggtccaccctgtcgcccctggaacgcgggctagtggccagcgcggagaggtacccgaggagggcctcggcctggagcgtgcacctggcaaaggccacgtccactaccgccctgggcgcgccatcacagacgccgacgtgctgggcacgctcctcatgcagaacccgttgctacgcgtcctctctatgggcgccctgatgccagcgccaccaccgaaggcaccgcgcgtcctctcacccacccagttgtcgttgcacagctcgaacatgcccctgttctcctgctggtccaggatcgcctgcgcgagggaagggacgggcgtgaggacacggcaggacgccgagacacaatgcataattaatcagggatacgcgcacgacacgacagggtgggtgacgccgtctcggcgctcacctcgtaggcctcgctga

SEQ ID NO: 121458 - DNA, 1971 bp, Zea Mays
aatccgcgtcaaccaatgattatataacagcccccgccccacagtcagcccagccccccgccacctgagtacctgacacacagcgaaacgccgaaaccgcgtcaagttccccatctccgatcccccaatcgccctaaccctagactcgccaccgccgccgcgatgctccgctcgccgggcaattcgccccgccgcctctcaccgtcgcccacacccgcgccctccacccctcgcccggcctccccgcccccctccaccgccccctcctcgaagcgccgccggtcggaggtgctcgacgaggacacctacgtcgccgccatcgagcgcatcatcgagcgcgactacttccccgacctgccccgcctccgggaccgcctcgactggctgcaggccgtgcggtcccacgacccgctcatcctccgcgacgcgcagctcaaaatcctagaccgccgccgccgcgcccagcgccacgcggcggggcccgtccccacgccgacgccggccacctccaccgcgctccgctccccgtcctttctcaccacccccgccggatccgtcgccggcggcgtgggaggtcccgacgccgaccacgacgacgacgtcgcggccgcgctctccctggacggcttcttccaccgcttcaccagcgaggacaacgactccttctcgcgcatcctagacaaggtgaaccagcgccgccgcgaacgctacgcgcacctgctggagccgccgccgcctgtcgaggcggggactaaaccgtcagaggacgccaagcgcaacaggatcacggacgggtacggtacatcggggcagccaccgagcacgctcgagggcgccaagttcacggcaaagaagttgctgatgtactatccggctgaccagggggaagcgcccctcacggaggaggagcgcgcagagcggctcagggggatgaccaaggagataaacaagtcgaacaccaggctacatggcagagccacggctgatgacgcgaggcccaaggaggaggagggggccgccatactgtacgcgctggttgcaagctctactccgggagggatggcctaccacgaccctgacaagttgaagaagtacgatctggaggacctgaggaagaccccgaaccctttctacctcgagtcggacaagaaggccggcaacgggtacagttttgtgaggacgccgtcgccagcacccggcgtggacgagtcgccgtttatgacgtggggtgagatcgacggaacgccgctgaggctggaccccgacgagacgccgggcggtagcgagagagcgcatttcaagatgccaccacctcctgctcgcgacatcaaggcgcacttgctttcgagggatgccgctcggaaaataaaggagcggtctaagcccttccataggccgcccctaccctcccctgcgaggggtgtcagcgcgagccctagaaccctttcgccagcagcgcaaaaattcgtgaggaacgccatctccaagtcgtcaaagtcctccagcgccattgacgaatctctccgtgcaagctacagaggctcgaccccgtctgcgagcactcccaagtcaaggttttcaagagatcctggcctcacatcgcgttctccatccacaaggcagggttccacccctccctggtgagtgttagtaaaccacttaatgttatttcataaaatgggtaggtggcccatcctgtactgtaacaaattgtataatgatggaagacatgaaatgatgaagtgatgctaatttactcttatattatctgagtcacccttaccaaaatcaatgtcatgagcatatcttttcatactaaattgctaagttccaacttgaattttaaatttcaaagtcatgcatctgggcagaccatttgtcgtctttgtaacagtgggtttggcaaaaacttccatgtcattgtattgtactccaaggcagattgtgcatctggtcttgcaaaaaaaaaaa

SEQ ID NO: 121459 - DNA, 1735 bp, Zea Mays
gacacctgagtacctgacacacagcgaaacgccgaaaccgcgtcaagttccccttcttcgatcccccaatcgccgtaaccctagactcgccaccgccgccgcgatgctccgctcgccgggcaattcgccccgcctcctctcaccgtcgcccacacccgcgccctccacccctcgcccggcctccccgcccccctccaacgccccctcctcgaagcgccgccggtcggaggtgctcgacgaggacacctacgtcgccgccatcgagcgcatcatcgagcgcgactactttcccgacctgccccgcctccgggaccgcctcgactggctgcaggccgtgcggtcccacgacccgctcatcctacgggacgcgcagctcaagatcctagaccgccgccgccgcgcccagcgccacgcgggcggggcccgtccccacgccgacgccggccacctccaccgcgctccgctccccgtcctttctcaccacccccgccgggatccgtcgccggcggcgtgagaggtcccgacgccgaccacgacgacgacgtcgcggccgcggtctccctcgacggcttcttccgccgcttcaccagcgaggacaacgactccttctcgcgcatcctagacaaggtgaaccagcgccgccgcgagcgctacgcgcacctgctggagccgccgccgcctgccgaggcggggagcaaaccgtcagaggacgccaagcgcaacaggatcacggacgggtacggtacatcggggcagccaccgagcacgctcgaggtcgccaagttcacggcaaagaaccagctcatgtactacccggctgaccagggggaagcgcccctcacggaggaggagcgcgcagagcggctcagggggatgaccaaggagataaacaagtcgaacaccaggctacatggcagagccacggctgatgacgcgaggcccaaggaggaggagggggccgccatactgtacgcgctggttgcaggctctactccgggagggatggcctaccacgaccctgacaagttgaagaagtacgatctggaggacctgaggaagaccccgaaccctttctacctcgagtcggacaagaaggccggcaacgggtacagttttgtgaggacgccgtcgccggcacccggcgtggacgagtcgccgttcatgacctggggtgagatcgatggaacaccgctgaggctggactccgatgagacgccgggcggtagcgagagagcgcatttcaagatgccgccgcctcctgctcgcgatgtcaaggcgcacctgctttcgagggacgccgctcggaaaataaaggagcggtctaataccttccataggccgcccctcccctcccctgcgaggggtgtcagcgcaagccctagaaccctctcgcgggccgcgcaaaaattcgtgaggaacgccatctccaagtcggcaaagtcctccagcgccattgacgaatctctccgtgcaagctacagaggctcgaccccgtctgcgagcactcccaagtcaaggttttcacgagaccctggccttgcatcgcgttctccatccacaaggtagggttccacccctccctggtgagtgttagtaaaccacttaatgttatttcataaaatgggtaggtggcccatcctgtactgtaacaaattgtataatgatggaagacatgaaatgatgaagtgatgcttatttactcttatattatctgagccacccttaccaaaatcaa

SEQ ID NO: 121460 - DNA, 1371 bp, Zea Mays
atgctccgctcgccgggcaattcgccccgcctcctctcaccgtcgcccacacccgcgccctccacccctcgcccggcctccccgcccccctccaacgccccctcctcgaagcgccgccggtcggaggtgctcgacgaggacacctacgtcgccgccatcgagcgcatcatcgagcgcgactactttcccgacctgccccgcctccgggaccgcctcgactggctgcaggccgtgcggtcccacgacccgctcatcctacgggacgcgcagctcaagatcctagaccgccgccgccgcgcccagcgccacgcgggcggggcccgtcccgacgccgaccacgacgacgacgtcgcggccgcggtctccctcgacggcttcttccgccgcttcaccagcgaggacaacgactccttctcgcgcatcctagacaaggtgaaccagcgccgccgcgagcgctacgcgcacctgctggagccgccgccgcctgccgaggcggggagcaaaccgtcagaggacgccaagcgcaacaggatcacggacgggtacggtacatcggggcagccaccgagcacgctcgaggtcgccaagttcacggcaaagaaccagctcatgtactacccggctgaccagggggaagcgcccctcacggaggaggagcgcgcagagcggctcagggggatgaccaaggagataaacaagtcgaacaccaggctacatggcagagccacggctgatgacgcgaggcccaaggaggaggagggggccgccatactgtacgcgctggttgcaggctctactccgggagggatggcctaccacgaccctgacaagttgaagaagtacgatctggaggacctgaggaagaccccgaaccctttctacctcgagtcggacaagaaggccggcaacgggtacagttttgtgaggacgccgtcgccggcacccggcgtggacgagtcgccgttcatgacctggggtgagatcgatggaacaccgctgaggctggactccgatgagacgccgggcggtagcgagagagcgcatttcaagatgccgccgcctcctgctcgcgatgtcaaggcgcacctgctttcgagggacgccgctcggaaaataaaggagcggtctaataccttccataggccgcccctcccctcccctgcgaggggtgtcagcgcaagccctagaaccctctcgcgggccgcgcaaaaattcgtgaggaacgccatctccaagtcggcaaagtcctccagcgccattgacgaatctctccgtgcaagctacagaggctcgaccccgtctgcgagcactcccaagtcaaggttttcacgagaccctggccttgcatcgcgttctccatccacaaggtag

SEQ ID NO: 121461 - DNA, 1824 bp, Zea Mays
atggaggacacactcactatcagtaggcttagtgtccttatccttgtccgcttagcggcgaaacgccgaaaccgcgtcaagttccccttcttcgatcccccaatcgccgtaaccctagactcgccaccgccgccgcgatgctccgctcgccgggcaattcgccccgcctcctctcaccgtcgcccacacccgcgccctccacccctcgcccgggcctccccgcccccctccaacgccccctcctcgaagcgtcgccggtcggaggtgctcgacgaggacacctacgtcgccgccatcgagcgcatcatcgagcgcgactacttccccgacctgccccgcctccgggaccgcctcgactggctgcaggccgtgcggtcccacgacccgctcatcctacgcgacgcgcagctcaagatcctagaccgccgccgccgcgcccagcgccacgcggcggggcccgtccccacgccgacgccggccacctccaccgcgctccgctccccgtcctttctcaccacccccgccggatccgtcgccggcggcgtgagaggtcccgacgccgaccacgacgacgacgtcgcggccgcgctctccctggacggcttcttccaccgcttcaccagcgaggacaacgactccttctcgcgcatcctagacaaggtgaaccagcgccgccgcgaacgctacgcgcacctgctggagccgccgccgcctgtcgaggcggggactaaaccgtcagaggacgccaagcgcaacaggatcacggacgggtacggtacatcggggcagccaccgagcacgctcgagggcgccaagttcacggcaaagaacttgctgatgtactatccggctgaccagggggaagcgcccctcacggaggaggagcgcgcagagcggctcaggggaatgaccaaggagatagacaagtcgaacaccaggctacatggcagagccacggctgatgacgctaggcccaaggaggaggagggggccgccatactgtacgcgctagttgcaggctctactccgggagggatggcctaccacgaccctgacaagttgaagaagtacgatctggaggacctgaggaagaccccgaaccctttctacctcgagtcggacaagaaggctggcaacgggtacagttttgtgaggacaccgtcgccggcacccggcgtggacgagtcgccgttcatgacgtggggtgagatcgacggaacgccgctgaggctggaccccgacgagacgccgggcggcagcgagagagcgcatttcaagatgccaccacctcctgctcgcgacgtcaaggcgcacttgctttcgagggatgccgcccggaaaataaaggagcggtctaagcccttccataggccgcccctaccctcccctgcgaggggtgtcagcgcgagccctagaaccctttcgccagccgcgcaaaaattcgtgaggaacgccatctccaagtcgtcaaagtcctccagcgccattgacgaatctctccgtgcaagctacagaggctcgaccccgtctgcgagcactcccaagtcaaggttttcaagagaccctggcctcgcatcgcgttctccatccacaaggcagggttccacccctccctggtgagtgttggtgagtgttagtaaacctcttaatgttatttcataaaatgggtaggtggcccatcctgtactgtaacaaattgtataatgatggaagatagtaaatgatgaagtgatgcttatttttctattatctgagccacccttaccaaaatcaatgtcatgagcatatctttgcatgctaagttccaacatgtacttgaatttt

SEQ ID NO: 121462 - DNA, 1052 bp, Zea Mays
caaaaaaaaaaaaaaaaactcctattccgaggcccagctcagtccacgccgagcatagcccaatctgtaagtttggaccagagcccatggcgatacggcccagcacataggcatagccctcccgccgtcatccttggcttccccgctcccgtcgcgactccaatcgcaattcgcaattcccagccccattccccgtcggccgactccagcgagcgacttcgccccggtcggaagcaccaccagccaccagcgatgtctggcgaggaggaggagaacgccgcggagctcaagatcggcgaagagttcctcaaggccaagtgcctgatgaactgcgaggtggcgatcatcctggagcacaagtacgagcagatccagcagcacgcgtcgtcggagtcggacccgtcgtcgcaggtgtcgcaggtgttcgagaagtcgctgcagtacgtgaagcgcttcagccgctacaagaaccccgacgccgtgcgccaggtccgcgagacgctgagccgctacggcctcgccgagttcgagctctgcacgctcggcaacctctgccccgacaccagcggcgaggccaccgcgctcgtcccctccctcaagtccggcggcaggttcgtcggcgaccccggggacgagaagatcgagaagatgctcaacgacctctccctcatcaagaagttcgagtagagcgggagccctctcttctcttatcttcttttctcttggagtagcgagcatccagagaggaggggaattcaacatcaagacgatgtactgataaaattttacttgccttacactactatcgttgaggttcacgtctgcgtattgattagaaccttgtttgatcgataatccaatatactagtagtatgtgtgtggttgatgatctgtctggaattctacacgagaagcctgcagaggatgaggatccgagttggccatgccctctgttcttcagctcgaaatgtactgatttccttgctattgttaaggttcatattatcttcatccgctttccatctagtcatgtatacatgaattaatggaac

SEQ ID NO: 121463 - DNA, 1906 bp, Zea Mays
tttccctccctgcaattcacattgatatgagcattactttgctcttcaagtgtttatatcttgctaaatggtaaccaattcaattctgactttcaccaagaattttgattacctcttttgcgttgaccttgaagcatcaatgactcatttttaggctcgaggcacgatgatgaaacctgtggtgcccagcccaggctacctttacgacctggctccgccactgttggcaacttcgcccgttgcacccccggaggaccgacagcgacgacgccactactgatgccactggccaaccgtgaggacaggacaacggtcgcctctggccgcggatcggcagattcagtcttatttggtgccatggatccagtcgccggtacggcggagcatcggggaccggtggaagtgcgcgcccgcgcgcccggcaagatcatcctcacaggcgagcacgccgtcgtccacggctccgccgccgtcgccgctgccatcgatctctacaccaactcctccctcctcctccgccccgcaggcccaggagagggtggcggcgctggctccagcgcggtagagctggacctcagggactcgggcctgaccttctcatggccgtgctcgcgcctccgcggggcgctgggggaagagatcagcgccaaccccggggctccggcgccgtgctcccccgaccagcttgccgctattgccaggctcttgcaggaccaggacatccctgaggccaagatctggctctccgccggcctctccgccttccttttcctctacacctccattttgggatgcaggcctggcaaggcagtggtgtcctcggacctgcccatgggcgcagggcttggctcatcggcagcattttgtgtctccatgtcgggggcactattgacggctgctggcgcagtaagtgttggagcacacaggggtgctgagggttgggaggtgttggagaagggtgctcttgagctggtcaaccaatgggcgttccaaggggaaaagattattcatggcaagccttctggcatcgacaattccgtcagcacttttgggaaaatgatcaaattcaagaagggggaactgacaaaccttgagtccaggaacccagtcaaaatgcttattactgatacaagagttggtaggaacacaaaggcactggttgctggtgtgtctgaaagagcatctagacatccagatgctatggcttctgtattccatgcagtgaacactatcagtgaagagctttcaagcattgttgagttagtagccgaggatgagatagccatcacctctaaggaggataagctagcagagcttatggagatgaaccaaggtttgcttcagtgtatgggagtcagccattcttctatagaaactgtgttgcggaccactctgaaatatagcttggtctcaaagctaactggagctggtggtggaggctgtgtgttgactctaataccgacgttatcgtccaatattgttctggagaaagtcaccagggagctcgaatctcatggttatcgctgcttcaaagttgaggttggtgggcgaggtctccaagtattccgaggataacataacactcaacctatttcaaggagatgttgtaccatacttttagaagatggcttacctgcactgaagctgtttagattctcttcttgagttattccaagatcatgataggatattcttctcctaagcctagcaggttcttgtatccagtactcgagttgctccaggattaggacattcttatgctatccctagcactcttgtatcaaataagctcatagatgcctgatcattgctggtatgattgttgtattaactattaagtaaacaaacatttaattgctccaaatgttgtatcaaataaaaaaaatatcatcgacctcatgaagcc

SEQ ID NO: 121464 - DNA, 560 bp, Zea Mays
aatcaatcattttcttttgttttcttcaataaacatttattggcaagacatattagcatgaatgttttgttacacttttttttgactgcttgcagtattttctaccttttgaaattatgctttatagttgtaaactaaacatgtatttatgtgacaatttagttttccagaaacagttttcctctctatttcagaacatgatctggtactttgtgaagtttttttgtttgtttgcttgtgcagactccgatgaacctctcaattgacgagcgatgcaggataaataatttgtccacaagtatgattgcattatcccaggtgcttatgaaagtttttactttttcttcaatatgaatagtctgaatgtgtggtgtggcctgtctgatctatctagcaggtttagtggtactcgcatcagctaaaccttaaacttgttttcttcttaatgtaatataattatacatggttctactacttgtttgaaaaaaaaaacttaaacttatttctacatatggaatcactaaatggtcgtattttccaataccaattgcagatccctt

SEQ ID NO: 121465 - DNA, 884 bp, Zea Mays
gcttggattcgggacctgagaggcaccatcacttgggctgtcctttctgattttttaactcttagtgaagtcattgcagatttctcccttagtgatggtgtgccagacaagcatatctggaaattttccccgacaggtcaatactctgctaagtcggcatatgatatgttatttctaggttccacttcttttggtgcatttgaacgtgtttgggagacttgggcacctccaaagtgcagattctttctttggcttgtcttgcacaatagatgctggaccgcggaccgtcttgctaaaagaggacttccacatcccagtgcttgtcctctttgtgaccaagaagaggaaacaatacaacatcttctcttttcttgcgtctttgcaagacagttctggtacttcttgttgagcaggtctggattgcctaatctttcaccggacaacgctttttgcagcctagatgactggtggagcagggctgtggagaagcttccccgtgatctccaatcaggtttcaattctatagttatccttggcgcttggagcctttggcgtcatcgcaacgactgtgtgttcaatgggcggtcgccgagccttgagaatactctcaccctcgctggcgatgagctcaggatgtggtgtagtgccggggcgaaagggttgaacctgctttcaactcttgcgtttatgcttgatccgggggatagtcttgtatcatgcccagagtggttaagtgtggtagtggtgttgcgtggttggtatgttgtgtcttgtgaggggtgtggtgcgtctgttggtatgttgtttgcggcgtgtgtgtgcgcgtgtgttgtaccttcttctatctatctattaatggaatgatacgcagatctcctgcgtgt

SEQ ID NO: 121466 - DNA, 171 bp, Zea Mays
taaacaaaaagaaaacatagaacataaaagtggcacgtatgctgttacataaatcggtttctatctttcttacacgcgacttttacctgtcggatcttgcatgtgtggagaagtaggtgagggtgtttgctggcgatgcaggctcgtgcgagaccggcgcacgtagatgtg

SEQ ID NO: 121467 - DNA, 2369 bp, Zea Mays
atcaaggcccctggcatctcccgaaagtccaaagggcccctcccccgcgcctccgcggggaccttgttaacaaactgggccgcatccagggggcattctgcaaagcacgagcccggttcgttctcgacctttcgtctcgctctcgcccgcccgaccccgcggagccctagcctagccttgcccccgaccgcggattccccctcggccgccgcgcgcccgcacccgcacccgcgatgatgaactgcgccggaggcggagaccccgtggaggacttcctgatctccggcgccgtcgacgacgaagatctagccatcttctgcgacggagggtacggcgatgccgaccggaacagtcctttcccgtagtatatatgtagactgcgtttctgtttatggcgcggcgcacctaggtcgttttcgctgcagattgctttttgggcttgttagaaaaaattgtgggcggtggtagactaattatttgatttggctgacgtatagcgtctaaaaactattcgcatattatatttcgtttttttgtcaaaaggaaaggacgaaggcttatgcatctgacagtcgagtctgcaatcctgtaacctttgatatctgcatctgaagttcagatatttgagagatttgcagtactagttggttcgggaactaatacctgtacgaaatgtttttactggttcaccaacacacttactgctgctatgatcatgtacaaactgtaccttgaagcaattggagtttgtttgctagctggtataaccttttccgctgatcaatcatgcattatagtataataatatatcgattcaagtgatttgcattatcatgatcatagacatttgattcttatcttctgactggaatgcaagcatgaagcagcacaatgatttattagatatttgagaagctattctgcacgtgcatttcctttcctgttgtggcatttgttcggtacttactttgcaattgtagcagacttgggattgagggtgtcaatggagatgcttgtggatttgagcagtctaatttgggcaaaaggtattgtttcttgtcgtaactcttcattctgattgtgaagtgcgtgcatgtgggtgaacactgtcaagtttctatccatcatgtgtgtctatttgggcatcttgtccgtccttctcatggggttcaggccccaaacaggaaaacctctctggctttaaaggtttctacaagatgccaacaagtttgtaaaacatcaagtgtgtgcacatgcaatcagatgatagtgattgtatagcatattgctatgaattatctccaatcaaatttcaattcccatgtgatctggtgtgttcattttcttatgcttggcaatggcatcactaacactatgaacatagcattcggcttgtacatggtatttccttatgttctgctctatagtaatataaatatctgttctgtgcaggggtagagatgaaccatgttcatctggtctaaaatccaaagcttgtcgtgaaaaaatgaggagggacaagctgaatgacaggttcctggaattaagttcggttatgaatcctggaaaacaagcaaagttggataaagccaatatcttgagcgacgcagcccgtatggtggcacaacttagaggtgaggcagaaaagcttaaagaatcaaatgagaagctgcgggagaatatcaaggacctgaaggaggagaagaatgagctccgcgaagagaaagtgaggctgaaggtagagaaagataggctggagcagcaagtcaaagccatgagtgtagctcctacaggatatgttccccatctccctcatccagcttcataccacccggctgcatttgctccatttgtgccgccacagcaagctgcaggcaacaaaagtgctccaatccctgcacctttccctgggatggcaatgtggcagtggctgcctccgaccatcgtggacacaactcaagacccaaagctctggccgcctaatgcttaggggcagctagctgccttggggtgttgactcgccaatcgccatgccgtttcatgcattgggcggcagatcagagtatcagttagtaggtccctggagaggaggaatcaagtttcgcaactcgcgtcatgtttatgctgtaacagttgcttccagcagtcgtcatcaacttgctttgttctattgaagggtgatgcatgtaattaatatgtggatcttaaccctctagctggcaaatgtgtcctttgctgccttgtgccctttgccccgttcgtgagtggcctgtggaggccgttcctgttcttggtgtccgagattttgccattagctttgtgagacacatacatagcaggaaaagaattcgatgaactaaatctttaaa

SEQ ID NO: 121468 - DNA, 1333 bp, Zea Mays
atcaaggcccctggcatctcccgaaagtccaaagggcccctcccccgcgcctccgcggggaccttgttaacaaactgggccgcatccagggggcattctgcaaagcacgagcccggttcgttctcgacctttcgtctcgctctcgcccgcccgaccccgcggagccctagcctagccttgcccccgaccgcggattccccctcggccgccgcgcgcccgcacccgcacccgcgatgatgaactgcgccggaggcggagaccccgtggaggacttcctgatctccggcgccgtcgacgacgaagatctagccatcttctgcgacggaggacttgggattgagggtgtcaatggagatgcttgtggatttgagcagtctaatttgggcaaaaggggtagagatgaaccatgttcatctggtctaaaatccaaagcttgtcgtgaaaaaatgaggagggacaagctgaatgacaggttcctggaattaagttcggttatgaatcctggaaaacaagcaaagttggataaagccaatatcttgagcgacgcagcccgtatggtggcacaacttagaggtgaggcagaaaagcttaaagaatcaaatgagaagctgcgggagaatatcaaggacctgaaggaggagaagaatgagctccgcgaagagaaagtgaggctgaaggtagagaaagataggctggagcagcaagtcaaagccatgagtgtagctcctacaggatatgttccccatctccctcatccagcttcataccacccggctgcatttgctccatttgtgccgccacagcaagctgcaggcaacaaaagtgctccaatccctgcacctttccctgggatggcaatgtggcagtggctgcctccgaccatcgtggacacaactcaagacccaaagctctggccgcctaatgcttaggggcagctagctgccttggggtgttgactcgccaatcgccatgccgtttcatgcattgggcggcagatcagagtatcagttagtaggtccctggagaggaggaatcaagtttcgcaactcgcgtcatgtttatgctgtaacagttgcttccagcagtcgtcatcaacttgctttgttctattgaagggtgatgcatgtaattaatatgtggatcttaaccctctagctggcaaatgtgtcctttgctgccttgtgccctttgccccgttcgtgagtggcctgtggaggccgttcctgttcttggtgtccgagattttgccattagctttgtgagacacatacatagcaggaaaagaattcgatgaactaaatctttaaaccgtctctataacgccagcaaaaaa

SEQ ID NO: 121469 - DNA, 2070 bp, Zea Mays
attctgcaaagcacgagcccggttcgttctcgacctttcgtctcgctctcgcccgcccgaccccgcggagccctagcctagccttgcccccgaccgcggattccccctcggccgccgcgcgcccgcacccgcacccgcgatgatgaactgcgccggaggcggagaccccgtggaggacttcctgatctccggcgccgtcgacgacgaagatctagccatcttctgcgacggagggtacggcgatgccgaccggaacagtcctttcccgtagtatatatgtagactgcgtttctgtttatggcgcggcgcacctaggtcgttttcgctgcagattgctttttgggcttgttagaaaaaattgtgggcggtggtagactaattatttgatttggctgacgtatagcgtctaaaaactattcgcatattatatttcgtttttttgtcaaaaggaaaggacgaaggcttatgcatctgacagtcgagtctgcaatcctgtaacctttgatatctgcatctgaagttcagatatttgagagatttgcagtactagttggttcgggaactaatacctgtacgaaatgtttttactggttcaccaacacacttactgctgctatgatcatgtacaaactgtaccttgaagcaattggagtttgtttgctagctggtataaccttttccgctgatcaatcatgcattatagtataataatatatcgattcaagtgatttgcattatcatgatcatagacatttgattcttatcttctgactggaatgcaagcatgaagcagcacaatgatttattagatatttgagaagctattctgcacgtgcatttcctttcctgttgtggcatttgttcggtacttactttgcaattgtagcagacttgggattgagggtgtcaatggagatgcttgtggatttgagcagtctaatttgggcaaaaggggtagagatgaaccatgttcatctggtctaaaatccaaagcttgtcgtgaaaaaatgaggagggacaagctgaatgacaggtactgcaaaatcaatgtttaaaaggctgctaggcaacaaggcaagctgggtacgcctggacgcgtaggccacacctttgaaacactgctgcgaatatgtcctatacctcacaagttgttgctcaaaagacaaggaatggtgaatgcacttacttgcacatatcttagttctcatctgttactttgatttgcaggttcctggaattaagttcggttatgaatcctggaaaacaagcaaagttggataaagccaatatcttgagcgacgcagcccgtatggtggcacaacttagaggtgaggcagaaaagcttaaagaatcaaatgagaagctgcgggagaatatcaaggacctgaaggaggagaagaatgagctccgcgaagagaaagtgaggctgaaggtagagaaagataggctggagcagcaagtcaaagccatgagtgtagctcctacaggatatgttccccatctccctcatccagcttcataccacccggctgcatttgctccatttgtgccgccacagcaagctgcaggcaacaaaagtgctccaatccctgcacctttccctgggatggcaatgtggcagtggctgcctccgaccatcgtggacacaactcaagacccaaagctctggccgcctaatgcttaggggcagctagctgccttggggtgttgactcgccaatcgccatgccgtttcatgcattgggcggcagatcagagtatcagttagtaggtccctggagaggaggaatcaagtttcgcaactcgcgtcatgtttatgctgtaacagttgcttccagcagtcgtcatcaacttgctttgttctattgaagggtgatgcatgtaattaatatgtggatcttaaccctctagctggcaaatgtgtcctttgctgccttgtgccctttgccccgttcgtgagtggcctgtggaggccgttcctgttcttggtgtccgagattttgccattagctttgtgagacacatacatagcaggaaaagaattcgatgaactaaatctttaaaccgtctc

SEQ ID NO: 121470 - DNA, 1205 bp, Zea Mays
acgagcccggttcgttctcgacctttcgtctcgctctcgcccgcccgaccccgcggagccctagcctagccttgcccccgaccgcggattccccctcggccgccgcgcgcccgcacccgcacccgcgatgatgaactgcgccggaggcggagaccccgtggaggacttcctgatctccggcgccgtcgacgacgaagatctagccatcttctgcgacggaggcagacttgggattgagggtgtcaatggagatgcttgtggatttgagcagtctaatttgggcaaaaggggtagagatgaaccatgttcatctggtctaaaatccaaagcttgtcgtgaaaaaatgaggagggacaagctgaatgacaggttcctggaattaagttcggttatgaatcctggaaaacaagcaaagttggataaagccaatatcttgagcgacgcagcccgtatggtggcacaacttagaggtgaggcagaaaagcttaaagaatcaaatgagaagctgcgggagaatatcaaggacctgaaggaggagaagaatgagctccgcgaagagaaagtgaggctgaaggtagagaaagataggctggagcagcaagtcaaagccatgagtgtagctcctacaggatatgttccccatctccctcatccagcttcataccacccggctgcatttgctccatttgtgccgccacagcaagctgcaggcaacaaaagtgctccaatccctgcacctttccctgggatggcaatgtggcagtggctgcctccgaccatcgtggacacaactcaagacccaaagctctggccgcctaatgcttaggggcagctagctgccttggggtgttgactcgccaatcgccatgccgtttcatgcattgggcggcagatcagagtatcagttagtaggtccctggagaggaggaatcaagtttcgcaactcgcgtcatgtttatgctgtaacagttgcttccagcagtcgtcatcaacttgctttgttctattgaagggtgatgcatgtaattaatatgtggatcttaaccctctagctggcaaatgtgtcctttgctgccttgtgccctttgccccgttcgtgagtggcctgtggaggccgttcctgttcttggtgtccgagattttgccattagctttgtgagacacatacatagcaggaaaagaattcgatgaactaaatctttaaa

SEQ ID NO: 121471 - DNA, 2055 bp, Zea Mays
atggaggggtcagaagcggcggcgcgtgaggcgctgtcgacggagaaggcgttcgagggggagcggctgccggcgtggtcggagcagatcactgtgcgctccgtggtggtgagcacggcgctgggcctgttcctgagcttcatcgtgatgaagctgaacctcacctccgggatcgtgccgtcgctcaacatgtcggcgggcctgctcgccttcttcctgatgaagacgtggaccagcgcgctggagcgctgcggcgtcttccccaagcccttcacccggcaggagaacaccgtggtgcagacgtgcgtcatctcctgctccagcatcgccttcagcggcggcttcggcacctacatcctgggcatgagcaagaagatcgccgagggcttcgacgaggccaagaccagcatcaacgtggaggagccgtcgctgggccggatcatcgccttcctcttcctcgtcagcttcgtgggcctcttctccatcgtgccgctgcgcaagatcatgatcatcagctacaagctcacgtacccgagcggctccgccacggcgcacctcatcaacagcttccacacgccgcagggcgccatccaggccaagcagcaggtctccatcctcttcaagtccttcgtcggcagcttcctctggtccctcttccagtggttctactccgcggggccaggctgcggcttcagctccttccccacgttcggcatggaggcctaccgccgccgcttcttcttcgacttctccgccacctacgtcggcgtcggcatgatctgcccctacatcatcaacttctcgctgctgctgggctccgtcgtctcctggggcctcatgtggccctacatcgagagcaagcgcggcctctggtacgacgccgagctgccgcggagcagcctccacggcctcaacggctaccagatcttcatctccatcgccatgatcatcggcgacggcctcttcaacttcctctccatcctcgtccgcacctcctacgacatgtacctcaagcgcacccgccccgccgaggccgccgccaagcccttcgcgggcgtcgacgtcaccgagcgccaggcgctcagcttcgacgaccgccgcaggacgcaggtgttcctcaaggaccagatccctacgtccatcgccgccggcgcctacgtgctgctggcggccatctcggtggtggccatcccgcacatcttccgccagctgcagccgaggcacgtggtgtgggcctacgtcgtggcgcccgtcttcgccttctgcaacgcctacgggacggggctcaccgactggtccctctccagcagctacggcaagctggccatcttcatcttcggcgccaacgtgggcgccgcggacggcggcgtggtggcggggctggcggcgtgcggactcatgatgggcatcgtctccacggcgtccgacctcatccaggacttcaagacggggtacctcacgctgacctcgccgcgctccatgttcgtgagccaggtcatgggcacggggctgggctgcgtcatcagccccgtcgtcttctggatcttctacaaggcgtacgacatcgggatggaggaaggctacccggcgccgtacgccaagatctaccggggcatcgcgctgctaggcgtcaacggctggaaccagctgcccaagtactgcctccgcttctgcctcgccttcttcctgctcgccgtcgccatctgcgcgctcaaggaggtggccaaggcgcggcggtggtgggtgcaggactacatcccgagcgcgctgggaatggcggtgcccttcttcctcggctcgttcttcaccatcgacatgtgcgtcggaagcatcgtgctgtacctgtggagcaagtcggaccgggtgagggcgcacatgttcgcgccggccgtcgcgtcggggctcatctgcggcgacgggatctggtcgctgccgtcgtccatcctctccctgatcaacgtcaacccgcccatgtgcctcagggtcttctccgccgacacaaactaccaggttgaggagttcctctggacgctgcgaaacccagccgccacataa

SEQ ID NO: 121472 - DNA, 1464 bp, Zea Mays
atggaggggtcagaagcggcggcgcgtgaggcgctgtcgacggagaaggcgttcgagggggagcggctgccggcgtggtcggagcagatcactgtgcgctccgtggtggtgagcacggcgctgggcctgttcctgagcttcatcgtgatgaagctgaacctcacctccgggatcgtgccgtcgctcaacatgtcggcgggcctgctcgccttcttcctgatgaagacgtggaccagcgcgctggagcgctgcggcgtcttccccaagcccttcacccggcaggagaacaccgtggtgcagacgtgcgtcatctcctgctccagcatcgccttcagcggcggcttcggcacctacatcctgggcatgagcaagaagatcgccgagggcttcgacgaggccaagaccagcatcaacgtggaggagccgtcgctgggccggatcatcgccttcctcttcctcgtcagcttcgtgggcctcttctccatcgtgccgctgcgcaagatcatgatcatcagctacaagctcacgtacccgagcggctccgccacggcgcacctcatcaacagcttccacacgccgcagggcgccatccaggccaagcagcaggtctccatcctcttcaagtccttcgtcggcagcttcctctggtccctcttccagtggttctactccgcggggccaggctgcggcttcagctccttccccacgttcggcatggaggcctaccgccgccgcttcttcttcgacttctccgccacctacgtcggcgtcggcatgatctgcccctacatcatcaacttctcgctgctgctgggctccgtcgtctcctggggcctcatgtggccctacatcgagagcaagcgcggcctctggtacgacgccgagctgccgcggagcagcctccacggcctcaacggctaccagatcttcatctccatcgccatgatcatcggcgacggcctcttcaacttcctctccatcctcgaaggctacccggcgccgtacgccaagatctaccggggcatcgcgctgctaggcgtcaacggctggaaccagctgcccaagtactgcctccgcttctgcctcgccttcttcctgctcgccgtcgccatctgcgcgctcaaggaggtggccaaggcgcggcggtggtgggtgcaggactacatcccgagcgcgctgggaatggcggtgcccttcttcctcggctcgttcttcaccatcgacatgtgcgtcggaagcatcgtgctgtacctgtggagcaagtcggaccgggtgagggcgcacatgttcgcgccggccgtcgcgtcggggctcatctgcggcgacgggatctggtcgctgccgtcgtccatcctctccctgatcaacgtcaacccgcccatgtgcctcagggtcttctccgccgacacaaactaccaggttgaggagttcctctggacgctgcgaaacccagccgccacataa

SEQ ID NO: 121473 - DNA, 2418 bp, Zea Mays
agtttaaaacccgtccccgtctccgtcagacagactcgactcgtcagcaagcagttcgaaacaaggatcgatccaggagcttccagaaggcgaggaggaagagggagaagggcgcgcgcgcgcgcagcgttcaagtggtgctggtgtcggccatggatcgggttcgtggatccgcgttcctgctcggcgtcctgctcgcaggatccctgttcgcgttttcagttgctaaggaggagaccaagaagctcggcaccgtgatcggtatcgatctcggaaccacctactcctgtgtgggtgtgtacaagaacggacatgtcgagatcatcgccaatgaccagggtaaccgtatcacaccctcatgggttgccttcaccgatagcgagaggctcatcggtgaggctgccaagaaccaggcagctgtcaaccctgagaggaccatctttgacgtcaagcgtctcatcggaagaaagtttcaggataaggaagtccagagggacatgaaacttgtcccctacaagattattaacaaggatggcaagccatacattcaggtcaagatcaaggatggggagaacaaggtcttcagccctgaggagatcagtgccatgattcttggcaagatgaaggatactgctgaggcgtaccttggcaagaagatcaacgatgctgtcgtcactgtccctgcatacttcaatgatgcgcagaggcaggcaaccaaggatgctggtgtcattgccggcctcaatgttgctaggatcatcaatgagccaactgctgctgctattgcctatggtttggacaagaagggtggcgagaagaacatccttgtctttgaccttggtggtggtacttttgatgtcagtatcttgaccattgataacggtgtgtttgaggtgctggccaccaatggtgacacccatcttggaggtgaggattttgaccagaggatcatggaatacttcatcaagttgatcaagaagaagtacagcaaggacatcggcaaggacaaccgtgctcttggaaagctgaggagggaagctgagcgtgccaagagagcccttagcaaccagcaccaggtccgagttgagatcgagtccctctttgacgggaccgacttctcggagccgctgacccgtgccaggtttgaggagctgaacaacgatctgttccgcaagactatgggccctgtcaagaaggccatggaggacgctggccttgagaagagccagatccacgagatcgtcctggttggtggaagcaccaggattcccaaggtccagcagctcctgaaggactacttcaatggcaaggagcccaacaagggtgtgaaccctgatgaggctgttgcctttggtgccgcggtgcagggaagcatcttgagcggcgagggtggtgacgagacaaaagatatcctcctccttgatgtggctcctctcaccctgggtattgagaccgtcggtggagtcatgaccaagttgatcccgaggaacactgtcatcccgaccaagaagtcgcaggtgttcaccacctaccaggaccagcagaccactgtctccatccaggtctttgagggtgagcgcagcatgaccaaggactgccgtcttctgggcaagttcgacctcaatggcattccgtcagctccgaggggcacaccccagatcgaggtgaccttcgaggtggacgccaacggtatcctgaacgtgaaggcggaggacaagggcacgggcaagtcggagaagatcacgatcacgaacgagaaggggcggctgagccaggaggagatcgaccgcatggtgcgggaggcggaggagttcgcggaggaggacaagaaggtgaaggagcggatcgacgcccgcaaccagctggagacgtacgtgtacaacatgaagaacacggtgggcgacaaggacaagctcgcggacaagctggaggcggaggagaaggagaaggtggaggaggccctcaaggaggcgctcgagtggctggacgacaaccagtccgccgagaaggaggactacgaggagaagctcaaggaggtggaggccgtgtgcaaccccatcgtgtcggccgtataccagcggtcgggcggcgcccccggtggtgatgccgacggcggcgtcgacgacgaccacgacgagctgtagatggtggtggggagcggtgacgtggagtgcccgggaacccaagccaaattttgtaatggtgtttaggggggagggtggtggacaaaaaaactaatcttggtgctgctctgtcaatagacgggctgagcatagaactttttttccctttctacttccttgtgattgttctttttatagaggattcgcattgcagtgtaatgtaaaaaaaagaagacgcgcttctgaaacttgttactacaagttaataatgaaatggtgcattgcatcacagtgt

SEQ ID NO: 121474 - DNA, 1954 bp, Zea Mays
ccacacccacctcgccgctatttaagcagcgaaaggttggagagcgagtatgtaaaccacactccactccagcactgaacactttgattgattcagtgggtagctagctagctgaatcacaatggatcctaccaagttccgtccgtccagcagccacgacacgacggtgacgacgacgaacgcgggcgctcctgtgtggaacgacaacgaggcgctgactgtggggcctcgcggtcccatcctgctggaggactaccacctgatcgagaaggtggcgcacttcgcgcgcgagcgcatcccggagcgcgtggtgcacgcgcgcggggcctccgccaagggcttcttcgagtgcacccacgacgtgacgtcgctgacgtgcgccgacttcctgcgcgcgcccggcgtgcggacgcccgtgatcgtgcgcttctcgacggtgatccacgagcgggggtccccggagacgatccgcgacccgcgcgggttcgccgtgaagttctacacccgcgagggcaactgggacctgctgggcaacaacttccccgtcttcttcatccgcgacggcatcaagttccccgacgtgatccacgcgttcaagcccaacccgcggtcgcacgtgcaggagtactggcgggtgttcgacttcctgtcgcacctccccgagagcctgcacaccttcttcttcctcttcgacgacgtgggcgtgccgtccgactaccgccacatggaagggttcggcgtgaacacgtacacgttcgtgagcgcggcggggaaggcgcagtacgtcaagttccactggaagccgacgtgcggcgtgcggtgcatcctgacggacgaggaggcggcgctggtcgggggacggaaccacagccacgcgacgcaggacctgtacgactccatcgcggcggggagcttcccggagtggacgctgtacgtgcaggtgatggagccggacacggaggagcagtacgacttcgacccgctggacgacaccaagacgtggccggaggacctgctgccgctccgccccgtggggaggctggtgctggacaggaacgtggacaacttcttcaacgagaacgagcagctggcgttcggcccggggctggtggtgccagggatctactactcggacgacaagatgctgcagtgccgggtgttcgcctacgccgacacgcagcgctacaggctgggtcccaactacctgatgctgcccgtcaacgcgccgcgctgcgcgcaccacaacaaccactacgacggcgccatgaacttcatgcaccgggacgaggaggtggactactacccgtccaggcacgcgccgctgcggcaggcggcgccgcccacgccactgccgcccaggccggtcgcggggaggagggagaaggcaaccatacgcaagcccaacgacttcaagcagccaggggagaggtaccgctcctgggacgccgaccgacaggaccgattcgtgaggcgattcgccgactcgctcggacacccaaaggtcagccaggagctcaggtccatctggatagacctcctcgccaagtgcgacgcgtcgctggggatgaagattgccacccggctcaacatgaaggcaaacatgtgatgcttctgctgaatagaataataatgaagacgcatgcatgtcgtcgccaggaacaagagaaataatacaagaccaccacgcatgggcatactccatatatatatgtatagcccgtgccccgtgtccgcctttgtaccaatacaagccaagactagtggatgtattattattattattattgcgctatcacatacatgtacccctgcaacatgaagatgggatgtgtatcgagttatcaaattaagacacctgcagcaaaaaccaatatatgttgcataagaatactcgtctcgatatggacatgattccctcagctgctaatttaaccctccaacaaattctgtaaga

SEQ ID NO: 121475 - DNA, 1929 bp, Zea Mays
gtatgtaaaccacactccactccagcactgaacactttgattgattcagtgggtagctagctagctgaatcacaatggatcctaccaagttccgtccgtccagcagccacgacacgacggtgacgacgacgaacgcgggcgctcctgtgtggaacgacaacgaggcgctgactgtggggcctcgcggtcccatcctgctggaggactaccacctgatcgagaaggtggcgcacttcgcgcgcgagcgcatcccggagcgcgtggtgcacgcgcgcggggcctccgccaagggcttcttcgagtgcacccacgacgtgacgtcgctgacgtgcgccgacttcctgcgcgcgcccggcgtgcggacgcccgtgatcgtgcgcttctcgacggtgatccacgagcgggggtccccggagacgatccgcgacccgcgcgggttcgccgtgaagttctacacccgcgagggcaactgggacctgctgggcaacaacttccccgtcttcttcatccgcgacggcatcaagttccccgacgtgatccacgcgttcaagcccaacccgcggtcgcacgtgcaggagtactggcgggtgttcgacttcctgtcgcacctccccgagagcctgcacaccttcttcttcctcttcgacgacgtgggcgtgccgtccgactaccgccacatggaagggttcggcgtgaacacgtacacgttcgtgagcgcggcggggaaggcgcagtacgtcaagttccactggaagccgacgtgcggcgtgcggtgcatcctgacggacgaggaggcggcgctggtcgggggacggaaccacagccacgcgacgcaggacctgtacgactccatcgcggcggggagcttcccggagtggacgctgtacgtgcaggtgatggagccggacacggaggagcagtacgacttcgacccgctggacgacaccaagacgtggccggaggacctgctgccgctccgccccgtggggaggctggtgctggacaggaacgtggacaacttcttcaacgagaacgagcagctggcgttcggcccggggctggtggtgccagggatctactactcggacgacaagatgctgcagtgccgggtgttcgcctacgccgacacgcagcgctacaggctgggtcccaactacctgatgctgcccgtcaacgcgccgcgctgcgcgcaccacaacaaccactacgacggcgccatgaacttcatgcaccgggacgaggaggtggactactacccgtccaggcacgcgccgctgcggcaggcggcgccgcccacgccactgccgcccaggccggtcgcggggaggagggagaaggcaaccatacgcaagcccaacgacttcaagcagccaggggagaggtaccgctcctgggacgccgaccgacaggaccgattcgtgaggcgattcgccgactcgctcggacacccaaaggtcagccaggagctcaggtccatctggatagacctcctcgccaaggtacgtggatggcatggcatggcagtgccacacgtgttttcgatcgatctagctactcatgcatgatatacgacgattgctttgcatatgcagtgcgacgcgtcgctggggatgaagattgccacccggctcaacatgaaggcaaacatgtgatgcttctgctgaatagaataataatgaagacgcatgcatgtcgtcgccaggaacaagagaaataatacaagaccaccacgcatgggcatactccatatatatatgtatagcccgtgccccgtgtccgcctttgtaccaatacaagccaagactagtggatgtattattattattattattgcgctatcacatacatgtacccctgcaacatgaagatgggatgtgtatcgagttatcaaattaagacacctgcagcaaaaaccaatatatgttgcat

SEQ ID NO: 121476 - DNA, 1832 bp, Zea Mays
acactccactccagcactgaacactttgattgattcagtgggtagctagctagctgaatcacaatggatcctaccaaggtgagctcagtatactctgcttcttcttcttccgtcatatcgatctttgatttgagattcgtagctcagtacctgttttgtgttgtttacttgtgttgattttgcttgcagttccgtccgtccagcagccacgacacgacggtgacgacgacgaacgcgggcgctcctgtgtggaacgacaacgaggcgctgactgtggggcctcgcggtcccatcctgctggaggactaccacctgatcgagaaggtggcgcacttcgcgcgcgagcgcatcccggagcgcgtggtgcacgcgcgcggggcctccgccaagggcttcttcgagtgcacccacgacgtgacgtcgctgacgtgcgccgacttcctgcgcgcgcccggcgtgcggacgcccgtgatcgtgcgcttctcgacggtgatccacgagcgggggtccccggagacgatccgcgacccgcgcgggttcgccgtgaagttctacacccgcgagggcaactgggacctgctgggcaacaacttccccgtcttcttcatccgcgacggcatcaagttccccgacgtgatccacgcgttcaagcccaacccgcggtcgcacgtgcaggagtactggcgggtgttcgacttcctgtcgcacctccccgagagcctgcacaccttcttcttcctcttcgacgacgtgggcgtgccgtccgactaccgccacatggaagggttcggcgtgaacacgtacacgttcgtgagcgcggcggggaaggcgcagtacgtcaagttccactggaagccgacgtgcggcgtgcggtgcatcctgacggacgaggaggcggcgctggtcgggggacggaaccacagccacgcgacgcaggacctgtacgactccatcgcggcggggagcttcccggagtggacgctgtacgtgcaggtgatggagccggacacggaggagcagtacgacttcgacccgctggacgacaccaagacgtggccggaggacctgctgccgctccgccccgtggggaggctggtgctggacaggaacgtggacaacttcttcaacgagaacgagcagctggcgttcggcccggggctggtggtgccagggatctactactcggacgacaagatgctgcagtgccgggtgttcgcctacgccgacacgcagcgctacaggctgggtcccaactacctgatgctgcccgtcaacgcgccgcgctgcgcgcaccacaacaaccactacgacggcgccatgaacttcatgcaccgggacgaggaggtggactactacccgtccaggcacgcgccgctgcggcaggcggcgccgcccacgccactgccgcccaggccggtcgcggggaggagggagaaggcaaccatacgcaagcccaacgacttcaagcagccaggggagaggtaccgctcctgggacgccgaccgacaggaccgattcgtgaggcgattcgccgactcgctcggacacccaaaggtcagccaggagctcaggtccatctggatagacctcctcgccaaggtacgtggatggcatggcatggcagtgccacacgtgttttcgatcgatctagctactcatgcatgatatacgacgattgctttgcatatgcagtgcgacgcgtcgctggggatgaagattgccacccggctcaacatgaaggcaaacatgtgatgcttctgctgaatagaataataatgaagacgcatgcatgtcgtcgccaggaacaagagaaataatacaagaccaccacg

SEQ ID NO: 121477 - DNA, 439 bp, Zea Mays
ccctcctcacggtaacccttcctgttcaaggagactcggcagaatcagacgccgccggagtcttctaggcttcctcgccccttccacatcgccggcggcatcatccttgcgccgcccggccagatcacagccggtccgccgcttgcctgtagggaagagagggtggaggaagtgggggaggatgagcgaggagaggccggtgccgcggcgggagagcccgtggggtctgcctgagggcgacacgcggcagcccaaggctcaccgctgtaacgaccgcgccgaggacgtcgtccaggcttgctttgaagggaacccattcaagacagttccaggcccatttaagctcttctggcaatgcatgcgctcaaaacctgggtatgtgtaccttgttattatttacgcgcttaccttctggcatatctcatgattcttatctgat

SEQ ID NO: 121478 - DNA, 618 bp, Zea Mays
ccctcctcacggtaacccttcctgttcaaggagactcggcagaatcagacgccgccggagtcttctaggcttcctcgccccttccacatcgccggcggcatcatccttgcgccgcccggccagatcacagccggtccgccgcttgcctggatggaataaaccccatatatatgtcgaggaacacaagtagcaatggcttgctttgaagggaacccattcaagacagttccaggcccatttaagctcttctggcaatgcatgcgctcaaaacctggggaggaaccaaccgagccctatacctacctgcagctagatcctccgagaagggtggaagtgaatctggagcaaacaggaagtgaaccttgaacgagcatgccatctcgtgccgatttgtcttcacctttggagcaaactagctgcatcaactaataaactaggcatagggagatgctcgttcaccatcttgttcaaggtgaatctggaataaactaacagaagcatcaactaattggctgcataagaaaaaaaatataaaccttcagtggctttttcattatcatcttgcatcaactaataaactagctgcatcaactaataaacgagcatgcctagtttacc

SEQ ID NO: 121479 - DNA, 572 bp, Zea Mays
ccctcctcacggtaacccttcctgttcaaggagactcggcagaatcagacgccgccggagtcttctaggcttcctcgccccttccacatcgccggcggcatcatccttgcgccgcccggccagatcacagccggtccgccgcttgcctggcttgctttgaagggaacccattcaagacagttccaggcccatttaagctcttctggcaatgcatgcgctcaaaacctggggaggaaccaaccgagccctatacctacctgcagctagatcctccgagaagggtggaagtgaatctggagcaaacaggaagtgaaccttgaacgagcatgccatctcgtgccgatttgtcttcacctttggagcaaactagctgcatcaactaataaactaggcatagggagatgctcgttcaccatcttgttcaaggtgaatctggaataaactaacagaagcatcaactaattggctgcataagaaaaaaaatataaaccttcagtggctttttcattatcatcttgcatcaactaataaactagctgcatcaactaataaacgagcatgcctagtttacc

SEQ ID NO: 121480 - DNA, 665 bp, Zea Mays
tacaagtttcaatggccctaatttttatggcctcccaaggaacacttcaaagattgtcttgagaaagaatgcctggaaagttcctgctacttataaacatagttcaggggagattgtgcctatgtttagtggcagcacccttgaatggtttccatctgatcagcctaaagagtaaacagtatacattattggacccagcacttgggggaatcaataggtggagttttctagttatttttcccgtttccgttagaatcagcatagcgaaactattctgcttgttgaaagcaacggcggaggatctgcttgttgagttgttatatccatttgcattgcagtgcaattctagaagtagctaaaaggccacattgtatggttatcaaggctaatctactgatctaaacaccatagcatctgtggtttctaaggtgaccaggcaagagctgggtgtgtctggaggcctagatggcacaaggtgctactgttccccaaggcgagctgggtatgcttggacacctagcctttgaaacatggtagcatccataataatgtaatgaataaatatcagcagttcagttacatagccgtataaccttctagtccggacacaatatttctatgttattgttactctgtgcctgaataaatagatttctagtttaaaa

SEQ ID NO: 121481 - DNA, 1492 bp, Zea Mays
ctttatcagtacttaaagcacaaaattctgatggtaatgatgcggcttaagccatacatacagcaagattgttcgcatattgttagttggctgaaattgcttcgacgttactttggagaccttcttcatcagcctatctcacaacatattgctaaaccagaaaattgtttagaagattctccgtttttattggacatggtagatttagtcgagagtcaggataagtcaactcggcacttgcaaaggcaagctatctatttgttccttagttgttccatatgtttgtcttacaacagaaatgatggtgcacttcagtgttcatgcaagcgtgatgagtgtttgttgggtgacaaagtacaaggctgtagtaatcattgcaactgttttggcttatccgaaatttcagactggtttcagaagtgttatctaaatgggagtatcgactcaaaatcatcaagtttcgcgttatcctttctggaattgtatatggaggaggatgacatgctattcagcatcctcttacaacttttagatgctccactcgttttcctaaaaatgtaagtaggaaaatatggtttattactgaagcaaggaaaaaggtcatcctgacaatagatgctcatgtaacttatgacctttttgtccaaacttgcagagctaacttcgaaactaaggaacttgttggtgtaaaactgttctcaagcatttttgacccagttcaccttttccatctgctgctttttctgctgcactatgatcacatggtactcgttgattatctcatatctagggatgttggtgtgctttgtgctcagtatctattaaggtgtttgcgcttggtttcccagtcttggcatgcttttgttgatgattcagtttactcaacaaaaatagaaaagcttaactgtaaaaggcagaggatttctggggataaagatagcgacagagccagttcaagtaaccagtataagaatggttctggttgtgataaagaagtcgaggattcacggaagcttttcctcgatgctaaaaaatgtctttatttattaaagagaacattggaagatctgcaaaagaaggatttgttcccttacaaccccaagcctcttcttagaagcttggcccggttccaggagctgggtgagcaggggtgaaattcgagttaaacctggtgaggaagctactatctgtagaagttgaagaatgacccttgggcagatagttgtatcgatatagtagttggtaaaagggagctgtgaatataatatatatctcttctaattcatgatctggtctaggactttgagtcgtctgaatcatacagagaaattccagatgctgctacctctttcttttttttttgcaagttgcctgctactctgatgcattgggccatgcgaggccacctatcatgcaagacaccattgttcactatacattaagtagcatcatatcatggtggcacttcaattatacatcaatcattttgtcc

SEQ ID NO: 121482 - DNA, 410 bp, Zea Mays
gagggctccacgagatcacgcgacaacctggtccttgatctggtgtcaccgcgacggtggggtggttcctgggcggcgctctcggagtgggggagggcatcaggcatcacaggcagggcaggggggcgtacgtcggtacgtgccggtggcgctgccaaatcatggggatgaggcgggcgcagtggcgggcttcgcggggacatggcggcgtgaagcgcggcggggtttgccgctggtggttagagcaaggcgacgggtaggagacgtggaggctatggcggcgggcgaggaggaagcgcacggggcaggggcgggggccgttgggatcgcgggcatcgctcgcagccggcgcgtggtgtactggtgttaggagctgggacgcgagcaagaggtgggggaggaagaaaggc

SEQ ID NO: 121483 - DNA, 2200 bp, Zea Mays
cgctgctcgatttccccaccaccgccgtttgatctcacaacaaactagggctggatatcgagccagctcggttcggctcgttcgagctcgagctggctcgtacaccaaactgcaactggcagcaaccagtagatgccgccgccggagatgcagaagcggaagctcgcccatatctgcgacctcgtctcctcctccctgcttctccacctcgaacccgcgccgtcgccgccgcggcagctgacgcgggagggcgagcggcagctcctcctcgcgctctccacggtgaacaagacgatacggcgatgggaccaggaggaggatgagtgggcttgtgaattgtttcaggaaactctttctgattctggagaagttcatagttgctgcttactacctgaagcgcgtccatatgatggatttggttgcctggcaaatattgtctctatgctggttggtttccttgatttctgcagcgactatgtcaaacactcagctggcaacatcctcatttccgtatctagtaccctaattaagtttgaatccatttggattcagttcattgagcttgcctggggggctatacatgcagcatcaaaatgtgttcataacacttcacattctacaaccgactccaacagtgatgacagcactagttcaggcacaagaatcacaagcttcatgacagcacttagtgagcatcgtcttaataccagtcggcaaaccatgtccagtctctttcgagtattgcatgctatcctgaagttccttaaacagagtgacagtgacttgaaagacgacttcatttgtctatccattcatcaaattcataagatgccttggaatttgttccatcaattacatgctggaggacttgccagctgtgccaaggatagcagatttagcaccagtaatgattcagcacagtctagaattctgactggcagtcttctccagctgttgggctctttacttgaccaaagctacctgagagacacagacggacaagatatgtttgtgaaacttgtggatgtagttcccaagatagcatcgttgtccttaggaggacagcatgatggatccaaaagtctttatcagtacttaaagcacaaaattctgatggtaatgatgcggcttaagccatacatacagcaagattgttcgcatattgttagttggctgaaattgcttcgacgttactttggagaccttcttcatcagcctatctcacaacatattgctaaaccagaaaattgtttagaagattctccgtttttattggacatggtagatttagtcgagagtcaggataagtcaactcggcacttgcaaaggcaagctatctatttgttccttagttgttccatatgtttgtcttacaacagaaatgatggtgcacttcagtgttcatgcaagcgtgatgagtgtttgttgggtcacaaagtacaaggctgtagtaatcattgcaactgttttggcttatccgaaatttcagactggtttcagaagtgttatctaaatgggagtatcgactcaaaatcatcaagtttcgcgttatcctttctggaattgtatatggaggaggatgacatgctattcagcatcctcttacaacttttagatgctccactcgttttcctaaaaatgtaagtaggaaaatatggtttattactgaagcaaggaaaaaggtcatcctgacaatagatgctcatgtaacttatgacctttttgtccaaacttgcagagctaacttcgaaactaaggaacttgttggtgtaaaactgttctcaagcatttttgacccagttcaccttttccatctgctgctttttctgctgcactatgatcacatggtactcgttgattatctcatatctagggatgttggtgtgctttgtgctcagtatctattaaggtgtttgcgcttggtttcccagtcttggcatgcttttgttgatgattcagtttactcaacaaaaatagaaaagcttaactgtaaaaggcagaggatttctggggataaagatagcgacagagccagttcaagtaaccagtataagaatggttctggttgtgataaagaagtcgaggattcacggaagcttttcctcgatgctaaaaaatgtctttatttattaaagagaacattggaagatctgcaaaagaaggatttgttcccttacaaccccaagcctcttcttagaag

SEQ ID NO: 121484 - DNA, 1757 bp, Zea Mays
ccatcttggcttgccgcttgcagcaagcacctgcacacttgacacagtcctgtgtgtccatcgctacttgcagcagcagctgcaggtgtagtggacctaggtagctagctgtgtatagcacgtggccacgttcgtgaccctgcactgcagctgcagcagcaggtaacgggtgatcctatcatgggcgacgacgtgcgtggcctgcgcgccgccgccgtgacgaccgccgccggcgtcgtgccggcgaagacgccggagcgcgcgcggctgcacgtggcgatgctggcgctgcagttcgggtacgccggcttccacgtggtgtcccggctggcgctcaacatgggcgtcagcaagctcgtcttccccgtctaccgcaacctcatcgcgctctgcctcctcgcgcccttcgcctacttcctagagaagaaggacaggcccgccatgacgcccgccttcctgctccagttcttcctgctggcgctgtgcgggatcaccgcgaaccagggcttctacctgctgggcctggacaacacgtcgccgacgttcgcgtcggcgatccagaactcggtcccggccatcaccttcgcgatggcggcggcgctgggcatcgagcgggtccgcctccgccgccgggacggcctcgccaaggcggccggcaccgtgctctgcgtcgcgggcgccaccgtcatcacgctcttcaagggccccgccgtcttcggcccggcgccctccgtggccgcagccgtgcccgtgcccatgcccgcgccgggcggcggcaacaacaacaacaacaacaagagctgggcgctggggtgcgtctacctcatgggccactgcctgtcgtggtccggctggctcgtgctgcaggcgcccgtgctcaagcgctacccggcgcgcctgtccgtcacctcctacacctgcttcttcggcctcctccagttcctcgccgtcgccgccgtcttcgagcgcgacgccgccgcctgggcgctcggctccggctccgagctcctcaccatcctctacgcggggctggtggcgtccggcgtggcgttcgcggtgcagacgtggtgcatcgaccgcggcggcccggtgttcgtggctgtctaccagcccgtgcagacgctcctcgtcgccgtcatggcgtcgctgctcctcggcgagcaattctacctcggcgggatcatgggggcagtgttcatcatcgctggactctacctggtgctgtggggcaagagccaggagagggcgctcgctgcaaagcaaaccgccgccgccgccgccggaagcgtctgcgacgacgacgcggctgcctcctgcctgaagcagccgctgctaccgccgccgccggcgacctcggaggccgtgtgatctccaatcggacccgaccgatcattttcatacggcggaggagtgtatgcatgcatctgtcatcgcgcctcatcatcagcatgcatgttaggttaatccatccatccatcacctatcacatggctagatctgagtaccaatacaagcagttgcgtggcgagtaacatgtacaacgattgcaacctttcgtcagcgaactgcagctgctcccgtttttatatgatattgcaactggacctatatattttaattttgtttagcttaagtgggacagcagttgaccgagcatgagtggcaactgccatgaatgtcgtcgatcattaggtacaatccatgtgatcggtgctttagagatcgagttattaattctcacaaaaaaaacttatgat

SEQ ID NO: 121485 - DNA, 572 bp, Zea Mays
gtccgtccgatcgatatctttcttcttctccttccattatatacctctccctccatcggtagggtagggtgattaattaatcaaaagtttgcatgcatgattcgtgtttctctccttgcaatgcatgcatgcaggatcatgggggcagtgttcatcatcgctggactctacctggtgctgtggggcaagagccaggagagggcgctcgctgcaaagcaaaccgccgccgccgccgccggaagcgtctgcgacgacgacgcggctgcctcctgcctgaagcagccgctgctaccgccgccgccggcgacctcggaggccgtgtgatctccaatcggacccgaccgatcattttcatacggcggaggagtgtatgcatgcatctgtcatcgcgcctcatcatcagcatgcatgttaggttaatccatccatccatcacctatcacatggctagatctgagtaccaatacaagcagttgcgtggcgagtaacatgtacaacgattgcaacctttcgtcagcgaactgcagctgctcccgtttttatatgatattgcaactggacctatatatttt

SEQ ID NO: 121486 - DNA, 2026 bp, Zea Mays
cttctccttctcccacgctcgatcgagaaagtgatataatatatcgagatgcccaaaaatgtcaaccatgcaccacagctcactataagtataaatacgtacccccaccgattccattgccggaacctcaagcacaagcaaccagccagctagtttccaagggatcacctgctctctagcactagcagcaatggcggccgtcggcgctccggggagctctctgcacggagtcacagggcgcgagccggcgttcgccttctccacggagcacgaggaggcggcgagcaatggcggcaagttcgacctgccggtggactcggagcacaaggcgaagagcgtccggctcttctccgtggcgaacccacacatgcgcaccttccacctctcctggatctccttcttcacctgcttcgtgtccaccttcgccgccgcgccgctggtccccatcatccgcgacaacctcaacctcaccaaggccgacatcggcaacgcgggcgtggcctccgtgtcgggctccatcttctcccgcctcaccatgggcgccgtctgcgacctgctgggcccgcgctacggctgcgccttcctcatcatgctgtccgcgcccaccgtgttctgcatgtcgctcatcgacgacgccgcgggctacatcaccgtcaggttcctcatcggcttctccctcgccaccttcgtctcctgccagtactggatgagcaccatgttcagcagcaagatcatcggcaccgtcaacgggctcgccgccggatggggcaacatgggaggcggcgccacgcagctcatcatgccgctcgtctacgacgtcatccgcaagtgcggcgccacgccattcacggcctggcgcctcgcctacttcgtgccgggcctcatgcacgtcgtcatgggcgtcctggtgctcacgctggggcaggacctccccgacggcaacctcaggtcgctgcagaagaagggcaacgtcaacaaggacagcttctccaaggtcatgtggtacgccgtcatcaactaccgtacctggatcttcgtcctcctctacggctactgcatgggcgtcgagctcaccaccgacaacgtcatcgccgagtacatgtacgaccgcttcgacctcgacctccgcgtcgccgggaccatcgccgcctgcttcggcatggccaacatcgtcgcacgccctatgggcggcatcatgtcggacatgggcgcgcgctactggggcatgcgcgctcgcctctggaacatctggatcctccagaccgccggcggcgccttctgcctctggctgggacgcgccagcaccctccccgtctccgtcgtcgccatggtgctcttctccttctgcgcgcaggcggcctgcggcgccatcttcggggtcatccccttcgtctcccgccgctccctcggcatcatctccggcatgacgggcgccggcggcaacttcggcgccgggctcacgcagctgctcttctttacctcctcgacctactccacgggcagggggctggagtacatgggcatcatgatcatggcgtgcacgctgccggtggtgttcgtgcacttcccgcagtgggggtccatgttcttcccgcccagcgccaccgccgacgaggagggctactacgcctccgagtggaacgacgacgagaagagcaagggactccatagcgctagcctcaagttcgccgagaacagccgctcagagcgcggcaagcgcaacgtcatccaggccgacgccgccgccacgccggagcatgtctaagtctactactaagatggatcgatcgacgatcacctatacctctttgtatgtacgaatatgccttgttattactgtgcgcgcgcatatacaatacacgtgtgctccgttgacatgagttatatagcactaaaaactcttttgaattcgcgtctattcagctcaatcaacgtatgttgaagcgattaggtgttaaatttaaacaaaatttcacacaaaaccacttaaacacatgttattttaccacaatccaacttatataat

SEQ ID NO: 121487 - DNA, 894 bp, Zea Mays
gaagctgctggaggacgcgccggggcagtggagcaccgtcgctgggatcgaggcgcagatgggcgtgctgtactacatggtggggaggtacgcggagtcgaggagctcgttcgagagcgcggtcgcgaagctgagggccagcggcgagaggaagtcggcgtttttcggcgtgctgttgaaccagatggggctggcctgcgtgcagctgttcaagatagacgaggctgcgcagctgtttgaggaggcgagggcggtgctggagcaggagtgtggcgcctctcatcctgacactcttggcgtgtacagcaaccttgctgcaatctatgacgccatgggaagagtggaggacgcgattgagatcctggagcacgtgctgaaggtgagggaagagaagcttggcacggcgaaccccgacgtggaggacgagaagaagaggctggcagagctgctgaaggaggcggggcggtcgcggaaccggaagcagaagtcgctggagaacctgttcggtaccaactcacagcgggcgaagaaggaggccgggaggaggtggtccaacttcgggttcaggagctgagctgaggtgccctttttgtttgtaacattaaaaaaaaaggcacgtgtaaagatgttgctgtaggtgagtagtattgttagcaaggtgggtggtgattatgctgtttgcttggcactgcattgctgttactgttttgggttattttcgagttaaaatttgttttttttattattaactgcgagctgagctgctgtacccggatggatggagaaagagtctttgtggtgttgactgatgagtgatgaaaatacctgttattgttagtacattgcttccttccattggttgagaatccaatgtgaggtggcacatggccacgc

SEQ ID NO: 121488 - DNA, 4060 bp, Zea Mays
ctctgcccccgccgtacgccccacgccctcctccccgcgaggagccaccagcccaccatctacgccgcctgttctgatgccgccgcccacgcgaggccgaggccgaggccgtggccgcggccgcgggcgcgggcgcggtcgcggtcgcgggaggccaagtaaggacaccgttgctgaggactccgcgcacgccaccgaggaaagtggcgaggaaaacctccaggagaaggtgcaggaaggtggcaaggtaaacctcacggagaaggtgcaggaaggtggcgaggaaaacctcacggagaaggtgcaggaaggtggcgaggaaaacctcacggaaaaggagaatgaagggatagtggaggtctcaaaacccccccaaaggcgtcggaaggatcctgttgcagacccctcttctcttgagtctagtggtttcatgcgatttcgggagaggaggaatgcttcagcggttcaggagcaggggcctaagaagagaaggattactgaggattcaaacatgtgccatcagtgccagaggaatgatagcggaagagttgtacggtgccaaggctgtgtcgtccgaaaaagaaaatacagatattgtgtgaagtgcattaaacgctggtatccacatttatcagaggatgattttgcgaacaattgcccagtttgtcaaaataattgcaattgtaaggcttgtctgcggggagacataacccgagccaactcgaggaaaaaaaagaagttactgcaaataaattctggaggatatagtgtgtctgaacaagataaaattaaattctcaatgcgtatcgtgcactttttgcttccttggctgaaacaattccatcaagagcagatgcaagagaaaagtgccgaggctgcaactaaaggtattgatgcagacaaactggaggtccctctaaccatttgtggaaaaaaggaacgtatatactgcaacaactgcaggacatctattgttgacttccacagaacctgcaataaatgtaactatgatctctgtctccagtgctgccaggagcttcgtcgaggccttgtttctggtaatgatgccaaggttgatggtggaggcaagcaagattttctatcgggagttagtcatgataaaatcataagcaaagggccatccgatggacagaatgacatgttgatagatagtgtagttcctggtgaaaacaacacttctagcttgagacagtggagtgtgaataaagatggaaccataccttgcccaccaaatgcatttggtggttgtgggagctctcttcttgaactgaagtgcttgtttaaagagaagtttattgctgaattactggagaaagctaattcagcgctcaataatgaaatggaggtgaagatagaaggatcaaaatgtccctgcttcactgaatccggtgacatggatgatggtatatcacggaaatcatcttgcagggagaattcctgtgataactacatatattgcccaaccgctacagatgtccaaaatggaagtttagaccatttccaggagcattggttgaagggtgaacctgtaattgtccgtgatacacttgcgttgacttctggattaagctgggaaccgatggttatgtggcgtgccttacgagaaaagaaagagaaagttgagaggctctcagttcttgctcttgaatgcttgggttggtgtgaggtcgatgtaaatattcatatgttttttgcggggtattcaagtgggcttgttggtccagacgatttgcccctgttgcttaagcttaaagattggccaccacatagttcttttgaggagcggctcccaaggcatggtgcagagtttatgtctgcattgccatttcgtgaatacactgatcctaaatggggacctcttaatctggcagtaaagcttcccgataatgttaataagccagaccttggtccaaagacttatattgcatacggtgtttccaaagagttgggaattggtgattctgtcaccaagcttcactgtgatatgtctgatgcggtcaatatcctcacacatactgatgaaataaaactcaaagcaaaaaggattgccgcggtggaaaagaagaagcggtgtttaggaatgaagattctatctaccaaggaagcaagtggaggccttcaacggtgtgcagattattttggtatgccaacagctcccagtgaatctaacaaggagccaaggcctgaagagtgtgtaaatgaactgggcattaaacaaccagtacagcatgttgcttccgaggagcaggaaggagttcaagatgatgccaaggcagatgcaaatgttatgaatgtttcttttggtaagggaaaatcagaagattcttttggtacaattaatggtaccaacagtggagataaaatagaatctcctagtggtttagcagaaagaacattgactcagcctaccactaagggttgcagtaagcagcgtggccgtagttctaatggtagaggaaacaggactaaaaaaatagaagaggggaatgcgtctggactaattgctgtggctcccgagtcagaagatgatgatgatgatgccgcatttatagatggaaaccaagcagagggtggtgcactgtgggatatttttcgacgggaagatgtgagcaaactgcatgattatctaatgaagcatgcacatgagtttagacattgcaactttgagccagtgaagcaggttactcatcctatacatgatcagtgtttttatctaacaattgagcacaagagaaagcttaaggaagaatatggagtcgagccttggacatttgaacagaagctaggtgaggcagtatttatcccggcaggatgtccccaccaggttagaaatttgaagtcttgcataaaggttgcactagattttgtttctccggaaaatgtccgagagtgcatcaggttaacagaaggtttccgtctgctgccgaagtggcataaggtgaatgaagataaactggaggttaagaagatagctcttcatgcattcaatcaagctattaaagatatcactgatgaatcatctaatagcaatgaaagcaaatggatccggagataatgaggatcatgaaggccattgaatccatgcttgatgtcatggaagttagcaccacccgcattcgacatcttgctatcgagaacctgaatgaaaaccgtagtggcttatcggatgccgacaagataacaaaacctgattttagtgtactatgcatgatattagtaccttatataatacgtagcttggagaaaaggccattcaccgtttctcattgttgggaggttctaaagaatgaagccaaatggttacacttggagcagggctcacaaaatattgatgtgctggtgaacaaaggtgtagggttttctccaagatgtcggatttgacactgaagaagattgagtattggaagaggtccgattgaacatttggcactgacattcaccaacttgttcaaatagaggaaaagaatatggaaatggagaaagagcgcatgtatgcatgtgtaggtcagggagtggctcggatcagccttgagtcaatttccactgcgttttcttcggttatggatgagcacgaggagtaaaagaaacagaagaaggctgagtgtgattctcatatgcttattttcttgtcctgtgtaatggatgtgtgtatgtgaaccatatgcgaacttaaacgtctttgtttgtaccggtcaggccattctgagtgagggttccgtctcttctttttaggactccactgcgaggtgtcggtgtgtgagaaatggtgcaaacgtgtgtatgaaactctacgaggcatactcttatctagtattgtgtctagtgaagaatgggacacatccgatgctactgtaaactcacttgttgcactcactttttgagttggatttttctttcaaacttttttgtatgctctcttgagtttatctaacactagatttcataagtgtgcaccattgtccataactagactcacttaggtaaagctatccattccatgtcctctttataatgtgacataaataaggattttatcact

SEQ ID NO: 121489 - DNA, 1886 bp, Zea Mays
aattcaaacgaagacagactagctggagctggatccagccaggtaataatattactgctgctgctgagatgacatcaatctttcttgctgcagggaagggaatccaactccatgcaaagcgtgtcaacgagcttttaattctctctgcctccaggcatcatctataggacatatacttattccataggtgccttatgtatacaatatttcgagagcatatacaaaaaaacaaaaaaaaaatgaatctttttcgtatcttctctgcagattaattgaacagtaccagtgtttaatttctgtttaagtggccctctccaactaccgtgagaagcaaagctcagctcagggagttagctgatgcatcaagctctgccttttaacttgccatcacttttaatttcacttggcggcatagatttttatttatactccatataatacaccatgcatgggcatgggcttcttcacctctcggtcggtcggcccccttcctgtgccttgccttgctttccgcaggaggatgcggagctgcttcttctgagttctgatcgctgacagagcagctagcagccgacttctgatggacgcggccatggcgctcgccttgctcttcttctgcgtcctcctgctggcctccggcgccatcgccttcctcctcatccgccactgcctcgcgcgagcacctcctcatcgtcatcgtcaggcacagcccgaagcagcggccaagcagctgcagcagcaagcgttactagccatcaagaaggagccggcaccgcggcggctggcgtggcgggaggtggaggcgctgaccggcggcttcgacgaggccgccgtggtaggccgcggcggctccagcaccgtctacctcgccaggctcctggacggctcgcccgtcgccgtcaaggtgcaccgctggtgcggcggcgagcgccggctgcgcgccttccgccaggagctcgacctgctccgccgactccgacacccgcacatcgtcgcgctcctcgcctactccgacgaccacgaggatgagggcgcgctggtgctggagtacctcggcggcggcacgctggcggacgcgctccacggcacggcggcggccccgctgccgtgggcgcagcgcatgcgcgtcctccacgacgtggcgtgcgcgctggagcacctgcacggcggcggcggcggcggggcctccgtggtgcacggcgacgtgtcggcgtccaacgtgctcctctccgacggcggcgtgcggctctgcgacctgggctccgcctgcgagggcttctcggcggccgtggcgccggcgcgcgccgccgtggcgtcgccgggctacgccgaccctttcttcctgcgcacgggcatcgtgtccagcaggtccgacgtgtacggcttcggcgtgctgctgctggaggccgtcacgggcctgccggcggcgtccgaggccgagaacctgacggcgcggatcctgccacgcgtcagggcgcgcggggtggcggggctcgtcgacggcaggctcggggacggcgggcacgacgaggaggaggccgccggcgtggccaggctcgccgtggagtgcgtggcggcgcagcccgggctgcggccgtcgatggcgcaggtgcgcgccgccatcgcggagaaggcggcgaggtccatcgccaaggcgggttgcggccaccatatccagctcagcaagctgctagagctcacatgatttttatttcctccatcgagaatttaggattgtgaaaaatggatcgtgcattgcagaggaaagaggacttgatattgaccatgtaaagaaaagatacattcaggtggttggttgtggtcgaaagcagcggcagtttttggaggactttaatatacacttgggattttgccgcaatatacaa

SEQ ID NO: 121490 - DNA, 419 bp, Zea Mays
ccgctaatatgctcaaagtatccaaaacaatatcatgcaaatatattcctcccggaacgaagcaatcaaaatcatctgcaccctatgcaagatttacaccttgtataaaaagataaacaaacagaatgcaaagaaaatcagaaaaatgtggtggggtcatgagagacttaaaacgagggaatcacaggagaataatcccatcatattgttgcagtttctagatctagcagcggggaagacggacgaagagagagggagaggaagaaagcggggaggcagatcttacagttgcggatgcgggcagcagggtaaccgcaggaggagcaggtgctcttctggaggtggaagctgcggcggccgcagcggatgcacaacgtgtgcgtcttgttccggcgcttgctgaagctgcccgtaccctt

SEQ ID NO: 121491 - DNA, 758 bp, Zea Mays
acactgcagtcactcagtcagtaccctttattaacaggatctccatctccatccgctagctaggcaagacagtcgagagtcgacaccatggccatggcgacgcaggggcaggccgaccaccagcagcagcagcacgggcggtctgagcccaccaccagcgtcgccgccaaccgctgggggccctactccggcgccggcgacttcgccagcaacatggccgtcatcctggccgccctgctggccgcgctcgcgctcggcctggcgctcaacgccgccgtgcgctacctgctccgccgccgccgccgccgccgccgcgccggctctggtggtggccagggcaacggcagcggcgtgctgccgtcggacgagccggctgagaagccctccgtggaggtggagctgcaggcgccggcgcgccgccgcccgccctgctggtgtactccgccgccgggacgaagctggcgggcgccgcggcggagtgcgccatctgcctcgccgagttcgcggacggggacgccgtgcgcgtcatgccggcctgcggccacggcttccacgcgcgctgcatcgagcgctggctcgcggagggccgccgctcctcctgcccgacctgccgcgcgccggccgtgcagcgcagcctgcacgcaagtgaattactctaaataaataattgccgttttagtgttgctatttaccattgcttgtactgcctctgtaaatcaagaagaagaaataaaattataactcttaggtttgggctc

SEQ ID NO: 121492 - DNA, 2485 bp, Zea Mays
ctccctcccacctccatccccatccccatcttccaccctcccttgctcactcatccacacaccccacgcttgcaatttgcaattcccttgtttggggtaacaagccaagcaagcaaacctcctgctggctgctgtccaacagcaacatgcaacaacccaagcaaatcaaagcttcaccatcaccatcaccgccgaggtcaggtcacctcagctttgctcagctccctagccagcagtaactgcccagtggaagtgcagagtggcctgtgagtactggcagtacaaatcacctcatctccagtcctgcccggctcgcctgccatgcagtccggctacggcggcgtgtccgagttccagcagttcatcatggacggcggctttgccatgtccgcgccgccgccgcctcagcagcagcagccacagaccgccaccgcccaggagctgggcgggcccttcaggtaccagccgctgcaccaccacgcgctgccgccgcagcaccaccaccacgcgccgcacatgccgccgcacttcgcccacttcggcgccgcgccgccgccgcccttcacgcagcagctgctgcaccaggcggccgccgcggggcaccaccaccttcagctcttccacgagcagcagcagcagcagcatccccaccaccacaagccccagccgccgcaccaccaccaccagcagccgccagcgaggtgggcacctcaaccacagcatcagcagcagcagcagcagccgccgcaggcccagacgcatcaccaccaccaccaccaccatctcggattcgacgtcgaggccgccgtgccggaaagctcgggggcagcgggcgccgggagagctgcggcctcgggcgtagccgcgcctccgggcgttcccccatttctggcagccgccatgaacttcaaacttgcggtcgacgccggtggcggcagcggcgccacgggaggcaccgacgacgccctcaacgacgggggtggcggcgtgggcagcggcatgatgcttcacgttggcggcggcggcggcaacgacgacgacgaggcggccactgagagccgcctccgccgctggacgggcgacgaggagacctccatcaaagaacccacctggcggccgctagacatcgactacttgcacagctcgagcagcagcaagaggacggggaaggagaaggtggccacgccggagtcccccgcgccgccggctgccgcggccaattacttcaagaaaggcgacgacaatgccgcggccgccgtggccgcgggcggcggcaactacaagctgttcagcgagctggaagccatctacaagcccgggagcggtggtgcgggcggcgcccagacgggctccggctccggcctcaccggagacgacaatgccatcctcgagccggccatgcccgacctcccgggcataacggccgaggacgcgggcccgcagctcatcacgtcggagacctcggccggggaggaggcggcggcggtcgtgcagccgcagccgtcggcggacgcggcgcggcgcaagcgcaagcggcggcggcagcaggagcagctgagcgcgtcggcgtccttcttcgagcggctggtgcagcggctgatggagcaccaggagagcctccaccggcagttcctggaggccatggagcggcgcgagcgggaccgcgccgcgcgggacgaggcgtggcggcggcaggaggccgacaagttcgcccgcgaggccgccgcgcgcgcgcaggaccgcgccagcgccgcggcgcgggaggccgccatcatcgcctacctggagaagatctcgggcgagtccatcacgctgccgccgccggcgtccggcgacgaagacgcggcggcggccggaaaggagctggtgccgtacgaaggcggggacgcggcggcggcccccgagggtggcgggtcgctgcacctcagctcgtcgcggtggcccaagcacgaggtggaggcgctgatccgggtgcggacggggctggaggggcggttccaggagcccgggctcaagggcccgctgtgggaggaggtgagcgcgcgcatggcggcggcgggctacggccgcagcgccaagcgctgcaaggagaagtgggagaacatcaacaagtacttccgcaaggccaaggagagcggcaagaagcggccggcgcacgccaagacgtgcccctacttcgacgagctggaccgcctctactcccgcttgggccaggcaaagcaggcgagctcggagctgctggacgcggtggtcaagtaccccgacgtgcgctacggcccgccggggttcgggatggacagggagcaggcctccggcggcgggggcaataataataacactaataatgaaggtggacaggacggcggcgctgaggatttcgacggagaggaggacggcattggcaaggggagggccggcgatggtcaggacgacgaggtggaaagccatggccacgaggatgagtagctagctgcattgcattgca

SEQ ID NO: 121493 - DNA, 1846 bp, Zea Mays
cccatccccatcttccaccctcccttgctcactcatccacacaccccacgcttgcaatttgcaattcccttgtttggggtaacaagccaagcaagcaaacctcctgctggctgctgtccaacagcaacatgcaacaacccaagcaaatcaaagcttcaccatcaccatcaccgccgaggtcaggtcacctcagctttgctcagctccctagccagcagtaactgcccagtggaagtgcagagtggcctgtgagtactggcagtacaaatcacctcatctccagtcctgcccggctcgcctgccatgcagtccggctacggcggcgtgtccgagttccagcagttcatcatggacggcggctttgccatgtccgcgccgccgccgcctcagcagcagcagccacagaccgccaccgcccaggagctgggcgggcccttcaggtaccagccgctgcaccaccacgcgctgccgccgcagcaccaccaccacgcgccgcacatgccgccgcacttcgcccacttcggcggtcgtgcagccgcagccgtcggcggacgcggcgcggcgcaagcgcaagcggcggcggcagcaggagcagctgagcgcgtcggcgtccttcttcgagcggctggtgcagcggctgatggagcaccaggagagcctccaccggcagttcctggaggccatggagcggcgcgagcgggaccgcgccgcgcgggacgaggcgtggcggcggcaggaggccgacaagttcgcccgcgaggccgccgcgcgcgcgcaggaccgcgccagcgccgcggcgcgggaggccgccatcatcgcctacctggagaagatctcgggcgagtccatcacgctgccgccgccggcgtccggcgacgaagacgcggcggcggccggaaaggagctggtgccgtacgaaggcggggacgcggcggcggcccccgagggtggcgggtcgctgcacctcagctcgtcgcggtggcccaagcacgaggtggaggcgctgatccgggtgcggacggggctggaggggcggttccaggagcccgggctcaagggcccgctgtgggaggaggtgagcgcgcgcatggcggcggcgggctacggccgcagcgccaagcgctgcaaggagaagtgggagaacatcaacaagtacttccgcaaggccaaggagagcggcaagaagcggccggcgcacgccaagacgtgcccctacttcgacgagctggaccgcctctactcccgcttgggccaggcaaagcaggcgagctcggagctgctggacgcggtggtcaagtaccccgacgtgcgctacggcccgccggggttcgggatggacagggagcaggcctccggcggcgggggcaataataataacactaataatgaaggtggacaggacggcggcgctgaggatttcgacggagaggaggacggcattggcaaggggagggccggcgatggtcaggacgacgaggtggaaagccatggccacgaggatgagtagctagctgcattgcattgcatgcatggcgccatggatgcgacgaccacaggacatacgatgcgagctgggcgccatctgtttaatttgttcgttcgttctttctttcttcttgctactaaatcagagtactactagcttttatcactaccttttgttattagctaccacctgcatgcatctgctgctgcttctagctagctgttattatgtatactactatatatgatatgatgatactactgttaatcactggtccaaggaatcattaaataatttgtacgatcaccattgcatattatatagctcctggagcagtgttttaattttagggaaattaaa

SEQ ID NO: 121494 - DNA, 432 bp, Zea Mays
aggcagccgaggggttcttcttcttcttcttcttcttcttcttcttcttcttcttcttcttcttcttcttcttcttcttcttcttcttcttcttcttcttcttcttcttcttcttcttcttcttcttcttcttcttcttcttcttcttcttcttcttcttcttcttcttcttcttcttcttcttcttcttcttcttcttcttcttcttcttcttcttcttcttcttcttcttcttcttcttcttcttcttcttcttcttcttcttcttcttcttcttcttcttcttcttcttcttctcctcctcctcctcctcctcctcctcctcctcctcctcctcctcctcctcctcctcctcctcctcctcctcctcctcagccggcgctttctccagggcgccggcgcttcttctcggccggtccagctcatccttgg

SEQ ID NO: 121495 - DNA, 1139 bp, Zea Mays
cccacttaaagcaagagtagcccagctcaggactactcctctcctctcaacctaccctaaccgccgccgccgcccgccgtcctttcctgtataataaaacctcaaatcgtctctctcccgtcctcccctccaccgccgcagccgccgccgtacctcctcctcccgcgcagtagccaccgccaccgccggaaatgaagaccatcctggccacggagacgatggacatccccgagggggtcacggtcacggtggcggccaagctggtgacggtggaggggccgcgcggtaagctcacccgcaacttcaagcacctcaacctcgacttccagctgcaggacggcggtcgcaagctcaaggtcgacgcctggtttggcacccgccgaaccatggccgccatccgcaccgccatctcccacgtccagaacctcatcgcaggcgtcaccaagggtttccgctacaagatgcggttcgtctacgctcactttcccatcaacgcctccatcaccaacgccaactccgccattgagatcagaaacttcctcggggagaagaaggtcaggaaggttgatatgcttgaaggtgtgaccatcttgcgttcagagaaggtcaaggatgagcttgttcttgaaggcaatgatgttgagcttgtctctcgctccgctgctctcataaaccagaaatgccatgtcaagaagaaggatatccggaagttcttggacggtatctatgtgagtgacaagggccccatctttgatgagcaatgagctgccctttgttcctggctagcaaaagccgtgttaggctgtggccagtagactgtttgcggagtggatgtagttggaaataggagatgggatgagtaaggttgctggagataagctttagcaagagtttatgagatggacctttattttgtgttgtgttttttttttgtttgagttcagttaactacatctttgcaagttggttggatctgaagttctgtactgtcttaggatgttattatgtaacccgaggtggacattgtttgtgatcatattcttcacctaagtacctccactcctccagttccatcgttagttgaaagagttcaactgcatgatgaaattgattgcaagtgatcatcttttgcgatgtac

SEQ ID NO: 121496 - DNA, 2427 bp, Zea Mays
cccacttaaagcaagagtagcccagctcaggactactcctctcctctcaacctaccctaaccgccgccgccgcccgccgtcctttcctgtataataaaacctcaaatcgtctctctcccgtcctcccctccaccgccgcagccgccgccgtacctcctcctcccgcgcagtagccaccgccaccgccggaaatgaagaccatcctggccacggagacgatggacatccccgagggggtcacggtcacggtggcggccaagctggtgacggtggaggggccgcgcggtaagctcacccgcaacttcaagcacctcaacctcgacttccagctgcaggacggcggtcgcaagctcaaggtcgacgcctggtttggcacccgccgaaccatggccgccatccgcaccgccatctcccacgtccagaacctcatcgcaggcgtcaccaagggtttccgctacaagatgcggttcgtctacgctcactttcccatcaacgcctccatcaccaacgccaactccgccattgagatcagaaacttcctcggggagaagaaggtcaggaaggttgatatgcttgaaggtgtgaccatcttgcgttcagagaaggtcaaggatgagcttgttcttgaaggcaatgatgttgagcttgtctctcgctccgctgctctcataaaccagaaatgccatgtcaagaagaaggatatccggaagttcttggacggtatctatgatttggatcttggaatttggtttctcaggaatgcagaaccaaagctgacagtggagatcttagcctacctacacgggcatgttactcagcagtactttttcgctgaacccaagacaatatactcttttatgagcaggagtgggagtgccagtgataggctacgtgatgatgacagtcgatgtcgagcactggcgctacatttattatttgttttttggaagaatctaaggggtgtgatgcaaattgaagagctatgtgccacacaattcacaagctcctcacacatggacgatgagtggaggccggtgatggccatgctcgtcttcaacctcatctctgctgtgatgacggcgctggtgaagaaggcgctccagcaagggctcaacgccctggtcctcatcactcttcgccagttggtggccactctcttcctagcaccaatagcctacttcaaagaacggaacacaaggcctaagctcacgctagagatctttgtgtaccacttcttcagtgcagcgcttggtgcttccctgtcgcagtacagcttcttctacgggctcaagttgacgactgcgacgttcgccataacatttgccaacatggctcctgtcctcaccttcctcattgccatagctctacgggtggagtcgctcaacatgaagagcaaatcagggtctgcaaagatggtggggacgctcatgtcgctcggtggagtgctgctgctgagcctctacaagggcatggccgtgacacaccacagcagcggcactcctccgccctctcaagtacaactaggcaacgacggcgacaggaaggtctggatgctggggactgtagcgttactggccaactgcctcgtcttctccctgtggttgctgctgcaaagcaggctgacgaacaagtacccggcgctctactccagcaccgccttcatgttcttcatcagcacgctgcagacaggatcgctgacggtgacggtcgagtggcaccacgcgtcggtgtggattgtcacaaagaagctggagatggtcacgatattgtattcgggaatcatggcgtctgcagcaggcttcctgataatgacctggtgcgtccacaagaggggtccagttttcactgcagccttcatccccatcgtccagatcatggtggccatcatcgatttcttcttcctccatgagcagctataccttggcagtgttctgggatccgcgctgatgatatttggactttaccttctgttgtggggaaagaagaaggatgcaatggcggcatgctctgcaggtacgaccaaacatgacgaagaggccagcatcaacaagtagcttagtgaaataatcagcagtcagcatcatcgagtggtggcaaacacagacatgtactagtggcggcatctgcaattgtttgaagaaaagaaaatctacgatcgatccagaccccttttgccatgcatgcatgagatgtgtttccagcaacactaattaacagaactgccgatcgatgatatcacgagtttattgttcataaccacttgtcaataaaaacttttgcttttatatagtcaaaagcattactgcttaagtttttttttgtgtgtgtttggaacgaaattatagtctaacttaatgctccgtttggatgtttatatttgagggcatagaattgaattgggttcaatgccaaaccatccatagtatt

SEQ ID NO: 121497 - DNA, 1052 bp, Zea Mays
cttccgatcgagaccagcagcagggaacatcgtccatccgagctaagtaattaggtcgaaaatgacccgtgccagcagcagtagcagcagccggcgtgtgacgctggtactgctcggtctccgcctgctgcttctggttggtgttgcgcaggcggtagtggagttggtgcctgctgatgataatatcgccgccgccgctgctggcacggcggtggacgatggcgagccgcctcagcagtgcgcgaccccggtgagcgtggaggaggcgtgccgcggcgcgtccgagacgcacgccggcgtggcctacgaccactgcatggcgtcgctgggcgccgacccgcgcagcaaggaggccggcaacaagaacatgcacgggctggcggtgctggccaccaggatggccatcgaccacgccgccagcaccgagtccaagatcgacgacctcgcggagctggaggcggcgtcgtcggatccgcaggcgcgcgcccgcttcaaccactgcctggagcagtacggcggcgccgccgacctcctccgcgacgcgctggacaacctcaaggcgaagatctacggcaaggccatggagcagctgaccgccgcaatgggcgcctccgagagctgcgaggacgcgtggaagggcgaggaggaggatgtccccgtcgccgcgcacgacagggagtacggtcggatggcgcacatcgccttcggattcacacaccacgccgccgtcgccgccgccgccgcatgaatcgattaattattatatatatatatgcatgctatctactatgatcgatcgcttctcgaccttcttgcatcgatctgcatgcatattataatttatattatattgatgccacgccgcatgcaggtctttccaaggcgtacgtactatatcaaattattttaatttccttacatgtatatgtatgtgctgctgttggatacgtacgtatatatatatgttctagggtttccggttccggccttgttacatgcatgaagagaagaaacacaatcaataaaagccttattcatttattatgtattaa

SEQ ID NO: 121498 - DNA, 3329 bp, Zea Mays
cgggtctccgttgacacctccagccatccctcaccgctctccttttctttcccagcgcaagttttgccttccttccgggtctccagttcttcccctccgccccgccgcatcctttgcttgcaggagtatccactcccgttgagaagagtccatcgggaaagctcagttcggttctcgcacgaaccccagttcctcgcggtagagatctctgcttccggttctggggctgctaccgcctagtggttgtgtgaacaggattcttaattggggttggtttgtttctacagaacaaggaaagtcaaactttgtggtcggagttgagaagggcaggattcatcttcggcggtcagctctgtggccatgacgacgtaggcgaggcaggtggttgtggttgacaagcaaagcagccagggcaggtagacgaagggaggagagagatcagagatggcggaggcgcacgcggaggccatggatgggagcacctgggaggacatgatgcggaggatccttcccccgggcactcccatccccgaggcgccgcccaacctcgactactccatcgccctcgagtacgacggcccgccggtgccctacgaactccccagggtagaccccgtggagatccctgcaatccccacggcggagccggtgtccggttcccaggtgctcggagggctcccggtggcgcctgttgttcagcccatccgcctcccagtctctaggatcgcccgctgcgcagatccggtggccgcgcaggctgctggcagctcagagtcagtcttgcacaaccaggagttcagtgacgacgacgaagaaggcgatgattcccgctcacagtcgcacggatcagcgcagagctcacctgggccacagaataggcctgaaagacaggagggcaggagaggtccggtcgtcaccttcggcttcacacccgacagcaagtatgagagcaaggagtttgaggagatgtctgagcagtacgtggccgtcacgaagaaggagaagaggagaagggcatgctatcgctgtgggaagaggaaatgggagagcaaggagtcgtgccttgtttgcgatgcaaggtattgcggctattgtgtccttaggatgatggggtcaatgccagaagggcgcaagtgtgtcaactgcatcggccagccaattgatgaatccaaaaggtcgaagctggggaagaactccaggacgctttcgcggttgctcagcccgttggaagttcggcaaatcttgaaagctgagaaggagtgccaagcgaatcagcttcggccagagcagcttattgtcaatggttgcccattgcggccagaggagttaaccgacctgctaagttgctcacggcctcctcagaagctaaagccaggaaaatattggtatgacaaggagtcaggcttatggggaaaggaaggagaaaaaccagacaggattattagctccaacctcaattttactgggaagcttcaggtcaatgctagtaacggaaacacccaggtttatatgaacggaagggagataacaaagattgagctgaaagttctgaaggttgcaaatgttcagtgtccccgtgacactcatttttgggtttatgacgatggtcgttatgaggaagaaggtcaaaacaacataaaaggaaaaatatgggaatcagctctggcacgttttgcatgcgcattattttcactgccggtgcctccggggaactcaaatggaaccagagatgaagttccatatacagcaagagctgtccctgattatttggaccaaaaaagaatacaaaagctgctgcttcttggaccacctggtgctggtacgagcactatttttaagcaggctaaatacttgtacgggactaggttcacccaagaagaacttgaaggtatcaaactgatgatccaaagcaatatgttcaagtatcttgggattttgctagagggccgcgagcgttttgaggaagaggctttgtctagattgaattacacgatttctcagggtgaagaaactcagcatgatgaaaataaagccaatggatcaaattcttgtatatactccataaatgcgaggctaaagaaattttcagattggcttttggatatcatagcaatgggcgacctagatgcattcttccctgctgcaacgcgtgaatatgctccgtttgttgatgagatgtggaaggaccccgccatacaagcaacatttaaaagaaaggaagaattgcattttctccctgatgtggctgagcacttcttgagcagggccgttgaggtgtcaagcaatgagtatgaaccttcagagaaagatgtaatcttcgctgaaggagtaacacaaggaaatgggctagccttcatcgagttcacacttgatgatcgcagcccaatgtctgaaccttatatcgacaacagtgaggcacattcgcagcctctcaccaaatatcagctgatcagagtcagtgcaaaaggcatgaatgatggctgcaaatgggtggaaatgtttgaagatgtccgcatggtaatattctgtgtagcactcagtgactatgaccaattgggaccccctgtaagtggcagcagtcggcctcttgtgaacaaaatgatgcaaagcaaagagttgtttgaggctacaatccggcagccatgcttctgcgatactccatttgttctggttctgaacaagtacgaccttttcgaggagaagatcaaccgcgcgcccctctctagctgcgagtggttcaacgacttctgcccggtgcggacgcaccacaacaaccagtcgctggctcatcaggcatactactacgtggccatgaagttcaaggacctgtactctgcgcagacgaaccggaagcttttcgtgtggcaggcccgtgcccgtgagcgccagactgtggacgaagcattcaagtacattagggaggttctcaagtgggaggaggagaaggatgacaactgctaccaggaggaatcattctacagcacgactgagatgagctcctccccgttcatcagagcggaatgagatttttttttttagctgatcaaatcaatcactgataatcagtgtatattgattgtctaattgatttgcttattcgtatcctagttggtattggttgtgtgtattttagaactaaggctgggctggcatataagaatcgagtgtccatgcattgtatgtaccagtactaatttaattttatccagctggttaaaatgtactccatccgttccgttctttttattatttgttaggttttagtttgcaaacatcagtgtacacgtccggtttaaaactggttggatactatgtttaaaattgggacc

SEQ ID NO: 121499 - DNA, 2918 bp, Zea Mays
ctccagccatccctcaccgctctccttttctttcccagcgcaagttttgccttccttccgggtctccagttcttcccctccgccccgccgcatcctttgcttgcaggagtatccactcccgttgagaagagtccatcgggaaagctcagttcggttctcgcacgaaccccagttcctcgcgaacaaggaaagtcaaactttgtggtcggagttgagaagggcaggattcatcttcggcggtcagctctgtggccatgacgacgtaggcgaggcaggtggttgtggttgacaagcaaagcagccagggcaggtagacgaagggaggagagagatcagagatggcggaggcgcacgcggaggccatggatgggagcacctgggaggacatgatgcggaggatccttcccccgggcactcccatccccgaggcgccgcccaacctcgactactccatcgccctcgagtacgacggcccgccggtgccctacgaactccccagggtagaccccgtggagatccctgcaatccccacggcggagccggtgtccggttcccaggtgctcggagggctcccggtggcgcctgttgttcagcccatccgcctcccagtctctaggatcgcccgctgcgcagatccggtggccgcgcaggctgctggcagctcagagtcagtcttgcacaaccaggagttcagtgacgacgacgaagaaggcgatgattcccgctcacagtcgcacggatcagcgcagagctcacctgggccacagaataggcctgaaagacaggagggcaggagaggtccggtcgtcaccttcggcttcacacccgacagcaagtatgagagcaaggagtttgaggagatgtctgagcagtacgtggccgtcacgaagaaggagaagaggagaagggcatgctatcgctgtgggaagaggaaatgggagagcaaggagtcgtgccttgtttgcgatgcaaggtattgcggctattgtgtccttaggatgatggggtcaatgccagaagggcgcaagtgtgtcaactgcatcggccagccaattgatgaatccaaaaggtcgaagctggggaagaactccaggacgctttcgcggttgctcagcccgttggaagttcggcaaatcttgaaagctgagaaggagtgccaagcgaatcagcttcggccagagcagcttattgtcaatggttgcccattgcggccagaggagttaaccgacctgctaagttgctcacggcctcctcagaagctaaagccaggaaaatattggtatgacaaggagtcaggcttatggggaaaggaaggagaaaaaccagacaggattattagctccaacctcaattttactgggaagcttcaggtcaatgctagtaacggaaacacccaggtttatatgaacggaagggagataacaaagattgagctgaaagttctgaaggttgcaaatgttcagtgtccccgtgacactcatttttgggtttatgacgatggtcgttatgaggaagaaggtcaaaacaacataaaaggaaaaatatgggaatcagctctggcacgttttgcatgcgcattattttcactgccggtgcctccggggaactcaaatggaaccagagatgaagttccatatacagcaagagctgtccctgattatttggaccaaaaaagaatacaaaagctgctgcttcttggaccacctggtgctggtacgagcactatttttaagcaggctaaatacttgtacgggactaggttcacccaagaagaacttgaaggtatcaaactgatgatccaaagcaatatgttcaagtatcttgggattttgctagagggccgcgagcgttttgaggaagaggctttgtctagattgaattacacgatttctcagggtgaagaaactcagcatgatgaaaataaagccaatggatcaaattcttgtatatactccataaatgcgaggctaaagaaattttcagattggcttttggatatcatagcaatgggcgacctagatgcattcttccctgctgcaacgcgtgaatatgctccgtttgttgatgagatgtggaaggaccccgccatacaagcaacatttaaaagaaaggaagaattgcattttctccctgatgtggctgagcacttcttgagcagggccgttgaggtgtcaagcaatgagtatgaaccttcagagaaagatgtaatcttcgctgaaggagtaacacaaggaaatgggctagccttcatcgagttcacacttgatgatcgcagcccaatgtctgaaccttatatcgacaacagtgaggcacattcgcagcctctcaccaaatatcagctgatcagagtcagtgcaaaaggcatgaatgatggctgcaaatgggtggaaatgtttgaagatgtccgcatggtaatattctgtgtagcactcagtgactatgaccaattgggaccccctgtaagtggcagcagtcggcctcttgtgaacaaaatgatgcaaagcaaagagttgtttgaggctacaatccggcagccatgcttctgcgatactccatttgttctggttctgaacaagtacgaccttttcgaggagaagatcaaccgcgcgcccctctctagctgcgagtggttcaacgacttctgcccggtgcggacgcaccacaacaaccagtcgctggctcatcaggcatactactacgtggccatgaagttcaaggacctgtactctgcgcagacgaaccggaagcttttcgtgtggcaggcccgtgcccgtgagcgccagactgtggacgaagcattcaagtacattagggaggttctcaagtgggaggaggagaaggatgacaactgctaccaggaggaatcattctacagcacgactgagatgagctcctccccgttcatcagagcggaatga

SEQ ID NO: 121500 - DNA, 1224 bp, Zea Mays
atggcggcgacaacaccgtacaagcccaagaggatcctgatcacgggcgccgcggggttcatcgcgtcccacgtggcgatccgcatcgtgaacaggtaccctgagtacaaggtggtggtgctggacaagcttgactactgctccaacctcaagaacctcctccccgtcatgggctccggcggcaacaacttcaagttcgtcaagggcgacatcgccagcgccgacctcgtcagcttcatcctggccaccgagggcatcgacaccgtgatgcacttcgcggcgcagacccacgtggacaactccttcggcaactccttggagttcaccaagaacaacatctacggcacccacgtcctcctcgagtcctgccgcaccgccgcccagatccgccgcttcatccacgtcagcaccgacgaggtgtacggcgagactgacggcgacgccgtggtgggcaaccacgaggcgtcgcagctgctgcccaccaacccgtacgcggccaccaaggccggggccgagatgctggtgatggcgtacggccggagctacggcctccccgtcatcaccacgcgcgggaacaacgtgtacgggcccaaccagttcccggagaagctcatccccaagttcatgctgctggccatgaggggccagcgcctgcccatccacggcgacggctccaacgtccgcagctacctctactgcgacgacgtggccgaggcgttcgaggtcgtcctccaccgcggcgaggtgggccacgtctacaacatcggcaccaagaaggagcgcacggtgatggacgtggccagggacatcagcggcctcttcggcctgcgcccggaggaggccatccagttcgtcgacaacaggcccttcaacgaccagaggtacttcctcgacgacgagaagctcaaggggctcggctggcgcgagaggacgcgctgggaggatggcctcaggaagaccatggagtggtacgtggccaaccccgactactggggggacgtgtccggggcgctgctgccgcatcccaaggcgggaggcgtcagcgtcagcgtcacgacggaccacggcgcccggggatcgtcggagatgctcgacgatcgtttcatttccatcccctcttctccgggagcggcgacggttgcaggagacgacgatgacggcgcaccagctgcaatgccgtacagcaatggcggcgccaccaatggaaccaccaccgtgcattga

SEQ ID NO: 121501 - DNA, 1039 bp, Zea Mays
actgcccatcttaagctggtatgactgtcttcactctttaaaaatatgtgctcatattaagcccatatgtctgccttggaaattttactatcttaattcattctgaattatctgattctcaattctagttcctcatcaagtacttttgtcactggttatatacgactattttcctttatcttaccccttggtttcacgtgcttcaactaataaatatactgtatattctacacaaataaacaccatatacagctaaaccaaacacaccattattgctccagattccagaatgatattcatactgggcctttagaatgatatgtcctaggatatatattaacctttaatgttctctttttgtttctcttgttgctaccctaccccactccatctggctgctcagggtgggcatgttaaaatcatggatgaactactggagcgtcgaaccaaaggggcttgcggctgtgagttgacgctagcttcctctgactcacttattgcctgcatttttagatagtaaagttgttgggtatgcacatttgcagtgtcattaatcatttttcatgatggagttgatgctgcttcttcatgaacagatctttcaagcatatgttgactcacttattacaagcatgcgaacaaataagcaggaagctagctagtttgcgcttcggagcaaggaaaggtatccgccttgtaggttcctcacgttggtgaagccctgcttatatgcagcacacgtacacaataaactcactcttataataaatatataaaaaaacaattagttgtaaatctaagatgagatagcactaggttaaggtaagcttaccgcgttgacgaggtctgcagtggcgagtttggaccggatgccagagcggcaaccctgttagttagttggtttggttagcggcaaatgaaatcaattaattactatgtatgaggcaggcattaccacaatcaagttttggtccttggcgtagagcgcggaaacctgttccacaaactggggattcttctccttcccatgcggagtgac

SEQ ID NO: 121502 - DNA, 2495 bp, Zea Mays
ccaccgcgcaccctggccattcaatttcttccctcctcttccctttctttttttccccagcaccaccaccaccaccaccagcagcagtagccaggatggggtgcgtgtcgtccgccttgctcgaggaggacggcgccgaggacgaccgccgccgcatcatctcgcaccaccacatcgtctccctcacctcctccacctacggcatcctcaccagcccgcgagcctactgctcctcctcgtcgtcttccactgcccttggctcagagccgttggctcgttgcgcgcctcctcctccccctccgctgcctccccctccaccgacgacggcaagacaacaagcagccccagcaccgaaacccgaatcccagccccaggcggaggtcatcaactcctgggagctcatggcaggcctcgtggacccctcgacgccgggcaagcccacgaagctcgacggcggcggccagcagcgccgccgccgcatccctctgcgcgccatcgacggcaactcttccgtctccaaggcgccgtcctcgtccgcggttgtgctctacaccacctccctccgcggggtccgcgtcaccttcgaggcctgcaacgccgtccgcgcggcgctgcaggcgcacggcgtcgccttccgggagcgcgacgtgtccatggaccgcgggttcagggacgagctgaggagcaggctggggctggggctgggcggcggcagagcagcagcggcgggcatgctccccaggctgttcgtgcggggccgtcacgtgggcggcgcggaggacgtgctgcgcctggacgaggagggcctcctggcgcggctgctggagggcctgcccagggcgcgcggaggggcctactgctgcgacggatgcggcggcatgaggttcctgccctgcttcgactgctcggggagccgcaagctggctgtcgcgcttcccgtggtggcctcctcgcggaagaaagcagggaccgtggtggtgcgatgcggggagtgcaacgagaatggactcgtgctctgcccaatctgctcctgaataaaacgacgacagaggcaatctggatcgaatttgctacatatgcgctccgtgcaatttttagaaacatttgctgcgctactgctactggtctgattgatgatcatcatcaacaggtagtaataatcaacaagtacatgatcctcagctgcatgtcgtgaagtcgcacatgagccttgtccgcccgccgccgcccgcgttggccctgcggaaccgcgcgccctccaggagcaccctctgcccggagctgaggagcgcgccgttcatgtggtccatgacgctggccgtggtcgggtacaggaagggacccccgggggcgttgtagtaggcgttgagcagcgccgccgtggcctcccggagcagcgtgcggtacatgtcgccgcgcccctccagcgcctccccgagcgtcagctccgacccgtaccgctgcgccgccaggggcccgaacgccatggccaccgtcgtgttcggggtcactaccttccagtggcagcggtgctccggcgacgaccacatgctgccatgccatgccatgcaatgcaatgcaaaatagtccccatcaccccatggcatgcaaatgcaaaaacgatggacggacgtactcgtaggtgcaggcggaggagccctgcgatgctgccgtcgttggaggcggcggcggcggctgcaatgtttgtggtagtggctttcgccagacgggcggcaggaaccttgacctccggcgccagaagaagggcggcgaggaagaaggcgaagccggcgccggcgcctgcgcctgcgcctgcgcctgcgaagatggcctgccccgcctgaacctgtcgtggtcgtgccccggacagaagtccatggcctcctccggttgcgagagcagcggcggcacggtgtagagcgagaggcccagcatgcggaaggcgagggtgagctcgcgcggcacggcgccgccacctgatgacgacgcggcgccgcagtggcccgtcccctggacgacgcgcgccgtgcagcggttcatgtccggggagccctccatgcggacggagaagccgccgaaccagttggtgttgctctcccgcaccgtcagcggggtgtcgccgccgccgcactggatggccacgcgggcgcctgatgcatgcatgcatcatcaaacacacacacgtcgacctcgtgacccatccatccatccatcacaagttcattcattaggtgcgaggatgcaacagcatgcatgtacctaccgtagagcgggtagtcgaagagtcccctggcgccgtccttgcactgatcgcagaacaccatgccggccaccaccgtgctggccatggccggcaccgccaccgcggcgaattccagcagcagcagggtcagtagtagcctgctggtgttgatgaccatcatatgacgcggctccttcaccatatatataatatatgcagcacaagcagagcagacgatcgttgttgatgcttt

SEQ ID NO: 121503 - DNA, 1224 bp, Zea Mays
atggaggccacctccccgcatcctcccaccaccatccgccggaacccaccccgccgcgcgaggcctcccccgaccccgctcgccggcgacaaatccaaaccctcccccctctcccgcctgctcgagggtgaagcagcgttcgccgcctccgttccctgtccaccgcaggaggagcgcctcaaggtgttcctccgcatccgccccctcccggaccgcgatcgaagccggccactccccgctgccaaggacccgcgccggaagcccaagcaggtcggagcccccggggagctctgcctcgcgcccgacggacccaactccgtcgtcctcaccgtcccgcggtctaagctagtcgaccccaagcgaggccgcaccgaggtcttcgacggcttctctgccgttttcccatccgactccacccagcatgatatcttcgcgcaagtcatgaacccactggtggatgacttcctgggcggaaagagtggccttctggttgcaatgggtcccacaggctctggaaagactcacaccatctttggttccccaaggaatcctggtatactacccctcacgctgaggagaatcttcaacgcacaaggcgaaagcaaggtttccaggaaaccaacgcggtcatttttcttctcgatgtttgagatattttctgagggaaaaggggaacgcattcttgacttactgtctgatactgtggagtgtgttcttcagcagtcagtgattaaaggtcttcaagaggtttccctttcaaatcctgcagatgctgagagcttggtttcacgtggtatgctaaagcgcagcacggctgcaacaaatgctaacagcaactcaagtcgatcacagtgcatcattactatacgtgcagacagtgaacatctacttagtagtgctgttctgaccatagcagaccttgctggcgcagaacgggaaaagagaactagaaatcaaggttcaaggctgttagaaagtaacttcatcaacaacacatccatggttttcagtctctgtttgaggtctctgttagaacatcagaaaaaccagaagaaacccttggaaaagcatttcaagaattccatgttgacaaggtacttaagagactacctagaaggaaggaagaaaatgactttgatcttgaatgtgaagccaggggatgatgattatttggatacatcatttttgcttagacaagcatctccttacatgaaaataaagtac

SEQ ID NO: 121504 - DNA, 2040 bp, Zea Mays
cttctcaacaagaaagcaaattccctgtccgaatcctcattttccacgaaccaaaatcactatttcttatatattctattccctctcctctctgcaccgcccgccgcgccgagcacgcctctccctccctcgatccagatccaccccatacctccgcggcgccaccccttcccgctccttctagccggcgtcggcgcgggccggagatctgttttctccggtaggaaaaatcctattgcgatctaaatatgggttcgaaatcggtagacgaggtgctcgacgccgccgccgccggagtccattactccgcactccgtctggacggccaggcttccgcaacgacgtctggcctggagaacggccaccaggagccctttgtcattggtgttgctgggggtgcatcgtcaggcaagagtaccgtgtgcaagatgatcattgatcagctccgtgaccagcgtgtcgtggttgttacgcaggagtccttttattatggattgacggatgaagaattagtacatgtccataattataactttgatcatccagacgcatttcatacagagctacttctctcttgtatgcaaaacttgaaatgtggcaaagctgttgacatccctaactacaacttcaagacatacaaaagtgtcccaaatgcaaggaaggttaatccttcggatgttattattttggaaggaattctagtttttcatgattcacgcctcagggatttgatgaacatgaagattttcgttgatacagacgctgacgtacggttaacaaggaggatccatcgtgataccattgacaagggtagagatctcaaagctgtgttagaacagttctcaaaatttgttaagcctgcttttgaagacttcatcctcccaacgaagaagtatgctgatgttatcatcccacgcggaggagacaatgatgtggcaattgacctaatcgttcagcatattcggactaaacttggacaacatgatcttcgtaaaatacaccctaatctgtatgtaattcagactacttatcagatacgaggcatgcacacaataataagggatgctgccacagcaacacatgatttcatattttatgctgatcggttgattcgattggttgtcgaacatggtcttggtcatcttcctttccaggaaaagcaggtcatcactccgactgggtctgtttacactggtgtggagttctccaaaaggttgtgtggtatctcagtgatcaggagtggcgaaagtatggagaatgcactacgtgcatgctgtaaaggtataaagattgggaagattcttattcatcgggaaggtgacaatggacaacagctcatctatcaaaatttaccaaaagatattgcaaataggcatgttctgctgttggaccccatattgggaacaggaaactcagcagttcaagccatctcccttctattaaagaagggtgtacaggaagcaaatatcatatttcttaatcttatttcagcgccccaaggagtgcatgtggtgtgcaagagattccctagaatgaagatcgttacttcggagattgagtccggtctaaatgatgatttccgtgtcgtacctgggatgggcgaatttggagacagatacttcggaacagatgaatatcagtcatcgacgccatttttctgtgacgataaaaatcgtgtcaggctcttgtgagaagacaacataagccatggacgcggcatattctccaattttttagaaacttatatctgcatttcgaactctagaatgcacatataatgatgctttctttaccatacagacagcacagaacacctcttggtataattggacccattccatttttgtctgtttggaaagcagtgtcatgttcagtagcctctagaaggaacattttttttctttcatgtaataaattagggtaaaaaggatgttttggatcggaacttaattcacataaaaagtgtgaagcttaaatacgaactcctgtcgacttttgattttttttttgaagtatcaataagtgtgtaatctttttctt

SEQ ID NO: 121505 - DNA, 702 bp, Zea Mays
cggatagtgtgtcgaggaaggcaaggacggctttgtcatctccggtgagtatgctctgggcctcgtcgacgctggtgacattttgcacggctgggccgagcttcttgttgatccagtcgacgatggcttccttggtcctggctccgttatagcctctggggacgccatcgatgaagaagaggatggtggggaagccctggacgtcgtacttctgggcgaggtcggtttcctcggtggcgtcgaccttggcaagggcgaggtgggcctggtggtggtgagcggcgagatgcgcggcggcggcggcgtaatccggggcgagctcctggcagtggccacaccaaggtgcgtagaactcaaccataacatggtggctggaggcgaggaaggaggaaaagtttgcggcggcgaggaccacgacgtgggtctcgtcgatctccggctggtggcctgtgaggtcctggtcctgatcttggaagagaaggtcgtcgtcgtcgtagtctccctcaggccacccgtcgggatcgttggtggggatgtcgtcggagttgtcaataagatactggaggggacattgttgttgatcccattccctctcacggtctcacctgatgatgtgctgcagccgtccagcgagaggaattggatgcgcgggcagctggtgagatgagatccgtgctgggcagtggactgagcagtgggcag

SEQ ID NO: 121506 - DNA, 1224 bp, Zea Mays
agccgccaccgccagcgaatcacgtgacttcccctccccttctcccctctccactccatcgtcaaggaaggaacacggccctaactaaaccctagctaagggaagggaaacaagaccatggatgcctccaagctccgcgagcttcgcgacttcgtcgaggcgtgcaagaagaatccttcgctcctcgccgaccccaacctctccttcttccgggattacctccagagtttgggtgccaaaattcccgccgccgccccctctttcgaaagtcccaagagatcttccatggacgacattgatgacgacggtgatgacgacgacgatttggatatgagggatcccactcctgagcgagacgagctcgatgaagagattgttgagtctgatcttgagctcgaaggagaaattgtacagtctgaccatgatgacccaccacagaagatgggaaatccttcagtggaggtgactgaggaaaaccgtgatgcttcccaagaagcaaaaggcaaggctatggaagcaatttctgaaggaaaacttgaagatgctattgaacaccttaccaacgcaatagtgctgaatccactctcagcaatcatgtatggtactagagcatctgtgtttataaaaatgaagaaaccagctgctgccattcgtgatgccaatgctgctctagagatcaacccagactctgcaaaaggctataaaactcgtggaatggcatatgccatgcttggcaaatgggaggaagctgctcatgatctgcacacagcatctaacatggattacgacgaggagatcaatgctgtgctcaagaaggtggagcctaatgctcacaagatagtggaacatcgcaggaagtatgagaggttgagaaaagagagggaggaaaagagagcgcagcgtgatcggcttcgtcaacgtgcagaggcgcaggctgcttacgacaaggccaagaggaaggagcaatcgtcaagtcgctcatcaggaggtgcatctcccagaggctttcctggagggatgcctggtggtggtttccctagagggatgcccggtggaggtttccccgggggtggcatgcctgggggtttccctgggggtggcatgcctggaggtttccctggtggtgttcccggtaatgttgatatgagtaaaatcctgaatgaccctgacctgatggcagcattcagtgacccagaggtcatggcggctttacaagatggtatg

SEQ ID NO: 121507 - DNA, 1359 bp, Zea Mays
agcgaatcacgtgacttcccctccccttctcccctctccactccatcgtcaaggaaggaacacggccctaactaaaccctagctaagggaagggaaacaagaccatggatgcctccaagctccgcgagcttcgcgacttcgtcgaggcgtgcaagaagaatccttcgctcctcgccgaccccaacctctccttcttccgggattacctccagagtttgggtgccaaaattcccgccgccgccccctctttcgaaagtcccaaggtaacattacccatccatcttctcctctatccaccccgcagatcttccatggacgacattgatgacgacggtgatgacgacgacgatttggatatgagggatcccactcctgagcgagacgagctcgatgaagagattgttgagtctgatcttgagctcgaaggagaaattgtacagtctgaccatgatgacccaccacagaagatgggaaatccttcagtggaggtgactgaggaaaaccgtgatgcttcccaagaagcaaaaggcaaggctatggaagcaatttctgaaggaaaacttgaagatgctattgaacaccttaccaacgcaatagtgctgaatccactctcagcaatcatgtatggtactagagcatctgtgtttataaaaatgaagaaaccagctgctgccattcgtgatgccaatgctgctctagagatcaacccagactctgcaaaaggctataaaactcgtggaatggcatatgccatgcttggcaaatgggaggaagctgctcatgatctgcacacagcatctaacatggattacgacgaggagatcaatgctgtgctcaagaaggtggagcctaatgctcacaagatagtggaacatcgcaggaagtatgagaggttgagaaaagagagggaggaaaagagagcgcagcgtgatcggcttcgtcaacgtgcagaggcgcaggctgcttacgacaaggccaagaggaaggagcaatcgtcaagtcgctcatcaggaggtgcatctcccagaggctttcctggagggatgcctggtggtggtttccctagagggatgcccggtggaggtttccccgggggtggcatgcctgggggtttccctgggggtggcatgcctggaggtttccctggtggtgttcccggtaatgttgatatgagtaaaatcctgaatgtaagtgattaaccagttgctgtcttccttggttatgttcgttttttatccacttctgatacacatgaatctcctttttgtacaatgatttgctttctttgtttaccaggaccctgacctgatggcagcattcagtgacccagaggtcatggcggctttacaagatggtatg

SEQ ID NO: 121508 - DNA, 728 bp, Zea Mays
cgatcaaatatcttctagcattattattcagttggcaagactggtcgccagaagctactcaagcagaaaggatgtgttgtttgcatcacgggcctttagtgcttcagcataatcaggttatgaagcacgaattgtacatcagctttcaagtgccaagttcagttaccttgaatattttaagtaatgataaactacgcctctgctcatgacaatgaaacactatttgatattattagtgtaaagttttttgtttgtttgcttgtgcagactctgatgaacctctcaattgacgagcgatgcaggaaaaataatttgtccacaagcatgattgcattatcccaggtttgaacttagaagatggccctgcacactctgcctcgacgtcatcttcaccagagcagactactgatgttgatggaagtaccactggtgatgtcaccttctaagtataacttgggtaaacttattacctcttcctcttttccaaatgctggttcggtgttatccatgttctcagcattaacctcttaaagttctgaaaagacaaggatgaatgcacactgcacttcctactgcacttcttttgaacctatcatgcaatgtccttctgcttgggtgtgagcttcaaaaacacactgaaatttactaagctagtagttcatctaaaagaaaaggtgtgtgctctgttctttctatccagcataattggcttctaattagagataaac

SEQ ID NO: 121509 - DNA, 831 bp, Zea Mays
atggctcgacatttcgtcgaacgggcaaggcgcgaagcgcggcatcgaccactagcacgggtttcgacgacgtcacagagggggctgcgcagcgagcacgagagagacaacacgcgacgaagggagtggagaacaaacgggagggctgctgctctcacggcaagccgggagagggaattaggggcgctgtccctgggagggagaagagctcctgcgcatcggggggaggctgctcgccttagacgacggcgggctcactgcggctgttgttttgtggggaagaggggaggagaaggggcctggtcggcattgctcctgctgctttccatggggaaaaaatgcagggcgcaggggacagcaggggtgctttggcatgctggggaagaggggcgctctgctgctgctgcgcgagggagaatgaaaaggggcgtcgaggaagctggagccgagggggagaagagcgctactgctgggcagccatggagcagggaaaaaggggcgccctgcgcagaggagaggaggacgggcgtcgtcgctggaaaagacagcagggggaagggcaccatgggagtgagctcggaaatctgggcgccatccatggaagctgctaccgctgctttgtgtagtagctcgggcatgggaggaagaagggcaggggacaccatgggaggagcagggagggcgccgcacagctggaaaagggagctcgcagccacggggagagaggcgtttttagacacgtttttgtcaatgggagcattaggattagagctaagaatcaaggtgaacgcgctcggttttggttcaaaggctgaaaattcaaaaatctga

SEQ ID NO: 121510 - DNA, 2713 bp, Zea Mays
cgccggcgtccgatctctcctttcctttttgccttttctcctgcccaccaccccgccacaaccctttcccttctctgcttgcttgctgctgcagtgctgcctccccctcgcccagcagcagggagcagccatgccaggggaccacggctccaagggcgacatctccttcgccggacgcttcacggccagcgccatcgcagcatgcttcgcagagatatgtaccatcccgctcgacacggccaaggtcaggctccagctgcagaagaacgtcgtcgccgccgccgcctccggggacgccgcgccagcgcttcccaagtaccgcggcctgctcggaactgccgccaccatcgctagggaggaaggggccgcagcgctctggaagggcatcgtcccgggcctccaccgacagtgcatctacggggggctccgcattggcctctacgagcctgtcaaatccttctacgtcggcaaagaccacgttggggatgtccctttgtccaagaagatagccgccggcttcacaactggtgccatcgctatcagcatcgccaaccctactgaccttgtcaaggtcaggctccaggccgagggcaagcttgcgcctggtgtgccacgccgctacactggcgcaatggatgcttattccaagattgctagacaggaaggggttgccgctctgtggactggccttggaccaaatgtagcgcggaatgctatcatcaatgctgctgagttggccagttatgatcaagtcaagcagtcaattttgaaactccctgggttcaaagatgatgtggtcacccacctttttgctggtcttggtgctggcttctttgctgtttgtgttggttccccagttgatgtggttaagtcgagaatgatgggtgactcagcctacaaaagcactctcgattgttttgtgaagacgctaaagaatgatggccctttggcattttacaaaggcttcctgccaaactttgcaagactgggatcttggaatgtgattatgttcttgacattggagcaggttcaaaagctgtttgtgaggaaagcgacaagctgaagatagagtttttgcagtcaggtggcgtacaattgacgcacagggtttttcttctatagacaaaaggggagaaatgacacctcccccctcgagaattggggaacaaggacagatctgacacctcaattgcgagaaataaaaataacagccgacagttgcatgatccctgaacgaataaattcagaactagaaaacagatgtcagtaaacaacatgtggtgaatgttggaacttgaactgctctagttcagtgggcatctgttgttgcatgcttgggatggatttaatgtttcgttttttttcttccttgtactgaagtgctctgatcggtaacgatcactgtgtgtgaagtgcttgattgttatgtggtatcatgagaatgaataaacataataatggagctgtttttttattttttactgaagaagcaagctgctgccattacattcctgacaaggagtcgagaagcagagcacacgacaacaaacacagcactgtgtgcacacatgctccaattcagatgttgctcctgatcttcatcttgccgaagagcgagtgcctcccctcggcgaccaccagccccgtggcggcgttggcgacgatgacgtgcgtgccggagtaggcgcccttgtggccgagcgccctggcggtgatgcggagggcgtccccgggcgcggcggcgtcgaggtcaacgaagttgacggacatgtcgacggagaccttgaggtggtggccgtcggacacggaggcggcggagccgatctcgtccaccagggccaccacggcgccgggggctatgtgatcgctgccggaggtgaggcgtgcggggaccgtgaaggagcagaggatgtggcctgggcggatgctctccacgcggatcccgtggagcgcgaacccctcgaagaagctgggggcggcggcagaaacagcagctcgacggttgagcgcgtccaccagcgcaccatcctcatcgctcacccttacctgcagcagcgccttcgggtcatggtcatcagaagcggccatggtggttggggagagggactagttggaactagttttttttcttttgatgccagctgccgcaactgcaagcgatatgacatttttgcccctgccgttatgtgtgttagctgtcgcttggatttgggatgtatccgcttccgccgccgtccatggctggggctggggctggcgctcttttggttgccagtgcaaacaggagaaccatttgatgcatctttgtccctgaatgatcctggcctgacacagtgcttgacttgaatagacaagggaagagcaagtcatgcttaatcatggagaaagaaaggctgtgcctgtgataaatatataagtccccctcccacctaaagtacctgttgtagagtgtttatgtaacagtctaagagctagagagtacagtacccaacacaagaaggactgactatgagttgcagttcagttcaccagctatggtccaccttgtcagccagaacagactacgtacgtacgtcatgctgaatgctacgggcacttgggatggaacaggcagctagagtccaagtgtgctcctccttgtcttgcccaattcatgcttggagttggaagaggagcgcctcgggatgttgggcggccggctgctcaactgcat

SEQ ID NO: 121511 - DNA, 2055 bp, Zea Mays
cacgcggcttcacttgttggatcgccatcgcccccaaatctgactcgattccttccatttccttctccttttccttgccgccgagacccaagagagaagggggatggcaggatcacgccgcccatcccatcctatcccctttaatttgctgcatcttctcgcagatatgtaccatcccgctcgacacggccaaggtcaggctccagctgcagaagaacgtcgtcgccgccgccgcctccggggacgccgcgccagcgcttcccaagtaccgcggcctgctcggaactgccgccaccatcgctagggaggaaggggccgcagcgctctggaagggcatcgtcccgggcctccaccgacagtgcatctacggggggctccgcattggcctctacgagcctgtcaaatccttctacgtcggcaaagaccacgttggggatgtccctttgtccaagaagatagccgccggcttcacaactggtgccatcgctatcagcatcgccaaccctactgaccttgtcaaggtcaggctccaggccgagggcaagcttgcgcctggtgtgccacgccgctacactggcgcaatggatgcttattccaagattgctagacaggaaggggttgccgctctgtggactggccttggaccaaatgtagcgcggaatgctatcatcaatgctgctgagttggccagttatgatcaagtcaagcagtcaattttgaaactccctgggttcaaagatgatgtggtcacccacctttttgctggtcttggtgctggcttctttgctgtttgtgttggttccccagttgatgtggttaagtcgagaatgatgggtgactcagcctacaaaagcactctcgattgttttgtgaagacgctaaagaatgatggccctttggcattttacaaaggcttcctgccaaactttgcaagactgggatcttggaatgtgattatgttcttgacattggagcaggttcaaaagctgtttgtgaggaaagcgacaagctgaagatagagtttttgcagtcaggtggcgtacaattgacgcacagggtttttcttctatagacaaaaggggagaaatgacacctcccccctcgagaattggggaacaaggacagatctgacacctcaattgcgagaaataaaaataacagccgacagttgcatgatccctgaacgaataaattcagaactagaaaacagatgtcagtaaacaacatgtggtgaatgttggaacttgaactgctctagttcagtgggcatctgttgttgcatgcttgggatggatttaatgtttcgttttttttcttccttgtactgaagtgctctgatcggtaacgatcactgtgtgtgaagtgcttgattgttatgtggtatcatgagaatgaataaacataataatggagctgtttttttattttttactgaagaagcaagctgctgccattacattcctgacaaggagtcgagaagcagagcacacgacaacaaacacagcactgtgtgcacacatgctccaattcagatgttgctcctgatcttcatcttgccgaagagcgagtgcctcccctcggcgaccaccagccccgtggcggcgttggcgacgatgacgtgcgtgccggagtaggcgcccttgtggccgagcgccctggcggtgatgcggagggcgtccccgggcgcggcggcgtcgaggtcaacgaagttgacggacatgtcgacggagaccttgaggtggtggccgtcggacacggaggcggcggagccgatctcgtccaccagggccaccacggcgccgggggctatgtgatcgctgccggaggtgaggcgtgcggggaccgtgaaggagcagaggatgtggcctgggcggatgctctccacgcggatcccgtggagcgcgaacccctcgaagaagctgggggcggcggcagaaacagcagctcgacggttgagcgcgtccaccagcgcaccatcctcatcgctcacccttacctgcagcagcgccttcgggtcatggtcatcagaagcggccatggtggttggggagaggg

SEQ ID NO: 121512 - DNA, 2101 bp, Zea Mays
ggcgtccgatctctcctttcctttttgccttttctcctgcccaccaccccgccacaaccctttcccttctctgcttgcttgctgctgcagtgctgcctccccctcgcccagcagcagggagcagccatgccaggggaccacggctccaagggcgacatctccttcgccggacgcttcacggccagcgccatcgcagcatgcttcgcagagatatgtaccatcccgctcgacacggccaaggtcaggctccagctgcagaagaacgtcgtcgccgccgccgcctccggggacgccgcgccagcgcttcccaagtaccgcggcctgctcggaactgccgccaccatcgctagggaggaaggggccgcagcgctctggaagggcatcgtcccgggcctccaccgacagtgcatctacggggggctccgcattggcctctacgagcctgtcaaatccttctacgtcggcaaagaccacgttggggatgtccctttgtccaagaagatagccgccggcttcacaactggtgccatcgctatcagcatcgccaaccctactgaccttgtcaaggtcaggctccaggccgagggcaagcttgcgcctggtgtgccacgccgctacactggcgcaatggatgcttattccaagattgctagacaggaaggggttgccgctctgtggactggccttggaccaaatgtagcgcggaatgctatcatcaatgctgctgagttggccagttatgatcaagtcaagcagtcaattttgaaactccctgggttcaaagatgatgtggtcacccacctttttgctggtcttggtgctggcttctttgctgtttgtgttggttccccagttgatgtggttaagtcgagaatgatgggtgactcagcctacaaaagcactctcgattgttttgtgaagacgctaaagaatgatggccctttggcattttacaaaggcttcctgccaaactttgcaagactgggatcttggaatgtgattatgttcttgacattggagcaggttcaaaagctgtttgtgaggaaagcgacaagctgaagatagagtttttgcagtcaggtggcgtacaattgacgcacagggtttttcttctatagacaaaaggggagaaatgacacctcccccctcgagaattggggaacaaggacagatctgacacctcaattgcgagaaataaaaataacagccgacagttgcatgatccctgaacgaataaattcagaactagaaaacagatgtcagtaaacaacatgtggtgaatgttggaacttgaactgctctagttcagtgggcatctgttgttgcatgcttgggatggatttaatgtttcgttttttttcttccttgtactgaagtgctctgatcggtaacgatcactgtgtgtgaagtgcttgattgttatgtggtatcatgagaatgaataaacataataatggagctgtttttttattttttactgaagaagcaagctgctgccattacattcctgacaaggagtcgagaagcagagcacacgacaacaaacacagcactgtgtgcacacatgctccaattcagatgttgctcctgatcttcatcttgccgaagagcgagtgcctcccctcggcgaccaccagccccgtggcggcgttggcgacgatgacgtgcgtgccggagtaggcgcccttgtggccgagcgccctggcggtgatgcggagggcgtccccgggcgcggcggcgtcgaggtcaacgaagttgacggacatgtcgacggagaccttgaggtggtggccgtcggacacggaggcggcggagccgatctcgtccaccagggccaccacggcgccgggggctatgtgatcgctgccggaggtgaggcgtgcggggaccgtgaaggagcagaggatgtggcctgggcggatgctctccacgcggatcccgtggagcgcgaacccctcgaagaagctgggggcggcggcagaaacagcagctcgacggttgagcgcgtccaccagcgcaccatcctcatcgctcacccttacctgcagcagcgccttcgggtcatggtcatcagaagcggccatggtggttggggagaggg

SEQ ID NO: 121513 - DNA, 2101 bp, Zea Mays; identical to SEQ ID NO: 121512

SEQ ID NO: 121514 - DNA, 101 bp, Zea Mays
cttgagtgcctgagtttctttcagttatctgtttatgatgttaaagacatgcttaactatctgacagaaggagcactttgttgcagatctttgttttgaaa

SEQ ID NO: 121515 - DNA, 2172 bp, Zea Mays
tcccggagccttccttcttcttccattccatgatttcccaccctaggcggcggcgtagtgctccctccatctgctagactttttgatgcacccacatcacacccacacccaccagcgcgagactgccatggccccaacgccggaggatccagccgccgacgactccgagcccttctcgccgtccatcttcctcgacctgcctccgacaccccaccctggtgacgatggcaaggactcgatgatagacctccatttcatcaggcgcttgctcatggaggacgacgacgtccagttccagtatgccgaccaccacgcgctccttcaggccgctgaggagcccttcgctcagatcctcgcgggctcggctggatcctctgtttccggctcggcaacagccgacacgacagcaatttactacccagacggtacgggattccatttccatcagcagactgcaggccctacgagtacgactggagatgacggggtagtaaccatggacatgctcaaccgggcgttcctcaagggtatggaagaggccaacaagttcttgcccgtcgtcgccagcagcacccacaccagcctgctgtgtcgtgactatgcctccaaacacagagtggtggatgggattgggatgccattattcttccaggagagtagtggtaataaccgtagaggcaggggctgccaccatgatgatgacggcgacgacgaggccgacactagaagcgccaagctgattgcaccagagctggaggaaagcggcgaggtgaccgacggcgtatttctcagaggctacgaggtggccctggagaaaatgaacggcttgagcaccaacgtgcctggtgccatgtcacggcagggacaggggaggcagcagaggagcagcggcaacgaggcagtagacctgcgcaccttgctcgtccactgcgcagaggccgtgtccacaggcaaccgccccggagcgacggagctgctgcggcagatcaggcaacgctcctcgccgaggggagacgcctcgcagaggctagcacattgcttcgcccagggactcgagctgcggctagccggcaccggcgcaaagccgaagcgcgccccggctggtgtccacctcctgaaggcatacctgctgtccatgcaagtttgctgcttcagaatggtagccttcaagtcctgtcatatggccatcagcaaggccgtcgcggggaggaagaaggtgcacatcgtggactacggcgtggaccacggcttccactggctgctcctgctgggtgcctgggccacccgggtgggtgggccgccggaggtgaggatcaccggcatcgacttcccccagcctgggttccgctcggctacccggaccgagggggctgggcgccggctcagcgacttcgcccgccagtgcggcgtcccgttcaagttccgcagcatcgtcgccaccaagtgggagatgatttttgccgaggacctcgagatagagccagatgaggtgctcgtcgtcaatggtctcttctacttcgggaaactcatggacgacgagggcgtcgacggagactgcccgagccctagggacatggtcctcggcaacatcagcaggatgcggccggaggtgttcgtcctctacgtcgacaacagctcgcacaacgcgcccttcttcgcgacgcggttcagggaggcgctcttctactactctgcgctgttcgacatgatggacgcgacgacgccgcgggacagcgacgaccgcgtcttggtcgagcgggagctgctggggcggtgtgccttgaacgttatcacctgcgagggctcggagagggtggagcgacccgagacgtataggcagtggcaggtgcggtgcagcagggcagggctcaggcagctgccgctggatcctagcacggtcaagtgtttgagtgatttggtcaaggagggctaccacaaggactttgtcatcgatgtggatcagcagtggctcctccagggctggaagggacgcatactctatgccatgtccacatgggcagcagatagataggtactgtagctagcattttaaggctatcaaatttgtgcatgtttctatattatttcgacgtcgttcatcctaacacgggccctgaatagttagttccgtgtgatatactatgatatctatgatatagttagttccgtgtg

SEQ ID NO: 121516 - DNA, 608 bp, Zea Mays
tttctacttgaagaaggagccagtcttcatggcgtcctcgttggcttcaccaagagcagcctcgttgaggtacttgtcagcaagctgcacacgcttgacgttctcctgctccgccaccagcatgtgtccgtactccaagagcttctcgatcgttatcttgggctgctcgaacgtgggcgggccctccttggagttgacgagcttcctggcgatgttctcgacgccggtctcgctcacccaccgtcggacctcgtcgtcgtagacccgggcacgcagcgcgccgaagaagtcgatggactggccagggaaggtgtcgaccagctggacgacgtgctcctcgtcgacgccgtcggtgcggaagatgcccttgcagacgccgatgcggtcctcgcgggtgggcgcccagtagaacttctccatgcggccgtcgcggatgagcggcgcgtagagcgtggagaagtcgttgccggtgacgatgatgggcacgcgggggttgtcctccttgttgtacatccccgggagctgcacgttggtggggttgtcggcgatgttcatcaggcgtcgcgttcaccatctggttgttcaccgtgtactgcgtcgtgccgccc

SEQ ID NO: 121517 - DNA, 714 bp, Zea Mays
aactaactacagatgcatggatcgagacacatataaatagagacgatgtacatggtggttgctgaactcatttctactttgtgtgtgtgcgatcgatcgcgtacgtgccgtgaagaacgaagaggatcgtcggagcgaggatcgaggaagaagaagaagaacaattgattggcaagatgcaccgcagagggagcagccgctgcagttccaccagcaccagcaccagttgggacggcgacatgaagctgctaacaagaaagaagaaggagaagcccaacacgggagaggagggattgggaagccgacggaaggagagggagaacagggttcagctgcaggctgaggctgaggctgaggaggaagaagaagacgctgcggcgccacgacgacggctgcggcggtcggtgtccatggggagccggctggcgagcgcggcgagggagcagagggctcgcctctacatcatgcgccgctgcgtctccatgctcgtgcgctggaagcacgactagctagctaggaccagccgatccatccacacaagccatcctcctctcttcatctcatctctccagtcttcaccatatatgcgtgcttcctttttatttatttatttactagatgagtgcccgtgcgttgcaacgggaacgtataataatacaacaacttatgtacaaatgtgtgttatattgttatgagaaaatgtttcgtaattca

SEQ ID NO: 121518 - DNA, 279 bp, Zea Mays
atgctccttcagaggtgcatagatattgcagaattttatccttgtgtttctgggtttagtttcagtaaattacataaaaactgctgcaagtctggatctgaagaattacaatgcctgtactttcaattactaggcattactattgcagaggtacatcttcctcgccaaaccattttggaggatcatacccatatccaccaagaggattacaacggcaaaggcgccaagcagtcaagatggaaccctttacaacaccatatcgtttgtacgcctgcatag

SEQ ID NO: 121519 - DNA, 1984 bp, Zea Mays
cacaccgcgcgtgatacctcgccctctcctaccatggccgccgcgccgctgccatcgcagaacctggagctggagctggacttgtttcacctccatcccgatccaccctctccttccgtcttcctcgacctcccgcccacgcctccgcccacctacctggacgacgacgacatggtgctcccctacatctcgcgcttgctcatggaggaggaggacgcccacacccacagcttcttctaccagtaccccgaccacccagcgttgctcaacgcgcagcagcccttcgccgacatcctagctgacatcgctgctgctgcctcgccatcgtcctcctccgtcgacaccactgacggcgcccatggtgatgctcctctgcaggctcaggctgaccactcgcccaacggcagggacgcagatgcagacatggccacctccgccttcctcaagggcatgcaggaggccaccaggttcttgccattgccaaccagcgacgctactctcctccacaactccaggggccgcaagaacaagcatgctgtagcccgggacgacgagccggagtcgggcagagcaaccaagctcatgctgccggcgcacacgacagacgacgccgacgcccgccagatgttccacgaactgatgacccacgagcgcgacgacatctgcatgaagggcgtgcagctgcacggcactgccagcacccagaagaaggccacgcggcggcggcggcgccggagcccggctgccgccgccgacgcggtggacctgcacgctctgctgctccggtgcgcgcaggccgtggccacagacgaccgtgcggccgcgaaggacctgctcgcgcaggtccggcggcactcctcgcccacgggcgacgctgcgcagaggctggcgcactgcttcgccgacggcctggaggcgcgcctcgccggcacgggcagccgcttgtaccagtcgctcatgctccgccgcacctccgtcgccgacttcctcagggcgtaccgcctctacatgaccacctgctgctgcaagagggtggcgttcgccttcgccaacaagaccatccacgacgctttcgcgctcgccggcaggcgccgccggctgcacatcgtcgactacggcctcggctacggcttccagtggcccgggctgctgcgcggcctcgccgccagggagggcggaccgccggagctggtcaggatcaccggcattgacctgccgcagcctggctttcgccccgcacagcagatcgaggacaccgggcgccgcctcagcgattgcgcacgccagctgggcgtgccgttcgagttccggggcatcgcggccaagcgagaggcggtgtctccagaggacctgggcatcgacccagctgccgaggtgctcgtcgtgatcagcctctgccatttcaggctgctcacggacgagatcgaggtcgagatcagctcctccgccgccgccgccgggcctagtgggcgtcgtcgtcccaccgccagggaccaggtgctctgcaacatccgccggatgcggcctgacgtgttcatccacggcgtcgtcagtggcggctacggcacgacctacttcccgacgcggttcagggaggcgatgttccactactcggcgcagttcgacctgctggacgccaccgtgcctcgggacagcccggagaggctgctgctggagagggacatcttcggccgcgccgccatgaacgtcatcgcgtgtgagggcgccgaccgagtggagcgccccgagacttaccggcagtggcaggcgcggaaccgtcgggcggggctcaagcagctccagctgcaggctgacgtcgtgaaggtggtgagggacaaggtgaaggacaagtaccatagggacttcggcatcgacgaggaccaggggtggttgctacacacgtggaagggacgtgttctctatggcctatccacatgggttgcacaacatgctgacccatgactaaaggccctctatggtgggc

SEQ ID NO: 121520 - DNA, 2258 bp, Zea Mays
cgaccatggccgccgagccggcggatgtcggcgactccgagcccgagcccttctccccgtcggacttcctcaaccttggtcccccaacgcctcgcctcgacagccccgccctgcagctgcacgacgacgatgacgacctcgtgctcctcttcatctcgcgcatgctcatggaagaggagacggacggcttcttcgagcagtaccacccggaccaccccgcgctgctccaggcccagcagcccttcgccgacatcctcgctggcgccgccgccgccgacggcagccgagggacctctgtagctggctcccctgcattcgccgccaacgctatctggccctacgatccagtccagctctcccagctgcttctttctaggacctacccggccgacacggcggcataccccagcgccgccgccgactcgatggcgtcctctgccgggtccggtgctggcacggtaaacatggacatgctcaacctggcgttcctcaagggcatggaggaggccagcaagttcttgccggccaccagcaacaaccatgaccaccggcgccaagcgacggaaacatgcgacaagcgggtggacgaatcgtcgccgttgctccaacagagtgcaagcaaaggccgcaagaaccacaggcacgctccttattggggtgaggatgaggaggccgagacaggcaggaggagctgcaaggtgatggcggtcgaaacagaggaaagcgagatggtggaggagttcgtccagagcggatacgactcgctgcacgagcagatgatggccatgaccctcagcacggccggcagcaggaaagggaaggggaaagggaaagggagcgccaacgaggccgtggacctgcgcaccttgctgatccactgcgcgcaggccgtggccgccggcaaccgccccagcgccgcggacctgctgggcaagatcagggcgcgctcctcgccgaggggagacgccacgcagaggctagcgcactgcttcgccggggggctggaggcgcggctcgcgggcactgggacccagcagctcacggcggcgacgaagcgcgcctccgccgtggagatcctcagggcctaccagctctacctggcggcctgcagcttcacagcgatggcgtacaagttctccaacctggccatctgcaaggccgtcggcggcggcgggaggaagaaggtgcacatcgtggactacggcgaccactactacgggttccagtggccgtcgttgctgggctactggggtagcctggaggctgggccgcccgaggtgaggatcaccgccatcgacttccccgagcccgggttccgcccggatgctcggctccaggcgaccgggcggcggctcacatgcttcgctcgccggcatggcgtccccttgaggttccacggcatcgaggccaggtgggacgcggtttcggtggacgagctgagcatcgagcgcgacgaggtgctcgtcgtgaacggcctgttcagtctcggtaggatgcaggagcaggagcaggacgacgtggatagggatagccggccgagccctagggacactgtcctcggtaacgtccggaagatgcggcccgacgtgttcgtcctgtgcgtggagaacagctcgtacggcgcgcccttgttcgtgacgcggttccgggaggcgctcttctactactcggcgctgttcgacatgatggacgcggtggcggcgcgggacgacgacgaccgcgtgctggtggagcagcacctgtttgggcagcgcgccttgaacgccatcgcgtgcgagggctcggacagggtggagcggccggagacgtaccggcagtggcaggtgcggaacgaacgggcagggctgaggcagctcccgttggatcctgatgcggttcgggccatcagaaggaaggtgaaggacaagtaccacagggacttgttcatcgatgaggatcagcagtggctcctgcaagggtggaagggacgagtactctacgccatgtctgcgtgggctgcaaaatgatacgtacactagtttaacaaagttcaaagaaaacaccattaatatctatggctcatgttcaaaaaacgtttgattccgagaattgtaatctttcttcttcttttttatgaagggacgtagaaagagtatataattaattttatggattacttgtttgactgtcctaacaagtctggtcacgtgaaggacttccctatctgttgtaacatcactcggagtttccttgggtctggaaaaaggaaactacttagc

SEQ ID NO: 121521 - DNA, 2278 bp, Zea Mays
ccacaaagcatcgccggtcttggaatttttatctcacgagcagcagccatggccgccgcgccggaggccgagggtctcttcggtgaccccgagcccttctccccgtccatcttcctcgacctgcccccgacgccccgccccgatggcaacgacgaagtcccggcctcgtcggacgacctcgtcctccccttcatcacgcggatcctcatggaggaggacatcaacgaccaattcttctaccagttccccgaccaccccgtgctcctccgagcccaggaaccgtacgcgcagatcctctctgagccagctacagctcgcgccgcctcggggtcccccgccaccgtctcgccgtcctccgacgaggaccctgtccagcccctcctgtccccgccgtaccccgatacgggactgcgtgacatcaacgacgacggtgtcggcgccagcccggggttcgagcagagtgatccggggaaattgaggaccgcagccttgggattgcccaccggtgacggtgaccgcgcggcgctggccccggtattcttcaacagcggagacgcggacgcggagatgctcaacaaggcattcctcaagggtatggaggaggccaagaagttcttgcccaccaccagcagcagccttctaatctacccacctggggcagaggaggagttgggcattaatggcaggggccgcaaggacagggacaggctcggttgggatgacttggaggctgagacgttcaggaagagcaagctgatggttcccgagcccgaggaaactgacgagatggtcgatcaaatgatcttcaacggactcgaaatgtgcctcagagaaatgaaggccctgcggatcagtatgggcagcggcgaggctaagaagaacagcaggaagggcaaacagggaaggaggtcgagcgccgacgaggcggtggagctgagcaccttgctcgtccactgcgcacaggctgtggccaccgacaaccggcggagcgcgaccgagctgctgcgacagatcaagcagcagtcgtcacccaagggcgacgccacgcagaggttggcacactgtttcgcagagggactggaggcgcggctggcagggtcggggagccagctctaccggtctctcatggccgagcgaatcccggccatggagtacctcagggcctactggctgtacctggcagcgtgctgcttcaagatgacggcgttcagtttctccaacaagaccatcttgaaggccatcgccgggaggagaaaggttcacatcgtggactacggcatagactacggggttcagtggccaagcttgctcggccgtgtggcgaccatggacatggagggcgggccgccagaggtgaggatcaccggcatcgatctcccccagcccggcttccgcccagccgcgcggatcgacgagaccgggcggcggctcagcgactacgctcgccagatcggcgtgccgttcaagttccgcggcatcacggcgaggtgggacgcggtcggtgccgacgacctcagcatcgaccccgacgaggtgctcatcgtcaacagcatcgtccggttcggaaacctgatggacgagggggccgacatagacagcccgagcgctagagacgtcgtcctcggagccatccgcgaggcacggcctgacgcgttcatcctccacgtcatgaacgtgtcctacggcgccccgttcttcgtgacgcggttccgggaggcgctcttcttctactccgccatgttcgacatgctggacgccacggctccgcgcgacagccggcagcgcttcatggtcgagcgcggattcttcaggcagtgcgccctgaacgtcgtcgcctgcgagggcgtggacagggtggagcgccctgagacgtacaggcagtggcaggcgcggaaccggcgggcggggctcaggcagcttccgctggatccggacaccgtgagggcgttgagggagaaggtgagggagcagtatcacagggactttgtcatcgatacggatcgtgattggctcctggaaggatggaagggacgcatactctacgccatgtcgacatgggttgcagatgacgatgctgtctcagaacatcaccacacatacacatactagatagtatactacggagatagatatatgcctatgtggtatggtatgtcgctcagcacccttcatctagatgatgtcttctaatgatgtaatactcctacactagtagatgctgcataggatctgagattagctttcctgtggaaatgtacaacaaacttgtgttaagacg

SEQ ID NO: 121522 - DNA, 1296 bp, Zea Mays
ccaagaagttcttgcccaccaataatagccttcttgtcgaccttgacgacacctatggccaatccttgcctacagacagagacaccaagccgtgcactgcctttgctgctacccaagtgaaggaggaggaggtggtggtggatgtaatatcaatgtttggaggaagtagcaatggcaggggccggaagaacagtcacacccaagaggacttggagtcggagatgggcagaaacagcaagctgatgatgcctgaacaagaagaaactggtgctagtgagctattcgacgaattaatgtcctgcaaatatgatggattcttgaaacacatgcaggatctgcgcatcgccatggatagcgagtctgagaagagtgtgaggagggtgagtgggaagggggcacgagggaagcagcatgggaatgagtttgttgacctgcacaccatgcttatccattgcgcacaggcaatggccaccggtgatcgccgaagtgcaaccgagatgctgaaacagatcaagcagcactcctctctcagaggggatgccacacagaggttggcctattgttttgcagaaggactggaggtgcgacttgctggcacagggagccaggtgtaccagtccctcatggcaaaacgcacatccgttgtggagttcctcaaggcatacaagctatttttggcggccatcagcctcaataaggtgcatatcatcttctccaatgggaacatcgtggatgccgtggcagggaggagcaagttgcacattgtagcatatggtgtacagtatggtttacagtggccaggcttgctacatttcctggcaggtagagaaggtgggcctccagaggtgagattcaccggcattgaccttccacagccagggttccgcccagcctaccagattgaagaaacaggccgccggcttagcaactgtgcccgtgaattcggtgtgccattcaagttccatgctatagcagcaaagtgggagatggtctctgccgaggacctgaacattgatccagatgaggtgcttgttgtgaacagcgattgccacttgagcaacttgatggatgagggtgttgacgctgacaccccaagcccccgagatttggtgctcaacaacattcggaagatgcgacccaatattttcatccagattgtcaatagtggcacatatggtgctccattcttcctcacacggttccgggaggcactgttctactactcagcactatttgacatgctggatgcaaccattccccgggataatgatgaacggctgctgatcgagcgggata

SEQ ID NO: 121523 - DNA, 2578 bp, Zea Mays
cgccgccggtgggacgagccaacatgtccgccacgccggaggacttcctgggggcgccgtacctggccgcgccggagcccttctcgccctccgtcttcctcgacctgcccccgacgccggagcgcccggataactccgacgacctcgtcctcccctacatcgcccagatgctcatggaggaggacatcgacgacaagttcttctaccagttccccgaccacccggcgctcctcaccgcccagcagccctacgcgcagatcctatccgactccgccaccgccaccgccacctcctcttcgtccgactccgccaacgccaccagcagcagtagcgcctcggggaccggcggcaactccaccctctcgccctcttccgacgcccccgccgaacgggggggacacggacatgcttaacatggccttcctcaaaggcatggaggaggccaagaagttcttgcccaccaacaacagcctactcatcggccttgatgaaacctcctgcaaatccttgcctaaagacagatacatcaagccctacactgcctttgccgctacccaagtgaaggaggaggaggagcatgtggtggtgcatggaaatggaatgccaatgtttgggggaagcagaagcaccaatggcagggtccgcaagaaccaccgtgctgagggggatgatctggaggctgagacaggcaggagcagcaagctgatgatgccggaacaggaggaaaccggtgccaacgagctttacgatgaaatcatgaattgtacctatgagggattcatgaagcgcatggaggacctgcgcatcgccatggacagcgagtctgagaagagcgccaggaaggtcagcaggaagggggcgcgggggaggcagcagctcgtgaacgaggtcgttgacctgcgcaccatgctcatccattgcgcacagtcggtggccaccggcgaccgccgaagcgcggccgaggtcctgaagcagatcaagcaccactcctcacccaaaggggatgccacacagaggctggctcattgtttcgccatgggactggaggcacggcttgcaggcacggggagccaggcgtaccagtcgctcatggcacaacacacttcggtcgtggaatttctcaaggcatatagcctttacatggcagccagctgcttcatgaaggtgaggttcatcttctccaacatgaccatttgcaatgccgtggcagggaggagcaagttgcacattgtggagtatggtgtgcagcatggattccagtatccaggtctgttccatctactagcaaggagggaaggtggaccgccagaggtgagggtcaccgcgattgctgtcccacaacccgggtttcgcccagcacaccagattgaagaaacaggccgccgtctcagcaacattgcccgtgagatgggtgtgccattcaagttccgcggtattgcagcaaagtgggaggccgtccgtgctaaggatctcaatattgatccagatgaggtgcttgctgtcaacagtgagtgctatatcggcaacttgatggacgagagtgttttggtggacagcccgagccctagggatacggtcctcaacaacatccgcgagatgcggcccaatgtgttcgtccacactgtcgtaaatggaacatatggtgcaccgttctttttgacacggttccgagaggcactcttcttcttctcggcacagtttgacatgatcgatgcaaccatccctagggacaataatgaacggctgctgatcgagcgggatatctttgggacatttgccctgaatgtgattgcttgtgagggtgcagacagggtggaacggcctgaaacttataagcaatggcaagtgcgaaaccacagggctgggctgaggcagctgccactgaatccagaggttgtcaaggcttccagggacaaggtcaagaactattatcacagagactttctcatcgatgaggataaccgttggttgctgcttgggtggaagggacgggtgctctatgccatgtcgacatgggttgctgaggataataagcccatcttttagtgtgcctgaatccaactgtagattatattgatattttgatcgaagggttatgttgaaccatgatccaccacatgttgtggttcagtggacttatgtttctagagagtttattgctgaaacctgtgaggtagaagcaattagatgcttagagctacataggctgtagatatagttcttgatatattcctgcagagttgtaatcatgtgccatgtacactagaattaaaaccctgcagctgacaagtggttacacgtttgacctctgaaggcttaaaccctgaaaagtatctaatgatgcatggtatgaaggtagatgatatatgttcaaactatgtttctagagggtttagtgcagaaacttgtcaggcagaaataagtagatgcttacagctagctacaaaggttgtggatatagttcttgatatattgcagagttgtaatattatatactatgtacaccagaacttgtaatagtatagtatactatgcacacagaattaaacccagtcgctgagaagcaattttattggct

SEQ ID NO: 121524 - DNA, 2521 bp, Zea Mays
ccaaaccctcctctcctccctgtactggtcgtctccgtctccggccgccttccccgaaccttccctatctcggccttcataaaaatcaaaatcaccccacccaacaccatcatcgccggcccatcccacatcaagccaagtccgactccgattctcccacgccaagcaaaaaacctccgattcctatctgtctcgcccaccgccgccggtgggacgagccaacatgtccgccacgccggaggacttcctgggggcgccgtacctggccgcgccggagcccttctcgccctccgtcttcctcgacctgcccccgacgccggagcgcccggataactccgacgacctcgtcctcccctacatcgcccagatgctcatggaggaggacatcgacgacaagttcttctaccagttccccgaccacccggcgctcctcaccgcccagcagccctacgcgcagatcctatccgactccgccaccgccaccgccacctcctcttcgtccgactccgccaacgccaccagcagcagtagcgcctcggggaccggcggcaactccaccctctcgccctcttccgacgcccccgccggctggccctacgacgacgcactcgatatctcccacctgctccgctccccgacataccctgctactcacatgatgggggtcggcctcgacgacttcgccgaactcttgacgccgccacagggccaaggcgaagcccagcggcagcaatcttccctcgccgcgctctcggatggcgcggaagaagaggacgggagcaccaaggcagaggccaccacaacgtttccggttggcgacgccgaccacgccgccctggcctcggccttcttcggcgcccagaacgggggggacacggacatgcttaacatggccttcctcaaaggcatggaggaggccaagaagttcttgcccaccaacaacagcctactcatcggccttgatgaaacctcctgcaaatccttgcctaaagacagatacatcaagccctacactgcctttgccgctacccaagtgaaggaggaggaggagcatgtggtggtgcatggaaatggaatgccaatgtttgggggaagcagaagcaccaatggcagggtccgcaagaaccaccgtgctgagggggatgatctggaggctgagacaggcaggagcagcaagctgatgatgccggaacaggaggaaaccggtgccaacgagctttacgatgaaatcatgaattgtacctatgagggattcatgaagcgcatggaggacctgcgcatcgccatggacagcgagtctgagaagagcgccaggaaggtcagcaggaagggggcgcgggggaggcagcagctcgtgaacgaggtcgttgacctgcgcaccatgctcatccattgcgcacagtcggtggccaccggcgaccgccgaagcgcggccgaggtcctgaagcagatcaagcaccactcctcacccaaaggggatgccacacagaggctggctcattgtttcgccatgggactggaggcacggcttgcaggcacggggagccaggcgtaccagtcgctcatggcacaacacacttcggtcgtggaatttctcaaggcatatagcctttacatggcagccagctgcttcatgaaggtgaggttcatcttctccaacatgaccatttgcaatgccgtggcagggaggagcaagttgcacattgtggagtatggtgtgcagcatggattccagtatccaggtctgttccatctactagcaaggagggaaggtggaccgccagaggtgagggtcaccgcgattgctgtcccacaacccgggtttcgcccagcacaccagattgaagaaacaggccgccgtctcagcaacattgcccgtgagatgggtgtgccattcaagttccgcggtattgcagcaaagtgggaggccgtccgtgctaaggatctcaatattgatccagatgaggtgcttgctgtcaacagtgagtgctatatcggcaacttgatggacgagagtgttttggtggacagcccgagccctagggatacggtcctcaacaacatccgcgagatgcggcccaatgtgttcgtccacactgtcgtaaatggaacatatggtgcaccgttctttttgacacggttccgagaggcactcttcttcttctcggcacagtttgacatgatcgatgcaaccatccctagggacaataatgaacggctgctgatcgagcgggatatctttgggacatttgccctgaatgtgattgcttgtgagggtgcagacagggtggaacggcctgaaacttataagcaatggcaagtgcgaaaccacagggctgggctgaggcagctgccactgaatccagaggttgtcaaggcttccagggacaaggtcaagaactattatcacagagactttctcatcgatgaggataaccgttggttgctgcttgggtggaagggacgggtgctctatgccatgtcgacatgggttgctgaggataataagcccatcttttag

SEQ ID NO: 121525 - DNA, 230 bp, Zea Mays
tatgtcatcggcttgccgctcgccatcctcttcggattcacgctcggcttccaaaccaaggggctgtggatggggcagatatgcggcctcctctaccagaattgcatcctcttttttatcaccctgtgaaccaagtggcaggagttagacctgaccatgttcaacaaggacaacgattttgtctgctaggaatccaaaaagagtttttcttttcttttctgccatatgct

SEQ ID NO: 121526 - DNA, 1964 bp, Zea Mays
ctataatcacaccgagcaaactgtccatcctagctacaatgggtagcacgcacaaggaagaagtaggtgtcctggaggaaatacttgacgggagaaaagagccgaggaagctatctttatcagttctaaaacacatcacaaatgacttctcgcacgagcgaataatcggttatggtgggtgcggagaggtttacaagggcatcctgcaaaacggaagcgtcgctgtgaagaaaatcttcagcaacctaaatgttgaagataaggaatttgatcgagagattcagagcatgatgcaggtgaagcatccaaacgtagtgcggtttattggctactgttctaacacagagcatgaactgatgagaaaagaaggcaagtatattaaggtcgaggtgcgagaaaggctgctctgtttcgagcatatcagcaacggaagcctccgcagccacattacagatggactaagagggcttgaatggcacgcacggtataaaataattaagggaatttgtgagggcctacatcatcttcacatggaaaaaaacatcattcacatggatcttaaacctgccaacatactagtacatgatcaaatggtaccaaagattgcagactttggtctatcaaggctggctgaagtatcacgtactatgagcaatgaacggcttttatccctaggatactgcgctccagaataccaataccatggcaaaatgtcccttaagtctgacatctatagtttaggtgtcataatgctggagctggtgaccgggagcaaggaggagccggacattactaatgaagtcacttatctggaggacatgctaggaatcgagcctcttgatctgcatttcctagtcgaacctaccaagcagatatcctgctcagtccatctgaccaacgctacgaatgactgtttcgccttcattgttcagacgacgaacccgaagcagtactgcatacagccggacagaggcgtcgttccaccacgatctgagtgtagtgttgccatcgtattatcgcaagaaccgacgcataataagcgatgcagcatggaggacgagctaagcgtgcagagcaccagagtggatgagggtgtgacagctgcggatgtgagtgaagcgttgttcactggaaaggaagatagaacggtcgatcacgtgagcctgatggtcggtttcgacatgtcgccatcgccacctgaggaacaaacggaggacttcacgtttgcaccactggcgtcgttgtacgacgaggagccacagttaagcgcggcgaaggtatcagtatggacatccaatcagttggggcgttctggtcgcttctctaagaagaagctagtgtctattctgaaatcctggcgagcaagattaaaggtatcatcccataagaaactcgagactccaaagcatgactgtgagattcctgaagctgtagagcatgaagaagttgccgcgcccaggtgtcccaaaggaccactgccacagcgcgatctttctccactgggcgaagcatgttctaggatgaacatgacggcgatccatgagatcctagtgaacagacattacagagatgatgacctagacccaaacgtgccgtcgctcgaggaatggacacagcagagcagggatatgttggatgataggaaacgtggggacttcacttttcgtgataaagatttccgagcagccatagactggtataccaagtgtatggatgtggggccaaagaaggcgtcaccaacagttctcgttcgacgcagttgctgccacctcatgtgcggcaacctggacgccgccctccgcgatgcaatgcaagcgcagcgtcagtatcccgactgcccaacctcactgtacatgcaagcagtggcactttcaaagctagggatgcatagtcaagccatgggcatgctgattgaggcgtcggagatggaagcgaatcagaaaaagacccgaaaagcagcttaa

SEQ ID NO: 121527 - DNA, 501 bp, Zea Mays
actaatgcgaaacagagcttgggagtcagattggtgcatatggggtgagcgatcgggtgcttgcttgctcatttctaaattgatggagcagggaattgagttatccgtgtttatagcggcgacgacggttacaaggatgcatgtcatgcatttgtggaattgcagcagccttcgttgagtcttggagagctacttctacggtcatgatctgaagaagtttctcaaagcgtgaacatctcttagcttgtaagatgattctaatttacagatgtttccatttcgatattaatcttattctgttaacaacatattttcttaaataacatcatgtttagcttcacaaatatgcttagtatttttttacatacatatattttcaatcagtagttataccaaatttgcaaattaaggcatgttagaggaagatacatcatgaaaaatagaataactaaaaattccaaacacaatggcttttgggcgtttaacttctctatacttcac

SEQ ID NO: 121528 - DNA, 414 bp, Zea Mays
atgggtgttgctcgtgggtcggttggtaccaccatcgggcgccgtgacacttcgaggagaaggggcggtgaaggaagcattggtgccgacgatgagggcggtggtcggaggcggaggaggcgcgctggagtcgatctcctcaaggatgagatcattacaaacgtcgcagttgcaggggtcgcacttgcagttgccaccgcagctgcagccgtgggcggcctcgccggactccgccgcggcctcgacgaactcgggcgcggccttcttctccggggccacgccgaggacgacggtggcctgcgcggcggtgctcgtctcctccagcttgagccgcagccgcagcttgatccgcagttgcaagacatcctcgaccttgtggtgcaaaagaagctcgatctcttcaagaatcaatga

SEQ ID NO: 121529 - DNA, 1620 bp, Zea Mays
atgtggcggcggcagcagactctcctccgccggctgccaccgctgagggtggtggcgcaggctccggcatcctggccggcctgccggctgggacgcttctgcgggtctgtgccggagaagaggaagggaaaggcggcgcctttgcaggtctcctacttccatatccgtttccccgagtctatttccccctccgactgtttactgatgggtttggtgcaggcgcggggcatggtggacaggttccggatgcgcgccaagggtggcgacggcggcaatggatgcgtcagcctcaggcgctctaggtccaaccgccagggcatgcctgacggtggtagtggagggaagggcggtgatgtaattcttgagtgttcaaggtctatctgggatttcagtggcttgcagcatcacatgattgcacaagtacctgtaggcacagtgattcatcttgtcgaaggcgagcaaccttctctgacagtaaataaaccaaccagagctctggatccctgggatatacctagtgctgaagaacactcttcagatttggaccagattgttaatatagtggcagaaggttttgatggtggcttgtcccatcggcatattgcccctaagcataacactgatggaaatgacactgtaaagggaagcagcagtcactcagaggatccaaaatactttcatacatgctccaagcttcagttctcaaactctaatcgtgatgtaagaatctattcatgtcaggaggggacagatgaaaaagatcaaactgaaagtgaggatgaagaattttgggaggatgaagacgagtttgacatggatgaggaggaagaagaggatgagaaggaagaacaagatgtgcaatattgtgttgctgagatgacgaaacctgggcagcggttaatcatagcacgaggaggcaaaggtggactggggaatgcttttgtcatgaaggagatgcggccatccaaagcaaacagacaagagaagatagcccgtttgagtactgggcagccaggaactgagagcatccttatcctggaactgaagagcattgcagatgttggtctggttggattgcccaatgctgggaagagcacattgctcagtgctctatctagggcgcaaccagagatagctgactacgaattcaccacgctgaggcccaacattggcagcctgacctacgaggactacttctcagttaaagtggctgatatacctggcctgatcaaaggagcacatgagaaccgtggcctgggccatgctttcctgaggcacatagagcgcaccaaagttattgcctatgtgcttgaccttgcagccacacttaatggcaggaagggtatcccgccttgggagcagctgcacgatttggtcacagagctggagcattaccaaaaaggaatgactcggcggccatcactgattgtggcaaacaagatagatgaagagggagctgaagagatgtacgaggagctgaagaggagagtgcagggtgttccaatatttccagtttgcgccatcttgcaggagggggtgccagatctgagagtgggtctaaggaaccttatggatgactcagatccgcagggcgttgattttgaggaaaacgactgttaa

SEQ ID NO: 121530 - DNA, 1624 bp, Zea Mays
tactgccgcatctgttttagtgcactctgtccctccctccctgcctgctttggatgaatgccttgagggttcagtcctctgtctccctcctccttccctgaactgagctgcaagctgcagccgcaggcttggctggttgggtcaactgtgccgcgcccttcctcttgttcctgctcaatctcacctctttgatggcttcatcccactgctgccagtgcagcctcttcttcactggcaggcaggttcctctagtctgtagtctcttctgaccggtggttgttgcagtttttaaccgttcttccctctgacagccaggcataggtggcaaaatccagcgccctgtagattcagctccattccctgctgcctgcagctccctgtcaatctttggaagccggccgcagagctttcagttcttgccgctctcctctgctctctcgctcgctcttccgctcacctctgcattcccccctccctctgtctctagtttccttgctggcaaacggacgaaggaaacgggccaagatgggagctttaagcagcatcggcgtcgggctggccgtggtgtcctcgctactcctgctggcgctcaccgcggagctctactacatcttcgtgcacaagcgccggcagcggcggcgcgccgcggccgtctccgacgcggcctcgtctccgtcctcctcctcccgcgagctgctccagctcttttgcttcaagaagccgccgccggagctcgcgtccacctacgccgtcccggagccggcgtccgccgtggccgtgtcagtcggcgacgacgacgacgacgacggcgagacggtggaggcgcaactgatgcggctcggcagcgtcgtcgggcccacgcggctgctgttcaccatcaaggaggagacccgggaggacctcgagtccgaggacggagggcgaggccggagccggagccggagccgcagcctcggtgagctgctgcattgcgccgagacaccgccgttcttcacgcccagggcctcgccatcgcccgtgccgacggcctcgatggacaactcctacaacccgctcttcgaatccccggcggccagcccggtccctacccatgccccgacggtgtcgccgccgccaaagttccagttcctcagggacgccgaggacaagctctaccgccgcgcgctggcccaggaggaggcgatgagggcgcggaggtcgccggcggccgctgccgaggaggatggcgggtacatcaccatcgtggtggataagaacaaccgcgtcatccccatgccgtcgccgtcgccgtcgccacccaccgccgccgccggccatcagtgagcgcgaaactgattagcagatctgttcagatggacaggaggcattcttcagtgttgtgctagtgtagtagctcttgtgatgtagtgaaactttcttctttttttgtttggcctatggtcctgtgaccatgccaaatttgagtcagtgattggatgtatataacatcaaagcgatgaggaatcgacaatttcagttcagaccaatatgtttctcttcatattatcttttatttagtatccttagaagccaatatgcgaccctgtgaggtgtcaaattattgttgtagaaatgtttaagccaa

SEQ ID NO: 121531 - DNA, 1419 bp, Zea Mays
ctccctccctgcctgctttggatgaatgccttgagggttcagtcctctgtctccctcctccttccctgaactgagctgcaagctgcagccgcaggcttggctggttgggtcaactgtgccgcgcccttcctcttgttcctgctcaatctcacctctttgatggcttcatcccactgctgccagtgcagcctcttcttcactggcaggcataggtggcaaaatccagcgccctgtagattcagctccattccctgctgcctgcagctccctgtcaatctttggaagccggccgcagagctttcagttcttgccgctctcctctgctctctcgctcgctcttccgctcacctctgcattcccccctccctctgtctctagtttccttgctggcaaacggacgaaggaaacgggccaagatgggagctttaagcagcatcggcgtcgggctggccgtggtgtcctcgctactcctgctggcgctcaccgcggagctctactacatcttcgtgcacaagcgccggcagcggcggcgcgccgcggccgtctccgacgcggcctcgtctccgtcctcctcctcccgcgagctgctccagctcttttgcttcaagaagccgccgccggagctcgcgtccacctacgccgtcccggagccggcgtccgccgtggccgtgtcagtcggcgacgacgacgacgacgacggcgagacggtggaggcgcaactgatgcggctcggcagcgtcgtcgggcccacgcggctgctgttcaccatcaaggaggagacccgggaggacctcgagtccgaggacggagggcgaggccggagccggagccggagccgcagcctcggtgagctgctgcattgcgccgagacaccgccgttcttcacgcccagggcctcgccatcgcccgtgccgacggcctcgatggacaactcctacaacccgctcttcgaatccccggcggccagcccggtccctacccatgccccgacggtgtcgccgccgccaaagttccagttcctcagggacgccgaggacaagctctaccgccgcgcgctggcccaggaggaggcgatgagggcgcggaggtcgccggcggccgctgccgaggaggatggcgggtacatcaccatcgtggtggataagaacaaccgcgtcatccccatgccgtcgccgtcgccgtcgccacccaccgccgccgccggccatcagtgagcgcgaaactgattagcagatctgttcagatggacaggaggcattcttcagtgttgtgctagtgtagtagctcttgtgatgtagtgaaactttcttctttttttgtttggcctatggtcctgtgaccatgccaaatttgagtcagtgattggatgtatataacatcaaagcgatgaggaatcgacaatttcagttcagaccaata

SEQ ID NO: 121532 - DNA, 740 bp, Zea Mays
atgtcctggtcgtcgctgattagcggcgacgcgtataagtcgccggcgttcatcgcgctggccagcgcgctgtgcgtggcggtggcggtgctgctgcaccactgcgtcctcgccgcctgctgccacggcggcgacaggcgccgccgcaggcagcagcaccaccaccggcatgtcgtcagtgccgtcaccaccagcttctcggccggcgcgcggcggcaccagcaccagcaccagccggaggaggaggaagcggacgtcagcgtggaggtgagcgcgacgtcgcggacgcaccttgtggccgcggcggtggtgtgccggtaccgcaaggaggagccctggaacgagtcgacgtgcccggtgtgcctggccgacttcgacgacggcgaggcggtgcgggtgctgcccgagtgcatgcactacttccacgccgagtgcatcgacacctggctgcgcgggagcaccagctgcccgatgtgccgcgccgagaccacgcccacgcccacgcccagcccggcctccgtgcgccaccacctcgagctctccttctccctcgaggagatccttgtcagggcgtagcacatctccttggatacgtacttggcagctgagcacaacggagcagcggagtgctggctgctctgctcttcatagttttttcttgatcaaaattcatctgaacgattgattcatagtttttttcagcaagatttagaagttgttgccactattccggctatatc

SEQ ID NO: 121533 - DNA, 1192 bp, Zea Mays
ctccttcaggctgcagctaatgcaagccaagtgcatgagcgatgatggaagttagcggcgccatgcgtgccgatgagatgcaaatgcatgcgtctcccgcgacctaaccaccagtccaccaccattccagatccacctcctccttccctctcttataccagccgacgcaccatctccaccaatgtcgtcgaccacagaagctctggctccgatgatgatcttggcgctcgccgctgtgctgctggccaccgctgcacgtcagccgtcgccggttatgtccacgaccaccaccaacctgaccctccacaacctgtgcccgtacccggtgtggccgctggtgaccgccaacgcgggcaatccgtccatccccaccgacgccgacggcgagccggcggggcggctggacggcaacggcgagggcctggcgacgctagcgttcccgccgggcgcgtggtcgggccgcgtggtggcgcggacgggctgcactggcggggacgacaacgacgaggcggacgcgtacgacccgctgcttccgacccctcctctccgttgcacgactggcgacgcgccgccggtgacggtggcgcaggtgagcgtgggcgggacgggcggggccgcggcgtacagcgtgagcctggtggacggcttcaacgtggcggtcgtggtgacgccgcacgggatgccaccagagggcaccgggccacgccggcggtgccccacgctggggtgcgccgtggacctcggcgccgagtgccccccgcgcgcccgcgcgcccggaggagggtgcggcgccggcgcgaccgaggcggcgttgttcaagcacctgtgccccgacacgcggaccaacgccactgacatcgaggacacgccccaggactgcgtcgaccccggcgagatcaaggtcgtcttctgccccaagcccggcagcgtgtcccgccagctctaggctctagctagcgttcgtccgcatgcaccatgcatccatccttcggtcacagaataagagctgtaaccaatcagtcgtgtcagctactgtagcagtagtattagcttggtagtatcgtgtcccttggcacgcacgaagatgattcgcaatgcaacagagagcaggagaccgagttgtttagctccaagcacaaaccaacaacagctcagctcaccagggaaacaaagaaagatcctcctcgtaacc

SEQ ID NO: 121534 - DNA, 1742 bp, Zea Mays
gaagaacaacccccaaacacacacccgaagaaagaggctcgctcctcccttcgctctctccaccttgcggcgctccacctccgtcccctcgccgccgcttctcacttcgcctcccctctcaaacaccccaagccgcagcgcaggcacgcgcgccgacgtctatccacccagcggcactcctcatgccctgcatcctccaccgcctgcagacgagtcccccacgccaccgcggccacgcctcgccgtccatgtccatggccgccgccccggcttcctgattcgtcccgtacccgcgcgtcgctcctcccgattccatccccgtccgcgccatgccgccgctgcgcggagccaagcgccgccggaaggcggcgttggagaagaaggcggcagcggtcgcaatggcgtctgccgccgcgggcgaccctcctggcgactggtgggaagccttctgcatccgtatgtcaggaaccttatcttctatcgaggatgcacaaagatttgagtctatattcaaaatgccaagaagagccttcgactatgtctgcaatttggtgagagatgaaatgatggtgaggtcctgcagctataccttccttgatggcacagtgctgtgtttggaagaccgagtggccattgctctgcgaaggctgaactctggtgggtcactggtgaccgtaggatcctctgttggagtgaaccactcaaccgtgtcgctgataacctggaggttcatcgaggctatggaggagcgagcgagccaccacctgcgctggccagactctattgaaatggagaagatcaagtccaagttcgagaagatccatggtctgccaaactgctgcggcgttgtggatacaacacacatcacaatgtgcctttcatcagccgagccgaactgcaaggtctggcttgatcaggagaagaactacagcatggtgttgcaagccgttgttgatctggacaccaagttcacagacatcgtgactggctggcctggtagcatgaaagagtcgagcattttgcacagctctggccttttcaagctctgcgagaaaggcgagcggctgaatggcagcaagctgaaggtatcagatgggtcagagatcggggaatacttgatcggcgactccggctacccccttctcccctggctgctcacaccttaccaagagaaggacctcacagagtccagtgctgagttcaacattaggcactcttctgcgagaacagtcgctccgagaacactggccaagttcaaggacacatggaagttcctgcaaggggagatgtggcgtccggacaagcacaagctgccccggataatccatgtctgctgcttgctgcacaacataatcatagaccttcaggaaacagcagtggacgaggcacaggcgtggccgagcgatcatgacgctaagtacaggcagcaagtgtgccagctagctgatgagaatggagtcagggtgagggacaaactgtcccagcacctgattagcaagtgaccaccaccaagcgtaaagcttattggacgagagagtagtgccattttcatctgtttcaggcagctctaaatcccttttgatgtccagttttgcagagttgtaaatgaggcaggtgagggcatcggttcaaactcactgtaaccctcttaaaattaaaattaaggctgttgcaaacttgtcaaaaatcaatgtggcattgtggctcctttggtttataatgtttgtgctttggtgggcttg

SEQ ID NO: 121535 - DNA, 175 bp, Zea Mays
ccttttgcttcgcaggatagggaaacaattacaaccaccacaagaaagcatgtcgtcaggatggacacgaaggtctttctccaaccgccgttgagtgccatcatcaggaggttagaagagggatgcctgttgtgctctcttctttttcagacgagaaaaatgaggaagacccctt

SEQ ID NO: 121536 - DNA, 275 bp, Zea Mays
tattttccaacacatgcattttattcattcattatatatattgatgatgattgacatgtatatcgatcaggtagcagcacggatggatgcatgcattttgtacgtttcaatatggacagcagcacttccatgggtcaccacgtttatcgcagtagccgccattcttagcagggaagttgtactcttggcaaactttgccgcagtgaaatggcgtgcagtattcacgatcgtatggaaagcagaatggtggccgcaacctggggacgacgccgcct

SEQ ID NO: 121537 - DNA, 1407 bp, Zea Mays
ctgaacgacaaaatcgatgaaacctgctccgatccgcactccctctgccttgcccacaatttctagctatttaaacccttttacgcaccataacctagcaggcacaaggaagaacgaagagagatcagcgacttaacaacaataatggccaccgccatagttcccacggacgccgagctgctgcaggcgcaggccgacctgtggcgccacagcctctactacctgacatccatggcgctcaagtgcgcggtggagctccacatcccgaccgccatccacaacctaggcgggtctgccacgctgccggacctcgtggccgcgctgtccctgccagcggccaagctcccgttcctcgggcgcgtgatgcggctgctggtcacgtcgggcgtcttcgcgtcgtccgacgacgtgcagtaccggctgaacccgctgtcctggctgctggtggagggcgtggagtcggaggaccacacctaccagaagtacttcgtgctgggcaccgtctcccgccactacgtggaggccggcatgtccctggccgactggttcaagaaggaggaggacgaggaccgccagctgccgtcgccgttcgaggccctgcacggggtgcccctcgtccacgagagcaccaagctgctggacgaggagctggacagggtcgtggaggaaggcgtggccgcgcacgacaacctggccatcgggaccgtcatacgggagtgcggcgccgacgtcttcagcggcctccgctcgctcacctactgctgcggcaggcaggggaacgccagcgcggccgccatcgtcaaggccttcccagacatcaagtgcaccgtgctcaaccttcccagggtcgtcgaggagacgacgaccaagaccatcaccatcccgcctgcgcaggctgtcatgctcaagctcgtcctgcacttctggagcgacgacgactgcgtcaagatcctggagctgtgcaggaaggccatcccttcccgccaagaaggagggaaggtgatcatcattgagatactcctgggcccgtacatggggccggtcatgtacgaggcccagctgctgatggacatgctcatgatggtgaacaccaagggcaggcagcgcggcgaagacgactggcgccacatctttaccaaggctggcttctccgactacaaggttgtcaagaaaatcggagctcgtggtgtcatcgaggtctacccatgatccatgatcgatgtcatgtgactgtgagaggacgatactgtacaattaaataaacggggtatctagctactactcagcttttgtacctcgagatccatgcatgttaattacttgcttccatctgttttcaaaatgcatctatgtaatgtacttcgcttcttcgtccattgtgctcgtagatttggatttattacttcg

SEQ ID NO: 121538 - DNA, 1638 bp, Zea Mays
cctccatgccatgcaaacacacaaagcgaggagtagagtagcttagccttgaagctacttgccgacatggagttcatccttgtgtgttcagtttctgtactatcactgttagtctcggcggtgtacttgtaccggacaacatggggtcgccggccgctgcagcagctgccgcctgcgccaccggggtggccagtgatcggacacctacacctgctctcggatatgccccaccaggctatggccgagctggccaagaccatgcgtgcgccgctactccgtctgcagctggggaccgtccgggccgtggtgatctccaagccagacgtggcgcgcgcggcgctcacgaccaacgacgcggcgctggcgtcgcggccgcacctcctgggcggccacttcctggccttcgggagctcggacgtgacgttcgcgccggcggggccgtaccaccgcaccgtgcggcgcgtggtcgtgtcggagctgctctcggcgcgccgcgtcgcgacgtaccaacggatccgtgtgaacgaggtccgccgcctcctcggacacctcgcgaagaacgcctccgtcccagatgcgccgcccgtcgacctcagcgagtgcgtcctcaacctggccaacgacgtgctcttccgcgtcgccttcggccgcggcttcccgcacgacaaggcggccaagctcggcgaggtgttcgccgtggccaatgacttcttcgccgggttcactaccgctgacttcttcccggagctcgagcccgtcgtcagcaccatcactggtctccgccgacggctgaaaaactgcttcgccgacctctgcgagttctgtgacgagatcatcgacgagctcatcagtggcaagcgcgacctgagctctggccacggcggcgacgaggacttcatcgacgccctcctccgtgtccagaaatcacaggacatggagaccgacgagaacattaaggctcttgttctggacatattcgtagcaggctcagacacgtcgttcgccgcactggagtgggtgatgaccgagctgctccggcacccgcgcatcctcaagaaggcgcaggacgagatacgtcgcgtcatcggcgacaagggctccgtggaggagtcggacgtcggtgacctccactacctccgcgccatcatcaaggagaccttccggctgcatccggtgatcccgttgctggttacgcgggagtccgtggcgccatgcactcttggcggctaccatatcccggcagggacgcgcgtgttcatcaacaccttcgccatgggccgggacccggagatctgggaccggccgcttgacttctcgcctgagcggttcgagaacagtaataatggtggcggtgcgacggcagatgtcgtcatggatccagactacaagctccttccctttggtggcggtcggagaggttgccctgggtacatgttcgcgttggccaccctgcagttgtcgctggccagcatgttgtaccacttcgactgggcgctgccgtccggaatgcgcgccgatgatgtcaatctcgacgagatttttgggctcgccaccaggaagaaggagcctttgttcgtggtcgtcaggaatagcaaggagcatgaattcaaggggggtgacaccgacgtggtcgtctag

SEQ ID NO: 121539 - DNA, 1660 bp, Zea Mays
agatcccatctaacccatgcatttctgaatctctctctacataaacaaaaaccagtcctttgttcttcttcccccggcacgcccagcgccagtcaccaaccttccactccctccctccgtcgccatggcgcgcaagaagatccgggagtacgactccaagcgcctcctcagggagcacctcaagcgcctcgccggcatcgacctcaccatcctctccgcccagatcacgcaatcaacggacttcgcggagcttgtgagccagcagccatggctgtcaaccatgaagctagtggtgaagcctgatatgctgttcgggaagcgtgggaagagcggcctcgtggctctcaacttggatttcaatcaagtcaaggagtttgtcaaggagcggctgggggttgaggttgagatgggtggctgcaaggctccaatcacgaccttcatcgtcgagccatttgtgccacatgatcaagagtactacctttcgattgtctcagagaggttgggcagcaccatcagcttctcagagtgtggagggattgagattgaggagaactgggacaaggttaagactattttccttcctactgagaagccaatgacgtctgattcatgtgctcctttgattgcaacccttccattggaggcacgcggaaaaattggtgacttcattaaaggagtgtttgccgtcttcctagacttggatttctcatttcttgagatgaatccgttcaccatggtcaatggggagccatatcctctggacatgagaggagaactagatgacacagcagctttcaagaacttcaagaagtggggaggtatagaatttcctctaccttttggaagagtactcagccctacagaaagtttcatccatgaactagatgagaagacaagtgcctctctgaagttcacggttttgaacccgaaaggtcgcatctggaccatggtcgctggtggtggtgctagtgtcatttatgctgatacagttggagacttgggatatgcatcagagcttggaaactatgcagagtatagtggtgctcctaatgaggaggaggttctgaattattctagagttgttcttgattgtgcaactgctgatcctgatggccgcaagagagcccttctcattggaggtggcatagctaacttcactgatgttgctaccacattcaatggcatcatccgagccttaagggagaaggaatccaagttgaaggcttcaagaatgcacatttatgtccgccgaggtggtccaaattaccaatctggactggctaaaatgcgtaagcttggtgcagaactcggcgttccaattgaggtgtatgggccagaagcgactatgactggaatctgcaaacaagcaattgaatgcatcatggctgcagcgtaatcagagcgtagctctgggtagtttgggatctgcaaacacgcaattgaatgtgtcatggactcagcataaatgagagatggatagtagttgcattatatagttcacacatggtgtttctgttttttgtttcagatatgttgtagcgtgttgtttgaacgaaaccttcacagatcattactgcaaagaaattgctgtgtgttaaaataaattcaaagtctagttttgtgccttttggaatgcatgttgaactgcaaagtgactcta

SEQ ID NO: 121540 - DNA, 1207 bp, Zea Mays
agatcccatctaacccatgcatttctgaatctctctctacataaacaaaaaccagtcctttgttcttcttcccccggcacgcccagcgccagtcaccaaccttccactccctccctccgtcgccatggcgcgcaagaagatccgggagtacgactccaagcgcctcctcagggagcacctcaagcgcctcgccggcatcgacctcaccatcctctccgcccagatcacgcaatcaacggacttcgcggagcttgtgagccagcagccatggctgtcaaccatgaagctagtggtgaagcctgatatgctgttcgggaagcgtgggaagagcggcctcgtggctctcaacttggatttcaatcaagtcaaggagtttgtcaaggagcggctgggggttgaggttgagatgggtggctgcaaggctccaatcacgaccttcatcgtcgagccatttgtgccacatgatcaagagtactacctttcgattgtctcagagaggttgggcagcaccatcagcttctcagagtgtggagggattgagattgaggagaactgggacaaggttaagactattttccttcctactgagaagccaatgacgtctgattcatgtgctcctttgattgcaacccttccattggaggcacgcggaaaaattggtgacttcattaaaggagtgtttgccgtcttcctagacttggatttctcatttcttgagatgaatccgttcaccatggtcaatggggagccatatcctctggacatgagaggagaactagatgacacagcagctttcaagaacttcaagaagtgagtcagatttcctagggatacaatttcttcttgtcattgttggatttattcttatcaatcgtgcaggtggggaggtatagaatttcctctaccttttggaagagtactcagccctacagaaagtttcatccatgaactagatgagaagacaagtgcctctctgaagttcacggttttgaacccgaaaggtcgcatctggaccatggtcgctggtggtggtgctagtgtcatttatgctgatacagttggagacttgggatatgcatcagagcttggaaactatgcagagtatagtggtgctcctaatgaggaggaggttctgaattattctagagttgttcttgatgtaagcaaacattgtaaccttgtcaatgctgctcttaactccacctta

SEQ ID NO: 121541 - DNA, 961 bp, Zea Mays
acaacaaacaaactgatccaccaaaacatgaagagccagcagcatgtcgtcctcgctgctctcatcgtcgtcgtcgtcgccaccatattggtgcagacgacgccgccgccgcgtggtgcggaggcggccattattccgggtaatgttagcgcccccaacgccgtcgtcttcggcgtagtgccatgcagcaccgggagctccatcaacgtggccaccgccccgccgttcccaaacgccagcctacagctgcagtgcggcgccgcctcccttgctggcaacgtgagtggacgcgcgacgacggcagacagccgcggcaacttcctcgtcggcgtgggcgtcatccgcaacgccaacagcagcggcggggcggtgctctcgctctcctccatgctgctgggcaaccagtgcagcgtggtggtcaccaccccgctggccgcctgcaacgtgtccctggccggcgccaataatggcacgctcagcgcgccggttcgggtcgtcggcggcgggccgctcctcggcggactgctcggtctggccgccgggcccttctccttctcattctcgaaccgaagctcttctcctctaggtcgtcgtaggatgatggggtcgtaggacgatgggatgtgatctccaacaaataaaaggaactactgcgactacgagggagggagtctatagatgcatggaataaattaaacaaatgatgatatgtgtaccgtgtgttgtgttgtgttatcatatcacgtaattatacgtatatatatacctgtaccgtgcgttgtattatggtactaataataagcacgtacgtataacatgcttctctgcaacgcactttgttgttgtcgcctcctgtttcagttttgtgaaaacaattaaaatgatgtggtgtcacgttatatcgtacacatgtcattggaataacacaggattagaatacacatatcatttgtttggacca

SEQ ID NO: 121542 - DNA, 568 bp, Zea Mays
agtacacgactcagccattgtattgtatgtgcgtgcagtacacgctcgatggctgccgcccttcaagtgttcgtcgctgtcgtcctgatggcgtccgctcttgtgtcggcagagatcggtaagaaggagtgcaccgatgtgaattacgactgcaaccgtttcccaggttcccgaaagtgcggagactcgtgccgggacaaggcccgcgccgagggcagcagcaactacgcgtcagcatgcgagcctgccgtcgcgcccttcaagtgctgctgcaccgtcaaggacccacaccacccctggcctccaagctcctcctccaagaccaacgcctaataaatatgtccagtccaaacattatatttagatagcatgcatatagtgtgcctgctgctatatatatatgtcatcgaattaataatgaagatggggtggtttaattatattccactataccatgacataaaattagcgacaaacatttgtcggtaaaaataggcttttggcgacagccagtctgtcgcaacataataccatcacagcatccgtcggcatatagtattttggtgtc

SEQ ID NO: 121543 - DNA, 1175 bp, Zea Mays
ttatttacaggaatcactgttggtgcttccgtattgtttttcattatccttgggactggggtatgctatatgctgaagcggatagaactggaagcgatcgaaaggaagaatggaagcgagaagcttaaaaacgtgaggactctacaaatattcagaaaagaggaactcgacaaaataaccatgaacaactcggtgcctcttggcaagggaggatttggcgaggttcacaaaggagttttacccgacaagaccgaggtggctgtcaaggcctcgatcgaggtgactaaaggtacgctggacaagtttgtggaggaagtagagatccagtcagggatgatgcacaagaacatcctcaagctcctgggctgctgcctgcgggtcgatgtcccactgctggtgtacgagtacgctgccaaagggagtctcaaggaccttctccatggaaaaaacgacgatggccagccgcgtgagcctctgacgcttaggtcacgcctagacatcgccattgggtgtgcccagggcttggcttacatgcattcgtacacagaaaatggcatacagcatgcagatgtgaagccagacaacatactcctggatggcgggttggtcccgaagatctccgactttgggctgtccaaggtttctgtggtgggcaaggactataccaagaatgtggtagggtgtttgccttacatggatccggtgtacaaggaaacagggaggttaactccgaagagcgacgtctatagcttcgggattgttctcttggagctgatctctagaaggcccgctgtagatggtagtgaaagcagcatcgtcaggcagtttaagagtgtttatgaacaagcagatgataataacactgggaaggagttgtttgacaaggatattgctgctgaagaagatatacctatgcttgatgaaattgccaaactagccatgaggtgtttgaaggacaatgttaatgaaagaccggctatggtgagtgtagcgagtgcgcttgtgatattgaaagattcttgggaagaaacaggacaagggttctcttctcctcctcctcctcctcctccaatcaagtagctattaattgtttcccatgccatttgcttcatgctttctatgtaatatattttgttatcatgcatgagtgtgtaaacatgtacagtaagctgtta

SEQ ID NO: 121544 - DNA, 1360 bp, Zea Mays
cgaactcgagccaagcaacagagagggggggggggtgttggagagatgacaggtgtggagccagcaattatcggtgcaatcgctaagttggcggcccctgtcctgcctatagccattaaagggatacaaggtgcactgaagaaacggcaagtccgtgacagtgatgttgaaaccctgaaatcccagcttagctacatccagggcatcatccgtgatactcggaagactatcaggagttcccaagacccgtccgacaggcttcaatcctgtgctggatacctcagatgcttggcgtacgacatcgaagacctaatagaaggccgccgtgccggaaccatgacaggtgcgaagcttaatggcaagattactatcatccaggatttaatcagatgtgtagagtcctatccggagtttatggcggttccgacgaatgaggctcctagtcaaggcgctgcttcttcctccactacttcaagcgcccagggctttccgctggctgatcttgtgggcaaggaggacctcgatgagcttctggacctcctcgtccggagacccgacaatgagctggacatggtcctcaataaggtgatggtgatctccgttgtcggcttctgtggcataggggagaccaagctttgccacacagtgtacacggacgtacaggagagcagaaagttctccctgcatgcgtatgtcattgtcagcgctgctgggaaggactgcagcatcgttctggaagagataatcgagcaatttagactgcaagaggatccacaagatagcagtggtggattttttcacagattcgcccgaacgtttcctggggctcgtggactcgtcgtactgaccaagttcatgggttacctgagtatctccaaaggaaaaggtattttgtggtggtggatggcgtggagtctgaagaactggtggatggcatagcatctgccttcccggataatagtatgggcagtagaattatcatgggtatgaggaccgcagtgggcagggatgcagatagatgtgtgggtcatcgtcacaagatgtggccacttgaagacaagcagtcggtggtccgcttcctaaatgaagcggagcgacgacgacgacgtgaacaagatttatcggattttgcagcggattccaaattttattgaaaagcatgtgagtgcgagaggttataagcattgtcttggtctgacttttcaaccgggtgtagcctatgtagacaagcaatcagaagctaaaaacaccggtttcgatcgtccactacactgctcaagttcatccaaaagtgcaaatggaagcagtcttgatacagtgatgtggtgaaaaatacaaatacatctcgatctttctgatt

SEQ ID NO: 121545 - DNA, 2556 bp, Zea Mays
atgacaggtgcgaagcttaatggcaagattactatcatccaggatttaatcagatgtgtacagtcctatccggagtttatggcggttccgacgaatgaggctcctagtcaaggcgctgcttcttcctccactacttcaagcacccagggctttccgctggctgatcttgtgggcaagaaggaggacctcgatgagcttctggacctcctcgtccggagacccgacaatgagctggacaaggtcctcaaggtgatggtgatctccgtcgtcggcttcggtggcataggggagaccaagctttgccacacagtgtacacggacgtacaggagagcagaaggttctccctgcatgcgtatgtcagcgctgctgggaaggactgcagcatcgttctggaagagataatcgagcaatttagactgcaagaggatccacaagatagcagtggtggattttttcacaggtattttgtggtggtggatggcgtggagtctgaagaactggtgagtggcatagcatctgccttcccggataatagtatgggcagtagaattatcatgggtatgaggaccgcagtgggcagggatgcagagagatgtgtgggtcatcatcacaagatgtggccacttgaagacaagcagtcggtggtgtgcttcctaaatgaagcggagcggcggcgacgacgacatgaacaagacgaccactcgtcgttcattaggtttcaggaacaagaccactcatcatcctgtttgcacaaggtatgtgatggcgtaccacttgcgctggttagcgtatgtgaagtccgcagagggtccatcatcactgctgccgttgaagaacaagaccgctggccacacagaatgcccaaggtgctcgaccacagctacgatggtctgcatatccggggtgctgggagctgtccgaaccaatacatcccctatctccaagcctgcctgctgtactttgccatgttcccccgcggcaatcatgtcaagaggggatccctgatcaggcgatggcaggcggaaggcctagagttcggaggcagcaatcaagctgccgaaaacctcaaggccctcgtagaccggaacttcgtttggcccctccatgcgagcctgaatgagcacgccaagacattccagcctcctggagtggtgctcaactacatctcccgcaggtctcaagaggaggaattcatcctcaggtcttgtccaagtggggaacttaatcccaattacagccgccggctttgtctacatcctgccgaggaagaagaaggtgaaccccaacccgtggtcattaccaacggttctgtaccaccacgcctgcgaactctggctgtgtcctgggggcagcaacaggccagcaggattgctgaatgcgagcagctccgagtgctggatctggcgtcatacaatggtctacagccagaccagctagaggagatatgcaagaaactgaagcttctcaaatatctgagcctcctgccagatatcatcactcaagttccaagctcaatgtctaatttgcagtgcttggagacactcgaggtgggggaggtcaatggcagggcggcagttctggtgcctatccaagtcttggaactgccacgcataaaacacctaatcggaaaatttgagcttattgacaacttcaacggactaccaattagggcttatccagatgcactagtaccaaaggcaatcaaggaaagcaacctggagacggtgtcggggttcttcacccgcagaggccaaggatttccgccactcatgcgtcacattaggcagctcaggaaggtgaagatatggttctacagggatgcagaacccaaatacctagcaagctatctcccgaaagcgattacaaaattcctcaggaatgacaacgttcatcgctccctgtcacttgacttccaggatggcccaagacaaacagaaatactgcaggcttgtgtggctgaagctagcggtaatctttactccctgaagctgtcgtccggcacaaatctgagcaggatccaactgtcggttattgccaccaacaagctgactggaatcacaaagctatgcctttcccgctggaaaacgataacgttggatgcagaatttctgaatgagctgaccaaattggccagtctgacgtatctgaagctggatgcagaaacaataaaaggtacgtacgaccaaaacccaacaccaggaggaaataaccaagagaaggtcgtcatagagactgggcacattgcaaatctgcggcggatgtgccttgtggccaggcagacgctgcccgacatacaagtcaagcctacagctctgcaacgactcgtttcacttcatctcatcagtgaaacggacgattattgtccttccgccaacgtcatctgtaaagccaacccccaggacgacaacgagccggcgccgttcacgagcctccaggaagtctcgctgaatgctacggtacccgaaaatttaagggattcttggcgtaatgctgcaagggaccatccaaagaggccacgaattctcttcatccaacaccctcaccgtgcgggataa

SEQ ID NO: 121546 - DNA, 1065 bp, Zea Mays
atgacaggtgtggagccagcaattatcggtgcaatcgctaagttggcggcccctgtcctgcctatagccattaaagggatacaaggtgcactgaagaaacggcaagtccgtgacagtgatgttgaaaccctgaaatcccaacttacctacatccagggcatcatccgtgatactcggaagactatcaggagttcccaagacccgtccgacaggcttcaatcctgtgctggatacctcagatgcttggcgtacgacatcgaagacctaatagaaggccgccgtgccggaaccatgacaggtgcgaagcttaatggcaagattactatcatccaggatttaatcagatgtgtagagtcctatccggagtttatggcggttccgacgaatgaggctcctagtcaaggcgctgcttcttcctccactacttcaagcgcccagctggtcgtgcctaattccaatccgcagacggccggaaggggctttccgctggctgatcttgtgggcaaggaggacctcgatgagcttctggacctcctcgtccggagacccgacaatgagctggacatggtcctcaataaggtgatggtgatctccgttgtcggcttctgtggcataggggagaccaagctttgccacacagtgtacacggacgtacaggagagcagaaagttctccctgcatgcgtatgtcattgtcagcgctgctgggaaggactgcagcatcgttctggaagagataatcgagcaatttagactgcaagaggatccacaagatagcagtggtggattttttcacaggtattttgtggtggtggatggcgtggagtctgaagaactggtggatggcatagcatctgccttcccggataatagtatgggcagtagaattatcatgggtatgaggaccgcagtgggcagggatgcagatagatgtgtgggtcatcgtcacaagatgtggccacttgaagacgagcagtcggtggtccacttcctaaacgaagcggagcgacgacgacgacatgaacaagatttatcggattttgcagtggattccaaattttattga

SEQ ID NO: 121547 - DNA, 3279 bp, Zea Mays
atgtcgatacatatttgcaagaacggttatatgccaggctatgaggtgtgggtgcaccatggttgggtcacccgcagatcaaggagtactggtgttggccttctgatggccgtgcgagggtccacatacatgatcaggcaatatataaaggagccaggattcaatgtagcgaatgagatggcatccatcaaccaggagataagacagattggtagaatgatggtcatatcaggcaatatattggagccgccggaatggattctgcaagcccaagacctggcctgtgatgtgcaggatttcacggatatctacacatggctgcaaagcaaatcgcggaggcgtgcccttgcacatataggctacatagcgcagctgaaggatcggatcagcagccttcgagagtggcaacagagaggaggcagcagcagcagcagcagccagcaggagcgtgctgctgccttgtccttctcgcggcgatcatgcgggccttgcgcccctgaggatgtgctagttggcattgatcagcccagaaaagaactttcggacctcattttcgaaagggaggatgttgtgcatatcgtgcaacagaagcccagggtggtctctgtcgttgggtatagtggcattggcaagacagccctggcaagagcagtctactacgaccgtagtgtccgttctgcctttgacgacgttgcttgggttgtggcatctgagtgcagccatgggtgcgaccttgtaagtaagatctgccagcaggtcaaggacgaacaagcagggaacggtgctgtcgtcgtccctgattgttataggttaaaagagattatgcgggataaaaggtttcttatcgttattgacgaccttcacggagctggcatgtggaacgatataaaaggtgtcttcagtgaaactcacagtggcagtcgaataatcgttaccacgagtattcagtcggtcgccgctgcctgcactcctgagccgcgatacatttacaggatgccaagtcttggtaatttggactctgaaaagctactgtggatgagggtcggcaggcatgcaagccgtacgcctgctctggagcatgctttaggcaacgacaccttgaaaaaatgcggcggtctacctctggcactgatcagtgttgccaatcatttgtgtcttgggaaagcattatttgaggagatggacagggttcttgccaaatgctatgacagcttgcctgacaatgctcacaggatgtgcttgctgtccctgagcacattccctcagggtcatgtgatgaagaggaagaggctaattagaagatggatagctgaaggattggctgtcgtcggagactgtgagctcagtgctgaacaagttgccggtaacatatttgatgtgttgattgacaggaacgttactgagcctgtgctgactgctggccacggttctcgtagtaaggtcaaggcatgcttagttcttggtgtgatcaaggacttcatcaacaaaacggcagtctcaaatgagactgtagctataatccagaacgatgagcttctccttcccaacaggatgctggtcgcccatcgccctgttcgtcgactgcttgttcatggaggcacaacaaagaaaagtgaagctgttgcaaaggcgatcggactggatcagggctgctggttgctgcgggtcttggacctggaggcttgccaggggatcgacaagagcatccttggcagcatatgcaagctggtgtttctcaagtacctgagccttaggggcaccgatgtttacggaatacccaagaaagtaaaaaagctccagtgtttggagacgctggacctcagggacacacgggttgaagaactgcccatccaagtcttgatgctcccacggttggcccatctgtttggcaagtttgagctacctccacagctcaagcatggtcatcgaaccgcaaggaggaggaggagtaggctgcaggcatttttctcccagagaagcaggctgcagactctttcaggattcgtcatggtggatgatagcaacagcttcgagcacatgatgataaccataaagtcactgaggaaggttaaggtatggtgcaagaattcaatctcctcccaccaagaacgccatctcgcttcttcccttcagcaacggctagtagcaggaaacagtaatcccctagaatctctgtcaattgattttggcaatgaatccatcaatttcctcaatgatgttggagctatcagtgcacttattggctctatgaagctacagggaaggctaacctcgctccctagcttcatgacttcgtacgatactacactctcccagctgcagctgtcctcaactggtttgggcatagaagccttgtccctgctgcagatcttacgtcggctggtttctctgaagctcgctcaggatggtgatggattttggggtgactgcttcgctgttaagaaggatggatttccaagccttttacgcctgtgcattcaggccagggagcttccccagttgcacatccatgaaggaggcatgagctctctcacctccctcgaactactctgtcccatgttcgctagtcgcggtcaatctgactctgactctgactctgactctgacaatctgtccccagttgcatttcggtacgcgtacgcggaaacctattcagagaagagatccaaacaagttctttcggtagagaagcccaaagcagttgatcccgggatcagcttcaaggaaccaagttctgagacaagatcagaaggaactgaaattcaggagattgattcccctaaaacgtccaaggaggctggtcccagcataggcttcaaggaaccaagttctgagacaagatcagaaggaactgaaattcaggagattgattcccctaaaacgtccaaggaggctggtcccagcataggcttcaaggatattattcttccggagaacacattcagaagaaacttttcgaagcaagtcaaaagtagatttgatctgaaacaacacttcaagggaatggagtacctccaatgtctcaatgagctggtactacatcgttctgttagcgacgaggtattggatgcctggacaaaacgagcaagcagtcacatcaataggccaaaggtgacaaggcaatgcacaagagcagcgctgtcgattggtagaggcccgggaacagcgaagcacgagaaagaagggcagcacagaagccagctcatgaaaaatagaggttcagaaacagcaatccatgaggagatacaggtcacaaagaagaagaagaagaatatatga

SEQ ID NO: 121548 - DNA, 1275 bp, Zea Mays
atggcgcctgctgctaggacgcgagtgtgcttggtcgcgctggtggtggctctagcgtttctcttcctcttggacggcggtgtgcatgccgcgtcgtcggcggcagagcagcggcggcgacaggttcggagcctgctcaggcgtctcaacaagcccgctgtcgcgaccatcgagagcccagatggagataccatagactgtgtggacatctcgaaacagcctgcgttcgaccatccttccctcaagaaccataccattcagatgatgccctcctgccacccacaacaaggcggcctctataacaagtcaaacgacgttgcgcacagtgctttgacgcaaacatggcatcagaatggcaagtgcccagagaacacagtgccaatccggaggaccagagaagaggacgtcctcgacatcgtccagagatatggcagaaagaagtggccatcgtcttggagcaacgaccctaaccgttatgacgacgacgtcccggacgcagcgagcgtactaagaggccaccagcatgcaatagcatctgcaccgggggatgacaactactatggtacccaagcaaccttcaacctgtgggaaccaacggttgagaggaaccaaggattcagtttggcccagctgtggattaccagtggatcctacgcaaacaacgacctcaatactatagaagcagggtggcaggtttacccaggtctgtacaaggatagccatacaagactcttcgtctactggactcgggatgcgtacaacaaaacaggatgttacaacctaatatgctcagggtttgtacagacaagcaaccagatcgccatcggcgctagcaactcctatttttcccctgtctccatctatggtggctcacagtatgacatcactattttagtttggaaggacccaaagcaaggcaattggtggttgcaagtaggaggccaggatttgggctactggccatcatcgatcttctctaagttgtcaggcagcgcagcctctgtcgactggggaggtgaagtggcatcgtcgccggatgccggccaaacatccacacagatgggtagcggacacttccctgatgaaggtttcagcaaggccagctacatcaagaacatccaattggtagattcgaccaacagtctcaaatcggctagtggtgtgaagttgacagctaagtggcccatgtgctacaatgttcaaaacggtactagtgctgattggggcacttacatcttctatggaggacccgggaagaaccctaactgcccatag

SEQ ID NO: 121549 - DNA, 264 bp, Zea Mays
gtgagcagtctcatcagggtcttctcttttttagaaatgactcatgggtttctcaccatcccttccacttggggatttcaatcgaatggtgaaatggagttaccaatcaaccactggctgaatcagctctcggcctgcccggccttatctccaccggtacaggctagtgaccaccgccgctaggagcacctcgccaggaacgtgcgtacctccctccagtgtatccttcaacccgccatgaatttcttggtttcactcgctgga

SEQ ID NO: 121550 - DNA, 935 bp, Zea Mays
tgtccttcttcctagtaaacatccaatggcacgacggagaattccttacacgtcgaagcacgatttcacatgccatttcctatataaaggcatccacacacacacacacacacacagagcaaacaaagccaacgtgatcagagagggatatatagctagctagctagcatagcatggcgcttgtagccgacgacgacgccgagctcaaggccaaggccaaggccaaggccgaggtctactacggcgacgaggcctgtcagctgtgcgcgcagctcctgctgagggaagcaggcctccccaacggcctgctgccgctggaggacctgacggagtgcggctacgtccaggagaccgggtacgtgtggctgaagcagggcaggagggtcgaccacgtcttccggagcctcggacgcctcgtctcctacggcgccgagatcaccgggtacgccgagaagggccggatcaggaaggtgaaggggataaagaccagggagctcatgctgtgggtgcccgtcgaggagatcgccgctcttggcgacccggcggctggcgggaagcttgtctgcaagagcgttgctgggatcaccaggaccttccctgcgtctgccttccatgtccctgagaaggcggcggcggcggaggaggtgaaggtggactgtgccagggcgccgcccgccacaccggtgctcgtcctcatggacagatcaggagctccaccagttgttaagaacaactgatgcttgcgtgcttacgaacgaaagcgaaccatgcatgaccccccaaccaagttcatttcatcctttcatgcatgtactatgtatgtagctctacatatatatatattgctactactatcaagcatgtatgtcgccgttgtggagacacatctattgatctatacatgagcttgtggaagcagataggtctgcattaat

SEQ ID NO: 121551 - DNA, 648 bp, Zea Mays
gcgccgctgcttaggcagggtgtggcagcttcggcgtcacaccaaacaggcccttaacctgcagctttatttgtttatttacttagttttaattaattaagacttgaaggttagacctgttattttattcacaaataatttgtttcatcaggtaatttggtgaaagttatcatcccacgccctgaccccagcggacagccagttgtaggagttgggaaggtgttcctggaatatgcagatatcgatggtgctgccaaagcaaagacagcgctgcatggaaggaaatttggtgggaacccagtggtcgctgtctgctatgcggaggacaagtttgccaatggggaatatgatggatgaaaatcttatccctcttgaactatagcagtagccggtctttgtctttggctctatgctacctgcttgtttaattgcaacaaagatgaacggtctctcatttaagctgaacctctacctgtattgatatccctggattttttctgagccaccacctgttgtgatttgtgaacgttgtaagaataggtttctttgcttgggttcgcttgttgctgtcgaaaatatgtaacgaatgttattaataaagaatttcttgtatgactttactaccgtgtgtttgatttggtttgagtt

SEQ ID NO: 121552 - DNA, 1410 bp, Zea Mays
ttattatgcctggactactctttgatgttttgtgaccgagtttgtttgaatcagttcaatccccttgtcatccagccacaagcaatgactcaacaggctactcgtcatgctcggcgtgtttatgtcggtggccttcctccatctgctaacgaacagacagtggcaatttactttaatcaagtcatggctgctattgggggaaacactgctggtccaggtgatgctgttctcaatgtatacataaatcatgacaagaaatttgcttttgtggagatgagatctgttgaggaagcaagcaatgcaatggccctggatggcattatgttcgaaggggcaccggtgaaggttagaaggccaacagactacaacccttcccttgcagccgccctgggcccaagccagccaagccccaatctgaatcttgctgcagttggcctaacagcaggatctaatggaggactagaaggtccagaccgtatttttgtgggtggcctcccgtattacttcactgaagcgcaagttcgggagttgcttgaatcattcggtcctcttcgagggtttgatcttgtgaaggatagggaaactggtaactcaaaaggctatgcattctgtgtttaccaggacctcaccgtcactgacatcgcttgtgctgcactaaatggtatcaagatgggtgacaaaacccttactgtcagacgagcaaaccagggggcatctcagcccagaccagagcaggaaagtatcctattgcaggcacaacaacaggtgcagttgcagaaacttgtgtatcaagttggagcgcttcctacaaaggttgtatgcctcacacaggtggtaactgcagatgaattgaaagatgatgaagagtatgaggacattatggaagacatgaggctagaagcaggcaaatatggtaatttggtgaaagttatcatcccacgccctgaccccagcggacagccagttgtaggagttgggaaggtgttcctggaatatgcagatatcgatggtgctgccaaagcaaagacagcgctgcatggaaggaaatttggtgggaacccagtggtcgctgtctgctatgcggaggacaagtttgccaatggggaatatgatggatgaaaatcttatccctcttgaactatagcagtagccggtctttgtctttggctctatgctacctgcttgtttaattgcaacaaagatgaacggtctctcatttaagctgaacctctacctgtattgatatccctggattttttctgagccaccacctgttgtgatttgtgaacgttgtaagaataggtttctttgcttgggttcgcttgttgctgtcgaaaatatgtaacgaatgttattaataaagaatttcttgtatgactttactaccgtgtgtttgatttggtttgagtt

SEQ ID NO: 121553 - DNA, 1801 bp, Zea Mays
gttgtttgtctgttttgtgtatgtgtatggtaagaaggcaaccatgtatggtaacaaggccaatcttgggtcacttgcctcacttctaccagtggaatgagctgcctactatagctttaatgtacaaggaagaatcagtgcgccggtttgatatcgtcatgttcatcttcaactagctagtactaggttactagcttcatgattattacatatttatatttgttcttgcacgtatgttgttaattctttgacatgattactgcatagctggttcttgatctatacagccttttaggagcaatacaccaataccttactaattgctaattgattatgcttcctactagaaatttattgatgccctgcaggtcagttaccaggctcttcgcttcccaacattggtggcatgtttccaaacatgctccctttcggtgttgctgggcagttcaatccccttgtcatccagccacaagcaatgactcaacaggctactcgtcatgctcggcgtgtttatgtcggtggccttcctccatctgctaacgaacagacagtggcaatttactttaatcaagtcatggctgctattgggggaaacactgctggtccaggtgatgctgttctcaatgtatacataaatcatgacaagaaatttgcttttgtggagatgagatctgttgaggaagcaagcaatgcaatggccctggatggcattatgttcgaaggggcaccggtgaaggttagaaggccaacagactacaacccttcccttgcagccgccctgggcccaagccagccaagccccaatctgaatcttgctgcagttggcctaacagcaggatctaatggaggactagaaggtccagaccgtatttttgtgggtggcctcccgtattacttcactgaagcgcaagttcgggagttgcttgaatcattcggtcctcttcgagggtttgatcttgtgaaggatagggaaactggtaactcaaaaggctatgcattctgtgtttaccaggacctcaccgtcactgacatcgcttgtgctgcactaaatggtatcaagatgggtgacaaaacccttactgtcagacgagcaaaccagggggcatctcagcccagaccagagcaggaaagtatcctattgcaggcacaacaacaggtgcagttgcagaaacttgtgtatcaagttggagcgcttcctacaaaggttgtatgcctcacacaggtggtaactgcagatgaattgaaagatgatgaagagtatgaggacattatggaagacatgaggctagaagcaggcaaatatggtaatttggtgaaagttatcatcccacgccctgaccccagcggacagccagttgtaggagttgggaaggtgttcctggaatatgcagatatcgatggtgctgccaaagcaaagacagcgctgcatggaaggaaatttggtgggaacccagtggtcgctgtctgctatgcggaggacaagtttgccaatggggaatatgatggatgaaaatcttatccctcttgaactatagcagtagccggtctttgtctttggctctatgctacctgcttgtttaattgcaacaaagatgaacggtctctcatttaagctgaacctctacctgtattgatatccctggattttttctgagccaccacctgttgtgatttgtgaacgttgtaagaataggtttctttgcttgggttcgcttgttgctgtcgaaaatatgtaacgaatgttattaataaagaatttcttgtatgactttactaccgtgtgtttgatttggtttgagtt

SEQ ID NO: 121554 - DNA, 1983 bp, Zea Mays
ccgggccccggccgaagaaacttgcgagcaacccggcgaaagccccccaaaccctcgcaccctaaaacagcggcgcacaagatgtccgacgaccccaccaacggcggcggcggtgatcgcgtggaggacgtcgtccgcgccgagggtgaaacacaacctcgtgatgatggcttgtcgaaatccaaggatagggacaaagatagagaaaaggacaaggacagagatcgtcgccgagaccgtgacagagatcgagggagagacagggaccgtgatagggatagggacagggacagggatcgggacagagacaaggatcgccaaagtaggcatcaccgtgaaagacgggaacagcgagaccgtcctgatgatcacagagtccgtgattctgaaagaagaagagaacgcgacaaagatgggcatcgtaggcatcgttctcggtctcgttcaaggggtagagatcgaagatctaggtcacgttcaagaagcaagcgagttagtggattcgacgccccacccccgcaagcaatgggttcaacatttccagttattccaaccccaagtcagttaccaggctcttcgcttcccaacattggtggcatgtttccaaacatgctccctttcggtgttgctgggcagttcaatccccttgtcatccagccacaagcaatgactcaacaggctactcgtcatgctcggcgtgtttatgtcggtggccttcctccatctgctaacgaacagacagtggcaatttactttaatcaagtcatggctgctattgggggaaacactgctggtccaggtgatgctgttctcaatgtatacataaatcatgacaagaaatttgcttttgtggagatgagatctgttgaggaagcaagcaatgcaatggccctggatggcattatgttcgaaggggcaccggtgaaggttagaaggccaacagactacaacccttcccttgcagccgccctgggcccaagccagccaagccccaatctgaatcttgctgcagttggcctaacagcaggatctaatggaggactagaaggtccagaccgtatttttgtgggtggcctcccgtattacttcactgaagcgcaagttcgggagttgcttgaatcattcggtcctcttcgagggtttgatcttgtgaaggatagggaaactggtaactcaaaaggctatgcattctgtgtttaccaggacctcaccgtcactgacatcgcttgtgctgcactaaatggtatcaagatgggtgacaaaacccttactgtcagacgagcaaaccagggggcatctcagcccagaccagagcaggaaagtatcctattgcaggcacaacaacaggtgcagttgcagaaacttgtgtatcaagttggagcgcttcctacaaaggttgtatgcctcacacaggtggtaactgcagatgaattgaaagatgatgaagagtatgaggacattatggaagacatgaggctagaagcaggtaatttggtgaaagttatcatcccacgccctgaccccagcggacagccagttgtaggagttgggaaggtgttcctggaatatgcagatatcgatggtgctgccaaagcaaagacagcgctgcatggaaggaaatttggtgggaacccagtggtcgctgtctgctatgcggaggacaagtttgccaatggggaatatgatggatgaaaatcttatccctcttgaactatagcagtagccggtctttgtctttggctctatgctacctgcttgtttaattgcaacaaagatgaacggtctctcatttaagctgaacctctacctgtattgatatccctggattttttctgagccaccacctgttgtgatttgtgaacgttgtaagaataggtttctttgcttgggttcgcttgttgctgtcgaaaatatgtaacgaatgttattaataaagaatttcttgtatgactttactaccgtgtgtttgatttggtttgagtt

SEQ ID NO: 121555 - DNA, 2114 bp, Zea Mays
gccgattaccataaagacttggcccatcacgtttacgggccgctaggaggaaaagaggccgacatccctgctagcctctcgttgtagtaaggagaagaaaaaaaaacaagaataataaaaagccgggccccggccgaagaaacttgcgagcaacccggcgaaagccccccaaaccctcgcaccctaaaacagcggcgcacaagatgtccgacgaccccaccaacggcggcggcggtgatcgcgtggaggacgtcgtccgcgccgagggtgaaacacaacctcgtgatgatggcttgtcgaaatccaaggatagggacaaagatagagaaaaggacaaggacagagatcgtcgccgagaccgtgacagagatcgagggagagacagggaccgtgatagggatagggacagggacagggatcgggacagagacaaggatcgccaaagtaggcatcaccgtgaaagacgggaacagcgagaccgtcctgatgatcacagagtccgtgattctgaaagaagaagagaacgcgacaaagatgggcatcgtaggcatcgttctcggtctcgttcaaggggtagagatcgaagatctaggtcacgttcaagaagcaagcgagttagtggattcgacgccccacccccgcaagcaatgggttcaacatttccagttattccaaccccaagtcagttaccaggctcttcgcttcccaacattggtggcatgtttccaaacatgctccctttcggtgttgctgggcagttcaatccccttgtcatccagccacaagcaatgactcaacaggctactcgtcatgctcggcgtgtttatgtcggtggccttcctccatctgctaacgaacagacagtggcaatttactttaatcaagtcatggctgctattgggggaaacactgctggtccaggtgatgctgttctcaatgtatacataaatcatgacaagaaatttgcttttgtggagatgagatctgttgaggaagcaagcaatgcaatggccctggatggcattatgttcgaaggggcaccggtgaaggttagaaggccaacagactacaacccttcccttgcagccgccctgggcccaagccagccaagccccaatctgaatcttgctgcagttggcctaacagcaggatctaatggaggactagaaggtccagaccgtatttttgtgggtggcctcccgtattacttcactgaagcgcaagttcgggagttgcttgaatcattcggtcctcttcgagggtttgatcttgtgaaggatagggaaactggtaactcaaaaggctatgcattctgtgtttaccaggacctcaccgtcactgacatcgcttgtgctgcactaaatggtatcaagatgggtgacaaaacccttactgtcagacgagcaaaccagggggcatctcagcccagaccagagcaggaaagtatcctattgcaggcacaacaacaggtgcagttgcagaaacttgtgtatcaagttggagcgcttcctacaaaggttgtatgcctcacacaggtggtaactgcagatgaattgaaagatgatgaagagtatgaggacattatggaagacatgaggctagaagcaggcaaatatggtaatttggtgaaagttatcatcccacgccctgaccccagcggacagccagttgtaggagttgggaaggtgttcctggaatatgcagatatcgatggtgctgccaaagcaaagacagcgctgcatggaaggaaatttggtgggaacccagtggtcgctgtctgctatgcggaggacaagtttgccaatggggaatatgatggatgaaaatcttatccctcttgaactatagcagtagccggtctttgtctttggctctatgctacctgcttgtttaattgcaacaaagatgaacggtctctcatttaagctgaacctctacctgtattgatatccctggattttttctgagccaccacctgttgtgatttgtgaacgttgtaagaataggtttctttgcttgggttcgcttgttgctgtcgaaaatatgtaacgaatgttattaataaagaatttcttgtatgactttactaccgtgtgtttgatttggtttgagtt

SEQ ID NO: 121556 - DNA, 1771 bp, Zea Mays
ccgggccccggccgaagaaacttgcgagcaacccggcgaaagccccccaaaccctcgcaccctaaaacagcggcgcacaagatgtccgacgaccccaccaacggcggcggcggtgatcgcgtggaggacgtcgtccgcgccgagggtgaaacacaacctcgtgatgatggcttgtcgaaatccaaggatagggacaaagatagagaaaaggacaaggacagagatcgtcgccgagaccgtgacagagatcgagggagagacagggaccgtgatagggatagggacagggacagggatcgggacagagacaaggatcgccaaagtaggcatcaccgtgaaagacgggaacagcgagaccgtcctgatgatcacagagtccgtgattctgaaagaagaagagaacgcgacaaagatgggcatcgtaggcatcgttctcggtctcgttcaaggggtagagatcgaagatctaggtcacgttcaagaagcaagcgagttagtggattcgacgccccacccccgcaagcaatgggttcaacatttccagttattccaaccccaagtcagttaccaggctcttcgcttcccaacattggtggcatgtttccaaacatgctccctttcggtgttgctgggcagttcaatccccttgtcatccagccacaagcaatgactcaacaggctactcgtcatgctcggcgtgtttatgtcggtggccttcctccatctgctaacgaacagacagtggcaatttactttaatcaagtcatggctgctattgggggaaacactgctggtccaggtgatgctgttctcaatgtatacataaatcatgacaagaaatttgcttttgtggagatgagatctgttgaggaagcaagcaatgcaatggccctggatggcattatgttcgaaggggcaccggtgaaggttagaaggccaacagactacaacccttcccttgcagccgccctgggcccaagccagccaagccccaatctgaatcttgctgcagttggcctaacagcaggatctaatggaggactagaaggtccagaccgtatttttgtgggtggcctcccgtattacttcactgaagcgcaagttcgggagttgcttgaatcattcggtcctcttcgagggtttgatcttgtgaaggatagggaaactggtaactcaaaaggctatgcattctgtgtttaccaggacctcaccgtcactgacatcgcttgtgctgcactaaatggtatcaagatgggtgacaaaacccttactgtcagacgagcaaaccagggggcatctcagcccagaccagagcaggaaagtatcctattgcaggcacaacaacaggtgcagttgcagaaacttgtgtatcaagttggagcgcttcctacaaaggttgtatgcctcacacaggtggtaactgcagatgaattgaaagatgatgaagagtatgaggacattatggaagacatgaggctagaagcaggcaaatatggtaatttggtgaaagttatcatcccacgccctgaccccagcggacagccagttgtaggagttgggaaggtgagtcttgaattgtactatgactagagaggttctcaaaacatggcagaaacatttgcattctattgaattatctctgatgcatggaattttctattgcaggtgttcctggaatatgcagatatcgatggtgctgccaaagcaaagacagcgctgcatggaaggaaatttggtgggaacccagtggtcgctgtctgctatgcggagg

SEQ ID NO: 121557 - DNA, 803 bp, Zea Mays
gtcgtcgatcaatactactacacagtaggaagctaggaggaaatcaaagcaacaaagttgccggccgagagaaccaaaccatgaggcctcaggtgttactcgtcacactggctgttatcgtcgtccttgcagctctgccactcagcaaagggacggaggaggaagacggaggggcggtagtcgccgccgtggacgacgccggaacgagctcgtggccatgctgcgacaagtgcggtttctgctacctgtcttacccgccgcagtgccaatgcctggacttctcgacggtcgggtgccacccagagtgcaagcagtgcatcaggtacaccgccgacgatggcgtcgacatcccgcccgtgcacgcctaccgctgcgccgacatcctcgtcaacttctgcgagcgccgctgcactcccgccgcagctgcttcgatgtctagcgctagcaccaagtagaagaaggatgcatgcatcctcgtcgatgccattgccgggttccgcttctgagaagaagcaaataaatgttgccgctgttgatgcgtgcctctccttaaataaactaatatttctgtaatatttattgtatgtccaactttcttaagtttcaaaaaaataaatgcgctgcttcatataatgcaggtgtccaacatatagagacagaaacactataaaaccagtataagttgatgcgaattaaggtcaacgaacaagctggtatgtaatttttgtgtccattgtcagtttgtattgcaagaatgggcgctgttttttttctttacaaatattaccgatgacatcataaat

SEQ ID NO: 121558 - DNA, 378 bp, Zea Mays
atggcatgcatatgcatccgtctacttggtgctagcagcaactgcggcgggagtactgcagcggcgctcgcagaagttgaagaggatgtcggcgcagcggtaggcgtgcacgggcgggatgtcgacgccaccgtcggcggtgtacctgatgcactgcttgcactctgggtggcacccgaccgtcgagaagtccaggcattggcactgcggcgggtcagacacgtagcagaaaccacacttgtcgcagcatggccacgagctcgttccggcggcgtccacggcggcgactgccgcccctcctccttcctcctccgtccctttgctgagtggcagagctgcaaggacgacgacgataacagccagtgtgacgacgagtaa

SEQ ID NO: 121559 - DNA, 396 bp, Zea Mays
atgaggcctcgggtgttactcgtcacactggctgttatcgtcgtcgtccttgcagctctgccactcagcaaagtccaatgcctggacttctcgatggtcgggtgccacccagagtgcaagcggtgcatcaggtacaccgccgacggtggcgtcgacatcccgcccgtgcacgcctaccgctgcgccgacatcctcgtcaacttctgcgagcgccgctgcactcccgccgcagctgcttctatgtgtagcgctagaccaagtagaaggatgcatgcatgccatgcatcctcgtcgatctgcatgccattgccgggtgccgcttctgagaagaagcaaataaatgttgccgctgttgatgcgtgctgcctctccttaaataaactaatatttctgtaa

SEQ ID NO: 121560 - DNA, 2136 bp, Zea Mays
gcgggaggtagcgatagggatccgcggcggcggttgtttgccgggaggctggcaggcacgacgtgcacgaggcggctggaacctcggcggggcagttagccgtgcgcgcgcaggattcgcgggaggcaggggcgagcgggggcagtctacacatgactcttaatatttgtagagataaagaatacctccaagaagacttggggaggtcaatgtcacaatcagcttttatcatgtagtaataagcatctctctaacaagtaacaagtacaaagactagttctttcctcttcccacgacccacatcttctctttctcctgtaaaagaaaagaaagggcaatcccatggcaaaaacttcggaagtgattgcagggatagccctgggcatcccactaatgaacggggtgctggtacccatcatcaccatcctcgtgaacagattcttctccatcctcctcaccgacacatccagaaaactcagtaacctggagaacctcaccatcccaagtctgaaggagactctggtacaagtggaggagcagaggatggtgagagcacccaaagatgcgcagtccgagtctgatctgaggactctcgatgggctgacgacggagctcaaagctgccttgtacgaagcggaggaaatcctggatctggtagactattaccggatcaagaagagaatagccgatgacgccgaagagaatggaagaagccgctgggtgcagcagaccctccgcgcttttcgcacctctatggcccgctgccagggcagcagctgggtgcggcacctgcacgactgcgtcggcctttgcgtcgcctgctgcaaggggaccttgttcagaagatcaggtgagcagcttccaatctcccatgcgtcctccgtttccatggcgcagaggctccgtggctggtataggcacctcgtgcaccatatccccagcagcagtcgatctgtgatgcagtggctccgtcactggttccagcacctcgtattcaacttcgctaagctatgtgaatccggcactcagacgctccctggtttgccggccgccgatgtgattgcaactaaccaggattggtcatataaagttattggcatcaacagtaatcagaacgatggcacagcaacagcttctttcttgctaaccattgctagacataacttgacgaaaagaatagagcacatagaaaacgttctcaatgatttgaagaaatcacatctgttgaatcagcaaagcaccatcagcagcagcagtaacaaagaaaagagtagcaggcatgaggatattcagtacctgtacagaagcattgagcggaaggtaattggtcgagataaggagcgtgagaagcttatcagtatgcttcgtaggggacctggtccggacacaccaagctccagtagcagtaaacattattctgtgattggtatatatggcattgcagggtctgggaagagtaccctggcacaatatgtctgtgattatgagaaggccgaaggccaacattttgaccctgtcatgttcattcatgtgtctcagacatttagggtggataagatatttcgtgacatgctgagggagatcaggaaggacaggcaatctgacagcaacagtgttaaatgcctacacgatgagctgaaggaaaagttgagaggaaaatgtttcttgttggtactggatgatctctgggtcagtcgtgagaatcaggaggagcgtgctattctacttactgtgctcgatgctgggcagagtggaagtcgggttctggtgacagctcagaagaaagatgtagctgcagcgttaggcgctgaggagcagatcccgattccggatatggaagaggagcagtacttttcgatgttcatgcactacgccctagaaggtcacggaggctgacattgaagaatttgaagctaaatatagagggtcagattctgagaaaacggacttgaaggaactctacacaaaatataagggcaacatgaacaggaataattatctcttatatcatattgtaaaatctgaaacagttctcatgtagatggttagcttacattttacgctacaattacctcagatcacttcttgttgtatcttacaccaatttacgaaatttcttgatgtgttttatgacaa

SEQ ID NO: 121561 - DNA, 912 bp, Zea Mays
atatagatcgatcgagtggcgacgccgcgtcccctgctcgtcaacacaacgcatctctcccctcgccgccgccgaatccagcgctggtggtgggtccaaccgtgcaagaggaacgccggcaagcgtggacgacaaatgtctgctcacactgcgtccgcaccggcacatccggcagaacctggcgacggtggcatctcttcgctgtggccagcgctcaagttggattcaggcgccagcgtccacatcgtgcgtgaccccagcctcctctccgacctccgcgacgcgccggaggagctgttggtgacggcggcggcgcacggcggaaacaagatgaccgtcaacaagatcggtgacatacgggtactcgaccgcttcacgatcccgaacgtctacctcctgccagagctcagggacgacggcctcatcagcgtccggcagctcgcgaggcagggcatctgcacgttcttcgttggagaccgggcgaggctgtacgcggggaccgacctggtcggcgtcgccgtcgctgagctagacgacccgtacggtctttacgtgctgcactctttgttcgtgccgaagatcatcgcttctgctcggcgggcctgtggtggccgcagctggtggtgtgcttggcgttggcgaccgtcctttgctgctgacgatgctggcgccgccgccaccgccgctgacgaacagcaagagaacatgctatcgttgactgattcctatcgttactgattaggaagaagaagacacgacgacaacaacaaccagtagtctcgtacatgcattataggggacaaatccctatattttataggatcaagcaatttgtgtcattgattataaatcatgcggtgataatatcttaataataatatatatataggatcaaacgtagagattgtttaa

SEQ ID NO: 121562 - DNA, 2928 bp, Zea Mays
gctgccggtgatggcggcggaggagctgctgcggaagttacgggagctggaggaaggccaggcggagctcaagcgggagatttccaagctcgtgccggagcagcagcaacagcaccaccaccaccactaccactcctcgcgccgcccgccgcagccttcgccggtgcgccgcgccctccccgcggcgccttccttgccgtcgcggctgcagcgcgtgggccgcgtcgggctcactgaccgccagcacatcagggccctgcacgcgctgggacaggccgtgcatatcattgcccccggcgggaagctcatttactggaaccgttatgccgagcaaatgtatggctattctacatcagaagcagtcggtcacgatgccgttgagttattggtccatcctgatgatgctgaggcagcaaacaatataattgggaatatatttatggggaaatgttggagagggaagtttcctgttaaaaagaagtcaggagagcggtttttcattgtggccaataatactcctttgtatgatgatgatggaagcttggtaggtctcatttgtctctcagttgatacgaagacattagaagatataatcggcccttcaacttcaatgaagtctcatacacatccagtgaagcctcgctttcaagtcaacaatcggcctaaatgcaatttgttaaataaaagttctattgagtctgagcaaactgtccaatcttctatagcctccaagataacaactttggctaccaaagttacaaacagagttcgttctcggatgaagacaggtcagaactgcggcgggtctgagtgtccgtactctgaagatgattccaaggaagaactgacatctagtggaaacacccctagaggtgatgtactgcatggtggcattgttaaaggagataatttccctgggaagtcgagtaaaacaagtagtgaagactcaggggacggaaacgaaaggctttgcaagattagttcaaagacagaggacttattggccaagaaggggatatcatggccctggaaagggcacgaacatagtggtcctgacaagggtcacatgaacccattgcagttccatgataagcaagacaatgatcagatacatctggtcggtccagagtcaattataattccagactaccaagattctgatagcacccaggaaagcagatatgaagtaacgggtaactggtggtctttcaacaacgatagcttcaatagtttgggtagcagtttaagttctaatagcagtgctattgagagagttgatcttgaagcagattgcctagactatgagattctatgggaagacctagtacttggagaacaagtaggtcaaggttcttgcggaacggtgtatcatgctcagtggtatggctcggatgtagcagttaaactattctctaagcaggaatattcagatgaaatgatagataccttcagacaagaggtatctctgatgaagaaactacgtcatccaaatattatactcttcatgggagcagttgcatctccagaacgactttgtattgttacagaatttcttccacgggggagtttgttccgcttacttcaaaagaacactgccaagctggatccaagacgacgagttcacatggctatagacattgcaaggggtatgaattatcttcaccattgtagccctcctattgttcaccgtgatttaaaatcgtcaaatttgttggtagacaagaactggactgtaaaggttgcagatttcggtctttcacgtctaaaactcgaaacgtttttacgaacaaaaactggaaaaggaacgccacaatggatggccccagaggtgttatgtaatgaaccttcagatgagaagtctgacgtgtacagctatggggttattctatgggaacttgtgacccagaagataccctgggataatctcaatacaatgcaggttattggagctgtcggctttatggatcagaggttggacattccaagcgatacagatcctaaatgggcatcgatgatcgagagttgttgggataggtaagcatattgtttttccctactaagcaacaactagttgaatgcatatggtggagatcatgtttgaagaccataggaagcccaaatcaattttttttgagaaaatcatagttccattctgatgaacagtgtgattagaagtccctgatacatgtatatccttttatttgagcagcgacccgcagaaacgcccttcgttcctagaggtcctggacaggcttagagatctgcagaagcagtacagcctgcaggctcagatgcagcgtaacctgtccgcggatgctctcctgaaaggcgctgtgaaatgagcgtcgaggaatgctagctctcggaatgtaatggaacatggcactggacacattgacagcgaccagggcaagcgttcatcgacatttgtagcgtctgcgtgctgatgaggaaggctggctacgtgcatcttggtggccttcgtatagaagaggaggagctacagtccggactccggaggctgtaccggcaaaggcggccggtgcatgcatggcttcatgtatctcaaggcctcaacgaagcttcataatgcggtaatcttcggccaagaaggccggacacttgtgaaacgagaatggctaagaaggccggactactttttgtattaacgccccagtttttcaatgggggaaaaatcgaattgtttataaattgtatacttagtctcgataacgttcttgcctgcatatagaaccgggtgtcttcagacgcatggatgggtggtagtagtgtgttcagatgcatagaaagatggtaagcatgtctctgctgctgctttccttactgaatggacctttgatgtcgtcgctcattgcagcgttttctgaacagtgaccacattacagccggctgcacgcctgcacttgc

SEQ ID NO: 121563 - DNA, 634 bp, Zea Mays
ggtactgggttgagcagcactcgaacccaggccggcagcgagcacatcggctacgctagcccggtgatgcccgtcgccgagaccgcgacggtcttcctggagacgagcctcggcacccgcctcgtcgtctgcttccccgcccgcgccaccaccgtcgccgacctcaagcgccaagaaagcacggagcatgccgcatgtttcccccgcatcggcccaatcgccgtcacatccttgcagattgagctggatggttcctggtttctgctcactgattccatggttgtggaagctgctttggaatgggtcaaggggccaaggcgcctcctagttgaggcccacgagcttcttcctcacccagttgctcgcaaggatgccaattgccaagtgtgtaactgttgactattccaagcttcgtccttaatcagttttttgctgccaaatttgggtattgctagtttgggcatataccaaatataaacctcttgagaatacttggaaatttagagaagcaaggatgccatgtaaccctcttctgtgttgggaagcaaggtttacatgtaccattatccttttgtaaattaaaggatccattttgtcccaaaacattggtagtaatactaaacaaattataatt

SEQ ID NO: 121564 - DNA, 1364 bp, Zea Mays
gccgctcgctattcagccaaaccacgggggttccgcccgcgaaacaaccccgcgagttaaaaactcccaccacctccacgcacgctctcccacgcttcccgttccttctcccagacagacagactccccagtccccacacaccaccatttccccccactccgcccatccgtccgtctccgtggctcgcctccacgccccgtaccggcgatggccgccgaggcagcgtgctgcgacgacagcgcctgctcgacgcccttcgtgagcgcgccgtccagccccgcccgggacagggacagggaaagggacacctacccgtcccacttcttcttcagcgcgccgaccagccccacccgcggcaaggacgccgccgtcccggacctggacttcgacttcgacttcgacttctcgtcgcgcttcccgtcgccgtccgccgccgccatgtgctccgccgacgagctcttccacaacggccagatccgcctcgccgccgcgctgctgctgcagccggacggggacgcggacccggacccggaccccgccgcgggcgcgcagcacgagaaccagcagcaggcggaggcggcggacgagcgcgggcgcgtgcggagccgctccgtgcggcgcaaggcgcgctctatgtccccgttccgcacgcactggcggtccgcgtcccaagtcccggtgccgaagcccgagtccgccggcgagtcgcagcagcagcagcagccggcggcggcgtcgcgctcgtcgtcgtcgtcgtccaccgcatcctcgtccgcctcgtccgcgtcgtcgtccaggggctcccgccgctggagcgggttcctcaaggacctgctccaccgcagcaagtcggacggcggcaagagcagccaccagcagcagcagcagcagcagcagccgcactcccaccaccaccactgcgctggcgctcccccagccgcggcggcgccgtctccgtccccgtctccgtctgtaaaggttgggaggggcaggaggaggtccgcgcacgagcggctgtacgaggcgcggcgcgccgaggccgaggagatgcggcgccggacgtcgctgccgtaccgccagggccagctcctcttcggctgcatcgggctcggcggccgtagctacggcatcgccagggggatcaacgccgccgccgctgtctcctccaggtcgtagtgtgtgtcagtgtgggtggtggtggtggtggtggtagtgtgtgttcagtgtggttactcttcagtcactactgtgaactagttagtggcaaccgtgtttaaaaaaaagggcttgttccagtgaaccaacgatcttcgcttctgtgttttagttactattgccacggcaccaaaaaaagaaaaaaaaa

SEQ ID NO: 121565 - DNA, 508 bp, Zea Mays
aaacttgtcaagcttttccaagaaacctagctagctagctagtaagaggcacaggccggcaccatgtcgcaccaccattcccaccacaaatctcattctcacaaccgtacccaccaccactctcactctcactccggaggaggtggaggcggcggcggcggtggcggtgccggtggaggcggaggcggagtggctaaatgccactgtgattgctcacaccatgatcattcaccgccaaggcaaccgttcttcccgccaccgcagcttccaccaccacaaatctttcttcctgcaggaccaccgctccctccgcctgggccgctcccatttccgccaccgatattcttcggacctccgccgccgccacccccgcccccgccaccgttcatgtgcccacgaccgccaccatgcatgtaccggaggtggtaatggagataaaagttgatatacacggtgtgcatgtgtttgtgccaaagcttctcgtacgtggtgttcgagtttctgtaac

SEQ ID NO: 121566 - DNA, 2089 bp, Zea Mays
gcatgtggttcacctccctgctggtggtggacgacaaatatcaggctggcattcacgtagaatgtgcggcaaagactgatgactgatgagtgatgactggtgaggaaccagacaaatgatgagttgaatctttcaaagtttgacagttcagtctccaatttttttttctcaaatcattggtactgtgtacaagcttgaagcttcctggaaacagcccctcctccacgggtttgttcaaccatgtgagcttccacaccagtacaggtcatcagtgtcttggactttctctgccactcccagaccttggtatcctttttaagggcgctcattctgtcattcaccacacctgtctcgttcctcactaccacaggtccaaagcaagcaagaagaaacgaaggacgataatggctctggtcgggcaggtggcgacggtggcgcagctggtgggcgtggacgcgttcagcctcatcacgatgatcgcggaggcggcgcagacggcgcggcggaaccgcgccgtgtgccggcagctggcccggcgcgtggagatgatcggcagcctgctccggcggctgcgcgagcaggacgacaacgacgacatgcggctgctgcggcacgcggagacgcgcggccccgtggaggcgctggaggagacgctccggcgcgcctacctgctggtgcggtcctgccagcggcgcgggtacgcgttccgctgcctgatgggggcgcggcacgcggacgagctccgcgagatgcagggcgagatcggcttctacctcgacctcttccccctcatcagctacgtcgactgggcgaggcgtcgcggcaacggcaacggcaaggccgcctgtggtgacactcgttctttgcaagaggcacctatggtaagaccatgtcttgtgccgttcctgtttctctcgctcctgcgatggatgcaattgttcagggagtacgtcatgcacctgctctgcttatcagcttatgtttactgacgtgtgtatctgtgaaatcattttgcatgttaattttcattaacaatgatctagctagctagctagcaccttaattttcattgctgggaaacaagctagctagctactagtatgcagctgttgttggtcctctgtttttcggactactatctgtcgagttcaggtgaaattgcctttcttttttgaaccagattaaataggtatgttggaataatcctatttttttcctcttgggaacgcaaccagcacacgttcatcaggagtgtttctgtttggcctggctatctgtttcggtttggatacatacagatagcttaccttcttggttcatcaggagtgcaaagttgcaggatctcaggcggcgctgacgatgacgcagcagccctggagccttccacggccgagcaaggacgagtaggaaggagggccacatgcgtcgtggccccgtgacacctgcttcacgttctctcaggttgcaacaaagtagcggagggagatagctcgagatgatacatttttgcgccatatgtggaagaaaaatctagactaatgtatagtcaagtcaagcaaaaatttggatgatgaatatctgtagcggccagcagcccaagcacaggaggacatatcatatgtaatgtgagagcaccacataatataactgagtacatgacacacacacacatgcttcacaagattcaaatacaaaatacaatcacaccacgtcgagggttgcatagatttagctcgacgtccttattcatctttgcactacacacatgcatgcataaacatgcatggcttggccataaacatgaacatagatacggctacctccaccatcccagaatgattgaaacgattgaaacagagacaagtgatgagcaacaaggcaatctagtttcctccacccccacctcctcctccagtaccaccaccaccaccgcctccaccgccgccacctccgccgccgccgcctcctcctcctcctcctccacctccacctccaccgccccctccacctccgagagactggtggagttgctgagcaagtatccttgaagaagccatttgcctagctggaatatggcacacttgctgat

SEQ ID NO: 121567 - DNA, 1844 bp, Zea Mays
gcatgtggttcacctccctgctggtggtggacgacaaatatcaggctggcattcacgtagaatgtgcggcaaagactgatgactgatgagtgatgactggtgaggaaccagacaaatgatgagttgaatctttcaaagtttgacagttcagtctccaatttttttttctcaaatcattggtactgtgtacaagcttgaagcttcctggaaacagcccctcctccacgggtttgttcaaccatgtgagcttccacaccagtacaggtcatcagtgtcttggactttctctgccactcccagaccttggtatcctttttaagggcgctcattctgtcattcaccacacctgtctcgttcctcactaccacaggtccaaagcaagcaagaagaaacgaaggacgataatggctctggtcgggcaggtggcgacggtggcgcagctggtgggcgtggacgcgttcagcctcatcacgatgatcgcggaggcggcgcagacggcgcggcggaaccgcgccgtgtgccggcagctggcccggcgcgtggagatgatcggcagcctgctccggcggctgcgcgagcaggacgacaacgacgacatgcggctgctgcggcacgcggagacgcgcggccccgtggaggcgctggaggagacgctccggcgcgcctacctgctggtgcggtcctgccagcggcgcgggtacgcgttccgctgcctgatgggggcgcggcacgcggacgagctccgcgagatgcagggcgagatcggcttctacctcgacctcttccccctcatcagctacgtcgactgggcgaggcgtcgcggcaacggcaacggcaaggccgcctgtggtgacactcgttctttgcaagaggcacctatggtaagaccatgtcttgtgccgttcctgtttctctcgctcctgcgatggatgcaattgttcagggagtacgtcatgcacctgctctgcttatcagcttatgtttactgacgtgtgtatctgtgaaatcattttgcatgttaattttcattaacaatgatctagctagctagctagcaccttaattttcattgctgggaaacaagctagctagctactagtatgcagctgttgttggtcctctgtttttcggactactatctgtcgagttcaggtgaaattgcctttcttttttgaaccagattaaataggtatgttggaataatcctatttttttcctcttgggaacgcaaccagcacacgttcatcaggagtgtttctgtttggcctggctatctgtttcggtttggatacatacagatagcttaccttcttggttcatcaggagtgcaaagttgcaggatctcaggcggcgctgacgatgacgcagcagccctggagccttccacggccgagcaaggacgagtaggaaggagggccacatgcgtcgtggccccgtgacacctgcttcacgttctctcagattttaattttatgacgcacagcgaaaagcccaaaaggaggggggggaagatgctgtcgatacagatcgttcgatccacacgggaagatctgaagcatgagagcatgtctgaaacagtcgagatgtcagacatgtcctgccgccattttattttttacccgctcatgtacgggggttatttttttttcgtatttctttcctcagcggcgctgcagaatagaaccgatcgaggcggagttgtctgtcatctcatcatctctcagtaatattcacacgcgctgcgtctctcccaagggcgccgccaacttgtacatatagcagcatttttttttgggtttttttaagatggtgccctcgattttggtggtgtgctcagttttacc

SEQ ID NO: 121568 - DNA, 1842 bp, Zea Mays
atggcactctggaacggcataggtcaggtggcaagcatcgcacagttagccggggtcgatgcctatgggctcatctccatgatcgtggaggctgcaaagacggtgaagaggaaccgggagacctgccagctactggcacgccgtgcaaggatgattggggaccttctacatcagcttgaaaggacacagctgatgcagcacatggagacgaggaacccagtggagcatctggaggagacgcttcggcatgcgtatgtcctcatcacatcctgtcgcaacagcagctacctatacaactgctgtatgggagggaagcaggctgatcggcttcgagaggtgcagaatgagattaccttctacctccaacttttcccccttgtcagctttgtcgacaacacccgtacttgggagcggcttctgagtagagcttgtcctctgtgcacaacagaaaacatggatgagttacatgcagcagcacatcatgtggaacatgaagatggatcagaggccatcaaggcaactaaattcgaaaatctcggaagtcatcctaccctaaaacctgacatagatcaaatggaaggccaagtcatgaggatgggaggattagtaaatctcattggtggtacaaaaggagcagagttatcatgttttaccttttctcatattttggcggcgacagacaacttttcagagaaaaatttggttggtaagggtggatttggttatgtctacaagggcaatcttattaatggtcttaacgttgccattaaaagatttgatgcatgttcatcatatcaaggtccacatgagttcagaactgagattgatgccattccaaatcttcgacacaagaacataattggtctacttgggtactgtgttcaaggagaagaaagcatacttgtctatgaatatatgtcaaataaatgcttggcatctgtcattgctggcaagtttttgttgacttaatgcctctttcctcttttctgatcattgttcagcaagtactacccacatatttctgctacaaacgcattgatggtttttgtagatgaaacaaaaagggggttgctaaattggtccaagcgtcttcaaataatcaaaggcatagcagatggtcttgcttttctgcatgggcattctcagatgtgcattgtccacagggacataaaaccaagcaacatcctgctggaccatgaaatgaatgccaagattactgattttggtctggcattaatgttggctccaaaatcgactgcagaggttcctgttttgggcacatatggctatgcagatcctgaatatattgttactggaaaaatctcggagaaggcagacatatatggatttggcatagtactttttgagataataagtggaaggtcgatccattcttatatgaaggcagagggcactcgagagctaccataccctgcttatgcacacaaatacaacccaaagacgctgcacaagcttgttgatccattgttgcgcgtggacgagcatgaacgggctcagattatggaatgcgtgagggtggcgcagttatgcgttgaccatcgtgccaagcatcggcctgtgatgtcagaagttgtcaccatgcttggcatggcagcatcaaagggatagttgtagctttgcaagacccacaaagggatagctgtgaatgatgcaagtgtgaactaattaatgagctctactcaactattttcccccttctcatgcatgattgtgtaaacatcagggagattagtcagtgaaatatttggcatgcaccttacttgagcgctgtggctaataaattgtggttggctggaatgcaaattgctccatggtgttgtt

SEQ ID NO: 121569 - DNA, 3198 bp, Zea Mays
aggagcggcagttagggttaggaaaccctaaccggccactaccttcccaaacggcggcggtcagcacctggcggcggtgggcgcgaccccggtccccggcctcccctggcggtcgtacgggcagcaccgacgcgaggccactcggtccctcggcgtaggccggcgcacgcccgcggcggcatggcgtcccggtgacgctggcggccagggcgtagctctctggcggcgcgggcgcggctgtgggtgtagccccggcgtcccacggcgtggacacgaggcgtggccggtggagccccggtgcagcgcggtcgcgcacccggctcaggccatcccggcccaaatggcgcggcggcgccccctggtggccggatccgcccggcatggccaccccacaaggggcgggcgcagctcggcggtccccctgcgcaggctcgcgcgaaccggcgcggcttcctggagggcgcgcggctccctggtgcgatgaggggcggcggctggggggcttgggctccctggtggcgcgcaggcgcgggatcagcccgactcgggcggatcggctactgccacggcgcggagggtccggcctcggcggctcggcggcccccagccccggctacctggcgcggacggtccggccacggtggcacagggcgcggagggtccggcctcggcggctcggcggcccccagccccggctacctggcgcggacggtccggccacggtggcacagggcgcggcccctgttgacgcgctagcgcggtcccctgacggcggcgcgcgggctcgcggccctcctgcgcgcgcgagcacggccccccggcggtggtccggttgccaggcgcggcgagcccgctgtgtcctcccggcatcagcgcgggcgtatggcccctcggcatggcggccccctcgacgtgcaggcgcagtggccctgtcaatgcgctgccccgacgaccggtccggcgcgggctaggccagcgcgtgtgcgcagccccgacggggcgcagtaccatgggcaggacgcgtgcgaagcccccgcagaacccctggtggcccgtggccctgatccggcttggaacatggccggtggccccgatgagccatggccgtgaatggcgaagcaaccatcagaaacaagaaagattaaacaaaatagtgataatgcgtaccacataatccttctgcacatttctgtttcttaacttctgtgagcgattccttctctcagcaacttcaacttctctctgtttctcacgagcagtgctgataacgtgttaaactctatcacaacgctcagtggcaaatgaagattaacagagacaaagacaaatcgctgggacaatcctttattgcagagtagtgaagtatatatacaagagttcccaaggggtgtgtcccttgggaaataactgtcactacgacatatggatggattagatcacatgtataaaatgttttataacaatgtgaaaccacatctgtggaactttcagtgtgtgatgactgggtcactggtggaataccgtgttttctgagctggtcgctttcagttcgcggccaaagtcgatagctcaactatcttttgagtttagctcccaggttctttggcttcatttcaacaagcccgatcttcttctgacctctaaggtaaacctgcgaggaaaccattcccaaagagcatggcactctggaacggcataggtcaggtggcaagcatcgcacagttagccggggtcgatgcctatgggctcatctccatgatcgtggaggctgcaaagacggtgaagaggaaccgggagacctgccagctactggcacgccgtgcaaggatgattggggaccttctacatcagcttgaaaggacacagctgatgcagcacatggagacgaggaacccagtggagcatctggaggagacgcttcggcatgcgtatgtcctcatcacatcctgtcgcaacagcagctacctatacaactgctgtatgggagggaagcaggctgatcggcttcgagaggtgcagaatgagattaccttctacctccaacttttcccccttgtcagctttgtcgacaacacccgtacttgggagcggcttctgagtagagcttgtcctctgtgcacaacagaaaacatggatgagttacatgcagcagcacatcatgtggaacatgaagatggatcagaggccatcaaggcaactaaattcgaaaatctcggaagtcatcctaccctaaaacctgacatagatcaaatggaaggccaagtcatgaggatgggaggattagtaaatctcattggtggtacaaaaggagcagagttatcatgttttaccttttctcatattttggcggcgacagacaacttttcagagaaaaatttggttggtaagggtggatttggttatgtctacaagggcaatcttattaatggtcttaacgttgccattaaaagatttgatgcatgttcatcatatcaaggtccacatgagttcagaactgagattgatgccattccaaatcttcgacacaagaacataattggtctacttgggtactgtgttcaaggagaagaaagcatacttgtctatgaatatatgtcaaataaatgcttggcatctgtcattgctggcaagtttttggggttgctaaattggtccaagcgtcttcaaataatcaaaggcatagcagatggtcttgcttttctgcatgggcattctcagatgtgcattgtccacagggacataaaaccaagcaacatcctgctggaccatgaaatgaatgccaagattactgattttggtctggcattaatgttggctccaaaatcgactgcagaggttcctgttttgggcacatatggctatgcagatcctgaatatattgttactggaaaaatctcggagaaggcagacatatatggatttggcatagtactttttgagataataagtggaaggtcgatccattcttatatgaaggcagagggcactcgagagctaccataccctgcttatgtaagtatttgccttgccgcagcacacaaatacaacccaaagacgctgcacaagcttgttgatccattgttgcgcgtggacgagcatgaacgggctcagattatggaatgcgtgagggtggcgcagttatgcgttgaccatcgtgccaagcatcggcctgtgatgtcagaagttgtcaccatgctt

SEQ ID NO: 121570 - DNA, 643 bp, Zea Mays
gctggatatgagcttacaagaaagttttgctaccatatcaaggaaagagacactgtaagcaaagatgaagcgaaagaagagatttttcttccttctgctaatgaaatgatacatagctctcctgcgtgttcgagaaaaaaaaaattgaactatctagtctccacatcatctacattttgggcggctgacaactgaagcatcaatcattctgtcaccttcattcatcacccagtttcgattcggagccgaggaggttccatttccgcggagaaacggtgcactattatgacatcagtagaagatgttgttatgtttcgaaaacaagaccatttcttgcgagccctaaactcaaatcaatgtggaattgtggatactgtatctgggcactccctgtgtggacagcatgctgttgccacagttgacgtctttgtaagttgtaaccgtgagttatctcaagcgaccggctggtgtttttggtcatgcttttgatctagccgtggtgttcagagtcagagatcgatgaagtacaacatattgcacatgtaaaataaatgcatcagttaccgattcctcatgtacacgcttgactgctcggttttgctcctggactccatgccatgcaagggaaaaaatgatcacttag

SEQ ID NO: 121571 - DNA, 1719 bp, Zea Mays
atgagcatggccaccacaccggaggaattcttcatcaaggatctcatggagcagccaccattgtccccacctgtcttccttgacctcccccacaagcccaatgccagcaatgaggaccggcatcatgtccctaacaatgacatgacgctcccttacatctcacgcatgctcatggaggacgatgacgatgagcttggtgatcaccctgcgctactccaggtgcagcagcccttcgctgagatcctctcctcccctccccttgttggcaataacacaaacaacagcgaggggccgaatgatttcttgcatgaaggtacatatgagctgctggatcaaaccgaggaaagcaacattattaatagcagggtcaacagagctgtgatgatgacgaccaatgagctagaggacagatgtgccaacgagatggtcgacaaaatgatacttcatgcctacgagacatgcatcgggggcatggagcgtgtcaccatcgatgtggagaagagaaacaggaagcggaaagcggcggcggcggcgaggggcggtgtggtcgacatacgtagggtgttgacctcctgtgcgcaggctcttgcagcggatgaccacgcgacagcgcgtgagctactgaagcggatcaagcaacacgcttcagcgacaggggacaccacccaacgactagctcattgtttcgccaaggggctagaggcacggatactgggcacaggtggccggatctggccgttgcttgtgttggagtacccctccggtgtggagctcctcaaggcctacagcctctactctgaagcttgctgcttcatcaccgtgacgttcattttctcagcaatgatcatcatgcaggccatggcaggcaagagcaggttgcacatcgtggattacggcacgcggtttgggttccaatgggctggcttgctccgcctgctggcgagtaaagaaggcgacctgccggaggtggagatcactgccatagcccgccccacgcccatttgctacccaggcgagcagattgagaaagtagggtcccggctcatgcaatgtgcccatgagcttggcttgccttcattcaagttccacgcagtgaccaaaaactgggaggatgctacttgtaccatggaggatcacttgcacagagacgccgacgaggtgcttgtcgtgattgacctcttcagtttcagcatcttgatggaggagagcatgttcttcgacgctccaagccctagggacactgtcctctgcaacatcaggaagatgaggccagacgtgttcatccagagcgttgtgaaccggtcttatggttcctccttcctgtcacggtttcgggagatactcttctactgcacggctatgttcgacatgttggacgcaaccttgccgagggagagcgaatctcgactggtgttcgagaaactcgttctgggatgctacgcgttcaatggcatctcctgtgagggcagcgacctcgtgctgcgccctgagaagtatagacagtggcaggcaagaaacgagcgagcaggcctacggcagctgccgctgaaaccaagcattgtgaaggttgtgaaagacgaggtcatgaagcattaccacaaagatttcttggtttgccaggatggccaatggcttctgcaaggatggatggggcgggtcctcactgcccacacgacatgggttgcgaacggagacgcctcttctggatgaagccgaagc

SEQ ID NO: 121572 - DNA, 2190 bp, Zea Mays
ttgatcaccatggccaccacacctgaggaattcttcagcaagggtctcatggagcagtcaccaccatccccacctgtcttccctgaccttctcgagaagcccaatgacagcagcgagggccagcaccatgtccctaatgagatgatgctctcttacgtctcacacgtgctcatggaggacaatgattttgatgataagttcagtgatcaccctgcgctactccaggtgcagcagccctttgctcagattctctcttccccttcctctggcactgacactggcaacagggaggggtgcaacgagttcttgcatgaagtcaatgttgataaaagcatgctcagttcggctttatccaagggcacagatgctgcggggacattcttgaaaggcatggaagaggccaacgtgctcctgcccaaagacaacaacttcagaagggatgagctggtgaatcagacggtcagggaaaacagcagtcacagcggcgtcaagaagagacatagcagggatgatcatctacaaatggagataagaaccagaaaagctgctatgacggtgatcgaggagccacaggagaacttggccaatgagacgcttgatgaaatgatgctgcttggctataaggaatgcatcagggacatggacaagctccgtgtcaccacagacaataataaagttgtaaagcaaaacaggaatagcaaggagacgagggacaacaatgtggtggacatacgcaggttgatgatctcttgtgcgcaggaggtgtcagtgaacaatcactcgagggcacgggagctgctgaagcagatcattcagcacgcatcagagacgggggatgccacacaacggttggcccaatgtttcaccaagggactggaggcacggctcgtgggcacgggcagtctgctttgggagttgctaatggcagagcgaccttctgtcgtggagttcaccaaggcctccaacctttactttgaagcctgctgcttcaacaaggtggcactttctttctccgagatgactatcatgcaggccatggtgggtaagaataagctacacatcgttgattatggtatgcagttcggataccaatgggtaagcttgttccgctcgttggcgagtagagaaggtgccctgccagaggtgaagatcacagccataggtctccccaagcctaagtcctacccaactgagaacattgaggaaatacggtgccgactcggcagatctgcccatgagtttggtctgcccttgttcaagttccacgctatcaagacaaactgggaggacgcttgcatcgaggacctgaacctagaagccgatgaagtgcttgtcgtgaatgatctctttagtttcagcaccttgatggacgagggcatatcctttgatgacctaagccccagggatatagtcctttgtaacatcagcaagatgagaccacatgttttcatccagagcgtgtacaattgttcgtatggttcatccttcctgtcacgttttcgagagatgttgttctattacatggcgctgtttgacatattcgatgcaacaatcccaagggagagtaaatctcgaatggtgctggagcaggtcgtgcttggacgttctgcgctgaatgccctcagctgcgaaggcgtggacctggtggaacgccctgagaggtacagacaatggcacacgagaaaccaacgggctggcctgaggcagctctcactgaagatgagcactgtagagctagtgagagatatggtcaagaagcatcaccacaaggacttcctgatctcccaggatgggcaatggcttctgcaaggatggagggggcgtgtccactttgcccactcgacatgggttgcagcggatgcgtcttctagaggtttaggttcttccaatgctgaatgatataacatggtcttcagaaacttcatgtgattgagattttttctcactcaggctacggccactggcatttatggttgtatgttgttgtagcttgtattttttctgttgtggacttacaatactcaagtgcaaatatacttttgtcttgagtaccattaattccacaactgatgaaaataaatctgtgccgtgagttcttgtaaaactgcttgtcaatctgtgcagtgagttcatctgttcctgaatcttggtctgtttcacgtacatgcttctttttcctttcatagatgt

SEQ ID NO: 121573 - DNA, 1469 bp, Zea Mays
ggacggatgcgaaatctcaggccacggccacaccacacccctctcccctccctccaccttctccctcccacgccggtccttcttgagcgccgtgagtcgctcgcccgtgtccgccgcacactattccatgtcagccggcgtccgccctctccaccgagcgctgcatcaacgctggccacgccgcggggcagaagcagcagggcagccacagccctgacgccttgcgtcgaccttggaccctcttttggcgccaacaataggaggaggagcggagccacgttccccgcgccgccgctcctgtcccggatgctgtcacccaccacgcggccggcagctcggactgacgagagatctggcaccagcccggagaagcccctgttgcgccggtgggtactgcgggcgccgtcgagaggatctacgtggttagggttgcagtccccaagtgcgatgagatccagaacgccatctccgacggtgaggctgagctagcgcccgtgccggtgttcgtgtttttggattttgtggatctgatgatgctcgtagaccttgtgcaccgggtccggaacgatgtcggcgggaggtgaagcagagatgaaggagctgcccgaggagcttgcctgcctcgcatgcgaaacatcggcccaagtggtggcggcgggacctgccgcgtcggcaccgcttatgtgtcgcatgtgagcttcttttccgtttgtctgccgacactaggacctcccctgcccccacgagatttgtatctgtacctgactacgatgaggagtacaatgactgtgatgatgatgactatgatggaaccgaatatggcatcaaccatcctgttaatatggggaaaggaagaagggcgagcccatcaagctcgtcttcaccggcaagaagaagggaatcactcccgtcgcctccttcagcgccctcgacaaggagggcgaggaccccaccccgtctgccgcagccgagccgaagcccagcaacgatccagccgaggacgacataagcactttatagaaaataattctcacaggtggaagcttgttgcagtctacagaattaggcgacactcttactggttgccttttgatttaactaccattcaaattagcaactcttgagcagatttattagatccaattgctgtcaaaggataagatgacctttatatagatttttcagttgccatttcaacgatttattgtgattgtaatgctcgcccctatatcaggaaggtgggcatatcagtatcttggatgacgactctactgaatgatgtccataatacacttgcggagtatttggtttgtagagtcactttatgtttcatgaagtgatgcattataagttcattccatcaattttggtggaatcaactcactcctcgtatatatactaattattagcttatgaagaatggagtggtgatgtatcaacccattttattccacaaaccaaataaaaaa

SEQ ID NO: 121574 - DNA, 1536 bp, Zea Mays
atagttgttctttggcttctgatttcaacaaaaaaaatggtgtttctctaaaacccacaaagccctcctctgctctccatccctgtctctcgctttccctaacccacaccagaataccagatcgagcaccgatctagggttgcacctcttctgctagccggctggcgaggagccgttcggcatctggacgcggccaagggagatgaagctcgcggggctcaagtctgtggacggcgcccacgaggagtccatctgggcggcggcgtgggcgcccgccgctgaccaccgccccacggcggtgctcctcactggcgcgctcgacgagaccgtccgcgcttggctccccgacgacctcgctgccttggggtcccccacacggggccacgcgctcggagtcgtctccctcgccgcccaccccgccggctcgctcgccgccgccgtgtcgctcgacagcttcatccgcgtctttgacgtcgacacgggggcatccgtcgccacgctggaggcgccgccgtccgagatttggggcgtccagttccatcccaagggtaatgctctggccgcagccggtggtggcagtggatcagtgaagctgtgggacacggagaagtggaaggcgatcaccagcctcgccgtcccacgcccggagggagctcgccccgacaagacaggcagcggcaagttcgtcctgtcagtcgcctggagccccgacggaaggctcctagcatgcgggtccatggacggcacgatcgccgtctacgacgcggtccgcatgaagttcctgcaccacctggagggccaccacatgccggtgcggtccatggtgttctccccggtggacccgcacgtgcttttcacggcctgcgacgactgccacgtccacatctacgacgccagggagaagggcctcgtcggggccatgtcgggccacgcgagctgggtgctgagcatcgacgcgagccccgacggcctggcggtggccacggggtcgagcgaccgcaccgtccggctctgggacctcaacatgaggacctcggtgcagaccatgagcaaccactccgatcaggtgtgggccgtggccttcaggccaccaggcggtgccggagtccgagcagggcgtctggctagcgcgtcggatgacaagagcgtctccctgtacgattactcgtaggtttttgtttccttataaaccgttgcaaatgcctctgttgtaccgaccagagatttgaattcgggcatggtggttggaagaattgttgtacgcagcacagtagtcgaggtgttaaattgcaaggaaagagtttatttcgtgttagttattgtaccctggggttgttgacttgcttggttgcaccgaaaggacgtggacgctggtcgtcgggtggtggtgtgcgtgccttcttgtctcgctgctgaaagctcgttaatacttgcaccttttgcattaacaggaggcgtggaacaaactcaactccgaagagctcttttgaaccaaattctgtgaatataaatcacattgtatgtcttattaatacc

SEQ ID NO: 121575 - DNA, 222 bp, Zea Mays
gtctatattactccagatactcttaaagaggaaaacacaacaaaaacaacccaaaggatcatgaagtagactgatgtaacccaagcccatagcctagggcctccaagctcagcaccgagtataatacgacgcagaaccaaaaccgttatgcatccaaatgatgtcgcgaagaagactagaagggagaagctgagaccggcagcattatctatgtacaatggt

SEQ ID NO: 121576 - DNA, 951 bp, Zea Mays
atacgtgaaacgaatcaaacacctacacatatcaccaccaacacacacacaggcaaaacacatcaagctcaacacacatggctgacaatgccggtctagtaggcctgctcttggagcagcaccagctgcgcccaccagcagcagcatcaagagcaccacctcaaatcacaagcaaggccactcgtcccctcctcgccaccgccaagaacgacgtcgtcgacaagggcagctccgccgccgcttccttcagccgctcttcctcttcttcttcttcccgtgcaccggcgccgacggtgtcgccgacgaccgcctgccctttcctgcaccggtgcttcttctgccacggggagctcgccgacggcagggacatatacatgtacagaggcgagagggcgttctgcagcgaggagtgccgctgccgccatatcctggcagaggaggacgatgacgacactactacctcggtcggggtcgtggcagcggcagcggactgctccacccagctccgccatcaggcccttgctgccagcttcacgttctgaggtggtgtccggccgagcgggcgggcgggtagaccaccgaggactcgtacggtgggcctgccaccggcggcttgccgtggaggaagcaacgatgtccatcaccttgagtcagatagcttgtccaaacacagatgggtgtcacggactcatgcacggctgatataatctgattgggcttcaatttcaacgtttcaaaatgatgggttaagtttcttgttttttgttggaggtgaatgttttttttttgcaaattgtcttcttatacagtatattattctgtcgaaactaccttcttgttttcagtgctctatgattatctcttgttaagtaagttggatagtaagtttgtacatttctatcctctttaagcttttgtatttatataattatatcatataccttggttgca

SEQ ID NO: 121577 - DNA, 216 bp, Zea Mays
agctcggtggagagcacggacctcagcccgcccagcagcttcagcttcttcagcctcccacacgcggcccgcagcgccatctcgaacccttcgatggagacccaggagaggtgcaccatcttcacgtcctggaggcacctcagcgaccccagcagatggcacagccccagcccagtcacttggcagtaggacacagtaagctgcatgcatgccaaa

SEQ ID NO: 121578 - DNA, 333 bp, Zea Mays
atgccggacaagtgggagccgtcgtcgtcgcaaatgctggacaacgaggacatgtgggagccggatctgaggggtggcagcggcgggggtgataggcgagcgcgcgccgcagcaggtgttgtggaacgtgacgtagaggaagaggactccgactcgccgtcgtcggagatgtcggtggatgagcccaacggcggggcaggttcttggtttcttgatttgcagcacctagtttcttggggatcactaggtgcgaccacgcgcggccaacagtggcgctgggtcaccacgagcaggtggtccacgaccatgattatcgatgacggcgcagggtaa

SEQ ID NO: 121579 - DNA, 870 bp, Zea Mays
atggggagggtgaagctgaagatcaagaggctggaaaacaacagcgggagacaggtgacgtactccaagcggcgatcgggcatcctcaagaaggctaaggagctctccatcctatgtgacatcgacctaatgcttataatgttctcgcccacggacaaacccaccatatgcattggcgatagaagtaccctcgaggaagttgtagcgaaatatacacagttaacccctcaggagagagctaaaagggttcagacagtcgaggggaacttcggaaagcaacatctaatcgggctacagtatgctgctacccagttccagaccgacatgcagttgcctctaggactgcccggcgagtcaggcccttcgtcgtggttccaaaacggcggcgctgatgggcaacaagccatgatgctaacggacgagtccggcctgctccatcagagagacattgcgcagggctatccaagctacttcagcacggtcaagcaggatcccgacaccggtggtagcagcagtgatcacgggcaggtggtgcttcaccatccgcagccgcccgacttcagccagaccgagtgcctgacgtcgctgcacctgccgtcgcagcagttcccgtacccacccttcgaccaccacggcctttacagcgaccgaattttcaggccagacgcagttgagctgcacgccggcggcgtcgccagtatggactttctcagcggtcagtacgacttgccgaggcctggcgatgatgccagcttccataactgggcgtcagctgcagcatgtagtgcaaccatgttcgaccagcaacagcaacagcagcatcagcatcaccagcaaccacaatcttcacctgcacaagtgagtgcataa

SEQ ID NO: 121580 - DNA, 138 bp, Zea Mays
tttcgttttatttatatatatttcatagatgttgttttttttactttcatcgatattatattatcaattatgaacctatactttcttctagatctagaatgttattcttataaatcgtgaccaaatttatgtaaaggc

SEQ ID NO: 121581 - DNA, 1279 bp, Zea Mays
gcttgctaacgaacaaaactagatatctccgccactagcactgatggcgagaccgccccggtgcatcttaaggggcgagagggcaggggaaaagcagcagcagcaaaactggtcaggggccagcacaccgagatccaagcatttcactatcgagcaacggagaaggacaacgataaatgacaggtatgcatcttgactagctcgctgagggggatggcttggtggatctaatgttcgtttgcttgtatcgctactaggcctgctgttgatcgaaaggagcaagcgagcaacaccagtggactacccttgaaaattgtgacctggcaagtctagtaagtgatgcttgcatcataatacattcacttgagactacatgaatgccccctaatattttagggatgaggcgacagggaatagccctttcactgtcttcatctacttttgttctccagatgacacgatggccatcttcctggcgctgcggtcgccgaagctggaggtgttgggcctcaccactaccttcggcaacgtccacaccgccctcgccacgcgcaacgcgctccacctggtgccgccgcctaccttccttcctctctctcccccaccctgctcgtctgttccacccactccgaccgcggctcacatttgcttctgatgtgtgtgcttgagctggaggctgttggcaggactgacatccctatggcagagggatcccatccaacgatcaagaaagccaccaagctgaggatcgcaagctttgtccacggttcagacggcctgaggatcgcaagcttcgtccacggttcagacggccactgtggatcgaggtgcggcaggtcggggcgccgccgcggattgtaggctcgaccgagactacttcgtcaccaacgtcctcgtatgcttcaatgttaaacattgtcacaggttctcatatatgggtggaagataaagatttgtcctgggttgatggtgaggtatttcgaattgatggccaaaacgcccatgttcgcacaaccaaggggaaggcgggatggcgtattgtggcggctacgagggaccgatgttcctgtgtggcagtgacaacgataccgtggagccaaggcaatgtcagcaagctgatttttcagattggaatctatggttctttttaaagatcgaatatgttctagcatcttaaaaagatttgtcagaatgtaaacatttgttctgaggtcatttaggcctcaaacagaatttcttggacttatttcgttggagggaatgggacatcttgagatct

SEQ ID NO: 121582 - DNA, 2159 bp, Zea Mays
gtctgaagccggtagctggactagctgctggagtgtggaggaagactagggaggctgccttcatatagcggctagttggagcccaacgctcgccattgcaagccttcccggttacttgttcactaacaaggtcgggacggcatggcccttggagctgcgtaccatcactacctgcagctcgccggcgaccatggcaccgccacacacgcactgctcctcggcgtacttatcttcctcgtcatccgcctagtatccgcaaggcgaaccggcacaacctcagccaacaaacgtaagcagcaacagcggcttccgctcccgccttcgcccccgggcaagctgcccatcatcggccacctccacctcatcggcgccgagacccacatctcgatccgggacctggacgccaagcacgggcgcaacggcctgctgctcctccgcatcggcgccgtgcccaccctgttcgtgtcctcgcccagcgccgccgacgccgtcctgcgcacccaggaccacatcttcgcgtcgcggccgccgtccatggccgccgagatcatccgctacgggccctcggacgtcgcgttcgtgccctacggcgagtactggcggcagggcaggaaactcctcaccacgcacatgctcagcaccaagaaggtgcagtccttccgccatggccgacaggaagaggtgcggctcgtcatggacaagatccgcgcggctgccaccgccgcgccgccggcggcggtggacctgagcgatctcctgtccgggtacaccaacgacgtggtgtgccgcgcggtgctgggcgcgtcgcaccggaaccaaggccggaacaggctgttcagcgagctgacagagatcaacgtgtccctcctcggcgggttcaacctcgaggactacttccccccgaatatggccatggcggacgtgctcctccggctggtgtccgtcaaggcccggcggctcaaccagaggtggaacgacgtgttcgacgagctcatccaggaacacgtgcagagcaggccctccggcgagagcgaggagagcgaggcggacttcatacacgttctgctctccatacagcaagagtacggcctcactacggacaatctcaaggccatcttggtggtaagtccagctactgtttttactgctttaccgattaccgttttaccatatcaagctacagtgattattattcccctgtttatatactaataatatatgatactaacttagtagatcgatcatctgatatgtgtcattaacaggacatgttcgaggcaggtatagagacatcttacctgacgctagagtacggcatggcccgagctcatcaacaacaggcacgtcatggagaagctacagacggaggtgaggacgacgatgcgctcgccggacggcaagaagctggacatgctagcggaggaggacctcggcagcatgccctacctcaaggcgaccatcaaggagacgctgcgcctgcacccgccggcgccgttcctcctcccgcactactccaccgccgactccgagatcgacggctacttcgtcccagccgggacgcgcgtcctcgtcaacgcctgggcgctcgggagggaccgcacgacgtgggagaagccggaggagttcatgccggagcggttcgtgcaggaaccgggcgccgtggacgtccacatgaagggcaaggacctcaggttcatcccgttcggctccggccggaggatctgccccgggatgaacttcggattcgcgaccatggagatcatgctggccaatctcatgtaccattttgattgggaggttccgggctctgcagcaggggtgtccatggacgagtcctttgggctgacgcttcgccggaaggagaagcttctccttgttccaaggattgcttcctgataatcctacatctgtaaaacttgtgtcttgctagctgtaccgggaacaagattaaataatgcaaggaataaagtgactctgttcttcgtcagtaactatatattgtaggagtcctgatgatgaataatgggatgtcgtgatttgttgcaactagtattattggtgatatttctatgtaaaaagtggtgtagcgatgtatgtaaaatattatatttgtcagatctttttataccaataatatttactccatctgtcccaaaata

SEQ ID NO: 121583 - DNA, 1852 bp, Zea Mays
gtctgaagccggtagctggactagctgctggagtgtggaggaagactagggaggctgccttcatatagcggctagttggagcccaacgctcgccattgcaagccttcccggttacttgttcactaacaaggtcgggacggcatggcccttggagctgcgtaccatcactacctgcagctcgccggcgaccatggcaccgccacacacgcactgctcctcggcgtacttatcttcctcgtcatccgcctagtatccgcaaggcgaaccggcacaacctcagccaacaaacgtaagcagcaacagcggcttccgctcccgccttcgcccccgggcaagctgcccatcatcggccacctccacctcatcggcgccgagacccacatctcgatccgggacctggacgccaagcacgggcgcaacggcctgctgctcctccgcatcggcgccgtgcccaccctgttcgtgtcctcgcccagcgccgccgacgccgtcctgcgcacccaggaccacatcttcgcgtcgcggccgccgtccatggccgccgagatcatccgctacgggccctcggacgtcgcgttcgtgccctacggcgagtactggcggcagggcaggaaactcctcaccacgcacatgctcagcaccaagaaggtgcagtccttccgccatggccgacaggaagaggtgcggctcgtcatggacaagatccgcgcggctgccaccgccgcgccgccggcggcggtggacctgagcgatctcctgtccgggtacaccaacgacgtggtgtgccgcgcggtgctgggcgcgtcgcaccggaaccaaggccggaacaggctgttcagcgagctgacagagatcaacgtgtccctcctcggcgggttcaacctcgaggactacttccccccgaatatggccatggcggacgtgctcctccggctggtgtccgtcaaggcccggcggctcaaccagaggtggaacgacgtgttcgacgagctcatccaggaacacgtgcagagcaggccctccggcgagagcgaggagagcgaggcggacttcatacacgttctgctctccatacagcaagagtacggcctcactacggacaatctcaaggccatcttggtggacatgttcgaggcaggtatagagacatcttacctgacgctagagtacggcatggcccgagctcatcaacaacaggcacgtcatggagaagctacagacggaggtgaggacgacgatgcgctcgccggacggcaagaagctggacatgctagcggaggaggacctcggcagcatgccctacctcaaggcgaccatcaaggagacgctgcgcctgcacccgccggcgccgttcctcctcccgcactactccaccgccgactccgagatcgacggctacttcgtcccagccgggacgcgcgtcctcgtcaacgcctgggcgctcgggagggaccgcacgacgtgggagaagccggaggagttcatgccggagcggttcgtgcaggaaccgggcgccgtggacgtccacatgaagggcaaggacctcaggttcatcccgttcggctccggccggaggatctgccccgggatgaacttcggattcgcgaccatggagatcatgctggccaatctcatgtaccattttgattgggaggttccgggctctgcagcaggggtgtccatggacgagtcctttgggctgacgcttcgccggaaggagaagcttctccttgttccaaggattgcttcctgataatcctacatctgtaaaacttgtgtcttgctagctgtaccgggaacaagattaaataatgcaaggaataaagtgactctgttcttcgtcagtaactat

SEQ ID NO: 121584 - DNA, 1980 bp, Zea Mays
gtctgaagccggtagctggactagctgctggagtgtggaggaagactagggaggctgccttcatatagcggctagttggagcccaacgctcgccattgcaagccttcccggttacttgttcactaacaaggtcgggacggcatggcccttggagctgcgtaccatcactacctgcagctcgccggcgaccatggcaccgccacacacgcactgctcctcggcgtacttatcttcctcgtcatccgcctagtatccgcaaggcgaaccggcacaacctcagccaacaaacgtaagcagcaacagcggcttccgctcccgccttcgcccccgggcaagctgcccatcatcggccacctccacctcatcggcgccgagacccacatctcgatccgggacctggacgccaagcacgggcgcaacggcctgctgctcctccgcatcggcgccgtgcccaccctgttcgtgtcctcgcccagcgccgccgacgccgtcctgcgcacccaggaccacatcttcgcgtcgcggccgccgtccatggccgccgagatcatccgctacgggccctcggacgtcgcgttcgtgccctacggcgagtactggcggcagggcaggaaactcctcaccacgcacatgctcagcaccaagaaggtgcagtccttccgccatggccgacaggaagaggcaaggacgacgacgaacacgcagatccaactctctctctctctctctcacacacacacgcacctgcacgtacatttttcctccgtttatctatgcaatagaacagaatatactgacgttcactgcaggtgcggctcgtcatggacaagatccgcgcggctgccaccgccgcgccgccggcggcggtggacctgagcgatctcctgtccgggtacaccaacgacgtggtgtgccgcgcggtgctgggcgcgtcgcaccggaaccaaggccggaacaggctgttcagcgagctgacagagatcaacgtgtccctcctcggcgggttcaacctcgaggactacttccccccgaatatggccatggcggacgtgctcctccggctggtgtccgtcaaggcccggcggctcaaccagaggtggaacgacgtgttcgacgagctcatccaggaacacgtgcagagcaggccctccggcgagagcgaggagagcgaggcggacttcatacacgttctgctctccatacagcaagagtacggcctcactacggacaatctcaaggccatcttggtggacatgttcgaggcaggtatagagacatcttacctgacgctagagtacggcatggcccgagctcatcaacaacaggcacgtcatggagaagctacagacggaggtgaggacgacgatgcgctcgccggacggcaagaagctggacatgctagcggaggaggacctcggcagcatgccctacctcaaggcgaccatcaaggagacgctgcgcctgcacccgccggcgccgttcctcctcccgcactactccaccgccgactccgagatcgacggctacttcgtcccagccgggacgcgcgtcctcgtcaacgcctgggcgctcgggagggaccgcacgacgtgggagaagccggaggagttcatgccggagcggttcgtgcaggaaccgggcgccgtggacgtccacatgaagggcaaggacctcaggttcatcccgttcggctccggccggaggatctgccccgggatgaacttcggattcgcgaccatggagatcatgctggccaatctcatgtaccattttgattgggaggttccgggctctgcagcaggggtgtccatggacgagtcctttgggctgacgcttcgccggaaggagaagcttctccttgttccaaggattgcttcctgataatcctacatctgtaaaacttgtgtcttgctagctgtaccgggaacaagattaaataatgcaaggaataaagtgactctgttcttcgtcagtaactat

SEQ ID NO: 121585 - DNA, 1200 bp, Zea Mays
gtccattccgttccgtaggatcccacgaggtgcggctcgtcatggacaagatccgcgcggctgccaccgccgcgccgccggcggcggtggacctgagcgatctcctgtccgggtacaccaacgacgtggtgtgccgcgcggtgctgggcgcgtcgcaccggaaccaaggccggaacaggctgttcagcgagctgacagagatcaacgtgtccctcctcggcgggttcaacctcgaggactacttccccccgaatatggccatggcggacgtgctcctccggctggtgtccgtcaaggcccggcggctcaaccagaggtggaacgacgtgttcgacgagctcatccaggaacacgtgcagagcaggccctccggcgagagcgaggagagcgaggcggacttcatacacgttctgctctccatacagcaagagtacggcctcactacggacaatctcaaggccatcttggtggacatgttcgaggcaggtatagagacatcttacctgacgctagagtacggcatggcccgagctcatcaacaacaggcacgtcatggagaagctacagacggaggtgaggacgacgatgcgctcgccggacggcaagaagctggacatgctagcggaggaggacctcggcagcatgccctacctcaaggcgaccatcaaggagacgctgcgcctgcacccgccggcgccgttcctcctcccgcactactccaccgccgactccgagatcgacggctacttcgtcccagccgggacgcgcgtcctcgtcaacgcctgggcgctcgggagggaccgcacgacgtgggagaagccggaggagttcatgccggagcggttcgtgcaggaaccgggcgccgtggacgtccacatgaagggcaaggacctcaggttcatcccgttcggctccggccggaggatctgccccgggatgaacttcggattcgcgaccatggagatcatgctggccaatctcatgtaccattttgattgggaggttccgggctctgcagcaggggtgtccatggacgagtcctttgggctgacgcttcgccggaaggagaagcttctccttgttccaaggattgcttcctgataatcctacatctgtaaaacttgtgtcttgctagctgtaccgggaacaagattaaataatgcaaggaataaagtgactctgttcttcgtcagtaactat

SEQ ID NO: 121586 - DNA, 1753 bp, Zea Mays
gtctgaagccggtagctggactagctgctggagtgtggaggaagactagggaggctgccttcatatagcggctagttggagcccaacgctcgccattgcaagccttcccggttacttgttcactaacaaggtcgggacggcatggcccttggagctgcgtaccatcactacctgcagctcgccggcgaccatggcaccgccacacacgcactgctcctcggcgtacttatcttcctcgtcatccgcctagtatccgcaaggcgaaccggcacaacctcagccaacaaacgtaagcagcaacagcggcttccgctcccgccttcgcccccgggcaagctgcccatcatcggccacctccacctcatcggcgccgagacccacatctcgatccgggacctggacgccaagcacgggcgcaacggcctgctgctcctccgcatcggcgccgtgcccaccctgttcgtgtcctcgcccagcgccgccgacgccgtcctgcgcacccaggaccacatcttcgcgtcgcggccgccgtccatggccgccgagatcatccgctacgggccctcggacgtcgcgttcgtgccctacggcgagtactggcggcagggcaggaaactcctcaccacgcacatgctcagcaccaagaaggtgcagtccttccgccatggccgacaggaagaggtgcggctcgtcatggacaagatccgcgcggctgccaccgccgcgccgccggcggcggtggacctgagcgatctcctgtccgggtacaccaacgacgtggtgtgccgcgcggtgctgggcgcgtcgcaccggaaccaaggccggaacaggctgttcagcgagctgacagagatcaacgtgtccctcctcggcgggttcaacctcgaggactacttccccccgaatatggccatggcggacgtgctcctccggctggtgtccgtcaaggcccggcggctcaaccagaggtggaacgacgtgttcgacgagctcatccaggaacacgtgcagagcaggccctccggcgagagcgaggagagcgaggcggacttcatacacgttctgctctccatacagcaagagtacggcctcactacggacaatctcaaggccatcttggtggacatgttcgaggcaggtatagagacatcttacctgacgctagagtacggcatggcccgagctcatcaacaacaggcacgtcatggagaagctacagacggaggtgaggacgacgatgcgctcgccggacggcaagaagctggacatgctagcggaggaggacctcggcagcatgccctacctcaaggcgaccatcaaggagacgctgcgcctgcacccgccggcgccgttcctcctcccgcactactccaccgccgactccgagatcgacggctacttcgtcccagccgggacgcgcgtcctcgtcaacgcctgggcgctcgggagggaccgcacgacgtgggagaagccggaggagttcatgccggagcggttcgtgcaggaaccgggcgccgtggacgtccacatgaagggcaaggacctcaggttcatcccgttcggctccggccggaggatctgccccgggatgaacttcggattcgcgaccatggagatcatgctggccaatctcatgtaccattttgattgggaggttccgggctctgcagcaggggtgtccatggacgagtcctttgggctgacgcttcgccggaaggagaagcttctccttgttccaaggattgcttcctga

SEQ ID NO: 121587 - DNA, 2745 bp, Zea Mays
tgaagactaaattgagaaacaagatgtgtgatagtcttttggatgattgtcttgttacatacatcgagagggatattttcttcgaagtgaatgaagaaaatataattgaaacttttatggccttgaggaagcgcaggccagataagtagtattattgcaatctttatgtttaatatatgcaattttcatgcttatttgttgagtgtcaaactttatatctatatatcaaattatttaccaaatttactatgaaattatatgtaaattagatataattctacatgaaaattttgttgtggcacaccctatgtaaaaatcctaggtccgccactgactccgactcccaagacaggccgcacatggccacaggaactcgatgatgcctacacccaaacacccaacacacaaagaggaagaccacggtacgctgtcgttgccaagtctcaacatactccacgcgaggctgctccgattcttcaccatccagtcttgatgcttcgccccctccagcttttgcccaacctcccaaacaatcgagtccacgaagaaggaagtttaattttgcctcatgttatcattgccgagccataacatcatcttacgtagcagcttcgactttacgatacacgacccaatctccacccacatactgggcgccgagaaataaaagcatcaaccaaaggcaacgtcgtggctgagaccaacttcagcacagcagagactggagggagcgacgttttataaccacgaataaattttaatattagcaatccaccgtgttcagctgatgatgaataattacatctctagttggcctgatatgggattgtagccggacgcgccttcatatagcggccgtcaggaaccccagcaagcaacccagccgcccattgccggcattgctcgcagcgctagcttcttgcgctcatcagtcgtctccgaccaagatcagcaaggacggcatggctctcgaagcagcgtacgactacctgcacgtcgccgtcgtccagtgcacgcccacacaagcagcagcagtcctcggcgtcctcctcctcctcgccatccggctagccgcggcggcgaggagctcgtccgcgacgtcccccaaatggaagcagcacaggctgccgccgacgcctccggggaagctccccatcatcgggcacctccacctcatcggctcccacccgcacgtctccttccgcgacctccacgccaagtacggccacaacgggctgatgctggtgcaggtcggcgccgtgcccaccatcgtggtgtccacgccgcaggccgccgaggccgtgctccgcacgcacgaccacgtgctggcgtcccgcccgcggaaccccgtcgccgacatcatccgctacaactcgacggacgtggccttcgcgccgtacggcgagtactggcgcacggcgcggaaggtggtcaacacgcacctgctcagcgccaagatggtcttctccaagcggcgggagcgggaggaggaggtgcgcctggtggtggcccggatccgcgacgccgccgaggcgtccccggggacggcgctcgacatgacggagctgctgggcggctacgccagcgacttcgtgtgccgcgccgtgctcggcgagtcccaccggaagcagggccggaacaagctgttccgggagctgacggagaccagcgccgccctcctgggcgggttcaacgtggaggactacttcccgaagctggcggacgtggacctgttcctccggatcatctgcgccaaggccaagggcgtcagcaagcggtgggacagcctcttcaacgagctgctgtccgagtacgcgctctccggcggcaagcagggcgaccacaactctgaagacttcgtgcacctcttgctgtcgctgcagaaagactacggtctcaccacggataacatcaagggcatacttgtgaacatgttcgaagcagccatcgagacatcattcctggtgctggagtactccatgagcgagctgatgaacaaccgccacgtcctggccaagctccagaaggaggtgaggacggcgacgcccgacggccgcatggtgatggaggaggacctgagccggatgccatacctgaaggccaccatcaaggagtccatgcgcatccacccgccggcgccgttcctcctgccgcacttctccacccacgactgcgagatcaacggctacaccatccccgccggcacgcgcgtcatcgtcaacgcgtgggcgctcgccagggacccgacgtgctgggacaaggccgaggagttcttcccggagcgcttcctggaacaaggccgcgacgccgaggtcgacatgtacggcaaggacatccggttcgtgccgttcggggctgggcgcaggatctgcgcgggggccacgttcgccatcgccaccgtcgagatcatgctcgcgaacctcatctaccatttcgactgggagatgcccgccgagatggagcgcaccggggccaaggtggacatgtccgatcagttcgggatgacgcttcgccggacgcagaaactttaccttgttcctagaattcccaaatgagtgtcgtcgtcgtcgtacaaatggcatgcatcttattgtaagttttggagtttgttgttgcacacgcaacgatggaccgcctgtgatatctttaataaatgtaaccgcagataataatgaaataaaaagaacgcatggctattgtattattattcccatgagttagatggaatcagtagatgtgttactt

SEQ ID NO: 121588 - DNA, 312 bp, Zea Mays
atggcggaaggagtagaccttcttgttgctgagcaggtgcgtgttcatcagcttcctggtctgctgccagtattcgccgagcggcgagaaggccacgtcgcaggtgttgtagcggaggatgtgggaggccatggaccacggccgggacgcgaagatgtggtcgtgggtgcgcatcacggcctcggcggcgctgggcgacgacacgatcagggtgggcacggcgccggcgcggaggaacaggaacccgttgtgcccgtacttggccaccagctcctggagcgagatgtgggtctggggcccgatgtggtgtag

SEQ ID NO: 121589 - DNA, 1912 bp, Zea Mays
tttgctgtagctttctggcatcgctactaccagacagagaggacaggggaggtcagactcagaaacgctcgctcacgacggcagcagccatggcagcatcgtgcggcggccgcgtggtggtcttcccgttcccgttccagggccacttcaacccggtgatgcgcctggcccgcgcgctgcacgcccggggcgtcgggatcaccgtgttccacaccgccggcgcgcgggcgccggacccggccgactaccccgccgactaccgcttcgtgcccgtgcccgtggaggtggccccggagctgatggcgtccgaggacatcgccgccatcgtcacggcgctcaacgccgcctgcgaggcgcccttccgggaccgcctctcggcgctgctctccgccgccgacggcgaggcgggggaggcggggggccgcgtccgctgcgtcctcaccgacgtcagctgggacgccgtgctgtcggcggcccgcggcctcggcgtgcccgcgctcggcgtcatgacggccagcgccgccacgttccgcgtctacatggcgtaccgcaccttggtcgacaagggatacctgccggtgagaggtgagtccgtccaagtcgatttcgtcggcggcggcgaggttagagttagattagatctgcctacttgcttatacataatggtttggattggatgcgtgaatcgatctaatcaaatcagaggagcgcaaggacgacgcggtcgccgagctacccccgtaccgcgtgaaggacctgctgcggcacgagacgtgcgacctggaggagttcgcggacctgctgggccgcgtggtcgcggcggcgcggctgtcctcggggctcatcttccacacgttccccttcatcgaggccggcacgctgggcgagatccgggacgacatgtcggtgccggtgtacgccgtggcgccgctcaacaagctggtgccggcggccacggccagcctgcacggcgaggtgcaggcggaccggggctgcctgcgctggctggacgcgcagcgggcgcgctccgtgctgtacgtgagcttcgggagcatggcggccatggacccgcacgagttcgtggagctggcgtgggggctggccgacgccggccgccccttcgtgtgggtggtccggcccaacctcatccgcggcttcgagtcgggcgcgctgcccgacggcgtggaggaccgggtgcgcggccgcggcgtcgtcgtcagctgggcgccgcaggaggaggtgctcgcgcacccggccgtgggcggcttcttcacccactgcggctggaactccaccgtggaggccgtgtcggagggcgtgcccatgatctgccacccgcgccacggggaccagtacggcaacgcgaggtacgtgtgccacgtctggaaggtgggcacggaggtcgccggggaccagctggagagaggggagatcaaggccgccatcgacaggctcatgggcggcagcgaggaaggggagggcatcaggaagaggatgaacgagctcaagatcgctgcggacaagggcatcgatgaatctgctgggtcggatttaactaatttggttcatctcataaactcctactgatcgatccttgtattgggtaccatgttccggatgatgagttggaataaatcaaaacttgtgttccagtcgatctacgcttctcatcattcatcatcatcaatggacaacaaaacctacagctacagggtttagaacattaacagacttgttttcgagcttcctcaggattcaacccagttgtgctagagcatcgtctctaacagattatggatgttctcctgatattagtaacagattatggatgttctcctgatattagcactgtagcttattgatcgagctgcaaattaagatctgtataaaaacaagcctctattctcaaata

SEQ ID NO: 121590 - DNA, 1794 bp, Zea Mays
tttgctgtagctttctggcatcgctactaccagacagagaggacaggggaggtcagactcagaaacgctcgctcacgacggcagcagccatggcagcatcgtgcggcggccgcgtggtggtcttcccgttcccgttccagggccacttcaacccggtgatgcgcctggcccgcgcgctgcacgcccggggcgtcgggatcaccgtgttccacaccgccggcgcgcgggcgccggacccggccgactaccccgccgactaccgcttcgtgcccgtgcccgtggaggtggccccggagctgatggcgtccgaggacatcgccgccatcgtcacggcgctcaacgccgcctgcgaggcgcccttccgggaccgcctctcggcgctgctctccgccgccgacggcgaggcgggggaggcggggggccgcgtccgctgcgtcctcaccgacgtcagctgggacgccgtgctgtcggcggcccgcggcctcggcgtgcccgcgctcggcgtcatgacggccagcgccgccacgttccgcgtctacatggcgtaccgcaccttggtcgacaagggatacctgccggtgagagaggagcgcaaggacgacgcggtcgccgagctacccccgtaccgcgtgaaggacctgctgcggcacgagacgtgcgacctggaggagttcgcggacctgctgggccgcgtggtcgcggcggcgcggctgtcctcggggctcatcttccacacgttccccttcatcgaggccggcacgctgggcgagatccgggacgacatgtcggtgccggtgtacgccgtggcgccgctcaacaagctggtgccggcggccacggccagcctgcacggcgaggtgcaggcggaccggggctgcctgcgctggctggacgcgcagcgggcgcgctccgtgctgtacgtgagcttcgggagcatggcggccatggacccgcacgagttcgtggagctggcgtgggggctggccgacgccggccgccccttcgtgtgggtggtccggcccaacctcatccgcggcttcgagtcgggcgcgctgcccgacggcgtggaggaccgggtgcgcggccgcggcgtcgtcgtcagctgggcgccgcaggaggaggtgctcgcgcacccggccgtgggcggcttcttcacccactgcggctggaactccaccgtggaggccgtgtcggagggcgtgcccatgatctgccacccgcgccacggggaccagtacggcaacgcgaggtacgtgtgccacgtctggaaggtgggcacggaggtcgccggggaccagctggagagaggggagatcaaggccgccatcgacaggctcatgggcggcagcgaggaaggggagggcatcaggaagaggatgaacgagctcaagatcgctgcggacaagggcatcgatgaatctgctgggtcggatttaactaatttggttcatctcataaactcctactgatcgatccttgtattgggtaccatgttccggatgatgagttggaataaatcaaaacttgtgttccagtcgatctacgcttctcatcattcatcatcatcaatggacaacaaaacctacagctacagggtttagaacattaacagacttgttttcgagcttcctcaggattcaacccagttgtgctagagcatcgtctctaacagattatggatgttctcctgatattagtaacagattatggatgttctcctgatattagcactgtagcttattgatcgagctgcaaattaagatctgtataaaaacaagcctctattctcaaata

SEQ ID NO: 121591 - DNA, 2036 bp, Zea Mays
atcaatatttatataatgaagtttaaaatagagatacgacagatgagcttataaagaaggaagccaactaagcaagaagccagcctagtcatacagaaatgaaaaggaaataagaaagagaaactggcccagtagcgcacgtgcggagaaacttgctaggggaaaaatattggcccagtaagtagcgctactgggcacccataaacccgtcatccaaatccatggctgctcagtgcagaccagcccagatctccctttggcgcccgagatcacgcacacggcattattgccggacacacaaccgggagtcgggaccactcgccccggccggatgccggagctcagacgactacgtgtataaactccggctacacgtcccggcacggcggcaccacaggctgataagcggcagtgggaaaataccgcaccgcacgcaccaatggagaacgccaacgcctcctcttgccgcaacggcgacggcacccagacgccaccgccgcacgtggcgatgcttgcgacgcccgggatgggccacctgatcccgctggcggagctggcgaagcgcctggcccagcgccacggcgtcacgtccacgctcatcacgttcgcgtccacggcgtccgccacgcagcgcgcgttcctcgcctcgatgccgcccgccgtcgcgtccatggcgctgccgccggtggacatgtccgacctcccgcgcgacgccgccatcgagacgctcatgtccgaagagtgcgtgcgcgccgtgccggcgctcaccgaggcgctcctgagcctcaagcagcggcccaccacgaccggccgtctcgtggcgttcgtcaccgacctcttcggcgcggacgcgttcgacgcggcgcgcgcggcgggggtccagcggaggtacctcttcttcccgaccaatctaaccgcgctcacgctgatgctccacctgccggagctcgacgcctcgatccccggcgagttccgggacctcgccgagccgctccgcctgcccgggtgcgtgccgctgccgggcaccgagaccatgaagccgctgcaggacaagtccaaccccagctacagatggatggtgcaccacggcgccaagttccgcgaggcaaccgccatcctcgtcaactccttcgacgccgtcgagccggggcccgccgaggtcctgcgccagccggagcccgggcgaccgccggtgcgcaccatcggcccgctcgtgcgcgcagaggacggtggaggcagcaaggacgacgcgccgtgcccgtgcgtggagtggctggaccggcagccggccaagtcggtcatcttcgtgtccttcggctccggcggcacgctgcccgccgaggagatgcgggagctcgcactagggctggagctcagcgggcagcggttcctgtgggtagtgcggagccccagcgagggcggcgtcggcaacgacaactactacgactcggcgagcaagaaggaccccttctcctacctgccccaagggttcctggagcggaccaaggacgtcggcctcgtggtgccgtcgtgggcgccgcagcccaaggtgctggcgcaccagtccaccggcggcttcctcacgcactgcggctggaactcgacgctggagagcctggtgcacggcgtgcccatgctggcgtggccgctgttcgccgaccagaggcagaacgcggtgctgctgtgcgacggggtaggggccgcgctacgagtgcccggggccaaggggagggaagacatcgccgcggtggtgcgggagctgatgaccgcggagggcaagggcgccgcggtgcgggccaaggtggaggagctgcagaaggccgcggccgagggccttcgcgacggcggcgccaccgcggccgcactggcggaggtggtcaaggagtggacgagtgcagacgacagcgtctactaatcctacactactacgctaaacgcgaatagcctagttaattattcaaagcatttattatgtccattttgctattattgcgggtgcagttattataataaagtgctcgtgtcagagtatataa

SEQ ID NO: 121592 - DNA, 3706 bp, Zea Mays
ttgcaagaaatattcatcatatatattaatatcatgaacaaaagcagttctcaacaatcccttgtactccatttttaaggaaaatatttccttatctatatataataaaaaaaattaaagccatacaaatgacgccccagacatgtctcttgcaccttgtcgtctcatgtagttagttcacacatgcacacgttcatacatagagtatgtacggagaagcaaatactcacgcgtgcacatgcaaaaaataaataaacaatttcacacacgcctgcaatgtacatgtagctgtttggttgcgcatgcgaccttatatattgttgttcaattcattcttggtcgaccatctctccatagagcttaatatccttggaatagaggaggaggcggagatgcgtatttgttggccatgataggtggaaggatgatgtcgttgaatgaaggtggaggtagggcttctgccggtggtgccgttgaatcttcttctttctttggtggggcagaggtgaccgcaggaggaggtgagcttaccggggctggtggtggtagcgatggtggcttcactggtgctggtggcggagagctaattggtgctggcggcggtggggacttcattggaggtggtggcgaactgaccggcgctggtggaggtggagacttcacagggggaggaagtgagctcataggggccggtggaggtggtgacttggccggaggtggtggagagctaatcggtgctggtggtggggaagactttacttcaggaggtggcaagcttacaggagcaggtggaggtgacgactttggcgctgatggtggtgagctaactggggctggtggtggagaggacttcagttctggaggtggcgagctcactggagtaggtggaggtgacgacttcggcgctggtggtggtgagctaactggggttggtggaggagaggacttcacttctggaggcggcgagctcacgggagtaggtggaggtaatgacttaggtgctggtggtggtgagctgactagtgttggtggtggagaagactttactactggaggtggtgagctcacaggagtaggtggtggagatggcttaggcgtcggtggtggtaagctgactggtgccggtggtggagaagatttcaccactggaggtggtgagctcacaggagcaggtggaggcaatggcttaggtgtcggtggtggtgagctgactggtgtcggcggtggagaagacttcaccaccggaggtggtgagctcacaggagcaggtggaggtaatggcttaggtgtcggtggtggtgagctgactggtgccggtggtggagaagacttcaccactggaggtggtgagctcacaggagcaggtggaggtgacgacttaggcgtaggtggtggtgagctaaccgttgccggtggtggagaagttttctctaccattggaggtgacgacggtgacttgggctctgatggcggtgagctgatcggtgccagtggcggggatgacttctctgcttcaggaggcgagctcacgtgtgcaggtgggcttgatgacttaggcgtcattggtggcgagctaagtggtgctggtggtggagaagacttcaccgtcgtaggtggagagctcacagaactaggtggagatgatggcttaggctccaatggtggtggtgagctcactggagccagtggaggtgatgacttaggtgtcggtggtggtgagctctctggtactggaggcggagaagacttcagtggaggtgactttgatggaggaggtagtgtctcaactggagatggtggtggtttggatggagttgatggaggagtaggcttctcttgtggtggtggagaggtagtcagagtgggtggaggtagagacttctctggaggcggcgatgactttactggagtaggtggtgttggtttttcctcttctggaggtggggttgatttcccaggagctggtagtggtggcaacttcaccggaggagaaggtgagctcactggagccagcggtggtggagatttcaccggtggaggtggagaggccactggtaccggcggtggtggagatttcaccgatggaggtggagaggccaccagtactggcggtggtggagatttcaacggttggggtggagaggccactggtgctggtggtggaggtgatttcatcagcggcggaggtgatgccactcgcgctggtgggggaggcgacttcatgggtggtggtggtgaggccaccggtgctggtggaggaggtggcgttggaatgtattcgtccgccggcggtgaacgaggggtcggcatcggcatgggtgcaggtgcaggcaccggcgaaggttctggaagcggttctggcgacacatccggcggtgtatgcggggttggcatgggcgcaggtgcagcaggcttccctggcaccgaaggcggcttccctggcaccgacgacgatggtggccctccggtcgacggggcgcgcgagcacgggagcgcactgcagcgcggtcttctgcgccgggcgcagcgcgccgaggcagttgtccctgtcgtcgaagttgacgagcgccttgtcggacggcatgcacacgacggcctccgagttgaagaagttgaaggcgaagctgaagttgacgagcgccgggagctcgcagatggactcgtgcacgatgccggtgaagacgttccgggacacgtcgagctgctccagcttggcgatgttggagagctgctcggggatggtgcccacgagcatgttcccgctgacgtcgatgacggtggtgttgaccagcaggcccatctccagcggcaggcacccgtcgagtttgttgttgaggaagatgatttcgtccagcgtcttcaccatgcggccgatgctcttggggatgcatccgacgaaggcgttgttggcgaaaacgatgacggacgccgtggagttgccgaggttctccgggatatagcccacgaatcggttggtgttgacgaagatggcgtccaggtccttgtcgaagagcgctggcggcagctcgccctcaaagtcgttgaagcggaggtcgaggtacttgagcgacaccatctcgaggcagacgtaggggaagacgccgacgaagcggttgttgctcacgtcgaactcgtgcagcagcgacagccgcgacatgctcttggggatgatgccgcagaagcggttggtgttgatgtggaagaaggcgaggtcggtgagcaggccgagctcgggcggcaggtaccccgcgatgtcggcgccgttgaggtcgatcccggccacgaccgtgaccttggggtcgtccagcgcctccgtgcagatgacgccgttgtacttgcacacgtcctcgccgacccagttggcggtgtagcccttggggtcggagtagaaggcgcggcgccaggcctgcagcgcgatgtacgcgcggcggaggcgcgggttggggaagttggcggcgccgacgcggtcgtcgaactcgaagtccgccggcaggtcgccgccctcgccggcgccggcctccttcatggccagcagctggcggcgcgcgatgtaggaggcctccgcgctcgtcaccgcctgcacgctgcaggcggacatgcaggctgccaggagcaacagcgctgccatgaggcgcccatcgggcagcagccggagaggagggtccatgagggagagcgagcgggcggcggtgggcgtgcacactga

SEQ ID NO: 121593 - DNA, 462 bp, Zea Mays
cgagaacaccacacgtccacccaccggccgccaccatggccgctgccgagcccctcgtcgtcgtcgtcgccgtcgccatcgccttcctcctcgccgccgccgccgccgccgcccccttgcctggcggcggtgggggcctcccgttcccgctcctcccggccgaccccggcgccgggtgccgtgggcccgtgggcacgtgcccggcgggggacgaggcgccgccggatttcggcgaggcctccaccatggcggtcgacgatcatcccgtacgtgcccggcgggtgcagcaccaacggcgcgacagcgtgccgtgctcgcgccgcggcgccagctactacaactgccggcccggcgcgccggccagcccctacagccacgcctgctcccgcatcaagcactgccacggctgaagccatgcatgagcatgagctcctctttgccatccatcgcgcgtccagagaa

SEQ ID NO: 121594 - DNA, 1522 bp, Zea Mays
caaagaaaaggtaacacatgcgcaggcaatataaaatgcaatgctgccacagcgatgtggagaagtttcaattttgatcccatccaaatggtcatcagtctaatacttcagtgtatgcttcaggttaggttggcagatcctgacattgtctcggatccaagcgaataccaaaaaatcgcgcagtctgtttctgaactggatcaggtcgtgaccacatacaggcaattcaaggattgtgagaggcaacttgaagcgacaaaagctctggaaaaagagaacgaaggtgaccccgatatgttagagatgatagcttctgagttggaggctctatctaaccagctcgcagagcttgaagaaaaaatgaagtttctactgcttcccagcgatcctctagattcacgcaacatcttacttgaagtaagagcaggtgctggtggtgatgaagctgggatttgggctggtgaccttgtaggttcgcatgtaccagagatactgtgagcgcaacaattggaagtttaagccagtttcttgctcagaagcagaaatgggtgggtacaagacatacgtgatggaggtcaaggggaaacaagtctatagtaaactgaagtttgagtcaggtgtacaccgtgttcagcgtgttcccttgacagaggctatgggtcgtgttcatacgtcaacagcaactgtagctattatgccagaggctgatgaagttgatgtggttattgatccgaaagatattgagcttaaaacagcaagatctggtggagctggagggcagaatgttaacaaggtggagacggctgttgatcttattcacaagccgacaggaatacggatattctgtacggaagagagatcacagctacagaacagagagcgggcatttcaattgttgagagcaaaactttacgagataaaattaagggagcaacaagaatcattaagaaaccagaggaaattgcaggataacagagtgacagaccatcgcttaaagatgaactttgagctgacaagcttccttttaggagacatcgaatcggctattcagtcttgtgctacgatggagcagcaggagctgttggaggaaatggccagttccgtgggcgcagtaaacgtatgattcaggcaaattcggcgttgaggccaggccatcaaactgaaccgcgaaactcatgacgtgctcggactcggtgaagatgattgatagctgtacatgaagaaaactgacaagatgaactccccccataggaactttttccccccctgtagtccgcagggtacaacacacacccacccatgcatctcagcttccttgacggcagcagagttactagtagaaaatatacatggtttgtgcagttcaacgcttcaactgctccagtattcacagtttaatgcattttaggtatgttgctccagtttctcaacaattcactgcttgcaattaaatctacagagcaaagttctcagctagctacatttgaaccaatcaatcaaccacttttctttttgaaacgag

SEQ ID NO: 121595 - DNA, 1542 bp, Zea Mays
caaagaaaaggtaacacatgcgcaggcaatataaaatgcaatgctgccacagcgatgtggagaagtttcaattttgatcccatccaaatggtcatcagtctaatacttcagtgtatgcttcaggttaggttggcagatcctgacattgtctcggatccaagcgaataccaaaaaatcgcgcagtctgtttctgaactggatcaggtcgtgaccacatacaggcaattcaaggattgtgagaggcaacttgaagcgacaaaagctctggaaaaagagaacgaaggtgaccccgatatgttagagatgatagcttctgagttggaggctctatctaaccagctcgcagagcttgaagaaaaaatgaagtttctactgcttcccagcgatcctctagattcacgcaacatcttacttgaagtaagagcaggtgctggtggtgatgaagctgggatttgggctggtgaccttgtaggttcgcatgtaccagagatactgtgagcgcaacaattggaagtttaagccagtttcttgctcagaagcagaaatgggtgggtacaagacatacgtgatggaggtcaaggggaaacaagtctatagtaaactgaagtttgagtcaggtgtacaccgtgttcagcgtgttcccttgacagaggctatgggtcgtgttcatacgtcaacagcaactgtagctattatgccagaggctgatgaagttgatgtggttattgatccgaaagatattgagcttaaaacagcaagatctggtggagctggagggcagaatgttaacaaggtggagacggctgttgatcttattcacaagccgacaggaatacggatattctgtacggaagagagatcacagctacagaacagagagcgggcatttcaattgttgagagcaaaactttacgagataaaattaagggagcaacaagaatcattaagaaaccagaggaaattgcaggttggtactggtgcccgatccgagaagataaggacgtacaactacaaggataacagagtgacagaccatcgcttaaagatgaactttgagctgacaagcttccttttaggagacatcgaatcggctattcagtcttgtgctacgatggagcagcaggagctgttggaggaaatggccagttccgtgggcgcagtaaacgtatgattcaggcaaattcggcgttgaggccaggccatcaaactgaaccgcgaaactcatgacgtgctcggactcggtgaagatgattgatagctgtacatgaagaaaactgacaagatgaactccccccataggaactttttccccccctgtagtccgcagggtacaacacacacccacccatgcatctcagcttccttgacggcagcagagttactagtagaaaatatacatggtttgtgcagttcaacgcttcaactgctccagtattcacagtttaatgcattttaggtatgttgctccagtttctcaacaattcactgcttgcaattaaatctacagagcaaagttctcagctagctacatttgaaccaatc

SEQ ID NO: 121596 - DNA, 1737 bp, Zea Mays
agctaaccttatcttcttcccgcgtcctttccagcctcccgtcccgtgtggcgtctggcgtgtgcgcacgcacctccccaggccccagtgccaccttccctcctcggctcgacccgcccggcgctccgccgcagctggctcatcccaatcccctcgtacagtcgtgctccgcgcccgcttcaccgcctgaacaaagatggaggccttcctagccggcctcttcagggcgcctccacgggccgtccccgcccctcggggcacgcctctccccagccttcctctcttctacggcaggcgccgcaggaggccgtcctcctccgtggtctgcatggcggagccctatctgattgccaagctggactctgcggagaaggcctggaaagaaatgtcggttaggttggcagatcctgacattgtctcggatccaagcgaataccaaaaaatcgcgcagtctgtttctgaactggatcaggtcgtgaccacatacaggcaattcaaggattgtgagaggcaacttgaagcgacaaaagctctggaaaaagagaacgaaggtgaccccgatatgttagagatgatagcttctgagttggaggctctatctaaccagctcgcagagcttgaagaaaaaatgaagtttctactgcttcccagcgatcctctagattcacgcaacatcttacttgaagtaagagcaggtgctggtggtgatgaagctgggatttgggctggtgaccttgtaggttcgcatgtaccagagatactgtgagcgcaacaattggaagtttaagccagtttcttgctcagaagcagaaatgggtgggtacaagacatacgtgatggaggtcaaggggaaacaagtctatagtaaactgaagtttgagtcaggtgtacaccgtgttcagcgtgttcccttgacagaggctatgggtcgtgttcatacgtcaacagcaactgtagctattatgccagaggctgatgaagttgatgtggttattgatccgaaagatattgagcttaaaacagcaagatctggtggagctggagggcagaatgttaacaaggtggagacggctgttgatcttattcacaagccgacaggaatacggatattctgtacggaagagagatcacagctacagaacagagagcgggcatttcaattgttgagagcaaaactttacgagataaaattaagggagcaacaagaatcattaagaaaccagaggaaattgcaggttggtactggtgcccgatccgagaagataaggacgtacaactacaaggataacagagtgacagaccatcgcttaaagatgaactttgagctgacaagcttccttttaggagacatcgaatcggctattcagtcttgtgctacgatggagcagcaggagctgttggaggaaatggccagttccgtgggcgcagtaaacgtatgattcaggcaaattcggcgttgaggccaggccatcaaactgaaccgcgaaactcatgacgtgctcggactcggtgaagatgattgatagctgtacatgaagaaaactgacaagatgaactccccccataggaactttttccccccctgtagtccgcagggtacaacacacacccacccatgcatctcagcttccttgacggcagcagagttactagtagaaaatatacatggtttgtgcagttcaacgcttcaactgctccagtattcacagtttaatgcattttaggtatgttgctcca

SEQ ID NO: 121597 - DNA, 2408 bp, Zea Mays
catcctcctagtttttttcttttctatttttcagctaaccttatcttcttcccgcgtcctttccagcctcccgtcccgtgtggcgtctggcgtgtgcgcacgcacctccccaggccccagtgccaccttccctcctcggctcgacccgcccggcgctccgccgcagctggctcatcccaatcccctcgtacagtcgtgctccgcgcccgcttcaccgcctgaacaaagatggaggccttcctagccggcctcttcagggcgcctccacgggccgtccccgcccctcggggcacgcctctccccagccttcctctcttctacggcaggcgccgcaggaggccgtcctcctccgtggtctgcatggcggagccctatctgattgccaagctggactctgcggagaaggcctggaaagaaatgtcggttaggttggcagatcctgacattgtctcggatccaagcgaataccaaaaaatcgcgcagtctgtttctgaactggatcaggcaattcaaggattgtgagaggcaacttgaagcgacaaaagctctggaaaaagagaacgaaggtgaccccgatatgttagagatgatagcttctgagttggaggctctatctaaccagctcgcagagcttgaagaaaaaatgaagtttctactgcttcccagcgatcctctagattcacgcaacatcttacttgaagtaagagcaggtgctggtggtgatgaagctgggatttgggctggtgaccttgtaggttcgcatgtaccagagatactgtgagcgcaacaattggaagtttaagccagtttcttgctcagaagcagaaatgggtgggtacaagacatacgtgatggaggtcaaggggaaacaagtctatagtaaactgaagtttgagtcaggtgtacaccgtgttcagcgtgttcccttgacagaggctatgggtcgtgttcatacgtcaacagcaactgtagctattatgccagaggctgatgaagttgatgtggttattgatccgaaagatattgagcttaaaacagcaagatctggtggagctggagggcagaatgttaacaaggtggagacggctgttgatcttattcacaagccgacaggaatacggatattctgtacggaagagagatcacagctacagaacagagagcgggcatttcaattgttgagagcaaaactttacgagataaaattaagggagcaacaagaatcattaagaaaccagaggaaattgcaggtacgttgtcaattcttcttaaaaagatcgtatcttccgaaggtcgtagctgttgagtccaactgaaatcaacaaaaaaaaactgtcttgtagatgataaatgctcaaattgaacagagtagcagtgtggtagacattttcgagaacagtattagtataatatccagatgaaattggcagaaatttaaaccatgacaagacaaccaaatctattgccttcagtttgtgtaggaaatagagttggcccttatgaaagattttgtaagagcatctccaacaagagccctaaatgggtcttatttaaaatatagggccctaccctaacaccataaaacaggttccaacgtgggacctattttacaaaaaatcatcaaacgattatagggttcggtctctcggattctaaatgtagtatcccatatacttgagccctatcctcattttgtacattatttctaaccttttatttcttaaataacatgatttatttcctaataatatgatataggctcaattgttggagccgcaaacatttttatggccctaaacactttaaatgaggtcctattttaattttgaggacccaaatataggacttcttgttggagatgctctaaaccgctttgtcaatgttactaatacctgttcaactgaaggttggtactggtgcccgatccgagaagataaggacgtacaactacaaggataacagagtgacagaccatcgcttaaagatgaactttgagctgacaagcttccttttaggagacatcgaatcggctattcagtcttgtgctacgatggagcagcaggagctgttggaggaaatggccagttccgtgggcgcagtaaacgtatgattcaggcaaattcggcgttgaggccaggccatcaaactgaaccgcgaaactcatgacgtgctcggactcggtgaagatgattgatagctgtacatgaagaaaactgacaagatgaactccccccataggaactttttccccccctgtagtccgcagggtacaacacacacccacccatgcatctcagcttccttgacggcagcagagttactagtagaaaatatacatggtttgtgcagttcaacgcttcaactgctccagtattcacagtttaatgcattttaggtatgttgctcca

SEQ ID NO: 121598 - DNA, 1764 bp, Zea Mays
catcctcctagtttttttcttttctatttttcagctaaccttatcttcttcccgcgtcctttccagcctcccgtcccgtgtggcgtctggcgtgtgcgcacgcacctccccaggccccagtgccaccttccctcctcggctcgacccgcccggcgctccgccgcagctggctcatcccaatcccctcgtacagtcgtgctccgcgcccgcttcaccgcctgaacaaagatggaggccttcctagccggcctcttcagggcgcctccacgggccgtccccgcccctcggggcacgcctctccccagccttcctctcttctacggcaggcgccgcaggaggccgtcctcctccgtggtctgcatggcggagccctatctgattgccaagctggactctgcggagaaggcctggaaagaaatgtcggttaggttggcagatcctgacattgtctcggatccaagcgaataccaaaaaatcgcgcagtctgtttctgaactggatcaggtcgtgaccacatacaggcaattcaaggattgtgagaggcaacttgaagcgacaaaagctctggaaaaagagaacgaaggtgaccccgatatgttagagatgatagcttctgagttggaggctctatctaaccagctcgcagagcttgaagaaaaaatgaagtttctactgcttcccagcgatcctctagattcacgcaacatcttacttgaagtaagagcaggtgctggtggtgatgaagctgggatttgggctggtgaccttgttcgcatgtaccagagatactgtgagcgcaacaattggaagtttaagccagtttcttgctcagaagcagaaatgggtgggtacaagacatacgtgatggaggtcaaggggaaacaagtctatagtaaactgaagtttgagtcaggtgtacaccgtgttcagcgtgttcccttgacagaggctatgggtcgtgttcatacgtcaacagcaactgtagctattatgccagaggctgatgaagttgatgtggttattgatccgaaagatattgagcttaaaacagcaagatctggtggagctggagggcagaatgttaacaaggtggagacggctgttgatcttattcacaagccgacaggaatacggatattctgtacggaagagagatcacagctacagaacagagagcgggcatttcaattgttgagagcaaaactttacgagataaaattaagggagcaacaagaatcattaagaaaccagaggaaattgcaggttggtactggtgcccgatccgagaagataaggacgtacaactacaaggataacagagtgacagaccatcgcttaaagatgaactttgagctgacaagcttccttttaggagacatcgaatcggctattcagtcttgtgctacgatggagcagcaggagctgttggaggaaatggccagttccgtgggcgcagtaaacgtatgattcaggcaaattcggcgttgaggccaggccatcaaactgaaccgcgaaactcatgacgtgctcggactcggtgaagatgattgatagctgtacatgaagaaaactgacaagatgaactccccccataggaactttttccccccctgtagtccgcagggtacaacacacacccacccatgcatctcagcttccttgacggcagcagagttactagtagaaaatatacatggtttgtgcagttcaacgcttcaactgctccagtattcacagtttaatgcattttaggtatgttgctcc

SEQ ID NO: 121599 - DNA, 2523 bp, Zea Mays
cgcgaggccgacccacgccacgctcctcctcagctacagtccctcctccaccgctgctgcgctcacgctcctcgacctcccacactcactgtcagtgtaaagctcacgccggaggccggagctagctgccccctgcccgtgcgtgttcatcctggctgctcatctatctctcttgctccgatccaagatccaacaagtgagctagtcactcacagcacaggtgacagggtggtggtgggcggcgggattgcggttgcggcagtagggttcaggctcggataccagcctcctcctcctcctcctcctcctccgcctccgtttccagaagggggcgagcgctaccggggagctcgacagacgccgagccgcaatgcccaagatgttcgggttctctcggcgccggatgaagctgggcaggttgaagggccatctgcacgaccatttccatggccctcgaagcccgtctcggaccaccaagcgttccagcagtcatcacaacgcagaggatccattggctacctcagtgagtgggcgcgccgacgacctcgcctggcgctgctcgtccgacactttcgatctcaatgggcgcgatttcgagagctccgagaactgggcggtcctgtccaccgagggtgacaagccagctcctcgtttcgatcatgcagcagccatggttgggagcaaaatggtggtgtttggtggcgactccggtcaatctttgctagatgatactaagatattgagcttagacaagcttacctgggattctgttgctcctaaagttcgaccaccattgaacgggcgttctctgaagctgaggccatgcagaggtcattgcctggtttcgtggggaaagaatgttattcttgtgggagggaaaagtgatcaaccttatgacaagatatcagtatggaccttcaatacagagagtgagctctggtctcatatggaagcgaagggtgacattccggtgtctcgaagtgggcatacggtgattagagccggtcctgttttaattctctttggaggtgaagatgccaaagggaagaaactacatgaccttcatatgtttgatctgaagtcattaacatggcttcctctgaactataagggtgctggaccttctccaagatcaaatcatgtagccgccctttacgatgatagagtcctattgatttttggaggtcagtcgaagtccaagaccctgaatgatattcatgctctagattttgaaacaatggtatggtcaagggtcaaaacccatgggcatcatccatcacctcgagcaggttgctgcggagctctttgtggaactaaatggtatattgcaggaggtggaagcaagaaaaaacggcaccctgaaacatgggttttcgatgtccttgagtccagatggtctgtttgtgtagtgcctcctagttcctcaatcactacaaagaaaggtttcagcatggttccattgtactacagggacaagatcgtgcttgttgcttttggagggaacaaaaaggaaccatccgacaaggttgaagtactagtggtgctgcaaaacgagcactgtttcagctggcggtctgcgcccgaggtggaacccttactgtacgacgagtctcctccaggctcaagggaactcgccgaccatctcagcagctgcgctccaccgtatcctactagctccgcggcgaggagcggtctcgccgccacagcggagaactcctgcgggaggaaacccctcccggactcactgctacggacctcgaacctcgggggctcgtcgctccgcaggcagttccgtcaggaagaggagtgcagcagcctggcgcaaaagctgcagaaaccgatcgacgacgacaggtacaaggacgccgccgacgagtgctccgagcatcaaccaccctcggccacgaaccctaaaccgcggaacgacgcgcggcggtcgtccccggaggtcgtcgtcgacgcaaaagcgaggaggctgctgggcaggagctcgtcggacatgaacaaccaccaggacgcaagggtggccgccctggtcaggaggaacgtggcgctggaagagcagctgtcggcggcgctggcgagcaaggacgaggcggagaagaacctgtccctggtcatcgacagcaaggacggcctggagaagaggctggccgagaaggacagggaggtcgaggcgctgagggagaaggcgacggggttggagctggcgcaggaggaggccaacagcctctccaacaccgtccacgccgacaacgtgcggctggagcgcgaggtggcgttcctgaaggccgtcatggacgagacccagaaggaactgcactcgactcgcggagttcttgcaggagaacgcgcacgggcattccagcttcaggtaagaccttatcatgctagactttctttctttcttttttttgttcatgccttgggctctgccaggttgaagtctttcatctgaagcagcgcctgcagacgatggaagggaggtcacccgcagcaccaagaaagcctcagaatgcgtag

SEQ ID NO: 121600 - DNA, 523 bp, Zea Mays
cacagtaatatatagccaccggaaaagctggcaatggaccgcgtggcgaagctggcgtcagagcgcgcggtggtggtgttcacggcgagcaactgcagcatgggcgacgtcgtgacgtcgctcctgagcagccttggcgtgagcgcggcggtgcacgagctggacagcgacccccggggccaggagatggagcgcgagcttgccaggaggctcggcggcggcagcgctgctgagcgcggaaccacagctctgccagcggtgttcgtgggcggcagcctcgtcggcgggaccaacagggtcatggcgctgcaccttgccggcgagctcgtgcccatgctcaagagcgccggcgcgctctggctgtaggaataggatcaacgtggataaggccgtggcaagaaaccaagagatgctgacggctgaccgttgtacagtacagaggagtgtgtgtgtgtgtgtgcttgcgtgaacagcaggggttttttgtatgcccaacgctgagaataacaaacgtaaaatgtgc

SEQ ID NO: 121601 - DNA, 339 bp, Zea Mays
tggcaatggaccacgtggcgaggctggcgtcggagcgcgcggtggtggtgttcacggcgagcaactgcagcatgggcgacgtggtgacgtcgctgctgagcagcctgggcgtcaacgcggcggtgcacgacctggacagggacccccggggcatggagatggagcgggagctggccaggaggctcggcggcggcggcgggcgcggcacgacgacgacccccaccgtgccggcggtgttcgtgggcggtgacctcgtcggcgggaccaacagggtcatggctctgcacctctccggcgagctcgtgcccatgctcaggaaagccggcgccctctggttgt

SEQ ID NO: 121602 - DNA, 1444 bp, Zea Mays
gcttgctcctcgctgccgccgtcttcttcttcttctttcttaccagtctcctccggtgcgggcgagggagacgacgacgacggcgatggcctggctgaggcggacggagacgctggtgctgctgctcgtggtgcttctggcctccgcttcaacctccgcggcggcggcggcggcgggagaggaggaggaaagagtgatcaggctgaagcacagtgacggtggctattcttataaccatactctggctcatattcttgtcgaatacgcgtctgcggtgtacacatctgacttgacatcacttttctcatggacctgtccaaggtgcaaaggccacacaaagggatttgaggtcatagagatcatagtagatgtggagaactgcttacaggcgtttgttggagttgcacctgaccctcgatccataatcattgcttttagaggcactcaacagcacagtgtctcaaattggatcgaagatcttttctggaagcagcttgatgtgacatacccaggcatgccggatgcaatggtccatcatgggttttattctgcatattataatacaactctgcgatatgagatcctgaagtctattaaatgggcaagaaaaacatatggaaatctacccataaatgttgtgggacactccatgggaggggctttagcttcgttttgtgcccttgatctatctgttaaatttggatcgcaggaggttgaactcatgacctttggacagcctcggataggcaatcctgcatttgctgtatactttggtgaacaagtcccaagaacaatccgtgtgacccatcagaatgatattgtgccgcatttaccaccgtattattattacctaggtgaatggacataccaccacttcgctagagaggtttggcttcatgagagcatagatggaaatgtagttaccagaaacgagacggtatgtgatgattctggtgaagacccgacctgtagcaggtcggtctatgggatgagcgtagcagatcatcttgagtactatgatgtcacactacatgctgattcaagaggaacctgtcaattcgtgattggtgcagccaaccaagtatacaactacgttcgtgaagttgatggatccatcatcctgtcaagatacccgcaagaaccacaagctctagaatctatgtgactttgtatgccacggaatgcacccctgtacagtatttttcattttcattttgtgtacagctcatgaaatgctgggcgctcctggagctctccagaggataaggagaggctcacctttttaaatgtgccccctttgctcaagtgagaatcgtgcatgtaagctccataagattgtccgcacaattcaatttgtgtatataaataatactatgtgttactaagtaatgtaagtattagatggtactccttgtttggtcattccctcattgtgttgtgttgc

SEQ ID NO: 121603 - DNA, 1744 bp, Zea Mays
ttgttttatttttatttgctatatgaatagtgcgcggctacagtgttaaagataactactaatgctaaagcatgtgattagtattctttccagctcacgttgttttgttctaaaaaaataacagtataacacagcatcaaacaaataggccaaagaagaatagaatctgaggtctatctttgacattagcccgtgtgtccacttttgtctaatatgaaactgcggtgctctgatttaaagattgcagctaagaacacgaaaaaggaaaaagaaagcaggggctgaaaataatggaaaccaacttgaatatatcaatctaaatgtatgttaacataatgaactcaaaatgtcaattagaatgttgatgctaaaatatatggacactagaaatgtgctaagctttggatccaaataatagaccacagacaccatgttaaacataaacataactaatttataaacataatgtctatttaaagcactgattgatgaaacagtaagcctacttaattaaaaacagaaaaaagcatacccaatcaacatgagactcaaaagttcctgagaagcttgcatccccattatttaattcccatcttttcaaggtaccatcacggctcccgcaaaaaagatgatcacttgtactaaatatggaaccatctagataagccaagcaattgatccccacacaatgctgaaaaacaaacagaaacgaatgcattagcatcgccattgagtggaatatgaattgtttcgaatgtatatagagtacctcgtcggcatcaagaatttattacaacacatgaataattaatttttgtagtagtttagaattctgaatcttctcttaatggttatgttttggattaggatgttattgtatctgatctatgtggcctttagtcttgacggactccagaaggagagagacggactgttgcagctgcagcagcaacaactaggagacgagcgataaaaaatagcgtagtagatagacgcctggaaagacaaagagagtgtgatcccgcaaaatttctcccaaaaatcatgacgcctttctggagcccggccctcattcttctgccaaatctctgcaagaataaaagatacgcagaagatatacgggactaattgctggattaattatctcgtggcgccggctgattagcgtggtacgtagaggaagactaatgctaataaacaaaatcaaggagctccaccagcatctggatcgatcatactcataccgggagaagacgcaggcccactggcggtggccgctgtgcttgcggcggaagtgcttcttgatgccgacgaggtcgcccagcgcgtgcgaggggtcgtggtgcaggcagctcggctccgggcacaggaacacgcgcttccgcgccgcctccccggcctcccgcttcagcagcttccacggcaccttgtgccgccgccggtgcatctgcaggttctggtcgcgctggaacccctgcccgcagatctcgcacacgtaccggtccgacacggattggtgcggagtattccgagcgagcgggcgtgtgggcgaagaagcggctggaacccctgcccgcagctaggattggtgcggagtattccgagcgcgcgggcgaagaagcggctgcggggctgcggggaaggaatacggcgtagcgtgcccatcgatttagcgggagagagaaagaatcaggaagggagaggaggaggaggaggacgccgttgaaggagcggctacagtgtt

SEQ ID NO: 121604 - DNA, 915 bp, Zea Mays
gatcatatcgccaaccgccctcgtctcctcactccaatccaaaccctagtcgtcgccaatatgcagctccatcccggtgctcgcctagatgggtcgccccgcaaggagagaacgtgactagatctagcaggagacagagcttcctgttccatctccaccgcaatcgaccgtgccaattaacaggctcccaaggaggagatccaatcctgctagcgggcatccccattgcatccatcgatctgaatctgcagatgagcagtctcattggggtcttctcttttttagaaatgactcatgggtttctcaccatcccttccacttggggatttcaatcgaatggtgaaatggagttaccaatcaaccactggctgaatcagctcccggcctgcccgggcttatctccaccggtacaggctagtgaccaccgccgctgggagcacatcgctaggaacgtgcgtacctccctccagtgtatcgttcaacccgccatgaatttcttggtttcactcgctggatgatcgactgactgacacacgtactctcttgtctttcagcctttcctcacgctctttgttctttggtcggttccatcaagcgtggcagtaatgttttgttattgcaaattatagatgtaaattcagatcaagtatatgcatttgtagtttatatcacaaagggaagctaaacatttcgagctgcaagatcccactgtatgcattactatacatatagaacaaaaattgtagttaccacaacatatttgttttagtatccagagtcctttgtccagtaagctttatgtctcacaaattagacaaattagggttatctacgtgtacactttgtgttttgtttttattcagtcatgaatgttctacaacaagcaaaatttatgacctgatcaactatgtaagg

SEQ ID NO: 121605 - DNA, 99 bp, Zea Mays
ctccaccgtctccttctcaaattgatttggaaagcctaaagcacaatgcattagtgccggctacctatccaagagttgtctccagcaagaaatagagat

SEQ ID NO: 121606 - DNA, 523 bp, Zea Mays
gcagagctcagattgcaacttcggcttctaaagagggagactatagacactagagatgacaacgagctttttacattgagtgatgtgatgtgaaaacatgtcaatcacttcctgagatgggggaatcccacgcttttaggaatatggaagaaatggatttcttctatgtgtttgatatgcttgttgctttgggcattcatgcacccaatgaggatgacctccttgataactgctacttactgcagtgtcctctaggggtttattcaggtagctctattcacatgattcaaatggtgattagttttagtggaaccaagtatgtttacatattgcttggttttgggcaaaaataaaatctattggaatgtgtttgaacaactatctaattttaaaaagtcaatgtgttatatagaaactgtggtaatgcacatacacctaacaattcttatatactccctccgtttctttttatttgtcgctggatagtgcaattttgcactatccagcgacaaataaaaagaaa

SEQ ID NO: 121607 - DNA, 95 bp, Zea Mays
ccctctttggtgaatgcttggagctatcgatcagggctcggtcggcggtatagacgtacaatgatgatgacgactaatgttctctttctcagcgg

SEQ ID NO: 121608 - DNA, 532 bp, Zea Mays
atagcagaagaccatccatcccctctgatcttaccgcttccatcgatttccacagatcttgagcaccagagtttcggtatggtgacagcaattaccacacgcaagattattattctcatggttgcgacagtagccatggtcgctctcttccccgccgggacgacggcggtgaagtacggtatgtgccagacgcagtgccaggagatccagcccaactgcgacgcatggtgcaagaggataggctaccccaagggcggcgagtgcatagcgccacactaccacaactgctgctgctggctggtaccaccgtcgtcctccgataataaacaactgaatggaacgacggcggggtcgtttcacaaccgcacgttacatgtatgacgactttaatttgtttgtcgttgttggttagtgattgaatggttttctgaaataaagagtatatgcgagatgttcggtattgaattttgggtgccaatcactttgtaccccgacactcaaattcagtgtgattggatgcctgcttgcgcgc

SEQ ID NO: 121609 - DNA, 1816 bp, Zea Mays
cggacgagggtgctagataggggggacacgtgacccggcaaccatgggcacgggcaggaggaagggcaagcgcagcgccgccgtggcttccgtcgacgacgctaacgaggccatggcttcggcggaggcgctctgtgtggagcatcaggacccaccgctggcttcagcggagggaaccgatgaggccaaggcggccaacggggaggcgacggcggtggtggagccggacgagccgaggcgggactcgtcgccggagcggggcgacggggatgccgcgcggctgaagctcctcaacggcattctcatccgcacggcctccgaggagcgggagcgggtggcggcgcttgaggcgcggctcgctgaactctccgccgacgccgccgtgctcgcggacggggagagcgcggtactgctcgcggccttctctgcccagctcagggccgtggaggaggagcaggctgcgctgctggaccgcattgcggtggcgcaggagtcccttgagcgcgcccaggcggaggcggccagcgaggccagggccagcgcagacgccacggcgcggctccaggaggcgatcgtggagaacggctcgctctcagagcagctccgtgcgaaggcggatgaggcggacgcggcggccgagcgggtggccggactggaggctgcggttgcgggattggagtcccagatctcggacctgcgcgcgaagaggagtgaattcgagagccagttggaggccatgcgggcgtcagctcgtgctgtccagtccgagaaggatgtgttggaatcaagcttcaacgagctcaagaaggaaaacgaggcgtacaaacaggagatggaggctacgcttcaggatcaattgaaggagtcggaggctctgcaatccaggaaggtggaattagaggcgaaggtgggttctttggaggcagagctctcagaggccgtcgctaggaaccatggattggagttggaagggcacaaattggatgtagagatggccgctaccaaggcggaggtggagaagctccacgccttgcttgcggagatggaccagaagcagattgttgtggctgctgaagtggctaggctccaaagtgagcttgaccaagtggcgatggcgaatgaagctgctgctggggcacatgaggctgagaagaagatgatggagggtgaattggagatgctgaaggtgaacgtggacatggttcaggctgagaaagatagtgccttagtcttggtagatgctaaaaatgctgaggttggaaagttgagggatgaactgaagaagctcaacagttccatggctgcgctccgtgctctctatgatgatcttgatggaaagtcttctttcctccacgatgagaaagtttcggttctcaaagaacttgagcaggagaaagctgaagcagaaaagctgaagtccaaaatccaggagcttgaatcctgtaacagagacaatgttcatgagattggggtgctgaaggcagaagttggtggcagggacaaacaaatcaatgacttgaacagtgagcttgagcaggtgcagcttgcagtagccgatgcagagcgcagtgggaagaatgtggtctggacatggctgtgcccagctaccacaaccgtgttagcagctgcgtcctttgtctacgccgcacgtagtcggtgaacagctagctctttcactcgctttttcgagtatgtactgctcgaaataacctggtctcttactcatgagtcgtgcatcattatacttggtatatgcctatatggtgaactgcttcttatactatgaaataaagctatggtccaacaattttgtttt

SEQ ID NO: 121610 - DNA, 1911 bp, Zea Mays
ccagtggcgcgccgcggagacgcacgaagtgccacacgtgtgcctgtccacacgccatccgctgaagcccttttggcatcccctccctccaccatgggtgcgggtggccccccggaggcgataagccccggcgcatcctggccgcccgtttcgaattcacgcttcccaacggtcgcgccaccctctccgactcccgcacccgccgtcgcttgcccttccgccactgaccgctcggcctcccgcttccgggacccacgcgtcgcggagggaaccgatgaggccaaggcggccaacggggaggcgacggcggtggtggagccggacgagccgaggcgggactcgtcgccggagcggggcgacggggatgccgcgcggctgaagctcctcaacggcattctcatccgcacggcctccgaggagcgggagcgggtggcggcgcttgaggcgcggctcgctgaactctccgccgacgccgccgtgctcgcggacggggagagcgcggtactgctcgcggccttctctgcccagctcagggccgtggaggaggagcaggctgcgctgctggaccgcattgcggtggcgcaggagtcccttgagcgcgcccaggcggaggcggccagcgaggccagggccagcgcagacgccacggcgcggctccaggaggcgatcgtggagaacggctcgctctcagagcagctccgtgcgaaggcggatgaggcggacgcggcggccgagcgggtggccggactggaggctgcggttgcgggattggagtcccagatctcggacctgcgcgcgaagaggagtgaattcgagagccagttggaggccatgcgggcgtcagctcgtgctgtccagtccgagaaggatgtgttggaatcaagcttcaacgagctcaagaaggaaaacgaggcgtacaaacaggagatggaggctacgcttcaggatcaattgaaggagtcggaggctctgcaatccaggaaggtggaattagaggcgaaggtgggttctttggaggcagagctctcagaggccgtcgctaggaaccatggattggagttggaagggcacaaattggatgtagagatggccgctaccaaggcggaggtggagaagctccacgccttgcttgcggagatggaccagaagcagattgttgtggctgctgaagtggctaggctccaaagtgagcttgaccaagtggcgatggcgaatgaagctgctgctggggcacatgaggctgagaagaagatgatggagggtgaattggagatgctgaaggtgaacgtggacatggttcaggctgagaaagatagtgccttagtcttggtagatgctaaaaatgctgaggttggaaagttgagggatgaactgaagaagctcaacagttccatggctgcgctccgtgctctctatgatgatcttgatggaaagtcttctttcctccacgatgagaaagtttcggttctcaaagaacttgagcaggagaaagctgaagcagaaaagctgaagtccaaaatccaggagcttgaatcctgtaacagagacaatgttcatgagattggggtgctgaaggcagaagttggtggcagggacaaacaaatcaatgacttgaacagtgagcttgagcaggtgcagcttgcagtagccgatgcagagcgcagtgggaagaatgtggtctggacatggctgtgcccagctaccacaaccgtgttagcagctgcgtcctttgtctacgccgcacgtagtcggtgaacagctagctctttcactcgctttttcgagtatgtactgctcgaaataacctggtctcttactcatgagtcgtgcatcattatacttggtatatgcctatatggtgaactgcttcttatactatgaaataaagctatggtccaacaattttgtttt

SEQ ID NO: 121611 - DNA, 113 bp, Zea Mays
gttcttttttggcgcacatatgagacgcacccgactttatcccttaaatccaggtgtgacatcttcacaaaattttatgtgctttaatatttaattagtaaattgtgtgtagt

SEQ ID NO: 121612 - DNA, 244 bp, Zea Mays
tttgaatttgaatttcgttatgagattcatcaatgaacaaagtgtaccaaattcaaatattagagtaaagaaatatattcttatttttatattttattttacctcatttgtttagtattttcttctcttttctcaaattctaaaattgtacctttgggttaaatcccaattctcgtatcattattatattcccatattattccttttttacattacaaaatttcaattccaatctaagataaag

SEQ ID NO: 121613 - DNA, 1091 bp, Zea Mays
cccgcctactcctccatagtcacaggctgatcccgcttctctcccctctgcgtccatgtccctggctcctcgcgccctctgcctctcgccgccgcagctttttcaccgaggcgccctcctccgcccgctgctgcgcggcatggcctcctgtgccgccaccgggtctcacgtcgctgcagaggcgcccccttttggtgtggggggatggggcgccagcgacccgcggtggctcgtcctggagaagctacccgcgagctacccgacaacccgcgatctgacaccatcccgcgggaggttctagcctgcctcctccttcccttacactcgccgctggcgtcattcaagcgcgctcgattagctgctccttcctcatgtttttgttaggctagcaactagcgcatcggcctgctgtgctgttgcaggtcctgcacgcctgttactccagggtgtttccttctgccaaaggggacaacctcaagctggttgcgtggtcttattccgtagccgatctactcgatctggatcacaaagattgagcctgaaatccttagttgttacagttctcatttctagctgcttatctataagcggacatcctatgacaagttgcaatggactaaaggatggcgtctggcgaagcagggagaaccttatcacacctttcttagaagcactgaaacgaagttgcttagtgttgacattgatggaattgcaagtgttagatttttgccccttacctactggtactgccctgatcgtgtgggcaattgcttgattagagaatttatttatggaaatgaaggggtggggattttgcttgtcgacgggcgcgtgccagtgtgccacaagtcgggctcgtacgtttgcagctgcacgagctgaaggttgggtgtctaacaatagctgccatcgaatttgcaccaagatcttactgtagctaccattgggacctagttacgaacatttgcacgcacagtaggaagctcgcttgtaaatttgagtttgtttggggtagtgtgagtggcagattacattgttggatcttttatgggcttagcccatttattcaataaactctatggtgtgtaatg

SEQ ID NO: 121614 - DNA, 173 bp, Zea Mays
cggatttttattcggatgtcaattttttggtcttctttcttcgattgtgaacaaataacatatagaatttgctatgtaaatttatattcttaacatatagaatttgctatgtaaatttatattcttgtttttagcatcgaggctattaaacttcataaaaaataaatattaaa

SEQ ID NO: 121615 - DNA, 292 bp, Zea Mays
gtgaatacttagtggcgaactgctattgcaagagcagaagcgacagaccataaaatagtgatgaacttagtctgaatacactaaagctaatagttaactgctaaaatttgatgtgctgctatcaattaaaatgtatgaaatacatgagtctgctgacaaatttgacatgttgggatatttgttttagcattcccaatagaagcataatataggtcttagatagtacagccctaaggagtgagaacaactctggttccaatgcacttcatacctaactcggacagcacaaata

SEQ ID NO: 121616 - DNA, 1305 bp, Zea Mays
atggctcattttgtggcctctttatcgtctgaggaatatttggaatcattgacaacaatgttgagttccgaaacattgatgggtgctattcgtacttcaactaacttgatgcctcaagggcagtctagccgatgcatagaggagcttacatcggatctcacagaaacattgaattggatggcatattgcaattttgaagatgatgctttggttagattaaaagtgcagtggaagtcgcttgttgtccttcgtgacaagctagctaatgtcagttgtggtttaagatatctttctcagttgatgtatacggtggggactggatgcatcatacactttgggagaaacacatttagcttgcctaccactgaatccccacaaatatcagattcagatggcttctcgtgccatccctttgtctgcagctcaaagcttcttgagaacaatgcaccagttggatttgtcatagaactggtcaacaatatcaacattctttatgccagaaaccaatatgaaattaagacagttaatgatatgagctactctgaatcaaaagagctaacattcatcgaaaagaaatatgtagaggtggttccgcctatggacaagcagcggcgcctagagcagattcttagagatcaagaaatgggctcaaaaatcatcatattttgctcaactaagaaaatgtgtgaccagcttgctcgtggcattggtcgcaattttaatgctttaagcatccatggtgataaatcacaggccgaaagagataatggtgtacaggaagagctggcgctactggagtctcgtacaccttttttctctaaacaagagtggaaacatgctggtgatttggtgaaactcttgcaaggtgccaaccagcatgtccctccacagctacgtgacatggctgcacgcagtgcttctggaggtccaagaaaccaggctgctgggatgagtcgctgggatgggcctggtggtagtcgttttgaacctggtgctggtggctctgttggttatggtggtgttagggagggtcctagaggttttggtggtcgtgagggcccaggtggatttggtgtccaagaaagcccagccatgtttggtggtcgggaagccgcaacccaggcagaggccggtcatggggttatgacagaagaagtgatggcaggagcattagtaggagcaggagtcgcagcaggagctggtcacacagcagaagccgcagcaggagctggagccgtagtcggagctgaagcagtagccggagtcgcagcagaagcaagagccgtgaccatggttaataaataa

SEQ ID NO: 121617 - DNA, 575 bp, Zea Mays
atggcatacccttacaggctgctggaaatactggatgctacaatgctacaaggcagcacaagtcacagcacccaagagacgatggatatggtcatcattcctgtcgtgagaataggactagcttgttgcaggactgctgcaagccagcgaattaggatggacgaggtggtgaaagaactcaatgacattaagaagacatgggaagaccatttcgcaaaaatcaccggggcaaccggcagagcagcggatggacgagcactccattgatggaaggtggcacaagcgcaatggcaaagcacacgctcagcctgtgcgcttgccatcatgctccgaatagagagagacagccagcccacacacggctgctggttctactcagtattttgcctagaaaattgagactatcatgtcacggcccctggtaaatctgctactactactacttgtatggtttagtaagtcggttgaagaggaaggggattaaggaaggattactgttgggctggcccattagggttccaagccgtgtaatagatccaggcgattaggcccagattagcatctataaatacctg

SEQ ID NO: 121618 - DNA, 1390 bp, Zea Mays
cacccctccctccttagatccggccatctcctgcccgcctcgacgtcggtcccacgacccggaaccctaaagctcaccccaatggcggtgtcgccggagcccccggtccggcggggagaatggaggcggccctggaggcggcgcgcgccaaggacaccaaggagcgcctggccagggttgagcggctgcacgaggcgctcaacgccgcggcgtgccgtgggctgaccactactgaggtcaccgcgctcgtgcgctcaacgccaacatctgcatctcccagggcggcctccaggcgctctccgccgccgccatcgtcagcggcaaccacttcaagatccacctcaacgccctcgtcccggccgccgtcgaacgcctcggcgacggcaagcagcccgttcacgacgccgcacgacagctcctcattactctgatggaggtgagcttcctttcgtcgtcctgggcagctaggttaagttatgaatttgtgctaagaggtcgagctggtgcaggttggagatttgaggcttgtttttttaggtaggttgggtggggtggggcacggtagatgtacaagttgcatggttgggctaaagcgaggaatccaaaggtctattcggctgaccatgatagattgataggcataacatttaaatggatcaatgggcataaccagtaaaagttcattctaagaaagaattacttcgggaatttgagaagatcgcagctacccttgttccagaaaaggattggtctttacgtattgctgccttgcaaaggattgaagccctggtttatggaggtgccattgattattcatcatttcttatgctcttgaagcaactggttcctccattgtcgactcagctgtctgatcgacgttctagtattgtcaaacaggcatgccacctacttaatatactatccaaagaactcctcggtgattttgagccatgtgctaaactattcatcccgatgctttttaagcttgttgtcataaccgtgcttgtgatcgctgaatctgcagatacatgcataaaaactattctacagaattgcaaggttggtaggattcttcctcgcatagttgacacaacaaagaatgaccggagtgcaatcctccgtgcaaggtgctgtgagtatgcacttctgatactggagtattgggcagatgcctcagggatacaacgttcagctgatttatatgaggatatgataaaatgctacactgtagtaaatgcgatgagcttttcttccattggtgttatttttagcctatcacatatatcattattctgaactcaatcccttcttgtacgtccataaatccaacacaacatacacattttcacaacatttatctactagtggaggtaccgaccatcacttgtca

SEQ ID NO: 121619 - DNA, 2501 bp, Zea Mays
cctcgttgcgaacatttatgtaatacagaaccttagaaactggaaatgtttattccattccggtaatttgggaatgatctgtgttaaaatcctttttaagtgtcataccacgcactatttttctgttcctcaactctatcgatcccataacctatttctgttaactggttactaaggacatgtacaatcccataaccaaattggtgggtatgcaatgcgtcaatgaaaaaaccatttcttcagtcctgtaatgttgttccgattgcgtcaatgaaaaaactgtaatttttgaccggggagatggtagcactagcatgtggggattaaagttcctaaatgttcagtactgtcctaaacacttgttttatcttttttgagtggaagtccgacgtccgagaggggctcgccattgggcttggcatgggcacagtcatgctgctcctcttctgcggctactcgctggtgatttgatatggctctaagctgatcctggagatggtgtacaccggagccaaggtcacaacatgatctttgtagtcctcactggttctcttttctcaaattgaccatggtgttgtaaatttgatcaatgaagaagattcaagaattaccgttttactggattgccatgggatttcgccattcagatttccaatgcaaatgatgaggtcgtttatcactgtggttcaagaaaactacccgaatcgtcttggggtattgtttgtcatccgccttcctccagttgtcagagttattgcacagacatttcttcaaattgcaatatcacatggtatccgtggagatgaggacgacattgcctccaagtctgctccaccggcatccatcgacggtgcaagatccagcagatagattgatggcaaagaggacgactccatgtccaggcgtactccccgccttgcatcgagattgctagctgcattctttagtaaaagacaaaggaagagttcgctctgctaataaatatttccaggaaggtgctagacactgaataagttggtggcatttttcatgaaaaaattgttgacttattattagccatctgtctatacaggtcataatcgaagggtttacagggaggagatctgaacatagctcttcaatcccaaagttaacatcgttggtaaaccccttctggtgttacctcacaaatatcactaaagtcattttagctttttgctgctccttatgtgcttcagattcagcaagaggtactttgcaagttttggaagactaatacctaacttttttactggtcgacatttgctttgtgtaggttaccataattcttactgcttgcaagcccttttagaatattactgctgcgaggttcttgcaagtccttgatgaagaagtcgaaggtgacgaacgccgaggccgtcatcctgatcgacgccaagaacctcacagcgcacctccttgtgatgctcttttctccaatgtcttctcttatctacatgcaggaaaaaatctacatgttgatggcgtggatcagaaaaatgtggaaggacaagatttaagatgcactgccatggttggcggtctatttactgcatctcgaagcggcttgcattcaaaggttctgcacctctaaatatttctggtcgtgaagctgtctatgaaaggaagatgaaaattcagcaagttggattgatttatctttcccccctatggctgattcagcaacctgtattaattagtctatttgacatttgatatttcaatgctgttataggactatattgtacatgaccttgaaggagctgaccatgtgacagaccttgatcataaccatgttgcagagttgaagatattaggactatattaaacattgctgcatatagcatcagacttagaagtcaaacaacatcaaacttatcatcagcaacaacttggtttccgtcgctgcccaaacttcagcagaggcgatctaagaagaagcaagcgtatcggctcatgttctgacggccgtgttcacgtggtgtaagatctgcattgtggaatccttcgcccggacaagagagattggatcctcccgtccagacaacctgatagaacgacagtgtataagaacagggctcttaggacgccttttgtcaagttgggtcataactctaccctgagaattgagatagatgatcatgtggtgcaagatattgagtccctaatctttgatgacacacataacaaatggtaagcgtctccgtggatggagcctgaagtatattcaaattcaaggcatgccacaaagcatctcgcgtgtgggatgctccggcgtgtggaaagtagaaaagccaaataaatgggtacatgtacagcaggcgtgagttcttaaatactcagattccttgtccataggcaaatgcatagttcatacgaatcagagtacacgatgcacacaacttgatgtctctatcgttgttttcaacatgatgaacatgcgaatttcgtggtattaattgggaccgtctgatttctcatgg

SEQ ID NO: 121620 - DNA, 2225 bp, Zea Mays
cctcgttgcgaacatttatgtaatacagaaccttagaaactggaaatgtttattccattccggtaatttgggaatgatctgtgttaaaatcctttttaagtgtcataccacgcactatttttctgttcctcaactctatcgatcccataacctatttctgttaactggttactaaggacatgtacaatcccataaccaaattggtgggtatgcaatgcgtcaatgaaaaaaccatttcttcagtcctgtaatgttgttccgattgcgtcaatgaaaaaactgtaatttttgaccggggagatggtagcactagcatgtggggattaaagttcctaaatgttcagtactgtcctaaacacttgttttatcttttttgagtggaagtccgacgtccgagaggggctcgccattgggcttggcatgggcacagtcatgctgctcctcttctgcggctactcgctggtgatttgatatggctctaagctgatcctggagatggtgtacaccggagccaaggtcacaacatgatctttgtagtcctcactggttctcttttctcaaattgaccatggtgttgtaaatttgatcaatgaagaagattcaagaattaccgttttactggattgccatgggatttcgccattcagatttccaatgcaaatgatgaggtcgtttatcactgtggttcaagaaaactacccgaatcgtcttggggtattgtttgtcatccgccttcctccagttgtcagagttattgcacagacatttcttcaaattgcaatatcacatggtatccgtggagatgaggacgacattgcctccaagtctgctccaccggcatccatcgacggtgcaagatccagcagatagattgatggcaaagaggacgactccatgtccaggcgtactccccgccttgcatcgagattgctagctgcattctttagtaaaagacaaaggaagagttcgctctgctaataaatatttccaggaaggtcataatcgaagggtttacagggaggagatctgaacatagctcttcaatcccaaagttaacatcgttggttaccataattcttactgcttgcaagcccttttagaatattactgctgcgaggttcttgcaagtccttgatgaagaagtcgaaggtgacgaacgccgaggccgtcatcctgatcgacgccaagaacctcacagcgcacctccttgtgatgctcttttctccaatgtcttctcttatctacatgcaggaaaaaatctacatgttgatggcgtggatcagaaaaatgtggaaggacaagatttaagatgcactgccatggttggcggtctatttactgcatctcgaagcggcttgcattcaaaggttctgcacctctaaatatttctggtcgtgaagctgtctatgaaaggaagatgaaaattcagcaagactatattgtacatgaccttgaaggagctgaccatgtgacagaccttgatcataaccatgttgcagagttgaagatattaggactatattaaacattgctgcatatagcatcagactttggaggatatgatgacatcagacttagaagtcaaacaacatcaaacttatcatcagaagttatatctgtgatccagcaacaacttggtttccgtcgctgcccaaacttcagcagaggcgatctaagaagaagcaagcgtatcggctcatgttctgacggccgtgttcacgtggtgtaagatctgcattgtggaatccttcgcccggacaagagagattggatcctcccgtccagacaacctgatagaacgacagtgtataagaacagggctcttaggacgccttttgtcaagttgggtcataactctaccctgagaattgagatagatgatcatgtggtgcaagatattgagtccctaatctttgatgacacacataacaaatggtaagcgtctccgtggatggagcctgaagtatattcaaattcaaggcatgccacaaagcatctcgcgtgtgggatgctccggcgtgtggaaagtagaaaagccaaataaatgggtacatgtacagcaggcgtgagttcttaaatactcagattccttgtccataggcaaatgcatagttcatacgaatcagagtacacgatgcacacaacttgatgtctctatcgttgttttcaacatgatgaacatgcgaatttcgtggtattaattgggaccgtctgatttctcatgg

SEQ ID NO: 121621 - DNA, 2221 bp, Zea Mays
cctcgttgcgaacatttatgtaatacagaaccttagaaactggaaatgtttattccattccggtaatttgggaatgatctgtgttaaaatcctttttaagtgtcataccacgcactatttttctgttcctcaactctatcgatcccataacctatttctgttaactggttactaaggacatgtacaatcccataaccaaattggtgggtatgcaatgcgtcaatgaaaaaaccatttcttcagtcctgtaatgttgttccgattgcgtcaatgaaaaaactgtaatttttgaccggggagatggtagcactagcatgtggggattaaagttcctaaatgttcagtactgtcctaaacacttgttttatcttttttgagtggaagtccgacgtccgagaggggctcgccattgggcttggcatgggcacagtcatgctgctcctcttctgcggctactcgctggtgatttgatatggctctaagctgatcctggagatggtgtacaccggagccaaggtcacaacatgatctttgtagtcctcactggttctcttttctcaaattgaccatggtgttgtaaatttgatcaatgaagaagattcaagaattaccgttttactggattgccatgggatttcgccattcagatttccaatgcaaatgatgaggtcgtttatcactgtggttcaagaaaactacccgaatcgtcttggggtattgtttgtcatccgccttcctccagttgtcagagttattgcacagacatttcttcaaattgcaatatcacatggtatccgtggagatgaggacgacattgcctccaagtctgctccaccggcatccatcgacggtgcaagatccagcagatagattgatggcaaagaggacgactccatgtccaggcgtactccccgccttgcatcgagattgctagctgcattctttagtaaaagacaaaggaagagttcgctctgctaataaatatttccaggaaggtcataatcgaagggtttacagggaggagatctgaacatagctcttcaatcccaaagttaacatcgttggttaccataattcttactgcttgcaagcccttttagaatattactgctgcgaggttcttgcaagtccttgatgaagaagtcgaaggtgacgaacgccgaggccgtcatcctgatcgacgccaagaacctcacagcgcacctccttgtgatgctcttttctccaatgtcttctcttatctacatgcaggaaaaaatctacatgttgatggcgtggatcagaaaaatgtggaaggacaagatttaagatgcactgccatggttggcggtctatttactgcatctcgaagcggcttgcattcaaaggttctgcacctctaaatatttctggtcgtgaagctgtctatgaaaggaagatgaaaattcagcaagttggattgatttatctttcccccctatggctgattcagcaacctgtattaattagtctatttgacatttgatatttcaatgctgttataggactatattgtacatgaccttgaaggagctgaccatgtgacagaccttgatcataaccatgttgcagagttgaagatattaggactatattaaacattgctgcatatagcatcagactttggaggatatgatgacatcagacttagaagtcaaacaacatcaaacttatcatcagttatatctgtgatccagcaacaacttggtttccgtcgctgcccaaacttcagcagaggcgatctaagaagaagcaagcgtatcggctcatgttctgacggccgtgttcacgtggtgtaagatctgcattgtggaatccttcgcccggacaagagagattggatcctcccgtccagacaacctgatagaacgacagtgtataagaacagggctcttaggacgccttttgtcaaggtaagcgtctccgtggatggagcctgaagtatattcaaattcaaggcatgccacaaagcatctcgcgtgtgggatgctccggcgtgtggaaagtagaaaagccaaataaatgggtacatgtacagcaggcgtgagttcttaaatactcagattccttgtccataggcaaatgcatagttcatacgaatcagagtacacgatgcacacaacttgatgtctctatcgttgttttcaacatgatgaacatgcgaatttcgtggtattaattgggaccgtctgatttctcatgg

SEQ ID NO: 121622 - DNA, 228 bp, Zea Mays
atggaggtggtgttccagagcatggcaatatggcagggtgactccaacacaatgcaccttcataggcacgacatgttcgtgctcgcccaggggcttgggaactacgatgtggcgagggacatcgttattgttgtaaggccgtcttcggtggatcgtgtaaatatgacatctacactggttgacactgttttgcagagtgaaataaatgatttgctaaagatgacctaa

SEQ ID NO: 121623 - DNA, 1649 bp, Zea Mays
gtaggtcagataacgagcatcaggtcaaagaaacagacatgggcagcctttccggcacctcttcgtccttggccgctgcgttcgacgccgactccgagcgcttccagccgctgaacgccgacgacgtccgctcctacctccacaaagccgtggacttcatctacgactactacaagtccgtggagtccgtccccgtgctcccgagcgtcgagccgggttacctggcccgccagctcaagtccgcgccgccgaacgccgccgcgccgttcgacgtcgccatgcacgagctccgcgaggccgtggtgccggggacgacgcactgggccagccccaacttcttcgccttcttcccggcgaccaacagcgcggcggccatcgccggggagctcgttgcctccgcgatgaacaccgtcgggttcacctggcaggccaacccggcggccgcggagctggaggcgctcgcgctcgactggctcgcgcagctcctcctcctgccggacagcttcatgaaccgcccctgcagcgctgtcgtcgccggccgaggcgcaggcactagaggcggcggcgtcatcctcggcaccaccagcgaggcgatgctggtcacgctcgtggcggcccgcgacgccgccctgcgccggagcggctccgacggcgtggccgggatcacgcggctgaccgtgtacgcagccgaccagacgcactccaccttcttcaaggcctgccgcctcgccggcttcgacccggccaacgtcaggtcgatccccaccggcgccgacaccgactacgcgctcgatccggcaaggcttctcgaggcgatgcggcgcgacgccggcgccgggctcgttccgacgtacgtgtgcgtcacggtcggcacgacgtcgtcgaacgcggtcgacccggtgggcgccgcggccgacgccgccgccgagttcggcgcgtgggtgcacgtggacgccgcctacgccggcagcgcctgcatatgcccggagttccggcaccacctcgacggcgtggagcgcgtggactccctcagcctgagcccgcacaagtggctgctcacgtgcctggactgcacctgcctctgggtgcgcgacacgcgccgcctcaccgactccctagagacgcgcccggagtacctgcggaaccacgccaccgagtccggtgccgtcaccgacctcaaggacatgcaggttggcgtcggccgccgcttccgcggactcaagctctggatggtcatgcgcacgtacggcgccgccaagctccggcagcacatccgcagcgacgtggccatcgcaaaggtgttcgaggagtccgtgcgcgcggaccaccggttcgaggtggttgtcccgaggaacttcgcgcttgtctgcttcaggatcaggccgagcgccaccgccagcatgacggaggaggacgccgaggtggccaatcgggagctcatggagcggctgaacaaaagcgggagggcgttcctggccaacaccgtgatcggtggcaagttcgtgctgaggttcgcggtggggtccacgctacaggaggagaggcacgtgcggaacgcgtgggatctcattaagatgaccacaaccgagatcataaacggagaggtggattaagcctgtttgttaaccttggtcttgttttctaggatt

SEQ ID NO: 121624 - DNA, 992 bp, Zea Mays
gcatcaagaatctgtaggtacaagtacaacaagcgcgcggtaatggcggagaaaggcagcggcggcggcgacgtggagccagcgacgagggcggccggcggcatgtgcgaccggttcctgacgttcctggccaagaacctgtcggtgagcaggatgaagagcatcgccgaggggccaaggagcaacggcgccggcggccaccctccgccgccgacggagggaggaggaggcgacggtggcatagaagaagacgagttcgccatacccatcgagagggccgagttcgacttccagcagctcggcggccatggcgatgggggccccagcggcgtcgcgacgaccgtcttggaagagagcgccgcgacgacggcgaggggcgttcctgatcctgagcggaagcaggacggagctgctgcggccgacggcccggtggaagcggaggccgcggcgccagcggtggcgaaggcggaggagacgaaggtgacgaggaggacggtgacgatcaaggaggaccgtcctgcgcaggagggcagcggcggcgcctcgttggagaggaagaagtcgctgttccggaagcggcaggcgtcgtcggtcgccggagcggaggagcagagcggcgcccgggtgccgaggcggagcgggctccggccgcggatgccgcaggcgccaagggtgccgtccaacatcaacgagcgctcctccagcttcatcgaggagcgcaagaagggattcggcggcaagccggcgccggggaactgaacggacgacggcgtaggtaggggccggagcaccgtgcagccgttgccgcgacggtgcaatatgctgccgcgccatgtctctctgactcccagggacagggagtgtgtagtgtacttacggttcgtgtgtatgggtttgatgaagtgtgtgattatattgctcgctaatcgtgtactggtccatggatggcggtctcgatcttataaccaaactgtgtatgggtttagaactta

SEQ ID NO: 121625 - DNA, 510 bp, Zea Mays
caccgctccaatcgccaagagatcgactgcatccagatcatctgcaatcagccagccatgtcgtcaagctcgagctcttcccagaggaaggaggaggagaaggccatggcaccggccgcggatgcggaagccaagaagaacccacggcttcagcggatgacgcaggagcagatcgactccttgatccggtaccagaccgtgcacatgcccgaggaagccttccgcaggttgagccgaaggaccaaggagctgctgaccccggaggagctggcgtaccagggcgacttccccgtccccatgggccagatcgacgactacctcgccaacatctgcagagagatcaaccagaccgaggcgcggttcctgcgggagagggaccgcatcctcaacgactactacaacaaaggctacgcctacgccgatcaacaaccttcgtcgtcatcgtcgggtaaccggaggaggttcccacctgggctcaccaagaaaaagcaaaccaaacaagtggtttaa

SEQ ID NO: 121626 - DNA, 255 bp, Zea Mays
catgtatcacaactaaaacttgctgcaggtttcaaaggggtggcttcttcctcgcttccaccatccttgccggagctccgcgttcctgtccgagtactccagactcgaggattatccaagggcaaccggctggttcagcaggtcctggtggaatggtctggcctcccgcctgacctcgctacatgggaagatcaagaagctcttcgtcaaagctttcctttggcccctgcttggggacaagcaggcttcgaaggg

SEQ ID NO: 121627 - DNA, 2944 bp, Zea Mays
ctcgtgaggtccgtcgcggtgatgcccacttgtcttacaagactccaacgaagacatcatcatatcaggattgggacaaacattctccacaagcttctgacagacctacttcaatggtttcagatccttcgtcgtctgacagtaaggttgcgtccctccgcgcttaccgtcgggcacgaggtctctgtcaatactgtgctgacaaatgggttaaaggccacaagtgctctcccactatccagttgcatgtgatgcaggaactttgggatctactcactccagagtcccaggaaccagaggctgaatttcaagatacatcagaacagttcatgatactgctttctactgaagctgtgtcctccaagtcctctcggtccaccttccggttatcgggttcgctgttcggccaggaattgttgatgttactagattctggcagctctcattgttttcttaacacgtcactggcaagctctctcacaggggtgaatcaattggctcaaccattgtcagtaacagtggctaatggcaacaagttgcagtgtacggctgaattaacaaatgcagagtggacttgtcaggggctctcgtttacttcatcatttaagcttcttcctataccttgttatgatgccatcatcggcatggactggcttgaaagctgtagcccaatgtatgtggactggaaacacaagtggatatccctctcacatctgggcaaatctgcgcttcttcaaggagtccagccaacaacaccgtctgcatccctgttggagttacgacacacagctccggaccagtctgaaatattccagctgcagatagcccatgattcatcagttccagaggcaattcaacacctcctacatgaatttgacttcctgttcgctgaacctaagtctctgccgccaagccgattttgtgatcaccatattccactcatcgcaggcgctcgcccagttaatatccggccttaccgtttctcaccaacaatgaaggatgaaatagagactcaggtggctgatatgttacgccaaggtttgattcagcacagttccagttccttttcctcaccggtcctgctagtgcgcaagaaggacaatacatggcgcttctgtgtggattacaggcacctcaatgccctcacggtgaagtcaaaatacccagttcctattattgatgagttgctagatgaattgtttggagcctcctatttctccattttggacctccgggctggattccaccaagtgttgctcaaggccggtgaggagcacaaaacagccttccagacgcacatgggccactacaagtttcgcgtcatggcatttggactcacaggagctcctggcaccttccaacgggctatgaaccacaccttgtctccattattgcgcaagtgtgccttggtgttctttgacgacatactggtgtatagtgattccttggagagtcatgtgcagcacttgcatcaggtcttcagtttgctcgctcaggatcagtggaaagtcaagcgatccaaatgttccttcgctcagtccagtgtctcctacttaggccacgtggtcagtaaagatggagtggctacagacccgggtaaaattcaggcaattcctcctggcccgtaccatgttcacttaaggatctgcgcagttttttgggtctggccggttattatagaaaatttattcgccacttcggggttatctgtcagcctctcacacagttattgaagaaaggtgtgcacttcatttggacatctgagcatgacaccgccttttccaccctcaagcaagctcttacgtcggctcctgtgttatcattaccagattttgcttctcccttcacagtggaaacggacgccagtgcagtcggtattggagctgtattgatgcagcatgggcacccagttgcattcctcagcaaggctttgggccctaagacccgtggtctctccacttatgaaaaggaatacatggcgattattgtcgcagtccagcagtggcgttcctacctccaacatggcgaattcacaatcctcacggaccacaaaagccttactcagcttaacgagcagcgcctgcacacgccctggcaacacaaagtcttcaccaaacttttgggcttgaattaccgcatccagtacagaagtggctctgacaaccgtgctgctgacgccctgtcacggcatagttttgcagaatgtcaagccgtctccgttattgttcctcaatggctggttgccgtccaagatagttatcaccaagataaacaagcactttccctcatctctaaattggctgttgacccagcggctgtacccaattttaccctgcatgatggtctactccgatacaaggaacgcatttgggtgggtgaggacacacatctgcagcaccgcattgtcgaagctttacacagttccccattgggcggacattctggcataccagtgacatacagccgtgtgaaaaaactctttgcctggactaagttgaagccctttgtgcagaagttcgtgcaggaatgtcaggtctgtctgcaagcaaagccagatcgagctgcttatcccgggttgctgcaaccgcttcctgtgtgtaacacctcaaatccatcaattaaaataatacattattagttgctaaactaagtagagagtaaattaaaaatttatcaagtgtttgaatgcattcattatcggtgcatgatttctttgtttgttaatgaattgcaacacctttattttaatttattctctttgtgaagctctatttacttaaataataaaaaaattgcctagaagcttatttataatatatattatttaataaaatattgttattagatttattatactttttggaatatttaaaatatagttctttttgaataatctaatgttttttaaaataaggggaatgaatttcgaaatttaaaaaaaaaa

SEQ ID NO: 121628 - DNA, 1128 bp, Zea Mays
gtccttcgtctcccttctctgttcttcctaaaaccccatctaccttctcctcctactactgctaacaacctggtatcagattcagtcgatcttcctccgcccatggcgccgccatctacctcagattcggcccttacccttgctctggagaaccagacccgctccctgcttgccgagctggacaagcgtatccagtccatggatagcaagtgggagtcgcgggtgtccgtcctggagaacacggcgacggatgcagccagatccgtcaccgaattttccactgccctccgcgccgatgtggaggcccatctcacagcctcggatgccgctacagaagggcgtctgcaccacttcgaagtggagactggcaaccgcatcgctgctctcgagtccgcgatgcagatgttcgacttttggcgtcctcgagttgactcttccatcgactcgctccagtcgaacatggactggatgcgcgccgagatcgccaagatggatgctcagtggtcccacggagcgcgcgtcggcggcgccaccatgccaggtgtccttggttcccccggttcccttgctgcgtcgcccagcatcctcggaactccgggcgcgttcgcctccactggatcgggtccggggcacccacctgctgccgtcgactacactgatggccctagattcggacacggcttcgacagctacctccgggatagtggacttcggcatccaactgccgatggccgctacccggtcacgggtatgtggcgtccccccttctccaacattttcgtttgctcaaccaaatgggttcggcgggggcgacgtagatctcagaggggctctaaacaaacatggtggcgggttgcccaaacttacattccccacgtttgatggctccagtcccaagttatggcaacgacgttgcgaaaaatactttgaaatgtatgccacagaggagatggtctgggtcaaagttgccaccatgtattttgaaggggcagctggccgctggctccaatcagtggaaccccgcctgccttctctgtcgtgggttcagttctgtcgtttggttcaagaccgattcggtcgcgaacagcacgaactggtgattcgcaaactttttcatatccgacagac

SEQ ID NO: 121629 - DNA, 105 bp, Zea Mays
tttattttttacacttgtgaccacgtacacctcttatgtctccgtcttgcatagactgctccagttggagcatcgtcagccggaaatcaggtattcatgtttgtg

SEQ ID NO: 121630 - DNA, 282 bp, Zea Mays
atggaagccccgccatcggccaggaatcgttgcatcacgtcatttgattcatctcccttccattcctttgcttccgtggtggatgagaagaaagcgatgaagggcgcaccggtcttattctacgtgctacctgctatgggatttgacaataaaacacacatttaccttgcttctggtgaactctttggtgggaaacatttcatgaaaccatacaaggctatgtttccacgtttagagaaccatatcatagtcggacctgaaaatctggaagagaatacctaa

SEQ ID NO: 121631 - DNA, 833 bp, Zea Mays
taaacctctccagggaatagtggggggagaagagattttgtaaaatgcagttacatcaggggtgctcctggggaagtgtatggatccggagaagagaatccgcatctgcccatcaatcagcactgccttcttgtcgtaagccacagcgcattccacggcggccaccagaacggacagcgccactacgaagcccagcagggcagccgggcaccacctcctcatggccaacctccccgctccaagaaggtgggcgaagaggaaaaccgcagcgtgcactgggtttgcgagtgcgcgagactgtgtggtcttcactcgcttgtgagatcttcccctccagcaccacctcctcctcctgcacacctcctctgttttggttgctgcctttcttggatttctagagggcggcgctaatgaaggtgggccagagggtggcgccccagaaggtggcaaaggagaggacgtgagccagcttggcggacgtgatggagcctacgccggaggggggaatggagagcatcagggacgaagagttcggtcgcggcaaagaagcacaccgccgctaggaaccatgtcgctcatcccatcgctcgaatccatggaatttttggaccagatttttcccttaggatttttgcttcttagattggaacaagaggaccgggggagaaagatgggggttttagagccggaagcttaccacgaaggcccatcgcggagcctggaaggcttggaacagggaacgccagcgaccgcgagccaagaagggaaagcggaaggcggtggcgtgggagggagaagagaaagggacaggaaggacaggaaacaaggacaag

SEQ ID NO: 121632 - DNA, 1351 bp, Zea Mays
cccgtacgtgtctcgctggccgtccgtatatatagagagaggcatcggagattggccgccacgttgccatcgcgcgcggcgcccgccggccaaggccaaccatgctggcgagggctcctccgccgcggccgtgctccagcggcggcagaggccgcttctaacgggtcagcggcggcggccgtcgcagggatcagcagcagcagcagcgcgctggtgacctcgaccgtcgggaaatcgacgaacatcctgtggcatgagtgcgccatcgggcagaaggagcgacagggtctgctgaaccagaagggctgcgtcgtgtggatcactggcctaagcggttcaggtgaggtctgcaagagctgatctcttcacatttaattacgaacaaagatccttccttttatatatatatacctgtctgtctgtctgtctgtctgtctgtcttgacttgatcagggaaaagcacgctcgcgtgcgcgctgagccgcgagctgcacggcagaggccacctcacgtacgtcctcgacggcgacaacctcaggcacgggctgaacagggacctcagcttcggagcagaggaccgcgccgagaacatccgcagagtaggtaggccggccgccgtaggcgccagcgccagcgccatgcatgttcagttctgctgatccgttctcgctcgcaaccgagtgctcgctcgctctagcgatgtcactgctcgtttgcttaaatctttatttcaggggaagtagcgaagctgttcgccgacgctggcctcgtctgcatcgccagcctcatatcgccctacagaagcgaccgaagcgcgtgtcgcgatctgctgcccaagcactcgtttatcgaggtgttcctggacgtgccgcttcaagtgtgcgaagccagggaccccaaaggcctctacaagctcgcacgcgccggcaaaatcaaagggttcaccggcatcgacgatccttacgaaccgccgtcggactgtgagatagtgatccagtgtaaagtcggcgactgcccttcgcctgaatcgatggctggtcacgttgtgtcgtaccttgagacgaatggtttcctccaggactagacatggaatgcgatcgatgcgtctgatgtgtatatatgtagcagcagccggagcggcattgccaaggctgtgtaatctcatggctgtctttctctttaagaccaaaacaaacaagagatggcagtgtaaaaaggaaaaaaaaaactgcgtctgacagagtcgctgaatcaaccatgcttctgataaaagctattgtttgtaggtacggcgttgattcttacgacatttatgacaatgctttcgaaaggtcggttccaaaaaaaaaac

SEQ ID NO: 121633 - DNA, 1230 bp, Zea Mays
accatttggacaccgatccatccatccatccagccccgtacgtgtctcgctggccgtccgtatatatagagagaggcatcggagattggccgccacgttgccatcgcgcgcggcgcccgccggccaaggccaaccatgctggcgagggctcctccgccgcggccgtgctccagcggcgtttgcatcgcccgcgcacatccaagagccgccgccgtcgcggccaggccggggacgacgaggacgacgacgacggtcgcggcggcggcggcagaggccgcttctaacgggtcagcggcggcggccgtcgcagggatcagcagcagcagcagcgcgctggtgacctcgaccgtcgggaaatcgacgaacatcctgtggcatgagtgcgccatcgggcagaaggagcgacagggtctgctgaaccagaagggctgcgtcgtgtggatcactggcctaagcggttcagggaaaagcacgctcgcgtgcgcgctgagccgcgagctgcacggcagaggccacctcacgtacgtcctcgacggcgacaacctcaggcacgggctgaacagggacctcagcttcggagcagaggaccgcgccgagaacatccgcagagtaggggaagtagcgaagctgttcgccgacgctggcctcgtctgcatcgccagcctcatatcgccctacagaagcgaccgaagcgcgtgtcgcgatctgctgcccaagcactcgtttatcgaggtgttcctggacgtgccgcttcaagtgtgcgaagccagggaccccaaaggcctctacaagctcgcacgcgccggcaaaatcaaagggttcaccggcatcgacgatccttacgaaccgccgtcggactgtgagatagtgatccagtgtaaagtcggcgactgcccttcgcctgaatcgatggctggtcacgttgtgtcgtaccttgagacgaatggtttcctccaggactagacatggaatgcgatcgatgcgtctgatgtgtatatatgtagcagcagccggagcggcattgccaaggctgtgtaatctcatggctgtctttctctttaagaccaaaacaaacaagagatggcagtgtaaaaaggaaaaaaaaaactgcgtctgacagagtcgctgaatcaaccatgcttctgataaaagctattgtttgtaggtacggcgttgattcttacgacatttatgacaatgctttcgaaaggtcggttccaaaaaaaaaac

SEQ ID NO: 121634 - DNA, 1226 bp, Zea Mays
accatttggacaccgatccatccatccatccagccccgtacgtgtctcgctggccgtccgtatatatagagagaggcatcggagattggccgccacgttgccatcgcgcgcggcgcccgccggccaaggccaaccatgctggcgagggctcctccgccgcggccgtgctccagcggcgtttgcatcgcccgcgcacatccaagagccgccgccgtcgcggccaggccggggacgacgaggacgacgacgacggtcgcggcggcggcggcagaggccgcttctaacgggtcagcggcggcggccgtcgcagggatcagcagcagcagcagcgcgctggtgacctcgaccgtcgggaaatcgacgaacatcctgtggcatgagtgcgccatcgggcagaaggagcgacagggtctgctgaaccagaagggctgcgtcgtgtggatcactggcctaagcggttcagggaaaagcacgctcgcgtgcgcgctgagccgcgagctgcacggcagaggccacctcacgtacgtcctcgacggcgacaacctcaggcacgggctgaacagggacctcagcttcggagcagaggaccgcgccgagaacatccgcagagggaagtagcgaagctgttcgccgacgctggcctcgtctgcatcgccagcctcatatcgccctacagaagcgaccgaagcgcgtgtcgcgatctgctgcccaagcactcgtttatcgaggtgttcctggacgtgccgcttcaagtgtgcgaagccagggaccccaaaggcctctacaagctcgcacgcgccggcaaaatcaaagggttcaccggcatcgacgatccttacgaaccgccgtcggactgtgagatagtgatccagtgtaaagtcggcgactgcccttcgcctgaatcgatggctggtcacgttgtgtcgtaccttgagacgaatggtttcctccaggactagacatggaatgcgatcgatgcgtctgatgtgtatatatgtagcagcagccggagcggcattgccaaggctgtgtaatctcatggctgtctttctctttaagaccaaaacaaacaagagatggcagtgtaaaaaggaaaaaaaaaactgcgtctgacagagtcgctgaatcaaccatgcttctgataaaagctattgtttgtaggtacggcgttgattcttacgacatttatgacaatgctttcgaaaggtcggttccaaaaaaaaaac

SEQ ID NO: 121635 - DNA, 1474 bp, Zea Mays
accatttggacaccgatccatccatccatccagccccgtacgtgtctcgctggccgtccgtatatatagagagaggcatcggagattggccgccacgttgccatcgcgcgcggcgcccgccggccaaggccaaccatgctggcgagggctcctccgccgcggccgtgctccagcggcgtttgcatcgcccgcgcacatccaagagccgccgccgtcgcggccaggccggggacgacgaggacgacgacgacggtcgcggcggcggcggcagaggccgcttctaacgggtcagcggcggcggccgtcgcagggatcagcagcagcagcagcgcgctggtgacctcgaccgtcgggaaatcgacgaacatcctgtggcatgagtgcgccatcgggcagaaggagcgacagggtctgctgaaccagaagggctgcgtcgtgtggatcactggcctaagcggttcaggtgaggtctgcaagagctgatctcttcacatttaattacgaacaaagatccttccttttatatatatatacctgtctgtctgtctgtctgtctgtctgtcttgacttgatcagggaaaagcacgctcgcgtgcgcgctgagccgcgagctgcacggcagaggccacctcacgtacgtcctcgacggcgacaacctcaggcacgggctgaacagggacctcagcttcggagcagaggaccgcgccgagaacatccgcagagtaggtaggccggccgccgtaggcgccagcgccagcgccatgcatgttcagttctgctgatccgttctcgctcgcaaccgagtgctcgctcgctctagcgatgtcactgctcgtttgcttaaatctttatttcaggggaagtagcgaagctgttcgccgacgctggcctcgtctgcatcgccagcctcatatcgccctacagaagcgaccgaagcgcgtgtcgcgatctgctgcccaagcactcgtttatcgaggtgttcctggacgtgccgcttcaagtgtgcgaagccagggaccccaaaggcctctacaagctcgcacgcgccggcaaaatcaaagggttcaccggcatcgacgatccttacgaaccgccgtcggactgtgagatagtgatccagtgtaaagtcggcgactgcccttcgcctgaatcgatggctggtcacgttgtgtcgtaccttgagacgaatggtttcctccaggactagacatggaatgcgatcgatgcgtctgatgtgtatatatgtagcagcagccggagcggcattgccaaggctgtgtaatctcatggctgtctttctctttaagaccaaaacaaacaagagatggcagtgtaaaaaggaaaaaaaaaactgcgtctgacagagtcgctgaatcaaccatgcttctgataaaagctattgtttgtaggtacggcgttgattcttacgacatttatgacaatgctttcgaaaggtcggttccaaaaaaaaaac

SEQ ID NO: 121636 - DNA, 1343 bp, Zea Mays
accatttggacaccgatccatccatccatccagccccgtacgtgtctcgctggccgtccgtatatatagagagaggcatcggagattggccgccacgttgccatcgcgcgcggcgcccgccggccaaggccaaccatgctggcgagggctcctccgccgcggccgtgctccagcggcgtttgcatcgcccgcgcacatccaagagccgccgccgtcgcggccaggccggggacgacgaggacgacgacgacggtcgcggcggcggcggcagaggccgcttctaacgggtcagcggcggcggccgtcgcagggatcagcagcagcagcagcgcgctggtgacctcgaccgtcgggaaatcgacgaacatcctgtggcatgagtgcgccatcgggcagaaggagcgacagggtctgctgaaccagaagggctgcgtcgtgtggatcactggcctaagcggttcaggtgaggtctgcaagagctgatctcttcacatttaattacgaacaaagatccttccttttatatatatatacctgtctgtctgtctgtctgtctgtctgtcttgacttgatcagggaaaagcacgctcgcgtgcgcgctgagccgcgagctgcacggcagaggccacctcacgtacgtcctcgacggcgacaacctcaggcacgggctgaacagggacctcagcttcggagcagaggaccgcgccgagaacatccgcagagtaggggaagtagcgaagctgttcgccgacgctggcctcgtctgcatcgccagcctcatatcgccctacagaagcgaccgaagcgcgtgtcgcgatctgctgcccaagcactcgtttatcgaggtgttcctggacgtgccgcttcaagtgtgcgaagccagggaccccaaaggcctctacaagctcgcacgcgccggcaaaatcaaagggttcaccggcatcgacgatccttacgaaccgccgtcggactgtgagatagtgatccagtgtaaagtcggcgactgcccttcgcctgaatcgatggctggtcacgttgtgtcgtaccttgagacgaatggtttcctccaggactagacatggaatgcgatcgatgcgtctgatgtgtatatatgtagcagcagccggagcggcattgccaaggctgtgtaatctcatggctgtctttctctttaagaccaaaacaaacaagagatggcagtgtaaaaaggaaaaaaaaaactgcgtctgacagagtcgctgaatcaaccatgcttctgataaaagctattgtttgtaggtacggcgttgattcttacgacatttatgacaatgctttcgaaaggtcggttccaaaaaaaaaac

SEQ ID NO: 121637 - DNA, 1339 bp, Zea Mays
accatttggacaccgatccatccatccatccagccccgtacgtgtctcgctggccgtccgtatatatagagagaggcatcggagattggccgccacgttgccatcgcgcgcggcgcccgccggccaaggccaaccatgctggcgagggctcctccgccgcggccgtgctccagcggcgtttgcatcgcccgcgcacatccaagagccgccgccgtcgcggccaggccggggacgacgaggacgacgacgacggtcgcggcggcggcggcagaggccgcttctaacgggtcagcggcggcggccgtcgcagggatcagcagcagcagcagcgcgctggtgacctcgaccgtcgggaaatcgacgaacatcctgtggcatgagtgcgccatcgggcagaaggagcgacagggtctgctgaaccagaagggctgcgtcgtgtggatcactggcctaagcggttcaggtgaggtctgcaagagctgatctcttcacatttaattacgaacaaagatccttccttttatatatatatacctgtctgtctgtctgtctgtctgtctgtcttgacttgatcagggaaaagcacgctcgcgtgcgcgctgagccgcgagctgcacggcagaggccacctcacgtacgtcctcgacggcgacaacctcaggcacgggctgaacagggacctcagcttcggagcagaggaccgcgccgagaacatccgcagagggaagtagcgaagctgttcgccgacgctggcctcgtctgcatcgccagcctcatatcgccctacagaagcgaccgaagcgcgtgtcgcgatctgctgcccaagcactcgtttatcgaggtgttcctggacgtgccgcttcaagtgtgcgaagccagggaccccaaaggcctctacaagctcgcacgcgccggcaaaatcaaagggttcaccggcatcgacgatccttacgaaccgccgtcggactgtgagatagtgatccagtgtaaagtcggcgactgcccttcgcctgaatcgatggctggtcacgttgtgtcgtaccttgagacgaatggtttcctccaggactagacatggaatgcgatcgatgcgtctgatgtgtatatatgtagcagcagccggagcggcattgccaaggctgtgtaatctcatggctgtctttctctttaagaccaaaacaaacaagagatggcagtgtaaaaaggaaaaaaaaaactgcgtctgacagagtcgctgaatcaaccatgcttctgataaaagctattgtttgtaggtacggcgttgattcttacgacatttatgacaatgctttcgaaaggtcggttccaaaaaaaaaac

SEQ ID NO: 121638 - DNA, 726 bp, Zea Mays
atggaagcaaactgtgcatccatttggagcgaggaatctgagacgattgctcacctgcagtcgatgttctggagcggcagcaatgctgatgcctgcctttcttctcccaacagcagtgccagttcttgtgttgaacccagcacgtcgcctactgccttgttccttccactcgctgaaaatcagcgctgcgataaagagcaatgtcagaacactggtgcagttcggtgctttggtcacaagagccaggttttggctccaatcactaatgaagttacagcaaacaagagggtatgtcttatggatgagaataggaagagtacggatgctaagagaccatgcactgttcctccctgggtatcgaggaaaaattccattgctcctgctgatgagatcaataccaccgagcctgtcaacaagagctgttcctggtgctgcagctctgaagatgattcagctggtgcatgcgaggaacctattgttctgaaacaaagtaccagctcaagaggtcctagccgctcctcaaaggattcacagagcctctacgcaaagaggagaagggagaggatcaatgaaaaactaaggacgctacagcagctaattcctaatggcaccaaagttgacatgagcactatgctggaggaagcagttcagtacgtcaagtttctgcagctgcaaataaagttgctcctagcttgcaagtgtgagcaagaagttcatttggaataa

SEQ ID NO: 121639 - DNA, 771 bp, Zea Mays
tgctatcttgttaaaaatcagaagtctttgtatcctttagtttagtatctcagttcaatgtggggtaatttcagctggttatatgtagcagctgctttggtctgctgtttggtggtcttactcatggctgtttgatgaaataacctgattgatttttagctgatatattctatgattatgttctattaatgagtatgcgtttggtctgttgtattgtgcatttatgccataatgtgagacttaagcagcacaaagggctcttgtttttaatggattgcgatttgttaaaaagatgtggaaatagaccgttttttacctttatgtgcaaagagtttatttcacaatacaacaaattagcctcggtaactctttatgtttgtggttttgcagccgggtctgcgcgaaccctcacggtctgatcaggaagtacgggctcatgtgctgcaggcagtgcttccgcagcaacgccaaggacattggtttcatcaagtaccgttgaagaggccactgtgctgctgtggagaacttcctacatcaaagaaatgggtccttcattagaaggcctaatttatgcgctttagctttttgttcagaacttgagactcatgtgttaaactcgacttgttaaagttttgatggctactttgtgcttgttggaccagctataatcagaagattgaaattttctcactcatgatgtttgttcttatcctgcgtgtatgctcagttttctttcttgagttactgtattacctgggtaactgttcctca

SEQ ID NO: 121640 - DNA, 525 bp, Zea Mays
agatttcccaactttttgttcctcgcgccgccgccgccgccgccgtgacggaaggaagaggaggagcaaggagcacgacgcgatgggccactccaacgtgtggaactcgcaccctaagaactacggccctggctcccgcgtctgccgggtctgcgcgaaccctcacggtctgatcaggaagtacgggctcatgtgctgcaggcagtgcttccgcagcaacgccaaggacattggtttcatcaagtaccgttgaagaggccactgtgctgctgtggagaacttcctacatcaaagaaatgggtccttcattagaaggcctaatttatgcgctttagctttttgttcagaacttgagactcatgtgttaaactcgacttgttaaagttttgatggctactttgtgcttgttggaccagctataatcagaagattgaaattttctcactcatgatgtttgttcttatcctgcgtgtatgctcagttttctttcttgagttactgtattacctgggtaactgttcctca

SEQ ID NO: 121641 - DNA, 431 bp, Zea Mays
gatctgaaggcatgtactattttgttgatgggagcaagttgaaaattggtgcccactaaaagtctggtgatctagctggatgaaattgtcgacaaggccattagcatcatgcaagttacctcgaagcatctcatgtatatatgcaagaagccgcactcacggaaaaggcattgagtgcaatagaggtgaaggaactgcgtgaagccctttaagcaattgctaaaggtttggacctagattcactcttgtgccagagtttggtgtagtcctcgattataaactgtgtaccatgttaatgtagtgacatagtttgtatgatgcaattcatagtgatgttgtttgaagctgtttgtatggattatgatgtctgatgcagtttgtatgaactatgtcatattatgttgaatgaagctattgaatgcccttattct

SEQ ID NO: 121642 - DNA, 351 bp, Zea Mays
atgccttgcgtccgcctcccctcctgcacctcgacattcttcccctcccacaccttgagaagcactacaggtctcacctgcccgttctcctgccccaagaatcgctggatctgggggtactacagcggtttggcggtggtggaggagggcgacgaccacgttatccagaaccgtgtcgcccctccattcatccttgacaacgtcgcatgtgttgctttacgtgctcatgtgttcatggcttcagtcatcgtgttcgacgctttgtgtatgttagaatttgagagggccttcattgatatctataactcaatattgcataaaaatgaaaccgttcttcaagtaattggatga

SEQ ID NO: 121643 - DNA, 1178 bp, Zea Mays
ccatccgtctgagaggcagaggatgagccactgaaaagccactgaaattgggactactccctcgctccctacctcaagcagagtgagtagtgactggggcttgcagtagctctattttgatgagccattgaggcaaattgaagagggatttgtttggcttgcaagtgtcatgatattcgtattttattttttgtgacttaagaactattagttcagggctactagctaggctaacgttgtcatttgcttcttcaaagaaagttggaggatgtttatttgatctcaaatagaagtgtcaacgatttgggcttggagccagctttgatttaccattccattggacatagccaaagtgcagatccagctgcaaaggaaggcaccattaccgccaccacttgtggctggaacagccaccacttgtggctggtggagggacactagccacaatcatgtgcatcgttagagaggaaggggttgccacgctctagaagggtgtcatccctggcctccactgtcagttcctctatgatggcctccacatcggcttgtgaaggctttcttcgtcagaggtgctgttgtggatgatgtcagtttactaagaaagaatcttgctgctcttgccacaggtgtgatagctatttttgtggcaaatccaactgatctcgtcaaagttaggttgcaagctgatggaaaggctaacactgttaagaggagtttttctggagcccttaatgcatatgctacaataatcagacatgttactttaaccatcatgggcagtaagtgtacaagactatttcttttttcgctgtccttaaattccttcatgtttccaggaaggtattggagctttgtggactggccttggcccaaatgtcgcacgcaatgtcatatttaacgctgctgagttggatagctatgattagttcaaacatgtacctgttgactctaatgtctttgtggtgggcattatatttcattatcactaatcattcctttgttctgttcatgtagatgtttctaaaacttcctaggtatactgatgacgttttacccatcttttagctagacttggtgctgattttttttatatttgcatcggctctccgatggatgcaaataatctttgactaaatatcttactagcagttcacaaggttcagcaaaaaaaactaaaa

SEQ ID NO: 121644 - DNA, 985 bp, Zea Mays
ggaagaagatccgatccaacataaccgtggtctgaagatatgaatttccaatttgaaatgcttgcaaaaataacgaataacttctcagaggaccgcaaagttggcagtggcgggtttggagatgtttacatgggcgtgcatgacggcaaagcgattgctgtgaagaggcttcgtcaattgcaagggctggatgacaaggaattcgagaacgaattccgcaaccttagcaaggtccaccatgagaacgtggtgaagctaataggctactgccacgaatcaagaagaacatacgttgaacacggcggcaaagagtttttcgccactgaaatggagcggattttctgtttcgaattcatggaaggcggaacccttgagaaacatatcgcagctgactcctgtgatcttgattggcccacatgttacaagatcatcagaggaacatgtgagggtctaaatcacctccacacggcataccacaagcctatcttgcatcttgacataaaacctggcaacattctgctggacagcaataagaaccccaagatcgcagatcttggcttgtccagactcgcaacacaaaccttggtaacaaagaatgttaaaggaacacaaggctacatgccaccagaattccaaagaagtggctgtataacgaataaaaacgacgtgttcagtcttggagttctaatcatacagctactggatggaaacgttggtcttacacgttctactgaaatgagcgctggacagtttattcagcatgtatacctaaactggaacaagaggctgaaggaaacgcccggcggcgggcatccatcccacgaagcacaaagcctgcgactgaagaaatgtgctgagatagcccttaagatgtgttgttcgggaccggcacaaaaggccatcaacgaaggatgttgtagacgaactgaagcaattagaggccaaaattatcaagagactgccgcaagcacctgctgatgagagt

SEQ ID NO: 121645 - DNA, 2306 bp, Zea Mays
attatagtaatagagaagggattatagaagtgcgggtgattataaagaaatatgagatttttttaaaaaatattgacacaagtcaacggttgaaactgattgtttaatatagtagagaaaaaaaaaccatttatcaaatcatctcgtgacgccacgtcaccggaagagcgcagcctggccactccacggcacgccagcatgacgaaagaagctcgacagcacgcggtggcggtgatcacacaacaagcgtcgatggacgtcccacctaatcctttctcgcactcgcaccgtctgtggagaagcgagaggaggaaggagacaaggaaaggaagggaggggaatctccgtagagcactaggcagcgacggagtcagcgcagcttcgtctccttccttccttcccctttcgctggccgctggccgtcggcaccatcacctacggccacgggcgcagcgcggcgccgctccataccgggtccgcgggcctctcgccaaggaaacccgataagcctccgctgctctgctcggctgctcttgccttctctcccgtccacggtccacttagctagaaacacacaacaaacaaggagaaatcgcaaggaggagcagcgcctgccgccgcgccgtatccagcgaggcagcccccccgccccgatctgccggcccgacacgctgggatcttcctttccttagccgaccggtcaacgccgcagatattctccttccctgcggctctggaggtttccgtaaacccgtcgcccccctccttctattccttgcaggtgaatccaccgtcgcccctttcctcgttcctccttcccttcgtctccccccaggatctcgccttcgctcggcgcttcccgattcgcggccggcggggcggactccggctgtgtgggtggacgcaaggtagtcggcaaaaggtatcgacgatcagacggagcagttgcttcaatctcgacttcgacctccatctgcattgaacccatttgggattttggagaggggggtgcttgcttgtattgcacagcatctgcatcagttcacattctttgggcatttgctatcttgtcaggcttgctgactatacagttctggttcaaggaacgcctttctgaggtctcttggattatgggagctttctgttcatgtctgcaacctgattattcggaccaccatggaaaccaaacttcttcagcgtttaggaactgcatgtgcctcagatgctttacccagcagctgatcaatgcgtatactgttttgttccgagctggagcagtgcattctgtttcccccgctattgaagccactcctgttgattcaactgaaagctccttcgatacatatcgttcgcccccaagacctctgccctatgatgatccacgattttcccctcctgctcgtgactggttaaggagtgagaacccaagccattccccagaggaatcggaaccacttagagcaaatgaggatgatgaagaaatggaaacaccaagtataatacagaaggcaagtaaaacaaactacaacacaaaaatgaaaatctgcagctctacttatggtgataaggtgccaccaagggaacatggaaattacttcagctatttttccccatctgctgaagatgaagatgtctgtccaacttgtcttgaagattatgattctgagaatcctaggatagtaatgcagtgctcacaccatttccaccttggctgtatttatgagtggatggaaagaagtgaggcatgccctgtctgtggaaagaagatggagtttgacgagacaacataatcctctggctggactctacaccatggcccatggattaacaaaccttctcatatgacattctgaaaatacagatggtctagcccagcaagttctctgtaaatacgccctgtaaatattggactggtagtgtgggtccctcttggccatacgagtgctctccaaatgctggaacggtgcacataaacattcttttccgatttgttacaaatagtcggcaggggaaggttgccccccctctgcctgtctgcgcctctgcctctgccttgtcgaggcttagaggtgcattggttgtccggtgatagattcatcggaagcctgtaaattaaagacctaggctcatataataatcatatggagtcccgtggttctggaagttcttgcaatgacaactatttggcttcagagactgaaatgctgtcatagtagtggtgtttatcatgccaacatttgcttctgtggtgtcgctaattgtgactcatggacacatatgaagagttatttattacacttaatgcc

SEQ ID NO: 121646 - DNA, 766 bp, Zea Mays
atttttttctcttaagtgtattggaaagatgctctgatatttttcaaaacgctacagtaaaatttccattacataagactttggtacatgcgaattgaacgaaaggtgttcaaaactatgagcattacattttttctgttgatactttataatcacattctcactattgttatatattaatgtaactaaattgcagattatgattctgagaatcctaggatagtaatgcagtgctcacaccatttccaccttggctgtatttatgagtggatggaaagaagtgaggcatgccctgtctgtggaaagaagatggagtttgacgagacaacataatcctctggctggactctacaccatggcccatggattaacaaaccttctcatatgacattctgaaaatacagatggtctagcccagcaagttctctgtaaatacgccctgtaaatattggactggtagtgtgggtccctcttggccatacgagtgctctccaaatgctggaacggtgcacataaacattcttttccgatttgttacaaatagtcggcaggggaaggttgccccccctctgcctgtctgcgcctctgcctctgccttgtcgaggcttagaggtgcattggttgtccggtgatagattcatcggaagcctgtaaattaaagacctaggctcatataataatcatatggagtcccgtggttctggaagttcttgcaatgacaactatttggcttcagagactgaaatgctgtcatagtagtggtgtt

SEQ ID NO: 121647 - DNA, 2615 bp, Zea Mays
acacaacaagcgtcgatggacgtcccacctaatcctttctcgcactcgcaccgtctgtggagaagcgagaggaggaaggagacaaggaaaggaagggaggggaatctccgtagagcactaggcagcgacggagtcagcgcagcttcgtctccttccttccttcccctttcgctggccgctggccgtcggcaccatcacctacggccacgggcgcagcgcggcgccgctccataccgggtccgcgggcctctcgccaaggaaacccgataagcctccgctgctctgctcggctgctcttgccttctctcccgtccacggtccacttagctagaaacacacaacaaacaaggagaaatcgcaaggaggagcagcgcctgccgccgcgccgtatccagcgaggcagcccccccgccccgatctgccggcccgacacgctgggatcttcctttccttagccgaccggtcaacgccgcagatattctccttccctgcggctctggaggtttccgtaaacccgtcgcccccctccttctattccttgcaggtgaatccaccgtcgcccctttcctcgttcctccttcccttcgtctccccccaggatctcgccttcgctcggcgcttcccgattcgcggccggcggggcggactccggctgtgtgggtggacgcaaggtagtcggcaaaaggtatcgacgatcagacggagcagttgcttcaatctcgacttcgacctccatctgcattgaacccatttgggattttggagaggggggtgcttgcttgtattgcacagcatctgcatcagttcacattctttgggcatttgctatcttgtcaggcttgctgactatacagttctggttcaaggaacgcctttctgaggtctcttggattatgggagctttctgttcatgtctgcaacctgattattcggaccaccatggaaaccaaacttcttcagcgtttaggaactgcatgtgcctcagatgctttacccagcagctgatcaatgcggtatgttctccttatcatggatgcttgattctttattgattggatttttttttctagctagtggtgactggtgagcacgcgagttggggtaagaaaatatagcaggcactctcttaattcaatttagcattggaacaaggtttgccatcactgcacattgcaagcagcgaactttattaactgtttttgttaaacttaaatatgcgatgttgtcttgtgtaaataattcgaaatgaaacgatgcaatgcgattttgatcaggtacgcaaaaattattgaaagttattcatgagcgtatacttaacagtgtatgtagctactgttctcattggtaacattgtacttgttgttttaggactaggccaaaattagttgtcatatcccgctacatactgttgggtactctttttttttaaaataaaattgcattgatgtctagtaacaactccttttgtcaaggatgtaggtctgtttggctggctgataacaacgttgggaactcatacaaagagaaaacgttccatttaattatatactgatataaactgtggttatgaattaatagctgatttaatttgagacaatacagatggaaatggttgcatattaatcttctcttttgtttttagtatactgttttgttccgagctggagcagtgcattctgtttcccccgctattgaagccactcctgttgattcaactgaaagctccttcgatacatatcgttcgcccccaagacctctgccctatgatgatccacgattttcccctcctgctcgtgactggttaaggagtgagaacccaagccattccccagaggaatcggaaccacttagagcaaatgaggatgatgaagaaatggaaacaccaagtataatacagaaggcaagtaaaacaaactacaacacaaaaatgaaaatctgcagctctacttatggtgataaggtgccaccaagggaacatggaaattacttcagctatttttccccatctgctgaagatgaagatgtctgtccaacttgtcttgaagattatgattctgagaatcctaggatagtaatgcagtgctcacaccatttccaccttggctgtatttatgagtggatggaaagaagtgaggcatgccctgtctgtggaaagaagatggagtttgacgagacaacataatcctctggctggactctacaccatggcccatggattaacaaaccttctcatatgacattctgaaaatacagatggtctagcccagcaagttctctgtaaatacgccctgtaaatattggactggtagtgtgggtccctcttggccatacgagtgctctccaaatgctggaacggtgcacataaacattcttttccgatttgttacaaatagtcggcaggggaaggttgccccccctctgcctgtctgcgcctctgcctctgccttgtcgaggcttagaggtgcattggttgtccggtgatagattcatcggaagcctgtaaattaaagacctaggctcatataataatcatatggagtcccgtggttctggaagttcttgcaatgacaactatttggcttcagagactgaaatgctgtcatagtagtggtgtt

SEQ ID NO: 121648 - DNA, 2594 bp, Zea Mays
attatagtaatagagaagggattatagaagtgcgggtgattataaagaaatatgagatttttttaaaaaatattgacacaagtcaacggttgaaactgattgtttaatatagtagagaaaaaaaaaccatttatcaaatcatctcgtgacgccacgtcaccggaagagcgcagcctggccactccacggcacgccagcatgacgaaagaagctcgacagcacgcggtggcggtgatcacacaacaagcgtcgatggacgtcccacctaatcctttctcgcactcgcaccgtctgtggagaagcgagaggaggaaggagacaaggaaaggaagggaggggaatctccgtagagcactaggcagcgacggagtcagcgcagcttcgtctccttccttccttcccctttcgctggccgctggccgtcggcaccatcacctacggccacgggcgcagcgcggcgccgctccataccgggtccgcgggcctctcgccaaggaaacccgataagcctccgctgctctgctcggctgctcttgccttctctcccgtccacggtccacttagctagaaacacacaacaaacaaggagaaatcgcaaggaggagcagcgcctgccgccgcgccgtatccagcgaggcagcccccccgccccgatctgccggcccgacacgctgggatcttcctttccttagccgaccggtcaacgccgcagatattctccttccctgcggctctggaggtttccgtaaacccgtcgcccccctccttctattccttgcaggtgaatccaccgtcgcccctttcctcgttcctccttcccttcgtctccccccaggatctcgccttcgctcggcgcttcccgattcgcggccggcggggcggactccggctgtgtgggtggacgcaaggtagtcggcaaaaggtgcgattttgatcttgtattcttgtttccggggccagctgcgttgcgtgatggctggtccgtcgaaccttcgctgttcatggttttccgtgatatacgattgagtagttcgattcaatagacactagaatcgatttgggtgccgccgacctgattgttcggtcccgaatgctgttgggttggatggggactacggggatggtattttggtgcgcggtgctgccggggcccaaagctttgcgtccaagtcccagattgcaggaagaggaaactttgttgtcaatttcagatttcttttctctgtggacgtgtgtgtctgtccaacaacgccttctctggaattacctgattttgctgcctgccattgataggtatcgacgatcagacggagcagttgcttcaatctcgacttcgacctccatctgcattgaacccatttgggattttggagaggggggtgcttgcttgtattgcacagcatctgcatcagttcacattctttgggcatttgctatcttgtcaggcttgctgactatacagttctggttcaaggaacgcctttctgaggtctcttggattatgggagctttctgttcatgtctgcaacctgattattcggaccaccatggaaaccaaacttcttcagcgtttaggaactgcatgtgcctcagatgctttacccagcagctgatcaatgcgtatactgttttgttccgagctggagcagtgcattctgtttcccccgctattgaagccactcctgttgattcaactgaaagctccttcgatacatatcgttcgcccccaagacctctgccctatgatgatccacgattttcccctcctgctcgtgactggttaaggagtgagaacccaagccattccccagaggaatcggaaccacttagagcaaatgaggatgatgaagaaatggaaacaccaagtataatacagaaggcaagtaaaacaaactacaacacaaaaatgaaaatctgcagctctacttatggtgataaggtgccaccaagggaacatggaaattacttcagctatttttccccatctgctgaagatgaagatgtctgtccaacttgtcttgaagattatgattctgagaatcctaggatagtaatgcagtgctcacaccatttccaccttggctgtatttatgagtggatggaaagaagtgaggcatgccctgtctgtggaaagaagatggagtttgacgagacaacataatcctctggctggactctacaccatggcccatggattaacaaaccttctcatatgacattctgaaaatacagatggtctagcccagcaagttctctgtaaatacgccctgtaaatattggactggtagtgtgggtccctcttggccatacgagtgctctccaaatgctggaacggtgcacataaacattcttttccgatttgttacaaatagtcggcaggggaaggttgccccccctctgcctgtctgcgcctctgcctctgccttgtcgaggcttagaggtgcattggttgtccggtgatagattcatcggaagcctgtaaattaaagacctaggctcatataataatcatatggagtcccgtggttctggaagttcttgcaatgacaactatttggcttcagagactgaaatgctgtcatagtagtggtgtt

SEQ ID NO: 121649 - DNA, 1350 bp, Zea Mays
tcccctcttgtattcgcactgcatgcctctcactctccctctccctagcggtctccacatgtgagaaacgcctctctagtaattaagcagcatggcagagaagatgtcgacgctaatcatcgtggttgaccttgattgccgcaagtgctaccacaagatccgcaagattctctgccaactgcaagaccatgagaggatccgcaccatctccttcgacgacaagagcaagacggtcaccatggtgggcccgttcgacccgcagcggctcgcgtgcaagctccgctgcaagggcggcaaggtggtgcgggacgtctacatcgtcgacgccaacggcggcggcggcggcggcggcaagcctcctcctccacagaacgtgccggacgacgggccacccgcgccggcgccggcgccagtgaggagcggcgggaagagcaagaacaagaacaagaacaagcagcagcagcagcagcagccgccgccgaccgagcggcctccgtcgcctccgccgccgccgccgccggagacagcgccgggacctccgccgcccgaggcgatgatgccgccgtccccggtccacgtccaccaccacccgcctcctccgcctgaccgcgggatggcggcggtggtgcctcagccgcagtacgtggaggagaggccgcccagagcggagctggagcctcagccacccatgtctcccccgccgcccaaggagatgaggccccccatggacctgccgccgtcgccgcagcaccagcaccacccgccgccgccaatgccaatgccgatgcctgggaacgagagaccgccgccgccgccgatgccgatgctgatgccggcggagtgcgtgatcccgacggtggagatcccgtcgtggccggcggcgccgcccgtggggccgtgcgggtgcccgtgctgcgcgccgtgctaccagggctactacgaaggctgcaggtgctactgctgcggcaggctgtacggcacgaccgtccgcccgttgccagcgccgtgcggggcctacaggggctgccggacgttcagcgacgacgacccgtcggcggcgtgtagcgtcatgtgaagaatggtggtggtgttgctttggatttgacaggaacatgcatggtgaactatactcttggaacgaataaataaatgtgttcattaggcagggggttgcgttttgctgtccattgttcgtgtctctccatgactgctctgcacggatcggagcatatgttcttgctgtcaacgtgtgattggccatagctagttactatatgagtgttcagtgctgttcaagacaaatgggatcggattcttcagctaataaagtctgtaatttatatatgattg

SEQ ID NO: 121650 - DNA, 136 bp, Zea Mays
gaaatggagaagtggcccgaggatacaggtaaagttcccttttctttgtcattttccaattccagctttaaatccatacttcaaatttttattctaggttttaggctttgataaaattcacaacaaacaaaaaaaa

SEQ ID NO: 121651 - DNA, 529 bp, Zea Mays
cataaatgttcgtttctgcatgaccgctgcttgatggaggagggtgccacgtcacttaggtctagtttctttgcgatgtccaatatgacaaacggatcagtccacatggagcttcgagataatcactagatcaatgcactgcgtggccgtatcaccactgcagcccagatacaagagttcgtctcccttgggatcaaaacctaggacacacaccttacaccgggcatgagggactccattctctggagatggacgacagacggaacatactccactcgcgcagcataccgtgtccagtttagactttagaggctcctttgggccttttcggtccggcctaatctggagagcacgtcctgaaaacaagtgcaaggttttcgcatggacaatggcaagggagaaagtactcaccgcggacaaattacaaaaaaggggttggcctcaccaagattactgcgctctatgtaatgggccactggagacatgcatccatttgacattgctttgcccttttgccaaatcggtttgg

SEQ ID NO: 121652 - DNA, 975 bp, Zea Mays
tgttgctttccctttcctcctcctcctcttcttcctcctcacctcacctcctatttagccgtccgaattgcttgtcagcatcttcccagcttcttcttcttcttccaaccgcgctacgctctcttgtccccggtgctcgcttggattcttctctcttcataggaaggaaggattggctaccgagatattcctactagtccagggctgtagtgcatcctgcgcgcttggtttattctgcagccagtaccagtaccagtaccccagctgagccggtgaggagaggagatagagagagcgagcgggagcgggagcgggagcgggagcagaggaggagggccatggaaggcgacagcttctccggcggcgccatggccaacggcggcggcggcggcggcggcggcagcgggcaggtggtggacgggaagctgatccacacgttccacaggagcttcgtgcaggtgcagagcctgctggaccagaaccggatgctcatcagcgagatcaaccagaaccacgagtcccgcgcgcccgacaacctcacccgcaacgtcggcctcatccgcgagctcaacaacaacatccgccgcgtcgtcggcctctacgccgacctctccgcctccttcgcgcgcaccatggaccacgcgtcctccgagggcgactcctccggcaccggcaataacggccgcgccggcgccggcgccggccacaagcgcgtccgccccgcctagagctagcttttagtttttttcttcttcttcttctgctgggtctagcttggcgtggcaatcctaggtgttgccattgccactaggaggcgtatttagtcttttctcttgcggttcttcttgttcgccttcttcctttgtgctcgctagctgcgacgaacgccggtgattagtgtatggtaatttagtgtcaaacagagagctgccatgtggatgttgctcctatgaccacgattaagacgatgaagaa

SEQ ID NO: 121653 - DNA, 471 bp, Zea Mays
atgtcctgggttttcatcttcgcttcaccaaccattacagcaacgactgatgtcgagtggggagacgatgttcgacgcgtgctcagctcagctcatgggttccatcagtcgtcagtctcgcgtgcctcctcccgactgcagcaggaagaagacggcgaggccgacgacgagccccgacacggccagcgccagcgtcggcgccggagtacccacgcccaagttctgcacgaagcccttgccggtggccacctcgacggcgatcgcggaggcgaagccgaccatggccgcgcggcccagccatgtgtccggcccgccgcccttcttcgcgctctgctcgcacctgatgatggacagcgacctgctgctgacggccctgcaggagacgacgcgcctcttgctgggcgccgcagatgctgcgtttcgagtttcgacgacggaactcactcactcacaagtgaatataagacatag

SEQ ID NO: 121654 - DNA, 479 bp, Zea Mays
tgactgagcgctggcagaaactgttgcagctgttgttgttgctggtttgcaactgcgtttgccagagcaagtgggttggatgcaagcagttgttgttacaagtcggcgccagggttcaccatggctaggtggctcagtgctggtaggaactgttgttgctgttgcgttgcgatggtttgtattgttagatgtgccaaggattgttgttgtaattgggcaattggttgttgtaagacgctcgccgcaagcgcttgttgtagcctgtaggcttgcacagctgggtgttcgaagcccattgaagtaactggtgggaggaactttggaataatggcactaggagcaagtgagcattgtggaataatgaacacatttgttgcgctcacaaaaagggcaagaagcgcaaggagggataatatcttggtagccattgttgttaggtcgttgctagtgcgcttccctaggtgtgtttctgaatgctc

SEQ ID NO: 121655 - DNA, 1085 bp, Zea Mays
atataatcatatggtatccacaacttttttattctttgcgaaattgtacccagaacttaacgcgcccatttcgtttccgcttttagagagacctctcttgactagctagtgttcatacttcacttcatagttcatagtgcatagcactatacagcagtcttcctcttctaagcagccatggctagcacgacctctacagcagtcctcctcgtctcaaccgccatcctcgtcgccgcagcgacctacttccgccacggcacgctcagcggcggcggcggcaccgccggaacgcacctccatttcttcatgcacgaccagtacaccggcgcgaacccgacggccgcgctcatcgtgcccggaaggccgccgctctccaacgccaccgccaccgccaccgccaccggcagcggcgatgacgacgagcacccgcgccggttcggcgacatcgccgtgatgaacaacgcgctcacggaggggcccgggcgcggcagcgcgcgcgtcggcaccgcgcaggggttcacggtgcgcgtggcggagcgcggctccgtcaacgcgctgagcatgcacctggtgctggaggccggggagcacgcgggcagctcgctggtggtcagcggcagggtcgacaccgacctggccgtgcgcgagtcggtggtcgtcggcggcaccggccggttccgcctcgcgcggggctacgcgctcagcaggagctacgactacgacctggccaagggaggcgtcgtggaggtcgatgtgtacctgcagtaggttcgcatggcatattggcatgcatcgctcgttccttacctctgtactgctatttgatcggtttttatgttcactatcctgcagtttcccagatttcaaatttatgtttacaagaactgggactagctatgagctgaaaacttggtccagtaataacaaggactttggtttggctatacttggttttgtatgtttctttcgtgggtgtactgtaaattaatcctgtttcacggccgtttaaggtaaggtttttcttttgttttactgtaaattttcattataaaaacagaacgaaaagattcatttgtgaatatgaa

SEQ ID NO: 121656 - DNA, 1317 bp, Zea Mays
aagagatcatgcatgtcattccacgtagatgaaaagaattcctatataaaatgacaccttttcttgtaggtagtggaaagtatctttccagcaaataccatataatccgataaagcggataactaaatgtcgaaatcgagtagatgccatatcatctataccttatctgttgtttggaaaaaagacaaaatccaaaaaatatatttgagacctcacctgtataaatagctcccaaatcagtagttaatccatcacccataatattttgagcattcagaaacacaccaagcgaagctacctagcaacgacttaacaacaatggctaccaagatattagccctccttgcgcttcttgccctttttgtgagcgcaacaaatgcgttcattattccacaatgctcacttgctcctagtgccattataccacagttcctccgaccagttacttcaatgggcttcgaacacctagctgtgcaagcctacaagctacaacaagcgcttgcggcgagcgtcttacaacaaccaattaaccaattgcaacaacaatccttggcacatctaaccatacaaaccatcgcaacacaacagcaacaacagttcctaccagcactgagccaactagatgtggtgaaccctgtcgcctacttgcaacagcaggtgcttgcatccaacccacttgctctggcaaacgtagctgcataccaacaacaacaacaattgcaacagtttctgccagcgctcagtcaactagccatggtgaaccctgccgcctacctacaacagcaacaactgctttcatctagccctctcgttgtgggtaatgcacctacatacctgcaacaacaattgctgcaacagattgtaccagctctgactcagctagctgtggcaaaccctgctgcctacttgcaacagctgcttccattcaaccaactgactgtgtcgaactctgctgcgtacctacaacagcgacaacagttacttaatccactagcagtgcctaacccattggtcactgccttcctacagcagcaacaattgctaccatacagccagttctctttgatgaaccctgccttgtcgtggcagcaacccatcgttggaggtgccatcttttagattacatatgagatgtaatcgataatggtgccctcataccggcatgtgtttcctagaaataatcaatatattgattgacatttatctcgatatatttttgaactatgttcatcaaataaataattgaaaacatcaaatcgtaattataaactcatgcttggtcaatacatagacaatacaatattacttcatcatccc

SEQ ID NO: 121657 - DNA, 1018 bp, Zea Mays
gatgaagtaatattttattgtttattttagaaatatatcgagataaatctcaatcaatatattgattatttctaggaaacacatgccgctatgagggcaccattatcgagtacatctcatatgtaatctaaaagatggcacctccaacgatgggttgctgccacaacaaggcagggttcatcaaagagaactggttgtatggcagcaattgttgctgctgtaggaaggcaacgaccaatgggttagccaccgctagtggattaagtaactgttgtcgctgttgtaggtacgcagcagagttcgacacagtcagttggttgaatggaagcagctgttgcaagtaggcagcagggtttgccacagctagctgagtcagagctggtacaatctgttgcagcaactgttgttgcaggtatgtaggtgcattaaccacagcgagagggctagatgaaatcagttgttgctgttgtaggtaggcggcagggttcaccatggctagttgactgagcgctggtagaaactgttgcaattgttgttgttgttggtatgcaactatgtttgccagagcaagtgggttggatgcaagcaactgctgttgcaagtaggcgacagggttcaccacagctagttggctcagtgctggtagaaattgttgttgctgttgcgttgcgatggtttgtatggttagatgtgccaaggattgttgttgtaattgggcaattggttgttgtaagacgctcgccgcaagcgcttgttgtagcctgtaggcttgcacagctgggtgttcgaagcccattgaagtaactggagggaggaactgtggaataatggcactaggagcaagtgagcattgtggaataatgaacgcatttgttgcgctcacaaaaagggcaagaagcgcaaagagggataatatcttggtagccattgttgttaggtcgttgctagtgcgcttcgctaggtgtgtttctgaatgctcaaaatattatgggtgatggttaactactgatttgggagc

SEQ ID NO: 121658 - DNA, 2292 bp, Zea Mays
cgagaagagagagctgggagaaagctagaggacaggctctgaccaccaccacacccggtcatggtcaccctcctcgccttccggctcccacctctttttttcttcttccttgtcctcctccccctcattgcagccgctgccgacgatggcaatatgccgcaggaaggggcggaggcgatggcggcgctcttaaatctcaagaagtcgttcgcggacccgaccggtaggctggaggcgtggtcggcggcgtcgccgttcgcgccgtgcgacgccgcgagcccctggcccggggtgcagtgctacaagggcagcctcgtcggcatccggctcacgcacatgaacctgtccggcacgttcgacttcggcgccgtcgccaagctcccgcggctgcactccgtcaacctcaagcacaatgccctctccggcccgctgccgccgagcctcggcaccctgcgcggcctccgcgcgctgtacctgtcctccaacaacttctccgggccgatccccgccgccgtgttcgccaacatgcggtggctcaagaagctctacctggacaacaaccgcatcacgggcccgctgccggccgacgcgatcgccagcgcgccgcgcctcatcgagctccacctcgaccacaaccagatcgacgggcccgtcccgtccaagctgccggactcgctcaagcgcttcaacgtgtcccacaaccgcctcagcggctccatcccgcccagcgtcgccgtgcgctacgacgcgtcctcgttcgccgggaaccccgggctgtgcggctcgcagggcagcgacgccgcggtgtgcgtggccgccggcccggcgctcccgccggccatgccgtcgcccacggaggcggactacgcggccacggaggaggagaccagcgtgttcgtggtcgtcggcatcatcctgctcgtcatcctgctggtcagcggtgccatggtgctcatgctgcggcaggacgagaggaacagcgccgcgccggcgtgggactactacgccggcacggccgtcggcgccggcgccagcgccagcaagtccgcggcgccgcgcgccggggagatggtggccgtggacgtggccggcgggtcgtccagccacggcgggcggcggatgggcgagttcgtcctcctgaacgaccacatccccgcgttcggcctgccggacctgatgaaggcctccgccgaggtgctgggcaacggcaccctggggtcggcgtacaaggccgccatgcgcaacggcgtcaccgtggccgtcaagcgcttgcgcgacatgaaccgcgtcgggcgcgaggagtttgagcagcacgtgcagatgctcggcgggctccaccaccccaacgtgctcccgcccgtcggctaccactaccgcaaggaggagaagctcatcgtctccgagtacatgccacgcggcagcctcctctacatcctgcatggcgaccagagtccgaacaggctgatcctggactggcagggtcggctgagggtcgccgtgggcgtggtgcgcggcctggcgttcctccacgagaggctcgggatcccggcggggcggctggtgagcatggacggcgccgacttcgacgcgccgccgccgccgccgccgcacgggaacctcaagtccggcaacatcctgctggacgcggacatggagccgcggctggtggactacggttttttcccgctggtgaacgcggcgcaggcgccgcaggccatgttcgcgttccggtcgcccgagggcaccacgcgcggggtcgtgtcggcgcgctccgacgtctactgcctcggcgtcgtgctcctggagctagtcacggggcggttcccgtcgcagtacctcctcaacgcgcgcggcggcaccgacgtcgtgaactgggcggcgacggcagtggcggagggcggcgagcgggacctcgtggaccccgccatcgccgcggccggccgggatgccgccgtgagtctgctccgggtaggcgtgcgctgcgccaaccccgagccggagcgccggctcagcgtggcggaggcggcatcgatggtggaggagattggcgccggcgcgtcgtgatcgtgatcacgcttcacgcacgtcgacgtcgctggcgctgcatcggtggagtggaacggaaggacatgcatgcatgtggaggagccaggtcgtcagatcctgaccgttcatcacagatgacgtatgggtatggttgtgccgcgtgtacagaagtattgctgtggtccgaatttgtaaatgaaaagggcaaaaatggaagagggagctgggtgtacgcatgccaatttg

SEQ ID NO: 121659 - DNA, 2312 bp, Zea Mays
tttataattgtttgcaaaagggctatagtacttgatgagatgaagtcaacagtgttttcaacagctgttgtttctattgggtatgcattgcttggatgggattttgcagcattatcagaagctaatcatcatatggaaaaagaatttgaattgttgaatggaccttctattgaaggtataacattagcagcctcaacatttggggctattgtgataacaatattctctggcgcgctattagattggctcggaagacgtgtcatactggtttactcgtctctggtattattttcgggtggcgtcttgatgctgtggtctcctaacatctacattgtacttctagctaggttaattgttggatcaggaagtgggttggttttcacctgtgtccctatttatatatccgaaacatctccttcaaatatgaggggcttacttggaactatgccacagtttatgttcttcataggaactatcttttcatattgcctgatattctggttaacattaatgtcttcacctagctggagaatcatgattggtgcaatctttgctccttccatcgtgtactttgctttgttggtttactacttgccagagtcacctaggtggcttgcaagtgatggaaagattagtgaggccagagtttctctgcagtggcttagaggaaagaaacatgatgtttcagacctgcaggagagatagctgctattgtggaaggtgtggacatcatatcggactccactgttggcgctgctcgtgctcagagtttctctggaaccagtgctagccacacttggccccgtagtactttttattggcagctttcagacccactagttgatcttctcggaagcgttcatgagaatatgtcagaaggaggaagtagacggaatagtttcttcccagtcttcaacagtttttcttttccagagcatgaacatatgaatgaacacagggatggtaacagtgatcaacagactagggagacttattatgctggagaagctaataatggagatggtttaagggcttctctgctttctcaggcagcaagtgttgaagtaaatgatacaaatacctcttttacttctgaagggagctcttcatatttaagaaggcatggaacatcagtgcttgcacaagagtttatggcgtctatacatgattatgacattgaagaagaagaagaagaaatccatgggtttgcattgcctcaccagtctgcacctcgtgatatggaaagcaccgggagacatccattcagacatcaaatagtccggttatctgaaacagctgatatgaagtttaaatggcgggtgcttcttcaaccaggaatcaggcatgccttatgttatggcatgttaattcaagcccttcagcaatctacaggaatcagtggtcttctccgctgcgctcctgaaatatttgagcagtctggagtggctagtttgttttcagacattggactttctcctcattcaacatcaattctcatgagtacccttaatgctttgctgatactcccttgtataactgccgcaatgctgctgatggatgtctgcgggagaagggttattgtgctggccactactcctgtcctgatactatcattgagtgttatgtctatgtccaccctggtgaatatgggaccgttcgaaagtgccgtcctcttccacttcgcattaaccatttgcttctggtcctatgtcattggtttgggaccgataccaaacattctctgctccgagatattcccaaccaaggcccgtgcgacatgtgcaagtttctgttcgctttccttctggtttgggggcctgctttcagcgtactgcttcccggtgatgttgagcaccatcgggcttggcggagcgtgtgggatctatgcacttgtgtgctgcgctccgctttttctcgtctactatcgaataccagagacgaagatgcttaacctggagctcattgcggagctgttcaagctttcaaggcaggagcatgtacagtagattgtccaggaaccgaggtagcccaggctgagtgccgatggatggtgatgtgtgtacatatgacaaatgtaactttggatgctgaatttgtttttgctagttaggaggattggtgatagtgtacgaagtggtttactcttttgctgtccacaggttgctggcagtgtttgtagtgttttgtcttagggggaattcctgtactccactgtaattgtaatgtaccctataacttatttgtcatcgcaaatatcctaatgcaatttcttatccttccataccattgctagtggtatagaagggaccagg

SEQ ID NO: 121660 - DNA, 420 bp, Zea Mays
cagtacctcctcggctcctcctcagcgttaagactgcttcgttgcgtcatcaattgcgccaaaactctctggcggccaaacccggcaaaagatcttccctgtaatcagcccataaggcacagctccaaattgcctcgaatcgttagaagcaaagatattgtcaccctgcacccagacatgatcttgcggtaccacgacggttctggaggagtcgcttttgccggggtcgacaaggtaggtgacggagtccccctgcatcccgacgacgcgcttgacgaccgatttgcgcgggtcctcaggggagatcatcagcacgatgtcccccggcgcgacccggccgagcctcacgctgaccctgtccaccgccaccgcgtcgcccgccaggttcagggacggcagcatgctggcgccccgcactaa

SEQ ID NO: 121661 - DNA, 270 bp, Zea Mays
atggccttcgccggcaacgccgacgactcggcggaggactattccgcggaggccaccgtggtgcgcttcgacccgccgctccctctcctccgggcgccagtcccctccccagcatctagcggcgagggccccgtcctcgccttccgcgacgccgcgagctggcgagccgcctgggaggccgccgaggccagcctcgtctcccagtgcgagctggccgaggtgcctcgcggtagtcatgcaaggcacttctcaagcatgccggttatgtag

SEQ ID NO: 121662 - DNA, 3204 bp, Zea Mays
atgtcgctccccaccagacttgtgctgctgcttccgttgctgctgcttcatgggatcctaccagcaccaacttcggcgtcagcagcaccgttgagaagtgagacggaccgggaagccttgctggagctgaaggccgtcctaggccagcgatcaagcaggctgtcgtcctggaacagtagcgctagcctgtgcctgtggccaggtgtgacatgcagccacaggcacggaggcagggtctcagcactccatctcagctctgccggccttgccggcaccatacctgcgtcggtgggcaacttgacgttcctgacgagcatcgacctcagccaaaacaagctggaaggcgaaatccccgcggcagttggccgcctgcaccggctgcgataccttgacatgtcaaacaactcgctgcagagcgagatcccggctggcctgaggaactgcagcagccttgtgagcatcaggcttggtgggaaccagctgacgggaggagtccctggttggcttggaggcctgccaaagctccaaggcgtgctgctggggccgaacaatctcacggggctgatcccccggtcgctcgccaatctcacttcttccctgagggaaatcaaccttgagaccaaccacctggctcgagggcaccatccccgagggcttcggtagaatccatggactcgagtcgttcacagtggcaggaaaccgtatctcaggcgccatccccgcggacctctcctcaacgtgtcttcgctgatcacgctcgcggtgtccgacaacacgatgcacggtacgctgccgtctgacatgggggctggcctacccatgatcagatatctcctcctgagcaggaacctcttcgctggaggagttccgccttcacttggcaatgcaaccatgctccatgtgatagatctcagcgtgaacagcctcaccggcaccataccgccaggggtaggaaggctttgtccagataccttagctttcgacgacaacatgcttgaggcaagcagcgcccaggactgggagttcatcacatccttcacgaactgcacccgcggcctgcgtctcctcagcctccagtacaacttgcttggcggtgagctcccgagttccgtcgccaatctttcgtcccagctccagttgctgtacctctcagcgaatgagatttctggtaagataccactcgacattggcaatctagctggcctacaagcactgaagctagactacaaccagttctctgggtctcttcctactagcatcggaaggctatcaaccctgaaactcttgcagttctcgaacaacaacctatcaggaagcctgccttcttcgatcggcaacctaacacaactgcaaatattgctcgcatataagaacgcctttgtagggccccttccatccagccttggcaacttgcaacagctaaatggtgttggcttgtctaataacaagtttactggccctttgcctaaagagattttcaacctgtcgtccttgacagatgatctttatttgtcctacaattacttcgttggttctctcccaccagaagttggaagtcttacaaaccttgtacatctgtacatctccgggaacaatttatctggccccttgcctgattcactaggcaactgcttaagcatgatggagcttcgattggacggtaactccttcagtggtgccattcccacatccttcagttcaatgcgtggcttggtactgctaaatttaacagacaacatgctctcaggaaaaattcctcaagaactgtcccgcataagtggtttagaagaactgtatcttgcccacaacaacctttcaggaccaatccctcatacctttggaaatatgacctcattgaaccatctagacctgtctttcaaccaactcagtggccaaatcccagtacagggtgtgtttactaatgtgacgggcttctcttttgctggtaatgatgaactctgcggaggtgtccaggagttgcatttgcctgcttgcgcaaacaaacctttgtggcacagtcggagaaatcaccatatcattcttaaagtagtgattccagttgcaggtgcactgctgttattcatgaccttagcagttcttgttcgaaccttgcaaaagaaatcaaaagcacaatcagaagctgcaccggtgacagtagagggtgctctccaattgatggacgacgtgtatccaagagtttcctatgcagatttagtacgtggaacagatggattttctctaagcaaccggattggtacagggaggtatggatcggtgtacaaggggagcttggtgatcaataacgcaacaactatcgttgctgtgaaggtttttgatctccaacagtcaggctctttgagaagtttcatgtcagagtgtgaggcacttcgtaaggtccggcatcgtaacttggttagtgtcatcacttgttgctctggttatgactccaaccaaaacaacttcaaagccattgtgctagagtacatgactaatgggagccttgacaagtggatacatccagatcaaggtggacagtctacagatccagttggtctgacattaatgcagagattgaacattgctattgacacttgtgacgcgatggactacctgcataatagttgccagccaccgatagttcactgcgacttgaagccaagcaacatccttctcaatgaagactttggtgctcttgttggggactttggaattgcaaagattcttagagactcgacaggcgacccctcgaacatgaactccagaagctccactggcaccgggataaggggaacaatcggatatgttgctccagaatatggggaaggtcaccaagtttccccatgcggagatgtttacagttttggaattctactcctggagttgtttactggaaaggctcctaccaatgacatgtttgcagatggcctgagcttgcagggctacgtccaggctgcattcccagatcatctggtggacattgtagatcctgctattgtagcagcagaagaaaactatgcacatgatgtgcacagcggaaccagcaacggtccacggggacaaaacaacagtgtcatggtatctgttactgggctggcactgttgtgtactaagcaggcaccagcagaaaggatatccatgagaaacgcagccaccgagctgcggaagataagggcccacttcatccgccagtaaattcagaatagc

SEQ ID NO: 121663 - DNA, 1418 bp, Zea Mays
ttttcttcttattgaacttgtgacagtttataattgatccttagcatgaccgtttttacttgtataacatgctgataacagtgtagcagacaccattgctactgcaatgttgacaagttgaatggcactgctctgtgtgcgcctcttttggaagtgacagtttggctgccaaaatgatggcagacaattcttgctcttatgccattttttattttgttaatacatcgtgttcatggatgttttccatatgttttctaaaagaaacaacttttctcttgcattagggtgaagataaaaagaggtttgcttggatactttcctacatccaacatctcctatctctattggcgcggaatggctccatgtccaatcgcaaatggaaaggcagaaatgaaaaccagataagccatggaccagcaaccccgcaggctgtatatcgcaggctgctgttcatgtttacagaaccggggtccagtgtcatgccaacagagaaaaaagagcttctgaccaactacatattggtcctaacactttttgccgatgacttcagatccaaccccagcgacatatgtgaggaccttaaaatgacccgccaaaatcttaaaccatactatgaccagttgggatgcaaatctgtgacagaaggtgcttttaagtctactttcatgacgctcccagcccctctcaagttcccaaaggaagttacgagaaagcggcgacggcagtagggcttttatccaaaggagacaaggagagaaaccaatggctatttatctcagaaatggcttgcattacttgaatggatggctggattggaaatactccctatcgaaggcaagaagtaaaggcatcgatgctaggggcccgattttaatagtgtactggaaatgaaaagttgtcctgtgtttcatctcgttttgtttttagttgctcatcgacattttcttgttaaggaaacatgtcatctatgtattgataaatgtttgtctatctgtatgagtgaatgtattgaaatgcttccgcttgggttaattcttagggttaattgtgtggagcagcttatcagattggtgaaaactctgcagaattgccatactgaattaaaagctgctcagtgtttttggttacatcagctcataaaacataggtaaaatccactagggcaacatgcttatatgaaattattcatataattgactacagcaatgtaagaacgcagtatcaatattggacggtttacatcatcaccaatctaaactttgttctacatcatctaaaccacacagtaaactggtaggggctagtagctgtcattcaaagactctttttttctttcgttgctagtatacaaggcattatttttcgccctgcccaggctgctcgacttaggatttctcggccacgtcgccacctgcctc

SEQ ID NO: 121664 - DNA, 2101 bp, Zea Mays
tgcgtgcaaaaacttgcagttctcttctcttaagatggacagccccgtttgttcactttccaaaacccttgagccgtcaccaatggcggacctcgaaaccctagccacgcccgcccctgcctctgcctccaccaagaagaagaagaaacactccaagaagcacaaggccgccagtgacgcccccaccaatgtcaccgtcgacgcatcccttatgggcggttcctcctacgtcgcggccgcccccgtggtcggctacttcccctccgggtacgacccactcactaccgctgccggggcggagtctgcccccggcacccagctcttccggcacgagaagcatcccacctgggtggacctcgtggtccggagccccggcggcggacacgacttcgttggccggagctatgccggtgaggccgccgtgccgcaggtctgcgactacgcgcttggcgtccttgacaaggcctccggcactctcaggatcgtgcccatcgctggcaaaaagattctgaggctagagccacatcttgaagtgcagcatccagcgcattcgcagcactctgaggtggcatcagaagcggcttcagctgcaggaaatgatgaattgaaggttcaggatctgacaatgatgtatggagccaagacggacagggacaaggacaataagtggagatcgttaaaggaacaaaggaatgatccttccgcttatgaggacattgatcttggaatatcagagaccaatgtcaacgccaatgataggcaggaacctgtacttgttcggaacattccaccttatgatcctaccgcagatacatcagaaaatgcatatcttttggacgagattattccaaagagtatgcgggagcatcttttggaaattgtccgtcattttgaatcaggagaaatctcctcaaaaggctatgggagttttgtctcaaaacgtgtgcacaagttaaaggagcttcagggtgaagataaaaagaggtttgcttggatactttcctacatccaacatctcctatctctattggcgcggaatggctccatgtccaatcgcaaatggaaaggcagaaatgaaaaccagataagccatggaccagcaaccccgcaggctgtatatcgcaggctgctgttcatgtttacagaaccggggtccagtgtcatgccaacagagaaaaaagagcttctgaccaactacatattggtcctaacactttttgccgatgacttcagatccaaccccagcgacatatgtgaggaccttaaaatgacccgccaaaatcttaaaccatactatgaccagttgggatgcaaatctgtgacagaaggtgcttttaagtctactttcatgacgctcccagcccctctcaagttcccaaaggaagttacgagaaagcggcgacggcagtagggcttttatccaaaggagacaaggagagaaaccaatggctatttatctcagaaatggcttgcattacttgaatggatggctggattggaaatactccctatcgaaggcaagaagtaaaggcatcgatgctaggggcccgattttaatagtgtactggaaatgaaaagttgtcctgtgtttcatctcgttttgtttttagttgctcatcgacattttcttgttaaggaaacatgtcatctatgtattgataaatgtttgtctatctgtatgagtgaatgtattgaaatgcttccgcttgggttaattcttagggttaattgtgtggagcagcttatcagattggtgaaaactctgcagaattgccatactgaattaaaagctgctcagtgtttttggttacatcagctcataaaacataggtaaaatccactagggcaacatgcttatatgaaattattcatataattgactacagcaatgtaagaacgcagtatcaatattggacggtttacatcatcaccaatctaaactttgttctacatcatctaaaccacacagtaaactggtaggggctagtagctgtcattcaaagactctttttttctttcgttgctagtatacaaggcattatttttcgccctgcccaggctgctcgacttaggatttctcggccacgtcgccacctgcctc

SEQ ID NO: 121665 - DNA, 4384 bp, Zea Mays
ccttcctcggcatccttcggtcccggaatatgcccccggcgtctccctcctcgcgttcctctcgtcggtgagctcctgccgcctggctcgcacagccgatttgcctcagtccagatcgtgcctccttcttcctagatcgggtccgaattcggctaccctcgccaccgccctacgccaggtgccgaggcctccgccgatctcttcgccggcgaagagcggccaccagcttgtggatggaggaggaggcgctgggtcgtggtggtggtgaaaagctttgatttcgtagccgtggtggacgccgctgctaatgcccttgccgtgcctcgttggtggcgtgcaagatgtatgccgtggggaaggtgggcagcctcatctcccgcagcgtgtacaccgtctccggcccgttccacccgttcggcggcgcggtcgacatagtcgttgtgcagcagcaggacggcagcttcaagagctcgccgtggtacgtgcggttcggcaagttccagggggttctcaagtcgagggagaaggttgtcgacatctccgtcaatggcgtcgacgcagggttccacatgtacctggacagcaacggcgaggcttacttcctcaggaacgcggacccgaatggtgaggaaggggagttcattgtctcccccgcctcgtcgggagatgagcgagaggtgccgatccaggaagctcagctgaggaagtcgaagagcacttcgtgtgatagctcgacgatggaagccgacgtcggtgagggcaagattcttgcgaggacaacctcgaggcggataaccatacttgaaaggatgtttggccggaaatcgattaagaacaatgcccatgctgtggatagggtgagttcattggagcgtgcagaggtcgctgcagaactcctagataccaagtggtcaacaaatctcccacgtagttcaaaacctaatggttcaaatgatgagccttccaagagcaacaatgatcagatggaaacctcaaaacctgtattttcggaacatagtttggatcatgggaaagagatggactctaactgtgacaatgctcactgcaattcatgcagccctcgtggaggaagaaacagttcagcagatgaaaccgatccgtgtttacaagccactattgtgaagaaagaggtggttgagatacacgcgcgtgagagcagcgacttcactgataatatcacttcaatcacacatcaacaagggtcagaatcttcgtcaaatgatctgggaacagataaacttatgcagcagtctgtcgatactcaagatgagttgctgcatgatgttgaagatgtaactgaaagggagacacatgcagaggaggttatttccaatgacatttttgaaatccatgttgttgagacagacattacaagtggtaagagcgaggtggattctgagattgttactgtggatccagaaccagatcgagctaaccagaattttacagatacaaattaccaaaattatggcaccacagatatttcatctgaaagacatgaggtttcattgatcccttctgcacaggatgcagttcaagagaaaatagttatcctcagcagttctgaggctgtggagggctcactagatgcagttccagagaaagtagtcattctcagcagttctgagactgtggatagctcatatgctgtgtcctgtattttggatgacacagttcatgatgcttctgatatctcacaggctgacggtgtacaacatgaggagcactctagtatctctgatgggagtacagaaaagctaatttctgaggaaagttcattagtatgctatggtgttcccagcaacaaaaaagacttggttaatatagctgttcaagaaagtaaagcctttatcttaaaaaatcctgcctcccaaatcttggaagagagtggtccaggtttggatgtatctacagacagtgtttccctttcacatgcagactcagctcctgatttagcttgtcagcatgtttctcctaatgttgaagatacaacaagttatgagcctggcattggtcctgaagatgtaacaaaaaactcagttgtggaaaatggagcatgcagcggggaacttgttgtttctgttattcagacctcagcgggagatggactgacaaaatgcattgctcatccagctgttttttctaataaaatagaagtagaaggctcaccaacttctgctggattttccagtttgatcagtgttgaagtgcaaaacacaaaactagaagatgacacaaacaaatctagttctgtgattggagatgaagctggttttgtgcctgaggctacagctgagcttgatgaagaagcagaaccagttatatcattatctgaatatacagaagaaattcagtttcaatttagtgatgctgaaaattttgcagatagaaaggccacggatgacatggtggctaacaaaacaacaggtgaagtagaacatgatgaatctgattgtgacacagagaaacaggaagaaggtgatgtaggtcttgtaaatgacttggagaactgttctgcgtcattaaagcctgtgagtagccctgtttctattcctgcaattgacttccagtcaggaaatagtaacagagaggctaaatctctaccaaatctccgttctcatatacatgatcttgaaaggtcttatagttttcagctaagccgctcactgcaatcaactgctgaaaataatggaattgatctagtcaagagcatgaattatgcttttcttgagcagaaatcagaagctattggtgatttttcagaagaaaataacagccctcctgaggttaccaacactgtagcacttgatggcaaccatgctgatgatctgaaagttgatgcgttcattccttttgcagaattatcactatgcagacacctgttatctgaaggcatgggggaggatgctgcttgcagtgcatttgattctgagaaggtaaccttagaggagttccgtaacatgaagcaatcactgatgcgaaacaacaaactagttgttaggattgctggccgctactttccctgggatgctgctgcacctatagtactcggtatgatttctttcagtgaggaacaagtttttgaacccaaaggaatgataaatgtggagcgagttgagcaaagtgcagctccaggtggcagctggagcatctggccatttagtttcagacgaacaaggactattactgctatccagccagtttgtgaaagtattgttgagacttctgtatccactcctaaagaattgacacattttaaagaactagatagagaaaggaataaatccagggtaaagaggattgagaggaaggtgcgatcactcactccaacatctgacgagcttgcatctcttgatctcagagagggcaggaacgtggtaacatttacgttctcaactgcaattgttgggaaacagcaggttgattgccacatatatttatggagatggaatacacgcattgtaatatctgatgtggatggaactatcaccaagtctgatgttcttgggcagttcatgccactagttggagttgattggtcccaaaacggagttgctcatttattttctgcaataaaggaaaatggataccagcttctatttctgagtgcacgcgctatttcacaagcccacatcacaagacagtttcttttcaacctaaagcaggacggcaaagcacttcctgatggccctgttgttatatctccagatggtctcttcccgtcactttacagagaagtcatcagaagagctccgcatgaattcaagatttcgtgtctagaggccatcaaagatttatttccacacgactcaaatccgttttatgctggatttggaaatagagacacagacgagcttagctacctcaaggttggtattcctatgggcaagatcttcataataaaccccaaggaggactacaatgcttggaattactggaagatgccattgcctgatgttgatttgtgaggtacaagtcgagtctgcacaacagcactgcactaattttatgatgtgccgtagtgatcatgagaaggccattacttggttggctacatgtggatgctcctgctcctgatataagttcctgcaagatggaattttgtatatataggatcataatagatgtagtagctatttcttgtgtctcctgttgttgttgttgttgtcgtcgtaggactggaaatcatacctccgtgtgtcctgtaactgaaggtacaaaatttactggatggagggatctgatagtatgttgcagccccccctttttcgtttcatccttgatgtaattgtggtaccgatgtattttgtacaagaacaaatcaataataatgcaatcgaaagcgagctgttcatacgcagac

SEQ ID NO: 121666 - DNA, 1805 bp, Zea Mays
agcgctgactcgtcgattagcattattagcagtttagcactagcgcctacggccctctcacctcgcctgctcgctacacgtccccagaaaagataccccagcacgcacacaccacgcgcccgcggccccgcgccggcgcaccaacacacccggccatcttctcccccttccctcccaattcaaggcggcccggaagctcctgcagccttccggaagggcttcgaggccgaggcgggcacgggatgtgggggcggcactactggggcggcggccggcgcccaagctgggcgcccggagggaacggagccggcaccggcggcgtggtggtgatgttcgcgtggctgtccagccaggagcggcacgtgcgggcgtacgtggagctgtacgcggcgcacgggtgggcgtgcctcgtctgccactccgacttcctcaccctgtttttccctgagaaggctgccatgctcgccgacagggtgattggggagcttgtcaaggtgctgaagattacacctgtacctgttgtgtttgcgtcgttttcgggagggccaaaagggtgcacatacaaggttcttcagctgatcgagagaagatgtgaagggcaactaagcatggatgagtaccagctcgtacgagattgtctatgcggacaaatgtatgattcaagccctgtggattttgtcagtgacttgggcactcgcttcctcctcgatccaagtgtcctgaagatgtctgaacctcctcgtgtcttgtcatggatgactaagggcattgcctcaggtcttgatgttcttttcataaacaaatttgaagaacaacgtaaagattattgggaaacactatactcatcggtgcattttggtccaatactaatactctgctcagaggatgatcaacttgctacatattcagttgttcaaaattttggccagcatctgctagagcttggtggtgatgtgagcctaattaaatggcatagttctccgcatgtcggccactacaagcatcatcctgaggaatacagagctgctgtgacggagctcctaaagaaagcctcgacgctctacgcgagcagacgacaactcaacggacacgccgtgggcacaagcgagcacaccgacgcgcccgcgcctgcatccacctccaagtccaacccacacagagatgccgcgagctctgtcggtcgtagcaggctgattcaagcaccggccgatccagccggccagtttccttccataccgagctccatggagtgtcacgagagcagcagccaaggtccgccgcagccggagctgttgagcatgccgggcgtggagagctcgggcctgcgttgtggggtgctggggcaggcgctgtacggtgtctgtgttccgaaggacgtagaagaaggctgggacctcgcgccgccttccgcgtcgtcggatgggatggggaggcgcgtccgtgctgctgccgcgccgcctcgccgtggtagcttccgtccgatgagatgtgtacggcgctcgagattgtgatattgtgcgtgcgttttagtttaaaaattaaggtgagcaacaaatattgagaacggagggagtagtacgtattctctatacaaatcaatataaatatggtgatcgtaatggtctattcctctatctgtatgaaccgtgtgtgttttctttctttctttcttttctgaaggaaaaattgaagggacggtggtgcggctgtcgtgagcggtgattgcacgaggagcactcccgattctgacggcgctcatcagtttcgttttcagagcattttactgattgccatgaataaaaaat

SEQ ID NO: 121667 - DNA, 78 bp, Zea Mays
aagaaaccctcgcccaaacccgctttcatacccgcaacgtgtagcaaaagttaatttatgtttggtgcccccgaaccg

SEQ ID NO: 121668 - DNA, 1316 bp, Zea Mays
atgggcaagtgcgtgaggatccgcggcagcagcaagccgcgcgccgccgccgccgcggcggcgtcgtgcctcacgctgtgcagcgggcgccgcgtgccgccgtcggaggcgtcggcggcgtgcagcccgaggacgagaagcaggccgcggcgccaccgcggggcaggcctccggcggtggtgcggcgccaaggagagcgcgtacggcggcagcccccggcgccacaggggcgagggcgaggccgacgcgcggagcccccgtggccgggtgctcggtgtcggtgcccgccagcagcagctctgcgccgacgacgggctcggccagcagcacgaggaggaggcgtctgcgacgatggccggcgactgcgacgacggcgcgggcgtggcgaaagtgaataaggcgaataaacacgagaacgacgagtgcggctgccgcgtcgtcggcggcgtcgccagccagacgccgtcgccgtcgccgtcgccgccaccgccgccgacggaaaccgagatagaggccttcttcgcggacgcggagctggccgagcgccggcgattcgcagaggcgtacaattacgacgtcgccctcgaccgcccgctggaggggcgcttcgagtgggtgccgctgccgctgacggggggtcggaggtggtaaacccgtcacagtccgttcgttaacctcaaggtcaagcagctagcaatgctctcctccgaccaccctcagctggcaaacttcaaactggagtcatcactcatcagtagtgctgattattatcctcccctgatgtcgtacgttatttttttgtagactgtcactcatccatcactaccccttaattagatttattattagcgtatatgcagctgatggtgcatgcacgtactctgtgatctgtccgtgacaaattaaaccacatgcatagtttagtactccatagtatgcatgtgtgtgtagtaactgtgtataggatgatccattggaggacgctttctgatgagctccccatgctgctagagctgtgcttatcgaccagttctgccacgcgtgatctttcgttctcctcgatcgtctgtttgcttgttttttggagcaaggtacgtacgtgtgtgcaaattttgttgttaattgtgaggagctgctggtcgtcgtcacatgtaatctatctccctcatgacaagctgcttaaccaattgctcacagcagcgtcatgagcttgagcttgagctagggctattaattaacaatgttcttctccggccggctagcagcctgcagctagtgagcgaggtatatagcagtgtggaaattgacactactgc

SEQ ID NO: 121669 - DNA, 551 bp, Zea Mays
ccgcccgccctctctcccgctgctccccatcgctctttcgttgtgactcgctccctccctggctccccgcatcgctccccatcccatcttgtcctggacacctgggaagcctcctgttctttttagtttcattcttggccacagacttcacgtgcccacaaccccaaggaggagaaaccaggctatgaccaatagctatcagttccttcagtgttttacgcccctctctgtgagcggaacaaggtcaccatggagcgtgtggtggggttcggcaaggaggtcgtgctgaagcagcggcggcggatgcgctggagacttcgcttgggctcctccagcgtcgtgtacgcctgacttcgctaccccctcgtcgcccgccgagacgccgtgcccagaggcggtctcttctcactgggaggaagcaggaaggaggatgaggctgctgccattctttgcctgaaaaaccaacaccagctttcatcagttcacaaattccatgagcagctggttcgttacctatgtttcagatcagtgtggagctaacacagtacgct

SEQ ID NO: 121670 - DNA, 872 bp, Zea Mays
atcgtcgacttcgagtcgtttcattgcctccactccacacagtacacacgacacgatgtctccagaactctcttgggtgatagcttccacagggcgacgacctccatgaaaaacggcgagtcttcattcccatcgtcgtctccgcgctcttggaccatacgaatctccggtcgaacctggtgtcgtccgcccgccctctctcccgctgctccccatcgctctttcgttgtgactcgctccctccctggctccccgcatcgctccccatcccatcttgtcctggacacctgggaagcctcctgttctttttagtttcattcttggccacagacttcacgtgcccacaaccccaaggaggagaaaccaggctatgaccaatagctatcagttccttcagtgttttacgcccctctctgtgagcggaacaaggtcaccatggagcgtgtggtggggttcggcaaggaggtcgtgctgaagcagcggcggcggatgcgctggagacttcgcttgggctcctccagcgtcgtgtacgcctgacttcgctaccccctcgtcgcccgccgagacgccgtgcccagaggttagcagatgcacatgccagtattgataaatcagcatgcatgctagctggagttatgttttagaacttgccacacatgcataccgacctgtctcctataatgcagacttccttttttatgatgaccttgcaacagtatattcagatatatgattttaccataagcgctccatctgagatcagtatgtgtaattctattgtggatggagattgaggcgaatgatacaggacttgaaaagtcaatgctttgagcactttaatcacgaatgttcaatctaaagttcaatgtttc

SEQ ID NO: 121671 - DNA, 1214 bp, Zea Mays
aaaagcccattaaccaaaccctacgatcgcacacagccgccgccgttttttcgccatccacctccgtctttctcgcactgcgcaaacgcatctgggcgatctgcgcccgcacgacgatgttccgcgccgccgcaggctcctactccgatgagttcatctgcctccaccgacccctcctcccgcctccactatggcagcacgtccctcaaagccgacgatatgacggcgagctcacctgggcgctcgcgaaccgcttctagggcatcggttccttctttgctccggcggcgcttggaggcagaggtgttctgtgtcagccagatctgggcgagatggccctacacatgatttagcgacggtcgtggacgacacgccccgtgtgcctcgcttgctttgctgtaacaggggcaatgggttctcgcccaatcggcttcgcgtgatgctgctgggggtggacaagcgtcgcaagggcaggacggtgccgccgtggaggaagaggacagcggtggcggcgactacgacactgtgctgaaggcccacgctagatccggtggcggcgactacggcgccgtgctgaaggcccgcgctagatccggtgccagcgacggtggggttgctgcatgactgtcttctcatgtatgaggtggtggaggcgccatgtgtgaagaaatacaagaatgtttatgtggtgagcaccatctcagagttctcatcctcgctggagacagcgggtgggcactggcgggtggactgtcttctccgtgctaaaggaatgccatcctatttcgccgtgctggaccagggtgctcgaagtgtttcttcagatatggacctcggtggttttctccacattaggaaagctggaagagcctttttgaactcagatttttttgctaacagtggtgttatggtgaaacaaagttttgtttgtatgtaccaacagctaaaatgtaaacacgacattatcatagttgagtacaggaataattatctcttatatcttattgcaaaatctgaaacagttctcctgtagatggttagcttgcattttacgctacaattacctcagatcacttgtatcttacaccaatttacaaaatttgttgatgcgttttatgacaacctcatgcgctgagagatacaaaaattttatgctattttgtatacatatttatgccaatgtcaataggattttatgacctatatttcagttc

SEQ ID NO: 121672 - DNA, 1367 bp, Zea Mays
aaaagcccattaaccaaaccctacgatcgcacacagccgccgccgttttttcgccatccacctccgtctttctcgcactgcgcaaacgcatctgggcgatctgcgcccgcacgacgatgttccgcgccgccgcaggctcctactccgatgagttcatctgcctccaccgacccctcctcccgcctccactatggcagcacgtccctcaaagccgacgatatgacggcgagctcacctgggcgctcgcgaaccgcttctagggcatcggttccttctttgctccggcggcgcttggaggcagaggtgttctgtgtcagccagatctgggcgagatggccctacacatgatttagcgacggtcgtggacgacacgccccgtgtgcctcgcttgctttgctgtaacaggggcaatgggttctcgcccaatcggcttcgcgtgatgctgctgggggtggacaagcgtcgcaagggcaggacggtgccgccgtggaggaagaggacagcggtggcggcgactacgacactgtgctgaaggcccacgctagatccggtggcggcgactacggcgccgtgctgaaggcccgcgctagatccggtgccagcgacgggttgctgcatgactgtcttctcatgtatgaggtggtggaggcgccatgtgtgaagaaatacaagaatgtttatgtggtgagcaccatctcagagttctcatcctcgctggagacagcgggtgggcactggcgggtggactgtcttctccgtgctaaaggaatgccatcctatttcgccgtgctggaccagggtgctcgaagtgtttcttcaggtatgcgaggaaaagtaatggagatgctaactgcatgttctgatgcattgatggattagtcttttatcctccctgtctgttatatatgcctttattattgtatggagctaataaatcattatccctactgagattgaattttttttgcattgatatcaaataaatcgtccattgaatcattttttctatgttttcagaatgatggacaaggtacaccatgatagtagaattttttttacaccctggttatcttgttttaattcatcctttctgtgctccaattattttggtgaatcttagcatagaacttgaccttctattattttgtatgtttggtttgcatgggataactggcatgggatatatttatgaacattgatatcatttttatgcttactcacatgggataatctgatcttctaactcaagatatttttattttggtaatctgatcttctaactcaagtttgcattcagtttagactttaggttatggtagtcataacaaacttgaaaagacatattaacaaggaaagatcatattaac

SEQ ID NO: 121673 - DNA, 672 bp, Zea Mays
atggatgtcaaccatgtcggaactggcatgcgagaagatgtcgatgatcggcgtgaagccgccgttgtagagccactggatgaggccccacttcgcgcactgctccgcggtgtacttctccgcctgcttggccgacccggtgccgacggagatgatgaggtagttggtgtactcggtggggctgccggcgttgaagttggggttgcggcggtgcacctccttggtgagcatggacatggcgaccatggtggggttgttggccgcgacgccgccgtccacgaggtggtactcgcgggggggccggccgtcggtggcctcggtcttgaagaagtgcgccgggaagtaggtgggcgccgccgacgtgctgatgcagatgtcggagaggtgcgcgttcttgagggtgtcggtcttggcctcgtacgtcgagaagatgatgggctgcagggacttgacgtcgaacgccggcacgatgacgttggtcaccgtgtccgccaccctgacgtcgtgcgtcaggctcttgatcttgtcgtgcaggaacacgccgtcgtacttggggccccgcaccaggcccagcaggttcctcagcggcgtcagcaacccagccctgcatatgcagtgagtgcagcaccattaggtaggatcgatagatggaagaagaacagagatggatga

SEQ ID NO: 121674 - DNA, 1001 bp, Zea Mays
ttttgagaaacgagcagagcaacctgcattgtatgaaactggaaaccgttggccatggctactcagaagatcaaaacggtggcaagcttggccagtagctccttgagaacagcagggcagctggcgttgagcacctcgaagccatccgtcgtctgagtgaaggagccaaggttgccgctagaagagaggaaacggaagcacgcctccttgagcgcagggcaatggtgtcggtcagctaaaaccagcatcgtggccaccgagtccgcgcgtatgtgcttgcacagcttctcctggcaaaccagcttcatcctgtcgacgccgtacctgtccgcggcggcaagcagaagctgatactgcaccatggcttcatcgtcgtcgtcgtcgtcgtcgtcgccgctgccagtctccggcggcaacgagtcggtgtagatgaaggccagcagggcgctgaacacctgggcttccatgtcctcaaccggtatgacgacgccggtgcccttgctgctctccatcatctcgccgaacagctgcgctctgaacacgggcgaccgcgccgcgagcacgcaccggtgcgcggagaacgtctcgccgcccgcgtcgaccagctggaacgtgacgtccgcgccgtccttgcgcgccagcaggtcgccgaggtgccggtggaggtcgtcggacgggggcgccgcgacgaaggcgtcgccgtcgccggccgtggccgcggcgaagggcttgatggcgatgtcgcagcggacgcggaagcagcggccgccgtcgctgtcgaggtagtactcgtgccgctctaggtcgtccctggtgaggaagcccggacactcccactgccacatctgctggatcaggcagttctggaacaaggtggctcgggtcctggacggcaccggcaggcctcctcggtccagcaggctgagcttgaacgaggcgttgaggggctcgcgggtgctgctgtagggaagagagacggtgaaggacgccgtaccagcagc

SEQ ID NO: 121675 - DNA, 949 bp, Zea Mays
aatctagaaatgtactttcttatttctgggaagccacaaatatcagcaaaaaaaactttattattgaactataactcataagcaatctaaaagagggcaccaccaatgatgggttgttggtagaacactgctgggtttgtcaaagcaagttggtcgaatggcagcaattgttgcagttgtaagagggtgccaacgttaggcgcagtgtgcaggtagaacggcaacaaatgttgctgtgtcaagaaggcagcagggctcacagcagctagctggctgaatggtagtagttgttgttgttgtacataagcatgagagttcaatgctgccagttggttgaatggaagaaattgccgggggtaggcagcagctagctggctgaatggtagtagttgttgttgctgcaaataagcagcagagttcaatgcagctagttggttgaatggcagaaactgttgttgctgagagtaggcagcaaggtttgctagcacgagttgttgtagttgttgtgccctgatgttttgtgccaacaaatgcaccaaaggtaactgctgttgctgagagtaggcagcaaggtttgctagcacgagttgttgtagttgttgtgccctgatgttttgtgccaataaatgcaccaaaggtaactgctgtaatagggctgatgattgttggaggaacaagggtgataaaggtaagatgcctgctgcgattgcctgttggatcctgtagggtagaagaattggattttcacatactgaagacatcgctggtgagaggtatgggggaagaagggaagctataggagcttgtgagcattgcgggaaaatgctcgccgtagcagcacttgcagaaagaccaaggagcataatgaggcaaaatattttggctgccattattggtacaatattgtgctttctatgttgctagttggtctcaataatatgtgcgatat

SEQ ID NO: 121676 - DNA, 948 bp, Zea Mays
atatcgcacatattatttagaccaactagcaacatagaaagcacaatagtgtaccaacaatggcagccaaaatattttgcctccttatgctccttggtatttctgcaagtgctgctacggcgaccattttcccgcaatgctcacaagctcctatagcttcccttcttcccccgtacctctcaccagcggtgtcttcggtatgtgaaaacccaattcttcaaccctacaggatccaacaggcaatcgcagctggcatcttacctttatcacccttgttcctccaacaatcatcagccctattacagcagttacctttggtgcatttattggcacaaaacatcagggcacaacaactacaacaacttgtgctagcaaaccttgctgcctactctcagcaacagcagtttcttccattcaaccaactagctgcattgaactctgcttcttatttgcaacaacaacaactaccattcagccagctacctgttgcctacccccagcaatttcttccattcaaccaactggcagcattgaactctcctgcttatttacagcagcaacaactactaccattcagccagctagctggtgtgagccctgctaccttcttgacacaaccacagttgttgccgttctaccagcacgctgcgcctaacgctggcaccctcttacaactgcaacaattgctgccattcaaccaacttgctttgacaaacctagcagtgttctaccaacaacccatcattggtggtgccctcttttagatttcttatgagttatagttcaataataaagttttttgtctgatgtttgtggcttcccagaaataagaaagtacatttctagattcttatgtgcttctagtctccaaatgtggttgatagttattttgctctaagatcagcagtacaacaacaacaacaacaacaacaacaacaacaacaaagc

SEQ ID NO: 121677 - DNA, 1273 bp, Zea Mays
atatcacacatattattgagaccaactagcaacatagaaagcacaatagtgtaccaacaatggcagccaaaatattttgcctccttatgctccttggtctttctgcaagtgctgctacggcgaccattttcccacaatgctcacaagctcctatagcttcccttcttcccccgtacctctcaccagcggtgtcttcggtatgtgaaaacccaattcttcaaccctataggatccaacaggcaatcgcagctggcatcttacctttatcacccttgttcctccaacaatcatcagccctattacagcagttacctttggtgcatttattggcacaaaacatcagggcacaacaactacaacaacttgtgctagcaaaccttgctgcctactctcagcaacaacagtttcttccattcaaccaactagctgcattgaactctgcttcttatttgcaacaacaacaactaccattcagccagctatctgctgcctacccccagcaatttcttccattcaaccaactgacagctttgaactctcctgcttatttacagcagcaacaactactaccattcagccagctagctggtgtgagccctgctaccttcttgacacaaccacaattgttgccgttctaccagcacgctgcgcctaacgctggcaccctcttacaactgcaacaattgctgccattcaaccaacttgctttgacaaacccaacagcattctaccaacaacccatcattggtggtgccctcttttagatttcttatgagttatagttcaataataaagttttttgtctgatgtttgtggcttcccagaaataagaaagtacatttctagattcttatgtgcttctagtctccaaatgtggttgatagttattttgctctaagattagcagtaatgaagtataaatcatcgttgtggtgtgctactcggttaattgagcattaacacacacaaacatgacgaggatggtataatctccaaaaatgtgtactttgttaggtgggaccctatagccttgcagaatgtgctacgttaggcatgccaatggaaacgtgtgacacatacgttttgtgaatctgttgatattatatgtgcttttatattaccatattttattaaaatactaatatttattactagtaagatataacattctatctagcttaaaaactaaccataaatattccataataactagatttaccaaactaatatactaaatatacataataaatataaaattaacaagacaataatt

SEQ ID NO: 121678 - DNA, 1139 bp, Zea Mays
aatccaaaattaatcttgcacaagcacaaggactgagatgtgtataaatatctcttaaattagtagctaatatatcacacatattattgagaccaactagcaacatagaaagcacaatagtgtaccaacaatggcagctaaaatattttgcctccttatgctccttggtctttctgcaagtgctgctacggcgaccattttcccacaatgctcacaagctcctatagcttcccttcttcccccgtacctctcaccaacggtgtcttcggtatgtgaaaacccaattcttcaaccctacaggatccaacaggcaatcgcagctggcatcttacctttatcacccttgttcctccaacaatcatcagccctattacagcagttacctttggtgcatttattggcacaaaacatcagggcacaacaactacaacaacttgtgctagcaaaccttgctgcctactctcagcaacagcagtttcttccattcaaccaactagctgcattgaactctgcttcttatttgcaacaacaacaactaccattcagccagctatctgctgcctacccccagcaatttcttccattcaaccaactgacagcattgaactctcctgcttatttacagcagcaacaactactaccattcagccagctagctggtgtgagccctgctaccttcttgacacaaccacagttgttgccgttctaccagcacgctgcgcctaacgctggcaccctcttacaactgcaacaattgctgccattcaaccaacttgctttgacaaacccagcagcattctaccaacaacccatcattggtggtgccctcttttagatttcttatgagttatagttcaataataaagttttttgtctgatgtttgtggcttcccagaaataagaaagtacatttctagattcttatgtgcttctagtctccaaatgtggttgatagttattttgctctaagatcaacagtaatgaagtataaatcatcgttgtggtgtgctactcggttaattgagcattaacacacacaaacatgacgaggatggtataatctccaaaaatgtgtactttgttaggtgggaccctatagccttgattaatgtgctatgttaggcatgcctggaaacgtg

SEQ ID NO: 121679 - DNA, 622 bp, Zea Mays
cacacatattattgagaccaactagcaacatagaaagcacaatagtgtaccaacaatggcagctaaaatattttgcctccttatgctccttggtctttctgcaagtgctgctacggcgaccattttcccacaatgctcacaagctcctatagcttcccttcttcccccgtacctctcaccaacggtgtcttcggtatgtgaaaacccaattcttcaaccctacaggatccaacaggcaatcgcagctggcatcttacctttatcacccttgttcctccaacaatcatcagccctattacagcagttacctttggtgcatttattggcacaaaacatcagggcacaacaactacaacaacttgtgctagcaaaccttgctgcctactctcagcaacagcagtttcttccattcaaccaactagctgcattgaactctgcttcttatttgcaacaacaacaactaccattcagccagctatctgctgcctacccccagcaatttcttccattcaaccaacttgctttgacaaacccagcagcattctaccaacaacccatcattggtggtgccctcttttagatttcttatgagttatagttcaataataaagttttttgtctg

SEQ ID NO: 121680 - DNA, 837 bp, Zea Mays
attgagaccaactagcaacatagaaaagcacaatagtgtaccaacaatggcagccaaaatatttgcctccttatgctccttggtctttctgcaagtgctgctacggcgaccattttcccgcaatgctcgcaagctcctatagcttcccttcttcccccgtacctctcaccagcggtgtcttcggtatgtgaaaacccaattcttcaaccctacaggatccaacaggcaatcacagctggcatcttacctttatcacccttgttcctccaacaatcatcagccctattacatcagttacctttggtgcatttattggcacaaaacatcagggcacaacaactacaacaacttgtgctagcaaaccttgctgcctactctcagcaacagcagtttcttccattcaaccaactagctgcattgaactctgcttcttatttgcaacaacaacaactaccattcagccagctacctgctgcctacccccagcaatttcttccattcaaccaactggcagcattgaactctcctgcttatttacagcagcaacaactactaccattcagccagctagctggtgtgagccctgctaccttcttgatacaaccacagttgttgccgttctaccagcacgctgcgcctaacgctggcaccctcttacaactgcaacaattgctgccattcaaccaacttgctttgacaaacccagcagcgttctaccaacaacccatcattggtggtgccctcttttagatttcttatgagttatagttcaataataaagttttttgtctgatgtttgtggcttcccagaaataagaaagtacatttctagattct

SEQ ID NO: 121681 - DNA, 849 bp, Zea Mays
atatcgcacatattattgagaccaactagcaacatagaaagcacaatagtgtaccaacaatggcagccaaaatattttgcctccttatgctccttggtctttctgcaagtgctgctacggcgaccattttcccgcaatgctcgcaagctcctatagcttcccttcttcccccgtacctctcaccagcggtgtcttcggtatgtgaaaacccaattcttcaaccctacaggatccaacaggcaatcgcagctggcatcttacctttatcacccttgttcctccaacaatcatcagccctattacaacagttacctttggtgcatttattggcacaaaacatcagggcacaacaactacaacaacttgtgctagcaaaccttgctgcctactctcagcaacagcagtttcttccattcaaccaactagctgcattgaactctgcttcttatttgcaacaacaacaactaccattcagccagctacctgctgcctacccccagcaatttcttccattcaaccaactggcagcattgaactctcctgcttatttacagcagcaacaactactaccattcagccagctagctggtgtgagccctgctaccttcttgatacaaccacagttgttgccgttctaccagcacgctgcgcctaacgctggcaccctcttacaactgcaacaattgctgccattcaaccaacttgctttgacaaacccagcagcgttctaccaacaacccatcattggtggtgccctcttttagatttcttatgagttatagttcaataataaagttttttgtctgatgtttgtggcttcccagaaataagaaagtacatttctagatt

SEQ ID NO: 121682 - DNA, 854 bp, Zea Mays
atatcgcacatattattgagaccaactagcaacatagaaagcacaatagtgtaccaacaatggcagccaaaatattttgcctccttatgctccttggtctttctgcaagtgctgctacggcgaccattttcccgcaatgctcgcaagctcctatagcttcccttcttcccccgtacctctcaccagcggtgtcttcggtatgtgaaaacccaattcttcaaccctacaggatccaacaggcaatcgcagctggcatcttacctttatcacccttgttcctccaacaatcatcagccctattacaacagttacctttggtgcatttattggcacaaaacatcagggcacaacaactacaacaacttgtgctagcaaaccttgctgcctactctcagcaacagcagtttcttccattcaaccaactaggttcattgaactctgcttcttatttgcaacaacaacaactaccattcagccagctacctgctgcctacccccagcaatttcttccattcaaccaactagcagcattgaactctcctgcttatttacagcagcaacaactactaccattcagccagctagctggtgtgagccctgctaccttcttgacacaaccacagttgttgccgttctaccagcacgttgcgcctaacgctggcaccctcttacaactgcaacaattgctgccattcaaccaacttgctttgacaaacccagcagtgttctaccaacaacccatcattggtggtgccctcttttagatttcttatgagttatagttcaataataaagttttttatctgatgtttgtggcttcccagaaataagaaagtacatttctagattcttat

SEQ ID NO: 121683 - DNA, 1943 bp, Zea Mays
atgctacactagaaccaaaagtccatacggcccggggcccgggcgtccccaaaaacctcacccctctcttatccgccccaacggccgcccgccggccaccacctcaccggcgagatgctgacctgcggccgctttatctcctcctccgctgctaccagcaccgcatcctttttcccgtttcggactctcactcgctccctcgttcgccgccccgctccccacctcctctcctctgcctccgccgccgccgccaccgccgtggaactcgacaccaatgacggtagtgcgggaggtggtgccggtgtggtgaggccgcagtggaaggccgcgattgatttcaaatggatccgagacaaccgggatgccgtcgccgacaacatccggacccggaactctaccgccaatctggacctcgtcttcgagctctacgatcagtacctcacactgcagaaggaggttgaaaggctccgagctgaaagaaatgcggttgccaacaagatgaaagggaaactagacccatctgttcgccaagcccttgttgaagaaggtaagaacctgaaagagggacttatagcactcgaggaggatcttgttcagctgacagataagcttcaacttgaagctcaaagtattcctaacactacccatccagatgttcctgttgggggtgaggaaagctctgtcctcaggaaagaggtaggcagtcagaggagcttcaattttgcaatcaaagatcatcttcagctggggaaggaacttgatttgtttgactttgatgcagcagccgaggtcagtggttcgaagttctactacttaaagaatgaagctgttttgttggagatggccctagtaaactgggctatttcagaggtctccaagaagggtttcacaccactcataactccagagatcgtaagatcatctgttgttgagaaatgtggctttcagccaagggccaaaaacactcaggtatactcaattgaggacagtgatcagtgtctcataggcacagcggaaattcctgttggaggcatccacatggactcaatacttgccgaatccgctttgcctttaaaatatgtagcatattcacactgttttcgcacagaagcaggtgcagcaggtgctgccactaggggcctctatcgggtacatcaatttagcaaggttgagatgttcatattctgtcggccagaggagagtggaaaatggcatgaagaacttattacaattgaagaggatctttatgcatcacttggacttcatttcaaaactctggacatggcaactggggatctgggtgcaccagcctaccggaaatttgatatcgaggcgtggatgcccggcctagagcgttatggtgagatctccagtgcatcaaattgtaccgactaccaaagtaggcgactaggcatccgttaccgcccatcaccctcggagcctccatcaacgagcaccaagaaagggaagggagctgcctcaggccctacgcagttcgtccacacgctcaacgctacagcagtggcggtgcctcgtctgatagtttgcattctagagaattttcagcagggcgatgggtcgattgtggttccagagccactaagaccctatatgggtggactagagttgctctccccaaaattcaagtgaccctctacggtcacccgctgttgtgcttgtgtggacttagaactgtctggctgaagtacaagttaaaggaaggtcatttctcactacaaatatacactactgagtttcgtgattggggcttctgtttcataagcagtcgactactctgatctaatctgcatagcattatactggtcggttactctgatctgcatagcactacaaagcttatgtgcatgcattaggccctctatggttcccaagaatcgagtgacatttaaaagtaatctaatgctccttacattctaatgcca

SEQ ID NO: 121684 - DNA, 1941 bp, Zea Mays
atgctacactagaaccaaaagtccatacggcccggggcccgggcgtccccaaaaacctcacccctctcttatccgccccaacggccgcccgccggccaccacctcaccggcgagatgctgacctgcggccgctttatctcctcctccgctgctaccagcaccgcatcctttttcccgtttcggactctcactcgctccctcgttcgccgccccgctccccacctcctctcctctgcctccgccgccgccgccaccgccgtggaactcgacaccaatggagacggtagtgcgggaggtggtgccggtgtggtgaggccgcagtggaaggccgcgattgatttcaaatggatccgagacaaccgggatgccgtcgccgacaacatccggacccggaactctaccgccaatctggacctcgtcttcgagctctacgatcagtacctcacactgcagaagatggcaggaggttgaaaggctccgagctgaaagaaatgcggttgccaacaagatgaaagggaaactagacccatctgttcgccaagcccttgttgaagaaggtaagaacctgaaagagggacttatagcactcgaggaggatcttgttcagctgacagataagcttcaacttgaagctcaaagtattcctaacactacccatccagatgttcctgttgggggtgaggaaagctctgtcctcaggaaagaggtaggcagtcagaggagcttcaattttgcaatcaaagatcatcttcagctggggaaggaacttgatttgtttgactttgatgcagcagccgaggtcagtggttcgaagttctactacttaaagaatgaagctgttttgttggagatggccctagtaaactgggctatttcagaggtctccaagaagggtttcacaccactcataactccagagatcgtaagatcatctgttgttgagaaatgtggctttcagccaagggccaaaaacactcaggtatactcaattgaggacagtgatcagtgtctcataggcacagcggaaattcctgttggaggcatccacatggactcaatacttgccgaatccgctttgcctttaaaatatgtagcatattcacactgttttcgcacagaagcaggtgcagcaggtgctgccactaggggcctctatcgggtacatcaatttagcaaggttgagatgttcatattctgtcggccagaggagagtggaaaatggcatgaagaacttattacaattgaagaggatctttatgcatcacttggacttcatttcaaaactctggacatggcaactggggatctgggtgcaccagcctaccggaaatttgatatcgaggcgtggatgcccggcctagagcgttatgatctccagtgcatcaaattgtaccgactaccaaagtaggcgactaggcatccgttaccgcccatcaccctcggagcctccatcaacgagcaccaagaaagggaagggagctgcctcaggccctacgcagttcgtccacacgctcaacgctacagcagtggcggtgcctcgtctgatagtttgcattctagagaattttcagcagggcgatgggtcgattgtggttccagagccactaagaccctatatgggtggactagagttgctctccccaaaattcaagtgaccctctacggtcacccgctgttgtgcttgtgtggacttagaactgtctggctgaagtacaagttaaaggaaggtcatttctcactacaaatatacactactgagtttcgtgattggggcttctgtttcataagcagtcgactactctgatctaatctgcatagcattatactggtcggttactctgatctgcatagcactacaaagcttatgtgcatgcattaggccctctatggttcccaagaatcgagtgacatttaaaagtaatctaatgctccttacattct

SEQ ID NO: 121685 - DNA, 1767 bp, Zea Mays
atgctacactagaaccaaaagtccatacggcccggggcccgggcgtccccaaaaacctcacccctctcttatccgccccaacggccgcccgccggccaccacctcaccggcgagatgctgacctgcggccgctttatctcctcctccgctgctaccagcaccgcatcctttttcccgtttcggactctcactcgctccctcgttcgccgccccgctccccacctcctctcctctgcctccgccgccgccgccaccgccgtggaactcgacaccaatggagacggtagtgcgggaggtggtgccggtgtggtgaggccgcagtggaaggccgcgattgatttcaaatggatccgagacaaccgggatgccgtcgccgacaacatccggacccggaactctaccgccaatctggacctcgtcttcgagctctacgatcagtacctcacactgcagaaggaggttgaaaggctccgagctgaaagaaatgcggttgccaacaagatgaaagggaaactagacccatctgttcgccaagcccttgttgaagaaggtaagaacctgaaagagggacttatagcactcgaggaggatcttgttcagctgacagataagcttcaacttgaagctcaaagtattcctaacactacccatccagatgttcctgttgggggtgaggaaagctctgtcctcaggaaagaggtaggcagtcagaggagcttcaattttgcaatcaaagatcatcttcagctggggaaggaacttgatttgtttgactttgatgcagcagccgaggtcagtggttcgaagttctactacttaaagaatgaagctgttttgttggagatggccctagtaaactgggctatttcagaggtctccaagaagggtttcacaccactcataactccagagatcgtaagatcatctgttgttgagaaatgtggctttcagccaagggccaaaaacactcaggtatactcaattgaggacagtgatcagtgtctcataggcacagcggaaattcctgttggaggcatccacatggactcaatacttgccgaatccgctttgcctttaaaatatgtagcatattcacactgttttcgcacagaagcaggtgcagcaggtgctgccactaggggcctctatcgggtacatcaatttagcaaggttgagatgttcatattctgtcggccagaggagagtggaaaatggcatgaagaacttattacaattgaagaggatctttatgcatcacttggacttcatttcaaaactctggacatggcaactggggatctgggtgcaccagcctaccggaaatttgatatcgaggcgtggatgcccggcctagagcgttatggtgagatctccagtgcatcaaattgtaccgactaccaaagtaggcgactaggcatccgttaccgcccatcaccctcggagcctccatcaacgagcaccaagaaagggaagggagctgcctcaggccctacgcagttcgtccacacgctcaacgctacagcagtggcggtgcctcgtctgatagtttgcattctagagaattttcagcagggcgatgggtcgattgtggttccagagccactaagaccctatatgggtggactagagttgctctccccaaaattcaagtgaccctctacggtcacccgctgttgtgcttgtgtggacttagaactgtctggctgaagtacaagttaaaggaaggtcatttctcactacaaatatacactactgagtttcgtgatt

SEQ ID NO: 121686 - DNA, 1800 bp, Zea Mays
gtccacatcgtcgtctcaatctcatatcctggtgatgattattatctatctatccaccatcgatcacgcaagcaagccaagtgctcactgttgatcaataatgctaagcgcgacggccctcctcttcttgctcctcctcgtctctgtgattgttcttcttgtatcatcatatcatggcaacaataatactggaacgaaatcaaagaagaagcgccctcctggcccatgtcgactcccgttcatcggaagcatccaccacctgctcacctcgcagccgcaggccactctccgcgacctggcccagaagcatggccctgtgatgtacctccggctgggccaagtggacaccgtggtggtctcgtcgccggcggtcgcgcaggtggtgctccgtgacaaggacatcaacttcgcgtcgcggccgtacctgctcgccacggagatcatcggctacgacggccatgacttcgccttcgctccctacggggcctactggagggcgctgcgcaagctgtgcacgctggagctcctcagcgcgcgcaaggtgaggcagctcgcgcccatcagggacagcgagaccatgtccctcgtcacggagatccgccgccgttcctgtggcgcccgcggcgagcctgcagcagtcaacctcggcagcctgctggtctcctgtgctaacaatatcactgggctggcgaccttcggagaccgcttcagcagcgagcacaaggcgaaattcctgtcaacgatggcggtcgtgctgagcagcggttccggtttctgcgtctccgacctcttcccgtccatgcggttcctggacgtcgccactgggatgcgacgccgcctgcaggtggcgcatgagcagctcgaccaggtgctggaccagatcatcgaggcgtgcgaggcgaggcagaacatcaagaatgctgaggcggaagacgacgatattctgagcaccatgcttagaatcaaagatgaggaggagttcgacttcccgttcaacatcacacacatcaaggcagtcatcattgatttattcataggaggcaccgagacgacttcgtctgtagctgagtgggtcatgtccgagctcatgagaaaccccgaagccatggccaaggcccaagcagaggttcggcgagcactcgacagcaagaacccaggcgaccacgagtcgctcctgggctccctgagctacaccggcatggtgatcaaggagacgatgaggctgcacccgtcgctcccgctcctgcttccccgcctctgccgcgaggactgcgacgtcggcgggttcgaggtgcccaaaggaaccagagtgatcgtcaactcgtgggcgatggccagaagcccagagctttgggacgaagccgaggagttcaggcccgagaggttcgtggcaagcacggctgattacaaggggacgcagtttgagtacttgccgttcggcagcgggaggaggatgtgtcctggcatgggcttcggactggtcacgttagagctcatcgtggtgcgcctcctctactacttcgactggagccttccagctgggatccgcgccgaggagctggacatggacaccacggttggagcgacagcaaggagaacaagacagctgcaccttgtggcgatgccttacgagcaagccatggaaatttgaagattggagtccgaactgcgtttcgttcttggcattgtgcccctgtcaaataagattaaaacagtcttacttatgataaaagcttccgaccttagtaacgatgttggttggattcaacttctcacttgaaaatgatgaacagttgctct

SEQ ID NO: 121687 - DNA, 1531 bp, Zea Mays
cgccaagaaactgagccatccggtcccaaaagtagaaaagggcaagcgacgagcacagcacagcacagcacaagcacgccttccgttttgggaaggcgaggagaggggaaccccggcccagggagagttgtggggaggggatcggcggcggaggagatggaggagcgggagaagctcgtgtgcctggccaagcttgccgagcaggcggagcggtacgacgatatggtggaattcatgaagaatcttgctaggatggacgtggatatgagtgctgaagaaaggcatttgttctcagttggtttcaagaacactattggagcaaagagagcatcatggagaatcatttgttcacatgagcaaaaggtcgcagctgatcgtcagactggtgtgatgatagatgcctataagaagaaagtagaagaggaactaaggaaggtttgcaatgaagtattgtcagtcattgctattcactgccttcccttggccagtacgggtgaaaatatcgtattcttttataagatgaaaggtgactactaccgttacttggctgaatttagcactggaactgaaaagaaagctgcctctgatcagtcacttatggcctatcagcatgccatggttgtcgcctccagtgagctctcacctgctcaccaaatccggcttggccttgccctcaatttgtcggtcttcttttatgagataatgaactctcatgagagagcttgccaagtggcaaaacaagcatttgatgaggctcttactgagataaattctggtgagggagtttacaaggatagcacacttatgatgcagcttctgaaggacaacttagcattgtggacatcagaactaactgggggtgaagcatccaagggtaacggcgatgtcgacatggagggttgatacattctccatgttttaaggaaacacagaacgcacgcaaaaatatccaggctgtgatgctagcgaacctgggtcctcaagttttttctgcatcggaactaagaagagccttgtgtatttttctgaagtttctgtccgtctcggggttttttttttgaggtctgtttgttcctctcttttggccatcgtttggtcctggagtcagtcactcactaccaagtgtttcagaggtctgaactggtgagcatccagatctgttgttgcttttttttccttctgtgcttcagaggcatctttgtacaccgatggaaaactgtttctcttatcaacgcatagactgtcagtgctgttactgatcatgttcggtgactgaagcgtctctgtagtgttgagatcgagcataaacttctccacgaaattatgtacctgcaaagtgtcggtatgatcttacacgccgatgcagcagttgcttccacgccgccggaaaaaatattggccgtccagcaccgtcgtaaaaataacttggccgtacgtgtattggctgctgcttctttcactttaccgtgagtccgtgagtccgtgacccgcagcttcagcttctgagtaaaagataaaaaaaaaggtgacg

SEQ ID NO: 121688 - DNA, 109 bp, Zea Mays
ctatttttcatataaatacatatattatacgtgcatatctatattctatattttatacttaaagcaccagtttcaacggtcgtcatgcgtcatttttttacaaataacc

SEQ ID NO: 121689 - DNA, 1509 bp, Zea Mays
atgctaagcgcgacggccctcctcctcttcttgctcctcctcgtctctgtgattgctcttcttgtatcatcaaatcatggcaaccacaatactggaacgaaatcaaagaagaagcgccctcctggcccatggcgactcccgttcatcggaagcatccaccacctgctcacctcgcagccgcaggccactctccgcgacctggcccagaagcatggccctgtgatgtacctccggctgggccaagtggacaccgtggtggtctcgtcgccggcggttgcgcaggtggtgctccgtgacaaagacatcaacttcgcgtcgcggccgtacccgtacctgctcgccacggagatcatcggctacggcggccacggcttcgccttggctccctacggggcctactggagggcgctgcgcaagctgtgcatgctggagctcctcagcgcgcgcaaggtgaggcagctcgcacccatcagggacaacgagaccatgtccctcgtcagggagatccgccaccgttcctgtgctaactacatcactgggctggcgaccttcggagaccgcttcagcagcgagcacaaggcgaaattcctgtcagtgatggcggtcgtgctgagcagcggctccggtttctgcgtctccgacctcttcccatcgatgcggttcctggacgtcgccaccgggatgcgacgccgcctgcaggtggcgcatgagcagctcgaccaggtgctggaccaaatcatcgaggcgtgcgaggcgaggcagaaggtcaagaatgctgaggcggcggaagacgacgatattgtgagcaccatgcttagaatcaaagatgaggaggagttcgacttcccgttcaacatcacacacatcaaggcagtcatcattgatttattcataggaggcaccgagacgacttcgtctatggctgagtgggtcatgtccgagctcatgaggaacccggaagccatggacaaggcccaagcagaggttcggcgagcactcgacagcaagaacccaggcgaccatgagtccctcctgggctgcctgagctacaccggtatggtgatcaaggagacgatgaggctgcacccatcactcccgctcctgcttccccgcctctgccgcgaggactgcgacgtcggcgggttcgaggtgcccaaaggaaccagagtgatcgtcaactcgtgggcgatggctagaagcccagagctctgggacgaagccgaggagttcaggcccgacaggttcgtggcaagcacgacggattacaaggggacgcagtttgagtacttgccgttcggcagcgggaggaggatgtgtcctggcatgggcttcggactggtcacgctcgagctcatcgtggtgcgcctcctctactacttcgactggagccttccagctgggatccgcgccgaggagctggacatggacaccacggttggagcgacagcaaggagaacaagacagttgcaccttgtggcgatgcctaacgaggaagccatggaaatttga

SEQ ID NO: 121690 - DNA, 591 bp, Zea Mays
atggctgccgatcgtgcatggatgtataatggttggagtaggaatggacgtcattctgatgattgggtagccaagaccaaagattttgtggaccacgtattcgccttgtccttaaccggcactgtcagatgcccttgtaggcggcacgaaaacagtatatttcttaataaggaaagagttagcctagatctttgtcagtttggatttatgcccggatatgaggtgtgggaacatcatggtgaggtagtacccaaccggaatgtagaagaggaggagaacaatgattgggctggcaatgatgcgatgcatgagatgctagattcgctacgtccagaattcaacctaagctccgaggatcctgccacaccagaggtttccagattttttaaactactaaaagactctgaagagccgttgcatgaacacacagatgtgagtatactcgcttttgtgactcggctcatggccattaagtccaagtacttcttctcgaacaattgttacaatgagattttaaagttattaggagatgtgctcccaaagcccaataagttgcctaaagacatgtaccaatcaagttttaggttgtga

SEQ ID NO: 121691 - DNA, 408 bp, Zea Mays
acctgcaaatcagtcgccggatgcgccggcggaggctctggagagctggaaagggatggacggctgccgatctgtgtcgtagtgcgctccgctggaccggactctggaggagcagaccggagcgggcaaagggacgccccccaaaatcggagaacaccgggatggggaggccacgccgacagagcgtaggaaggaggatgcggagacgacggatatggccgcaaggacggggaggatgcggaggtgacggaggggcgggcgctgcgggagtcgcacgggtgagggacgggtctggttcaccgagaaggcgccgggggaggaagaaggcgcgtgcggctggacgggaaccggcggcggatgggccggagggcggcggaccggaccccacggcggggagggcggcgaacg

SEQ ID NO: 121692 - DNA, 852 bp, Zea Mays
atgctggaggtgccacagtccagtttagtccatcttccctgccatagcgatttctgtttggttgctccttggccatctggactaaatttaaggagcaatggcccaagaaacagtgtgaacagctgcaagttgttccaagagttaacggttgctggattctgtcaatttcttcacgtaggcgccaattgcttcgatgtaattgtctccgtgggcgaagaagccaacgatcctgctgtcgctctgcaccggaacctggaacgcggctcccagctgcgttccgaaaggcccgtgtgttttgcccgtgctggtcacgagcgtcagagaggacacgacactgggtattgttctgtcccacgcgcatggatggaatgtcccagtaacttccactatgaactcttcaggggcaagatgaatctttcgaccagttcctccgcagccgccccacggaccggtggtgtgctgctgcccgtcgccatcgctgtacagatactccagcgagtttacgatcgtcccgctgaagatcgtcactctgtgcaggcgatgcggcctctctgcgatgtcatggagagcatttccaaccccgccccaaggcccaatcctggcgacgacggcctcatcaccaccatcttgtttcccaactgcttttggttcgggtttcggcgccgtgtagacaccgatcgcgttgaggtaccgtccggagcgcccaaagaaaccgacgatgcagccattgccctgcactgggatgtggaaggatgtgcctcgccctcttccaaacggcccgtagctacgagcgttggtgacgaacgtcagagacgttatgacgtttgcatggccgttgaatgtgccgattga

SEQ ID NO: 121693 - DNA, 830 bp, Zea Mays
ctcttttattatttgagcacacttgaaattaattatatatagatgttcttcccccatgcatacagcactccgatccagggggtgcgcaagcaagtacatatttatccgatagaacaatttaatttccttcgttcacacattaattcactagatcgagcgaaataatggaattgttggtgcacgaagcagtctccatcgagctgccctccagcacacggtgaattcaagtgcctagggatcgatgtccttttcctcatggtgcaataatgcttggtttatgctgctagcaaagaggtggtagtcaaacgacaaatgtgacactcatgtgttttcatgtcgatggactgaagcggtgaaggacgaacgacggtcttaaactgagtggtggccggaggatcaaccgtaggtgtggctgacacatgtggtcatcgacaagtgcaagatgacatggaggactagatcgtgttgatcgggtcaatacggcggttgatcaagtcaaaagcgaggtgttgtataggacatggcgaccgagaggtcaaggaccagaggtcacccatatcgagatcatgggggctagcatatgaagtacgctaaccatggatgttttgatgatttgggccccaaaaccacaggtgaacgatttccgggtttgggtctcaaaactaggatagagtttcagcaggaactagatgcggcatgtggcatcatcataaaagctttcattaatgtgaagcaaagtcgtgaaaaactatgaatggtaagatatttgtgagatatctagttacctaggagcaagttggaaatatgcaaaagaccatgttgataagaca

SEQ ID NO: 121694 - DNA, 510 bp, Zea Mays
atggccataccttggaagtcgacagcaagagcaagcgatgcccgctggcatcgcaacagaaggaacacaaaagctaacagcttcatgcttactgaatccatcatcacgtttctgtttcaggaactgaaagaaaagcccttgcgaagtggaatggacgctagactgctgcaccaaggaaacagagcgttaatcaccgaagtggaaatgtgcagcgaagtggagtcgctgccagttgtgccagagagcatcaaagtccacgcctacgtagcaacttccgaaaggtcagttcctactctgtttcaagaactagggatcatgctatgcggtgcaggtggaaagaaacttggggtcgctagaggcagcgttctcctgttcggagtagtgtttgggctgaaacaaagcttgttgtttgcagctatgcttccattggtttcgccacaaaaggcaagcaagcaagaagcacaggcggcaataaggccagaagcacaggggtggggggaaccgctctaa

SEQ ID NO: 121695 - DNA, 2883 bp, Zea Mays
cagagatgctcccccggcatggccatgtctgccgcctcctcctccttccgaggctccggcctatgtccaccagcgccaccacggccttcccacctaccgactccgctcccttcttctccgccgcccccggctccttcctcgacccgaccgcgctcgcccccgacgacgccatcgcgttgctcccgtcagtcgcggactccgagggctccgcggcggcgctggcgctcttccgccgcctgtcgtcccgcccggacatgcgccgcctcatgcggctctacgccacggccgccaccgccttcgtcgcgcgcgggaacctgcccatggcgcacgaggccgcgcgcgcgatggtcgccgccttcgcggaggccgggcgcctgcgggaggccgcggacatgctgctagagctgcggagccacgggctcccgctcgtcgtcgagacggccaactgggtgctccgcgtcgggctgcggcacccgggctgcttcgcccacgcgcgcgaggcgttcgacggaatggcacgcgccgccggcggcgtgcgccccgaccaccgcagcttccgggcgctcgtcctcgggtgctgccgggaggggcggttcgaggaggccgacgccctgctggcggcgatgtgggcgcaggggttctgcctggacagcgccacgtgcacggtggtcgtgcgcgcgttctgccggcagggacggttcaggaacgtgactgacctgttcaggaggatgtcggagatgggcacgccgccgaacatggtgaattacagtgcgtggatcgatggtctgtgcgaaagaggctatgtcaagcaggcgttccatgtgctggaggagatggtggggaaggggttgaagccgaatgtgtacacacatacgtcgctgattgatgggctatgcaagattgggtggatggagcgggcgttccgtctgttcttgaagcttgttaagagtagctcctacaagccgaacgtgcacacctacactgtgatgattggagggtactgcaaagagggcaagcttgctcgagccgagatgctgttggggcggatggttgagcagggacttgccccgaatacaaacacatacactacgctgatccatgggcactgcaaaggaggcagcttcgatcgagcctttgagctgatgaataagatgaagctggaaggtttcctgcccaatatttacacatataatgccattattgggggcttttgcaagaagggaaagattcaagaggcttacaaggtgctccgaatggccactagtcaggggctgcatcttgataaggtgacatacactatactgataactgaacactgcaaacagggccacataacttgtgctcttgatttgttcaagcagatggcagaaaaaagttgccatcctgatatacacacatacaccaccatcattgctatgtattgtcagcagaggcaaatggaacaaagtcagcagctctttgacaaatgtctttccataggattagtgccaaccaagcaaacttatacctcgatgattgcaggatactgtagacttggcaaattgacctcggctctcaaggtctttgagaggatggttcaacatggatgcctacctgactctataacttatggggcactaataagtagcttatgcaaggaatcaagactagaggaagcaagggcattatttgagaccatgcttgataaacatttggtgccatgtgatgtaactcgtgtcactttagcttacgaatattgcaggagggacaagataaccattgctgtatcattcttggatagactggacaaacggcaacaggctcatacagcagatgcactagttagaaagctcagtactgttggcaatttggatgctgctagtcttttccttaaaaatgttctggacaagcattatgctgttgaccatgcaacttatacaagctttatcaattcatgctatgaaagcaatagatatgctctagcttctgaaatatctgaaaagatctcaaagcggatttctggctttaagaaaaaggatactgcagttattgcttgatttgcaagagcaatcaaaatttctcccattcttgcagcttaggaacctgacagttgtgttcgatgttcctttttagcacaacgtctatgcctatcaattggctgtaaatggtatgcctatcaatttctctctctctgaatccgcattcaggacatacaactgcagtcagatttagatgaccaaatgtccaaatcacatggaaatggaccagtgatgggtaatacaccactaaatcagcctaccttactggaggttcaaaaccgacatcatttggtgagcacacgcggtgaacaagtgtaaactctttgcctggatccccagtcaaaataaaatactaacaacatacaattacaacctcaccatcagagggtggcttcaccaggacgattgtatcttatgcaatggcctgcttgaaaatgggcacttgtcttcgctgcccctttgcacaggaggtttggagcaaggtggcgccctgggaaaactttggaagtctgcagactgcccttcagactagcatgagtccttagtcgactggtgggaattgatctcgcccatgatcctgaaagggaaaagatgggcattcaatggaatagccatttatatcatgttgaacttgtggaaggaacatgatcttagattttttgacaacaaatactccatagctattcaggtgtccgggcgagctaaggaggacctagagcagtatagaagggcctttgccaatgcacacacttagctctctattgggtttgggcaacttatgttttgtggcttttgtgctgctgctctgaccttgcgacagtttctggccttactgccaccttgtatatataacctttttccactt

SEQ ID NO: 121696 - DNA, 693 bp, Zea Mays
atgcttcaccgccattacccgaggaggccccgcaggcgcagcagatcggaggatgagcgttgttgctggtgcttctcctgtgactgcgattatatcgagaaacccgagcagaagtgcgggttctgggcagtctgcgtcttcgtctactccctcgtcgactacttcatcccaatcagcctggtctcggtcctcctctggctcgtcctccgccccagcaaccttcggccgcgggtggacgccgccgtcgccgtcagcttcagcctcgacaacgcgacctcgtcgctcgactacgacttcgccgtggacctgcgcttccgcaacctgcaccggcacctcgacgtccggtacctggacctggtagcgctggcgtcgtacggcggggaacggctcggccccagcgccgacgtgctgcccgtcttcgtccagcgccccatggcgtccaacgctgttcgcgccagcttccagggcagcgccgctccgctgtccccggcagcagccgagctgttcgccatggaggccgccaacggctccttcggcgtcctcgtgaaggtcgcctcgacgttcatgtacaagttcccgttccagaagacggtctactacctcgaccatgagtgctacatccgtttcccggcgcccaacggcggggtggtgacgccggggacgctttgcagcgccacagcgcggtcatcatga

SEQ ID NO: 121697 - DNA, 648 bp, Zea Mays
atgcgacaaggaacgaacttcggtcctgtctacgtcttcattgctgttctgggatccataacggtgctcattttcgcgtacctggtcctcgtaggggcgcccgagccgagcatcttcgacgtttgggtggagaatggaaccctccacgccatggaaatggactcctccagcaactccaccctgacatacagcctctccgctgtatacggccttcgcaacaaaaactacgagcgtgacaccgtcagcgtcgccaagcttgccgtggcgcccatgtacggcgggcagcagctggggccgggatccagcctgccggcgttccagctgcggtatttggagacggcgacggttcccctcgacgcgcgcggccagctgcccgccgctgcaggcgcggtggtcaccaggacgtacgcggacgacgccgcgcggggctactacgccatacaggtgaagctaagcctggctttgggaggaggactccattggtgccactcctcctgcaccctctatttcttcgcgccgctgccgtcgtcgtccccaagaagaggcgcccccaacatcttcgatggcgacgactgttggactacatgtaagaaaagtgtgttgcatgacgagaaaccggacaaagctatgcagattaaggaacaataa

SEQ ID NO: 121698 - DNA, 663 bp, Zea Mays
atgccagaagaagcagggaacgactgtactggctgcctttatttcgctggtatggtatcctttttggtgctggttttcgggtatctgatcctcgtagtaggggcgcccgagccgggcatcttcgacgtttgggtggagaatggaaccctccacgccatggacatggtggactcctcctccagcaactccaccctgacatacagcctctccgctgtatacggcttccgcaacaaaaactaccaccgtgacgccgagagggtcgccaagcttgccgtggcgcccatgtatggcggccagcagctggggccgggatccagcctgccggcggccttccgggtggggtattgggagacggccacggttccctgggacgtgcgcggggagcagcccgctggcgcgttggtcgccaggacgtacgcggacgacgccgcgcggggctactacgccatacaggtgaagctaagcctgggtttgggaggactccggtggtgcgactgctcctgcaccctctatttcttcgcgccgctgccgccgccacagccgtcatcgtcttcgtccccaagaggcgttcccaacatcttcgatggcgacgactgttggactacatgtaaaaccagtgtgttgcatgacgccgaacatgctaagcaaattaaggaacaataa

SEQ ID NO: 121699 - DNA, 94 bp, Zea Mays
tgctgaggtcatttattattattctgcattatttctccaagcactaaggctaatcccagttcagatgacttttaccgatcgcacgtcagctatc

SEQ ID NO: 121700 - DNA, 993 bp, Zea Mays
atggcggccgagggcatcgtcgtcgtcgccccagagacggcagacatgcagagggacgaccaagtgcagacaggcacgcatccgctggctcgcggacccgacgaggtggggcgcggcgggccctgcgatgacatagcagtctctctggacggccacctgaacgacctccgtgaccaccttctggacgacctccgtgacgatctcggcaagagagcaacgtacaccaggtgcctcggctcctgcgccttcttcttcctgtgccatgccctgggggagctgttcctcgagctctgctgctgctcccgctgcctgccctgtctggaggtcagcacgccacggcacctggcgccggagaaccgcacgcagaagttcttcgccttcttcgccaagaacctctccaagctctgggtgaccacgctgctcgtcttgttcatacggtgggtgctcttccggccgatcgacgtgaagccccacctcggcacctccgccgtccacgagttcgctcttcttcagccgtcgtcgtccgacgacgccgccgacgccgacgccttcgcgggcttatcagctgctggtgttcctcgtctccgcttcaacctcaccgcctacctcctcttcaagaacgggcacgactactacgatatcaattacgacaatttagccgtgagcgtactgtacgcgggtgagaagataggcccagtcgatgacgagctcccgtctttcaagcagcatccccacggcagcaccgtgatgcggctggcgttcgtggggcagctgcgcaacgccagcagcacggtggccgagatgttctccggtgacagggacaaggggctgttcgagatggtggtgaggatccgcgtcacactaggatacaagtcttggccgttgaaggaggagtacttcaccatctacgactgcccggtttcctcgccgtttccgcaggtcggcgagcccgcgctgtcgtcgccagcgtggtgcacggccaacgacatctag

SEQ ID NO: 121701 - DNA, 2344 bp, Zea Mays
ggaggtagctggctcgcaaatgtctcgccttctcccacgccgccgtcacctctcctgcacctctactgcctcccttagtgaactcgcctccctcctcgacgccggccgcttccaccgcgcggtcgaccttgccaaatccctcctctcctcccatccccccgctgccaacgtccccgacctctaccaagctcttgccgccacagccgacaccaaggacgacccacgggcgcgcccccattccttcctctgcgacgcggcctccgccctcgttgtcgcctccgcgcgtctctgccaacctgacggcgcgctccgcctgctctccctcctcgccagcgcgggcgacggcgcctgcgccggcgaggtgtgctcgccgctgccgtccctatcgtcctgcaatctccttctcgagtctctcctattcgtaggtcgccacgctgatgtgcgcgccgcgttcggcctcctcgtggcggccggggcgcgcccggacaccttcgcgtggaacaaggtcgtccaggcttgcgttgcggcgggcgacctcgatgtggcactcgccatggtgcggcggatgggccgtagcgaaggcgccccacctcccgacgcgttctcgtacaacgtggtcatcgcagggctgtggaggtccgggaagggcagcgacgccctcaaggtgttcgatgaaatggtggacatgggagtcgtgcctaactggatcacctacaacacgatgattgatgggcatgtcaagggtggggacctggaggctggtttcagactgcgggatcaaatgctacatgatggccctaagccaaatattgtcacttacaatgtgctgctatcagggctgtgccgcgctggcaggatggatgagacaagagtcttgatggatgagatggcatcacatagcatgtttccagatggtttcacatatagcatattgtttgatggtctcacaagaacgggagagtcacggaccatgctttctttgtttgcggagtctttgaagaagggtgtcatgcttggagcatacacttgcagtatcttgctgaatggtctatgcaaggatgggaaggtcgcaaaggcagaacaggtgttggagatgttggtacacacaggactggtcccaacaacagtgatctacaacactctaataaatggctattgtcaggttcgtgaccttcgaggagccttctgcatctttgagcaaatgaaatcacgccatattaggccagatcacatcacctacaatgcactcataaatggtttgtgcaagttggaaatggtcaccaaagcagaggatttggtgatggagatggagaagagcggagtggatccgagtgtggaaactttcaatacactgattgatgcttatgggacagcagggcaactcgaaaagtgtttcactgttctgtctgatatgcaacagaaggggataaagtcagatgttatctcttttggttcggttgtcaaggctttttgcaagaacggaaaaatcccagaagctgtagctatcttggatgatatgatatacaaagatgttgcaccaaatgcacaggtgtacaactcaatcattgatgcttatatagagtcaggtgacactgagcaggctttccttctggtggagaagatgaaaaatagtggagtatccgcaagtatagttacctataatttgctgctaaaaggtctttgcagaagttcacaaatagatgaagctgaagagttgatttacaccttaagaaatcaagggctgagacctgacgttgtcagctacaatactataatatcagcatgctgcaacaagggcgatactgataaagcattggagcttctccaagaaatgaacaagtatggcatcagacctacactgagaacgtaccatacacttgttagtgcattggctagtgcagggagagttcatgatatggaatgcctatatcagcaaatgttgcacaagaatgttgaaccgagcagtagcatatatggcatcatggttgatgcctatgtgagatgtgaaaatgattcaaaggtagcatctctgaaaaaagaaatgtcagagaaaggaatagcctttgatgacacgaagagaagtaaccatgagctagataggataatagcaagtccaatttgattggattgccttgaaatgaaaaggctggaaggttgccggttatgttaatatcaaaaacaaaatttcagatttagagttcaattgtgttagactacccgtctagggtttggggttttccccttgtaattaccatctcaccttcactgtaatgggcctggcccatgtattgactctattaatactactcacaaccctgtttagggtcatgagttcacattctaa

SEQ ID NO: 121702 - DNA, 119 bp, Zea Mays
atgaacctatcatgtttggcttggatctgaacctatcacgagtaaatggtcaaaacttttccgtatattccgatttccgacaaagaatacgctatacaaataaaatatttgttaaaaca

SEQ ID NO: 121703 - DNA, 1586 bp, Zea Mays
gcgcgggcatcccgcggcgccactcctattcctacgccgacgccaggcccagccctccaccgacgcctccgacctcggtgtgtggcgcgtggtagcacgacgacgatcgccattgccgccgcctgtgccatcgggcgcgcgcgcggcgagacaatgacctcctccgtatccccagccgcggccgcctcccagtcccaactgcatattaccaccaccggtacgggcaccgggtccactgcaatcatatcgccctcctcaaaccaaagcaccagcaacgccaacgcgcgctcctcctcctcctcctcctcctccccgcattccgcgagcagcccccctcgagctcgcggccccagcaccactggaggcactggcagcagcggcggaagcggaagtggaagcgggtgcacgaaccaggcgtgcgcggcgtgcaagtaccaacggcgcaagtgcaacacggactgcccactcgcgccctacttccctgcggaccagcaggagcgcttcctcaacgcgcaccgtctcttcggcgtcagaaagatcctcaagacgctggagaacatcagtccggagctctccgccgatgccatggcgaccctcattttccagtcggacatgcgcgcacaggaccccgtcggcggctgctaccacctcatcctcagcctggagcgccagctccagatcgagacggccgagctctccgccatgctccaaacactggcgctcttcggccaggctactactactaccacgatgccaccggatcaaggcggcggcggcacggctggcctcgactacaccgcgtcatccaacctcctccacaacgctcagcaagaggtgctttacgcactctacaagaacaaacacgaagaagctgacatcgtacattccgacaacgaggtcgtccgccaccacggtggtggaggccacggccccaacaaggatgatcacggccggcaacagcatcaggtccttaactatttttattgcaacaacgcaaccgcaagcgacgatgtcgacaacatgcaacagttccattttaacgatagctgtgccgccgccgacaaagtggatctgactcctccggcgggggctgacgaaatgagacatcatcatcagcacctcgacgagaactgccagattgaccacaaggattatttcgagattaaagcagcggccgcactcgtcgacgacgcgtttcacatgcgacaggaggtggtggacgtgagcgccgaggttgacatggaggacatcaagacggtggatgtgaataatgccggcattggcggcgtcgatatcaaggcgatggccatgaacgccaacgtcgtcgatgtcacaccacaaatggcagctgagtcatcgcactgcagactagggctaggcttttcatcgttctgaatctgatcaaaccttccattattattcgcatgcatgtactaataattttttttccggatataatagggagattagagggtttttttggtccaccgaaagatccaccagactcgtttttaagaattataaccacaaaaaggctatatataaatcaggctagaatttcaacgacagtttgtactaataatata

SEQ ID NO: 121704 - DNA, 2964 bp, Zea Mays
cacggtcacaccaccagacccagacgcgcggtcacctctccggctctcccctcgttaagaaccaacaaaaacctgtgcctgcctgcctgccactctgcgcatgtgaccgagcaacccactgccgcccgggatcgagccgccgcattgccgcgtcccttctggagccgccgccgcccacgggggtaccggatctgaggagcaaaggccattacttatcgtaagcaagatttctaattggcggaagcttttatgtgtagctgactgttgaatttactggtctcaagtatagagtaggcaggcaatctgcagtttagtggaacccaatgggttcttctccttccaaagccactggagaggatgccctggttctgtgcaaggatcggatgcgccacatcagacaagctattgactcgagagatgcactgtcagcagcgcacttatcttacacacaatctctccgtagtgtgggtactgcactgcggcagtatgctgagtctgagatctcaccggaatcatcgctctccatttcagaagtggataagtcaccatcacattcctctatggcatctccttcgccttcgcgtgcagtagagagtgttgcctctctggggcatcgagcaagtccatctattactccaccctcaacacgaatccattgcatgaaagcagcagcaaccactcctttgacctttgtgatagatcaatctactgctgaatttgtggggcgcgaatccccagtatcagcttttgtcccacccccaccaccattgcctccagaattatgtaccacgtgggacttctttgatcccattgatgctgctggtacctcttcctccaacaatgagaatgaggtaaccctgaacttcagtagattgagggatctaagagagtcaagggtagctgaagtagttccattgaaagaagttgaagaggaaatcatgtccagaaggcatacagaaatttctgatgataatacaccacctgagcaggaaagagagccaaagcaaggtgggaccggaaaaccaagtcagttggtggatacttcaaccaaagctacatctgagcaggttgctgcaaagttggaggaaagtgaaatggaaaaagaattatgtgcagaggcagaggacccttcagagttcatcactcatcgagccaaagattttgtgtcgagcatgaaggacattgaaacccggtttatgcgtgcagctgaagcaggaaatgaggtttccagaatgcttgaaaccaagaagatccgacttgacatatgtgctaaaataccaggttctccagtcaagctaccttctgcccgatttgtgtcagcacttcgagtgtgctgcaatcgtgatgttattctcaaccaggaaactgcgcagcatgtttcaaaggttgtcacatggaagcgttctgtctcatctctttcatcatcatctaagagtgcacttatgacatcgataatgaaagatgatgtggatgacagtaatagtgattttgttgaggaattcgccatggtatccggaagccattcttctacgttggacaggctacacgcatgggagagaaaactatatgatgaaatcaaggcaagtgaaaatgttaggaaggcctatgatgagaaatgtaacctactccgacgccaatttgcacgaggcctaaatgcgcaggtgattgataagactagagctgttgtgaaggatctccattccagggtatctgttgtgattcaagctgttgatgcaatctccaaaagaattgagaagataagggatgaagaactgcagccacagcttgtcgagctaattcaagggctaatcagaatgtggaaactgatgctggaatgtcaccacaaacagttcatcacgatcacattagcataccacgtgaaagactcgacctcggcgcgtcaaggtgagcaccaccatcaccgccaggcggcgatgcatctgtggaatgagatggacagcttctcctccagcttcagaaactgggtcaccgctcacaaatcgtacgtcgaggccctcaacgcgtggctccagaagtgcgtcctgcagccgccccaggaccggcgcaggcgcaaacgcaaggtctccttccctcctcggcaggctgtctcccctcccatattcatcctctgcggggactggctcgccaggacagaacctctccctgctgacgagctatgcagatccctcaaagacgtgatgcagctcctccgcggctcgttcgagcaccgcgacgagcagaacaggcccagaagcggcgagtcgcaggagtgcgggatgctggagaacagtagcgagcaggaggcggcggctaagagtgggagttgtgcagcatcagctgaagggctgcagtcgagactgacggcggttcttgaccgcctgacaaagttctcggaggcatcactgaagtgctacgaggagctcaagcagaactacgagatggcctgtgctgattataggagagttggaccaaatgctcagcttgcttaggattgatgttggctgtggtgtgtgactttttgctatctctgttctggatgacaaattctctagtgttttggtatatattttgtgaacaatcaggtgatagcacaatctttggccgaatattactgatgatttagtgctatcagttatgtaagcttcatcacttgccctgccctgatgcttcgaaaggcctatgagaaccgttttcacaacgatataacaggcaaaatataccatgattcctgtgcgctagtaatctgctactcattttgcagctacgggaattcggcgaccattaatctcctactcacctttcagcaatggggtatgtactggcactattttttacaatggagaataagcagcttcatacgaaatttgtcgaaccaagtgaaaagaaagtctgtatagccatttttagcttactgataaaaatcttaattgaaaacaattcagacaaaaaaataatctgacaatt

SEQ ID NO: 121705 - DNA, 2953 bp, Zea Mays
cacggtcacaccaccagacccagacgcgcggtcacctctccggctctcccctcgttaagaaccaacaaaaacctgtgcctgcctgcctgccactctgcgcatgtgaccgagcaacccactgccgcccgggatcgagccgccgcattgccgcgtcccttctggagccgccgccgcccacgggggtaccggatctgaggagcaaaggccattacttatcgtaagcaagatttctaattggcggaagcttttatgtgtagctgactgttgaatttactggtctcaagtatagagtaggcaggcaatctgcagtttagtggaacccaatgggttcttctccttccaaagccactggagaggatgccctggttctgtgcaaggatcggatgcgccacatcagacaagctattgactcgagagatgcactgtcagcagcgcacttatcttacacacaatctctccgtagtgtgggtactgcactgcggcagtatgctgagtctgagatctcaccggaatcatcgctctccatttcagaagtggataagtcaccatcacattcctctatggcatctccttcgccttcgcgtgcagtagagagtgttgcctctctggggcatcgagcaagtccatctattactccaccctcaacacgaatccattgcatgaaagcagcagcaaccactcctttgacctttgtgatagatcaatctactgctgaatttgtggggcgcgaatccccagtatcagcttttgtcccacccccaccaccattgcctccagaattatgtaccacgtgggacttctttgatcccattgatgctgctggtacctcttcctccaacaatgagaatgaggtaaccctgaacttcagtagattgagggatctaagagagtcaagggtagctgaagtagttccattgaaagaagttgaagaggaaatcatgtccagaaggcatacagaaatttctgatgataatacaccacctgagcaggaaagagagccaaagcaaggtgggaccggaaaaccaagtcagttggtggatacttcaaccaaagctacatctgagcaggttgctgcaaagttggaggaaagtgaaatggaaaaagaattatgtgcagaggcagaggacccttcagagttcatcactcatcgagccaaagattttgtgtcgagcatgaaggacattgaaacccggtttatgcgtgcagctgaagcaggaaatgaggtttccagaatgcttgaaaccaagaagatccgacttgacatatgtgctaaaataccaggttctccagtcaagctaccttctgcccgatttgtgtcagcacttcgagtgtgctgcaatcgtgatgttattctcaaccaggcatgtttcaaaggttgtcacatggaagcgttctgtctcatctctttcatcatcatctaagagtgcacttatgacatcgataatgaaagatgatgtggatgacagtaatagtgattttgttgaggaattcgccatggtatccggaagccattcttctacgttggacaggctacacgcatgggagagaaaactatatgatgaaatcaaggcaagtgaaaatgttaggaaggcctatgatgagaaatgtaacctactccgacgccaatttgcacgaggcctaaatgcgcaggtgattgataagactagagctgttgtgaaggatctccattccagggtatctgttgtgattcaagctgttgatgcaatctccaaaagaattgagaagataagggatgaagaactgcagccacagcttgtcgagctaattcaagggctaatcagaatgtggaaactgatgctggaatgtcaccacaaacagttcatcacgatcacattagcataccacgtgaaagactcgacctcggcgcgtcaaggtgagcaccaccatcaccgccaggcggcgatgcatctgtggaatgagatggacagcttctcctccagcttcagaaactgggtcaccgctcacaaatcgtacgtcgaggccctcaacgcgtggctccagaagtgcgtcctgcagccgccccaggaccggcgcaggcgcaaacgcaaggtctccttccctcctcggcaggctgtctcccctcccatattcatcctctgcggggactggctcgccaggacagaacctctccctgctgacgagctatgcagatccctcaaagacgtgatgcagctcctccgcggctcgttcgagcaccgcgacgagcagaacaggcccagaagcggcgagtcgcaggagtgcgggatgctggagaacagtagcgagcaggaggcggcggctaagagtgggagttgtgcagcatcagctgaagggctgcagtcgagactgacggcggttcttgaccgcctgacaaagttctcggaggcatcactgaagtgctacgaggagctcaagcagaactacgagatggcctgtgctgattataggagagttggaccaaatgctcagcttgcttaggattgatgttggctgtggtgtgtgactttttgctatctctgttctggatgacaaattctctagtgttttggtatatattttgtgaacaatcaggtgatagcacaatctttggccgaatattactgatgatttagtgctatcagttatgtaagcttcatcacttgccctgccctgatgcttcgaaaggcctatgagaaccgttttcacaacgatataacaggcaaaatataccatgattcctgtgcgctagtaatctgctactcattttgcagctacgggaattcggcgaccattaatctcctactcacctttcagcaatggggtatgtactggcactattttttacaatggagaataagcagcttcatacgaaatttgtcgaaccaagtgaaaagaaagtctgtatagccatttttagcttactgataaaaatcttaattgaaaacaattcagacaaaaaaataatctgacaatt

SEQ ID NO: 121706 - DNA, 2867 bp, Zea Mays
atgctaacaaactgagaactgtagtttactgtttgggttagaaaggctacacctttttttccttctaagtcaacgcttgaaatgtgaaaccttttgtgcaatacaaattaaatagtgtgcttttccaggtgtatgcaagtataattctgaaagaattcagtagtttgtgttcattttggtgctttcttatctggagcttgtttttaaaaattggattgttgatttctttccaagactagtaaactaaccgtgttagatgcttcataaacaggagggatttgcattttctcattgtactacctgcaaggctccatattacttgagggttcattcgcacactgacaggaaatggcgaacactgaagtttcgtttctttgttactagagatatattattcatctttgctctagtccagattatcatctctgcattggcatatttggtacattttattgatgggtgccaacaatattggttgaggacagcctgggcttttgataatgaagttagtttttattatatctgtggtgcattaatgttttttgctttgttgggactatcgggatgcttcataacctgttatgaccgaagagtacggaacgacctggctcagccttgtcgagaattatgtctttgttgctgtcagccagggatgtgtgcggattgccacctacctggcacgctgtgcatgtggactgactgcactacctgcttcgaaggctgtgctaccacagccggcgagtgcggtggttgcttgggaggggctggggaagccgggctaccgcttctcctcatcatgggggtcattgtgctggggcttttcacggtcatcggcatattctacagtgtcctggtcgcgaccatggttggccagcggatctggcagcgccactaccacattcttgccaaacggttgctaaccaaggagtatgttgtagaggacgtcgatggcgagcgcacagactggtgtccgccgccactgcccgcggagcacatcagccagctgaagtctctggggcttctgtaatatggaggctggtgaccctaagctaagaccggcgtggcgttacccagctccagctgtacaggagggaggctatactgtcaggcattctgcgttgaaatgtgtcaatattgatactttttctctttttttttcccttcttttttgtacattgtaatggcaaagctttctccctgacaaaacccaaaacttatatcaagtgaaaccgcctacatttttactggacaattcctttttaggccttgttcggctattcccattatacatgaattgtatgatattggaaacaatttagaagaattttgacttgcttgagatttaaacccacccaatctcactcaatctacatgaattgagagctaaccgaacgtgatcaacggcaactgggattcacagtacgaacctcgacctcgggttctgtaactgggacctttgtaagccagtgttctacatttttacttgattctacatgcagaattgtatcaaattgtttcgctgtttgattactgaacggattcttccccaaaaaagtttataaaaataaaaaggcgttttaaaacttacaagcccaactgcccaagttctttcaagtttcagctcaacttcgggtgcgggcctgttgggctcaatactttgggaacatcggtctggtggcccatgttctactatgaagagcttcccagccaccgaggcctagctagctcacttcgctcccctctttcttccccacgaaaccagagcaaattccggcgagccggtgcggtgcggcggaggaggccgagggagacgccggcgcgagaaggagcatcaggaggaggcagcggagatggatccggactcggtgaagtcgacgctctctaacctggccttcggcaacgtcatcgccgccgccgcccgcgacctccaaaaggaaatggtggctaaagacaaggctcaatcagcacctgcaagccatgatgaagttgatcttgatgagctgttggatgacccagaacttgagaagttgcacgcggagagaattgctgcccttaagaaagaagttgagaagcgtgaagtgctaaaaaggcaaggtcatggtgaatacagggagataactgaaggggacttcctcggggaggttactggcagtgaaaaagtcatatgccatttttaccaccgtgaattttaccgttgcaagatcatggataagcatttgaaggcccttgccccagtctatgtgggaacaaaattcgtcaagcttgatgctgaaaatgctccattctttgtggccaaactggcaatcaagacactgccatgtgtaatattgttcaagaagggtattgctgttgaccgattagttgggtttcaagatctcagaagtaaagacgattttccgacaagagcgttggaaaatattctcaagacgaaagggataattgatgagaagaagaaagatgacgacgatgacgatgaagaaagcgaggctaagaataggagggttaggtcttcaactgctcaagactctgactcagactgaacctgagatgaggatcgaggactcaccgtttttgcactttggattttgtttgtttgtttgttctgtgttgtgctgtactgtactgtaattgatttgtgtaaccatgtatcggtaccagacaccacaacaagaacatgtacaagagattctttagcatccattgtgtgtaaaagctagggtttgtggctgccttttatttcgtttttcctcagccatcataggatggtacggctgatgtataatagattactatttgctatgtgggcgtcagatttgttttggcgtgcgctagagtgaaaaaggtcgcatgaaagcgaatctaaaccc

SEQ ID NO: 121707 - DNA, 3217 bp, Zea Mays
ccagcccagcccagccgcgccgacgggccccgcgcgtcattctctcacagctagctcgtcccagcgtcggcgtcgcggaagaacgctatacctcgcttcgccgctagtccaccaccacctaacaccaactcctctccaacctcctcgtcccgtccccgtcgattcgattcggtcgaagcgggcgggcggaggaggaggaggaggctagggattccggatgggcgcggcgccgaggaggctctagaggcgccagccgagttggtggtccggggggagagggagcggcgggagggcgggcggcgatggaggagaaggcgtcgtcgccgctgatcccgccgccgtcggagatcgacctggaggcgggcggcggcggagagcagctccagtgccggatctgcctcgagaccgacgggagggacttcatcgctccctgcaagtgcaaggggacgtccaagtacgtgcaccgcgactgcctcgaccactggagggcggtaaaggagggatttgcattttctcattgtactacctgcaaggctccatattacttgagggttcattcgcacactgacaggaaatggcgaacactgaagtttcgtttctttgttactagagatatattattcatctttgctctagtccagattatcatctctgcattggcatatttggtacattttattgatgggtgccaacaatattggttgaggacagcctgggcttttgataatgaagttagtttttattatatctgtggtgcattaatgttttttgctttgttgggactatcgggatgcttcataacctgttatgaccgaagagtacggaacgacctggctcagccttgtcgagaattatgtctttgttgctgtcagccagggatgtgtgcggattgccacctacctggcacgctgtgcatgtggactgactgcactacctgcttcgaaggctgtgctaccacagccggcgagtgcggtggttgcttgggaggggctggggaagccgggctaccgcttctcctcatcatgggggtcattgtgctggggcttttcacggtcatcggcatattctacagtgtcctggtcgcgaccatggttggccagcggatctggcagcgccactaccacattcttgccaaacggttgctaaccaaggagtatgttgtagaggacgtcgatggcgagcgcacagactggtgtccgccgccactgcccgcggagcacatcagccagctgaagtctctggggcttctgtaatatggaggctggtgaccctaagctaagaccggcgtggcgttacccagctccagctgtacaggagggaggctatactgtcaggcattctgcgttgaaatgtgtcaatattgatactttttctctttttttttcccttcttttttgtacattgtaatggcaaagctttctccctgacaaaacccaaaacttatatcaagtgaaaccgcctacatttttactggacaattcctttttaggccttgttcggctattcccattatacatgaattgtatgatattggaaacaatttagaagaattttgacttgcttgagatttaaacccacccaatctcactcaatctacatgaattgagagctaaccgaacgtgatcaacggcaactgggattcacagtacgaacctcgacctcgggttctgtaactgggacctttgtaagccagtgttctacatttttacttgattctacatgcagaattgtatcaaattgtttcgctgtttgattactgaacggattcttccccaaaaaagtttataaaaataaaaaggcgttttaaaacttacaagcccaactgcccaagttctttcaagtttcagctcaacttcgggtgcgggcctgttgggctcaatactttgggaacatcggtctggtggcccatgttctactatgaagagcttcccagccaccgaggcctagctagctcacttcgctcccctctttcttccccacgaaaccagagcaaattccggcgagccggtgcggtgcggcggaggaggccgagggagacgccggcgcgagaaggagcatcaggaggaggcagcggagatggatccggactcggtgaagtcgacgctctctaacctggccttcggcaacgtcatcgccgccgccgcccgcgacctccaaaaggaaatggtggctaaagacaaggctcaatcagcacctgcaagccatgatgaagttgatcttgatgagctgttggatgacccagaacttgagaagttgcacgcggagagaattgctgcccttaagaaagaagttgagaagcgtgaagtgctaaaaaggcaaggtcatggtgaatacagggagataactgaaggggacttcctcggggaggttactggcagtgaaaaagtcatatgccatttttaccaccgtgaattttaccgttgcaagatcatggataagcatttgaaggcccttgccccagtctatgtgggaacaaaattcgtcaagcttgatgctgaaaatgctccattctttgtggccaaactggcaatcaagacactgccatgtgtaatattgttcaagtaagcgcacaagtttttttgttgctcctgcccatttgataatgtttattgctgtttggcaccctgcaatcttcctgcctcacattactacctgcttcaccatactactatgacccctgtcatttttcaggaagggtattgctgttgaccgattagttgggtttcaagatctcagaagtaaagacgattttccgacaagagcgttggaaaatattctcaagacgaaagggataattgatgagaagaagaaagatgacgacgatgacgatgaagaaagcgaggctaagaataggagggttaggtcttcaactgctcaagactctgactcagactgaacctgagatgaggatcgaggactcaccgtttttgcactttggattttgtttgtttgtttgttctgtgttgtgctgtactgtactgtaattgatttgtgtaaccatgtatcggtaccagacaccacaacaagaacatgtacaagagattctttagcatccattgtgtgtaaaagctagggtttgtggctgccttttatttcgtttttcctcagccatcataggatggtacggctgatgtataatagattactatttgctatgtgggcgtcagatttgttttggcgtgcgctagagtgaaaaaggtcgcatgaaagcgaatct

SEQ ID NO: 121708 - DNA, 1817 bp, Zea Mays
ccagcccagcccagccgcgccgacgggccccgcgcgtcattctctcacagctagctcgtcccagcgtcggcgtcgcggaagaacgctatacctcgcttcgccgctagtccaccaccacctaacaccaactcctctccaacctcctcgtcccgtccccgtcgattcgattcggtcgaagcgggcgggcggaggaggaggaggaggctagggattccggatgggcgcggcgccgaggaggctctagaggcgccagccgagttggtggtccggggggagagggagcggcgggagggcgggcggcgatggaggagaaggcgtcgtcgccgctgatcccgccgccgtcggagatcgacctggaggcgggcggcggcggagagcagctccagtgccggatctgcctcgagaccgacgggagggacttcatcgctccctgcaagtgcaaggggacgtccaagtacgtgcaccgcgactgcctcgaccactggagggcggtaaaggagggatttgcattttctcattgtactacctgcaaggctccatattacttgagggttcattcgcacactgacaggaaatggcgaacactgaagtttcgtttctttgttactagagatatattattcatctttgctctagtccagattatcatctctgcattggcatatttggtacattttattgatgggtgccaacaatattggttgaggacagcctgggcttttgataatgaagttagtttttattatatctgtggtgcattaatgttttttgctttgttgggactatcgggatgcttcataacctgttatgaccgaagagtacggaacgacctggctcagccttgtcgagaattatgtctttgttgctgtcagccagggtcatggttttcatgcctgcaccgtttgatcgcaccgacatgtgctgtattccaggatgtgtgcggattgccacctacctggcacgctgtgcatgtggactgactgcactacctgcttcgaaggctgtgctaccacagccggcgagtgcggtggttgcttgggaggggctggggaagccgggctaccgcttctcctcatcatgggggtcattgtgctggggcttttcacggtcatcggcatattctacagtgtcctggtcgcgaccatggttggccagcggatctggcagcgccactaccacattcttgccaaacggttgctaaccaaggagtatgttgtagaggacgtcgatggcgagcgcacagactggtgtccgccgccactgcccgcggagcacatcagccagctgaagtctctggggcttctgtaatatggaggctggtgaccctaagctaagaccggcgtggcgttacccagctccagctgtacaggagggaggctatactgtcaggcattctgcgttgaaatgtgtcaatattgatactttttctctttttttttcccttcttttttgtacattgtaatggcaaagctttctccctgacaaaacccaaaacttatatcaagtgaaaccgcctacatttttactggacaattcctttttaggccttgttcggctattcccattatacatgaattgtatgatattggaaacaatttagaagaattttgacttgcttgagatttaaacccacccaatctcactcaatctacatgaattgagagctaaccgaacgtgatcaacggcaactgggattcacagtacgaacctcgacctcgggttctgtaactgggacctttgtaagccagtgttctacatttttacttgattctacatgcagaattgtatcaaattgtttcgctgtttgattactgaac

SEQ ID NO: 121709 - DNA, 341 bp, Zea Mays
gttggttatcacgttagtctcacacactaaaggtccccagttcgaacctgggctcagacatattttttttctttttctttttgcttttcataatatacgtccatggacgccaagcgcatgtagcttaagggtgaaaacggtcggaaaaaacctctcaccattttcacccgcataattttttgttcggtcgaaatcggtaaacggataacgaccgataaattcaggtatatcgaaaacggttaaatccgagcaaaatagctcgaaattgatcgggaaatggtaactgtaatcgaaaaagctcacaataaacaaatcctaatcacacaaatgttcattcacat

SEQ ID NO: 121710 - DNA, 479 bp, Zea Mays
acacacaactaaaacataataccgataaacacaaggaaattaagctagagtcagctctctcaactctgatggcacttctcaacaaggatgccaaagctctgtgctttgcagtccttatcgtgatggctgtgatattctcgtcttgtgaagcaggaggcaataggtgccatgctttcccaggatgtgactcgatactgtgctgggcggaatgtgacaggctagggtacagcaaccctaagccacgctgcctttatcccaagcctaaccatgatggcgatgaatgttgttgttaggctaaaaaaaacctgggtgtgtgtgtgtgtgtgcccctttgttgaaacggtgtatcagtttcatgcaaggtggtgtgtgtgtgtctcaccgccaactatggatgttggtcaactatgaataagaacaataatttgtgatgcttatatatgtttactaaattatttattacgggtgcaaaaccccca

SEQ ID NO: 121711 - DNA, 479 bp, Zea Mays
acacacaactaaaacataataccgataaacacaaggaaattaagctagagtcagctctcttagctctgatggcacttctcaataaggatgccaaagctctgtgctttgcagcccttatcgtgatggctgcgatattctcgtcttgtgaagcaggaggcaataggtgccatgctttcccaggatgtgactcgatactgtgctgggcggaatgtgacaggctagggtacagcaaccctaagccacgctgcctttatcccaagcctaaccatgatggcgatgaatgttgttgttaggctaaaaaaaacctgggtgtgtgtgtgtgtgtgcccctttgttgaaacggtgtatcagtttcatgcaaggtggtgtgtgtgtgtctcaccgccaactatggatgttggtcaactatgaataagaacaataatttgtgatgcttatatatgtttactaaattatttattacgggtgcaaaaccccca

SEQ ID NO: 121712 - DNA, 1659 bp, Zea Mays
taaccttgtcctctgtatccgtgctggtgctctgcttggtctcggtctcgtcaccgccacgccggtctgccgtcgtctcgtctgctgcactccactgtccactccactctcccaccgcactttcctctctcctcccctgttttcgctcccctcgagacccccaaagcaccgaaagggggaggagcggagggagatagagaaagcggcggggttcaagaacgccgcggccatccggagccaggattctcccgatacaccccctcgttcccagttcttcagtggcgccgatttggagttccagagacggcgatgggctccggatctctgctcaaggtcttcgccaacaacttcgacgtccttgcagggcctttggtggcattggcttatcctttgtatgcttccattaaggcaatagagaccaaatctcctgtggatgatcaacaatggctcacatattgggtcctgtactcactaataacattgtttgaactcacatttgcatcaattattcagtggcttcctttctggccttcaatgaaattgatctttatttgctggcttgtcttgccatacttcaatggcgcagcctatgtgtaccagaattatgtgagacctgccttcataaagaaccagatggtcaacatttggtatgtccctcagaaaaaaggccttcttgggaaatctgatgacttcctcacagcacttgataagttcattgaagaaaatgggactgacgcgctgaagaaattggcgaacaaggctggcaagccatttaaacagtctgggaaatcatctaaggatcagaaagagacaaaatcatcaaaggattccaaagaaccgaagccatcaaaagatgcaaagcaaccaaagccatcaaaagatacaaaggagccaaagccaccaaaggtttcaaagtcacccaaggactccaaagaacagaagaaggcaacgctgaaagatccgaagaaagcaccaaaggattctaaaggactgaagaaagcgcttaaggatccgaaagaacaggaatcattggaagacccaaaggaacatacagcaaagaaggccggcaagcgtgtgacgttcgccgaggtggagcctgagaaggagctcaaggcctcgaacagtgactggcacccatcctctgatttccacgcggcgtaccctgagcagaacccatgggctagcggcttcatgatctttgaggatgaaaacagctactggaaccgaggacccctagactgctgagatcaaatgtatcgaggtggacactttttggtccgctagcagtgcaaggtcccaccagttcatcttcagccgaggagatgggtctcactcgcattatggcgacttgcgcctggtgtctgactctcggtcctgtaacatatttgtccgacgaatacctgtaggttgtagtgtagaattatcaattatgcagtgtggatggtgaaccggtgatattgtgtttcaggcggtgaaccttgttagttaggagaattgagatagtagcagtgtggtgctaaaccttatctggtttctggttgtgttgcttgctgtgctccctggtgcgtttccagtatctgcacaagtgccacaaaagtctgaccgtgatgaaaagatccgtaaaatcgtgcgaacttgccgttaccaatgccattttgg

SEQ ID NO: 121713 - DNA, 1453 bp, Zea Mays
taaccttgtcctctgtatccgtgctggtgctctgcttggtctcggtctcgtcaccgccacgccggtctgccgtcgtctcgtctgctgcactccactgtccactccactctcccaccgcactttcctctctcctcccctgttttcgctcccctcgagacccccaaagcaccgaaagggggaggagcggagggagatagagaaagcggcggggttcaagaacgccgcggccatccggagccaggattctcccgatacaccccctcgttcccagttcttcagtggcgccgatttggagttccagagacggcgatgggctccggatctctgctcaaggtcttcgccaacaacttcgacgtccttgcagggcctttggtggcattggcttatcctttgcttcctttctggccttcaatgaaattgatctttatttgctggcttgtcttgccatacttcaatggcgcagcctatgtgtaccagaattatgtgagacctgccttcataaagaaccagatggtcaacatttggtatgtccctcagaaaaaaggccttcttgggaaatctgatgacttcctcacagcacttgataagttcattgaagaaaatgggactgacgcgctgaagaaattggcgaacaaggctggcaagccatttaaacagtctgggaaatcatctaaggatcagaaagagacaaaatcatcaaaggattccaaagaaccgaagccatcaaaagatgcaaagcaaccaaagccatcaaaagatacaaaggagccaaagccaccaaaggtttcaaagtcacccaaggactccaaagaacagaagaaggcaacgctgaaagatccgaagaaagcaccaaaggattctaaaggactgaagaaagcgcttaaggatccgaaagaacaggaatcattggaagacccaaaggaacatacagcaaagaaggccggcaagcgtgtgacgttcgccgaggtggagcctgagaaggagctcaaggcctcgaacagtgactggcacccatcctctgatttccacgcggcgtaccctgagcagaacccatgggctagcggcttcatgatctttgaggatgaaaacagctactggaaccgaggacccctagactgctgagatcaaatgtatcgaggtggacactttttggtccgctagcagtgcaaggtcccaccagttcatcttcagccgaggagatgggtctcactcgcattatggcgacttgcgcctggtgtctgactctcggtcctgtaacatatttgtccgacgaatacctgtaggttgtagtgtagaattatcaattatgcagtgtggatggtgaaccggtgatattgtgtttcaggcggtgaaccttgttagttaggagaattgagatagtagcagtgtggtgctaaaccttatctggtttctggttgtgttgcttgctgtgctccctggtgcgtttccagta

SEQ ID NO: 121714 - DNA, 159 bp, Zea Mays
acagatgttcagtgaactcagagcgcacatattaacatcacatgttagaccagtcctccttgaagttccatattacactagagccttcttacacatcttttttgtcgagacgtcataatcttcttggttcttttgttttgctcctatggtacaaattgg

SEQ ID NO: 121715 - DNA, 2096 bp, Zea Mays
cttcacaacggacgagaggcgtcagacaaaaaatagaatctggttgctcatctcatctcacgactcataaaaaaatagcgtcttttatcatatccgttgctcgcaaaacgcccccacacgccgccggcgaatcggcgactccccttgcgacgggaggaagcagccacgccgccgtctcggcgactccctgacgactgcctctccggtctcgaacgcgatctggcccatggtggctctggcgccgttggttcgtgagatctagggttgtcgagcgccgcggagtgggagcggatggggcgccggaagatgtccgcagcggcgccgccgtcccggagctggtccaacgttggcgggagcgtaatccccgaactacttgcaaaacacaaaatggacttggaaaatttgacgctgacaaaacatccaatcagaacattacattttttcctgttagccatgttacaatacttgaaaagattagcaacatatatcctgagaaagagtggtttgttctttctcttaattgttttggtggtagcttccggaatcttactctctatttcagatggcctgcataagaagcatgtgcaggagttccttaattatgctaaattcgtgttgtggtggatttcattaggtgtggcttcatcaattggactaggttctgggttgcatacatttgtgctgtatctaggtcctcatattgctctgttcactattaaagctgttcaatgtggccgaattgatttgaaaacggctccatatgataccatacagctaaaggttgggccatcatggctcgacaagaaatgttctgaatttggtccgcctgtgtatccagcatcagctcattctgttaggatccccgtctttgatttactacctcagatacagctggaagcagttctttggggcattgggactgcacttggcgagcttcccccttattttatatcacgagcagctcgcttatcaggaagcaagtcaaaagctgttaaggagcttgatgccgctacttccaaagaagatgggacagtagcatccactcttgatcgctccaagcgttggcttctttctcactctcaacatctcaacttcttctctatcttgatacttgcttcggttccgaacccactctttgatctcgctggaattatgtgtggccaatttggtgtacctttctgggagttcttttttgcaactttgattgggaaggccatcatcaagactcatattcagacgctgtttatcgtgtccttatgcaacaaccagctcctgtatcttatggaaaaggagctaatctggatattcggtcacattcctgggttttctgctaccctaccatctgtgattgccaaactccatgctgccaaggacaagtatctatcaccaccgacaccagtctcggcgtcctcacagatggaggagaaaagttggaatctctcttttacattggtttggaactctatagtgtggcttgtgcttctgaacttctccgttaagataatcacgtcgacggcacaggattatctcaaaaagcagcaggatatggagatggaacgcgtttctgattctccgcccccggaacaaaactaactagcggcgcaagtttatttcagctgctagctgcacagattctcctctgcatttttagcaactggttaagcgtctgcagacgattccaagttccaacgattatcaattagtattagtagctattcatctacacagtcaacgaaaacatgggcctggcaactggccgggtgatggctgtgacctcctatcatatcattgagcctgtagtgggcagttcctggaggagaattctactgttcttttttgtttttccggacatctacacggatagacagtagggattgtttgtgtgaagcacggttggcttatgccgagatttagcactggtagatgtttctatttgttttggaaatgctatagaaacatgtgagcattcaacaatgatacgctctgttaagtttgttgtgtattttggtttgcaactggtgcccgaaagagcaaacagtggctccatcaatttcctttggcaagtaaaaccccctatagaagacattgcttgtcct

SEQ ID NO: 121716 - DNA, 2096 bp, Zea Mays
ctcgtaccgagacaggacgtgtgtacacgtactgtacatctatgtcactagttattattcggctgcaaatacggccacagcattcttcccgccgtgtgacgacaaaaaaagaaaaaaaacgaaacaaaattatagagaaatacggccatcggccagaaccagtagctaccactcctgtctatctcagtatctctacgcgcgaaaaagggcgacgacccgggcccaccacgcggcgcaaccgcttcttccgcggtgaaccaaaccaaaccaaaccaaaccaacctcctcccctgtctgcctgccctggctccagctcccgcccgtgcacgctctcgcgccgttcaccgtcgccacctcctcccctaccggccgctccgtccataaaacccaaccgctcccaacccactccacatttcctcccctggggtacaccgtgcacacaaccgccgccgcagcccctcagactccctcctcctcctcctcctccgcgcgggaacgggaaatggcgtccaccacggcctccctcgcccccgcggccgcgctggagcggctgggcctcctcgccgcgcccaccgacgccgacgacccgtccccgccgctgcccgcgccgctcccggggctcctccccctgcgctgcgccgtgcagcactacgagtggggccggcgcggcgccgactccctcgtcgcgcgcctcgccggcgacggggacggccggccctgcgccgagctctggatgggcacgcaccccgccgcgccctcctcgctggcgcccgacgtctcgctccgcgactgggtcgcgcgcaacccggccgcgctcggccgcgccgtcgccgcgcgctggggcggcgacctcccgttcctcttcaaggtgctgtcggtggccaaggcgctgtccatccaggcgcacccggaccgggagctcgccgcggcgctgcacgcgctgcgcccggccacgtaccgcgacgccaaccacaagcccgagatggccgtcgccgtcaccgagttccacgcgctctgcggcttcgccgccacgcaggagctcaaggaagttttgaggactgtccctgaggttcaagaattagttgacaaagaagaatctaggaagcttttgagtgtcaaagagcaagatgggggaatcggagtgaggtcatatttgaaatcagctttcaccaagttaatgacagcgtgtgatgaagcagtttctgaagcaattacaaaccttaagagtcgcttaaaaagtgagagtaaggctagaagtttaacgaagaaggagcaacttgttctgtcattggagaagcagtacccaggagatgttggtgttctggcagcattcttccttaattttgttaagctcaatcctggtgaagcactttatgttagtgcaaacgaacctcatgcatatctctcaggggagtgcatcgaatgtatggccacttcagacaatgttgtccgtgcaggtctaactcctaaatacagagatgtgcaaactctctgctcgatgttgacttataatcaggccttccctgaaattctgcaaggaatgcctgtacagccatacgtgactcgttacaccccatcaactgatgaattcgaagttgaccgctacttgctacctcctggaaaatcagtcaccatgtctccggtgcctggtccatccatattcatcgtcttgacaggagaaggagaaatccaggcaggtttcatgactggcagtgcaaaggcgaaggaaggtgacgttttctttgtgccggctaacaccaaggtcaagctctacacttcttgccccaggtccatgcaactgtatagggctggggttaacagcagtttcctgagttgatgggcaactggtttctagggttggcatctgtaggttaggtaccagctacacaaggattttcatgtttggcacttgtccaagaagtaagttaattatgtgggttctcatcgtgtataggaaatatggagaataagttcatcccttgtttattttataaatttgtatttcatttccaaatctgacgagctgctgggatcacaaggatatgtaattcgagttcaaagttaaatgtgcatcttgtgaacattagggctggaaa

SEQ ID NO: 121717 - DNA, 1548 bp, Zea Mays
atgaagacgcgcgccgcgtttgaccgttgcgcgcagacgctttcccgtccagtcctacaggctacaactacaagaggggaaaaagacacgaaggaaaaaaaaaccagagctggaaggagagagaaggaaccaaaaaaaaagctcggaatttgtagtctccaagccgtgcgacgaccggacgggaaggggaagagagggagggccgccgctgaagtcgccgtcggtgaggagatcggttcctgcgtgcagaggcggcaacaagcgctgcagagggaggagggatttgggatggctggtgacgaccatgtggtggttgacgtgaacggcttagcaaaatccaaggatgacgggggttccaagaagctgtctgaggatgcaaatggttcggctccggctgctgcatctttgtcagcagctgttgacttggtccaggaggaggaggaggaggagggtgatggggaggaggagccgctaatccaggccgcggagtgccgcatatgccaggaggaagatagcgtgaagaacctcgagaaaccgtgtgcttgcagcggcagtctcaagtatgctcacagagcttgcgtgcaacgctggtgcaacgagaaaggagacactacttgtgaaatttgtcatgaggaatacaagccaggttacactgcgccacctcgtgttcagccagatgagacaaccatagacattgatggtgatttggttatggatttgcgagacccaaggattcttgctgtagcagctgcccaacatcgtcttcttgaggcagagtatgatggttacgctagtacagatgctagtggtgctgcattctgccgttcagctgcgcttattttaatggcactgttgcttctaaggcatgcattgtctatgtcagacaacgaaggaaacgatgatgacgcttctaccatattctcgctttttctgcttcgagctgctgggtttctgctgccgtgctacatcatggcatggatattcagtattttgcatcgccgtcgacaaagacaggaagaggctgcactggcggctgcagaggtggccttcatcctacagtcggccaggggccgcgccctccagtttgccatcgctccagactcccccgccaccccgcagcatgagccagtgtcgcagcaacagcaatagtggctgacaaccacatccccagtagttgctcacgactactgaccatacgtatctgtttcgttttcttgggcatcatactgagtcacaaaggttaagcctgggcttctgcctcccgtggccagtttgggtgtcagtgtcacccaaagttcgttacacccgaaaccttgtgctttgtattaaaccgagtgtgatccgagaatataccaatttaatgtaaattcattcttgttcttactgcggcatcattattaaccgttgtatgcactgtaatgtacagtctttcataatactatttatttttctatatggcatatttgatagatgtgaacgatgtggtgtatggaaattgaaacctctattgtttattgtgggaactaatagtgtgtttggattgagaac

SEQ ID NO: 121718 - DNA, 371 bp, Zea Mays
cgaccgagctagggccgccggatccatccagctccatgcaagcggaccacccggccggccccattatattggacgatcgatgcagtcagtactcgaacatagtgactgagtggcccgcagcagctctagcgcaaggacgactgcagctacactgtttgtttgttcaagaaagcctgtaggatcgatcggatcggatcggatcggacagagcgagctatagctagctagggctagctagctagatggcgaggctacgcctggcggtggtcgccgtcgccctggccttgtgctgctgcctcatgatccacgcgccgacgacaggtgccgctgctgccgccgacgacgcctcgtttcctcctggatttctgtag

SEQ ID NO: 121719 - DNA, 252 bp, Zea Mays
atgtcgtgcacaaaactgttctcgcgctttaggcgagcacgatgcatcttgaagagaaatagtggggatcgtggggtcttacacaatgtgcaacatcgaaataatcaaacctgtcacaacagaaaagctacagccggtgccaacatgcccgaggcttcaagactgatttgtgtctctaggtttggggatcagtcttcggggcagcctgctacacaagtgtggaacttcggcgtgtggaatgcactggagtag

SEQ ID NO: 121720 - DNA, 542 bp, Zea Mays
aagcatactattagacataccggtatatattattgttcttagtcatcgcacaagactcttgtcaacaagaccaacaacaggatgaggactgccgtgcatgctgcgctttgcattgtgcttgtgataatgtcttcaacactgtcatcttgcgaggacgatgagaaggtatctatcgcatgtgacacaggatgcaatgccgcgatctcccgtctcaaatgcttcctgatggcctattctgaagggaaagtgttggtcagcagcaactgcgaaacgccgaccaggtgcggctgcgtgtttcgtcacaaacaagatgcaacccttatcgccggcgacgttggcaacaaaaagggatattgatggcagacgtgtatttcttggttgaataatatatactgctagaattaatatgggcaccaacaacgaaatatctataatgttattcttcagtgtaatgcttccagcatgttctgttttagtataactaaatatctatctttcccccccaatttaagtttttttttggttctccatacgtggcctct

SEQ ID NO: 121721 - DNA, 915 bp, Zea Mays
atggaggaaaggagaaacgaggctgtaattgaattgattctgggtatttcaatgcaacttgaacgaaggcatcttgttggaaaatgggctacagatctatgtagaaagaaaaccatgcaaagtcctagaatggcacgagagatgttaaaactagctatacatcttacaccagctccagatgacatgattcttgtttatgaggtgtctaccgagttgatgaatttaatggcctctggagatgatggagattcttctgatacatttcatatcattaactgtaaaacaaagagctcactcgcagctctctctcttcaaatgattgagtcatctcttactgaattggatgggggctttggaaagcttaaagcaatgcttacattaggttatgattgtgctaacattgatgaagatcaaccagcagatgaaataatgctaaggttggctttggagaaaggactctactcgagatcaacattagtagttcaagtgctctcttcctttgcacatatgagccctatggatactcaagcagaacattttctaaaattgactgtcaagttctacaagcttttaactcgcatgtcaaagtcccagattgcacctaaaggctacagacaatccattccaagcctcaagtttcagaaactggcagaattcatcgcctccgagcccttcaacgtggggggattcgactgggcgatctacttctaccccgatgggaagagcggcgaggatagcgctgcctacgtctcgctcttcatagcccttgccagcgaaggcaccgatttgcgcgcgctattcgagctcacgctcgtcgaccagagcggcaaggggcaaaacaaggtgcatacccactttgggaggtctctcgagagcggcccatacaccctcaagtaccgcagcagcatgtggtga

SEQ ID NO: 121722 - DNA, 99 bp, Zea Mays
cgggtgcactggcttcgacagcacggatatattttgtacatacgtatacacgtgtgttcgtataagctagcttggttcaggataatatgcgcgcacgaa

SEQ ID NO: 121723 - DNA, 3059 bp, Zea Mays
aaacaaaccccccgctccgccgcccggagaacccacctggccacctcaccgcggcatttccacgagaccacgagcacccctcgccgccttccgaccgcgatgaccgacgccgaagcggacacggaggccgtccgcgccgcggcctgggaggtgctgcgcctcgatcacgacggccacacccacgaggcgctcacccgcgcccgcgacctcatgctcgcgcatcaggacatggcgatcacgcaccgcctcctgggcgacctctcctacggtgccgccgcccgcgcgtgcctcgaagaaggcactcggaaggccgggttggccgcggcagcgccgcacctccacgtcgcccgcgaagcgtttgccgcggcgcgccgcctcgcccccgactgcatcgacattgccgacgcgctcggcgacgccttcgcggcctcctggatgttcagggaggccgagtgcgagtacaagcgcgcgcagcacaccccgcagcctaccgacccggcactccacaacgcggcctacggcatgtgcatgtccgggggccacgagcatgaccgcgacccggacttcatgagcgtgagggtggaggaggtcagggcgcgggcccgcgcctcctacagccgcatgaagacggagcagctccttccgatcgcgatccaccgggtgctcgaagccggcatgcagctcggcgcggcggaggggcgcaagcaggccaagggcatcgccgaggtgttccccgacctggggcgcgcgcagtacctcgcggcgtacatggacctggagttcgtgcgcagcctcgacgcggccatcgacaagcgcctgttcctgcgccgcaccctcgtcatcaccgagcgagtggcgcgggactaccccaaatcgcccgtgttcgcctccttccacgccaagctcctcttcgtcctgggtgagtacgacgcagccgagacggagtgccgccgcgcgctggaaatggtggagcccaatgacccgcaagacgactgcatcccggttgggtcaatcagcggggaaaaccgtggcgtcaggctggtttcggtggcctgcgagttccacgagctgatcaacaagatcgtgatgctggccagcgattactgggactccatgagcagtgagaggcagcgtcacagcttcctacaggtcaggctcgatgtgctgcagcatgagtacaacaaggttgatccgtcgcatgcgttcgctatgtctgatgtgcggagctttgtcaaggagcacgagtcttggaggttctggatttgccccctttgtcattgcaagaagttcatgtacactggtttgctattgtcacacatgtgcaccaggcacccaagggcagtcctgccacgacttcagtcagtattggatcagaaactcagtgatgaagcattggagagtgacgattctctgcatgcggtgacattttgtgaagattcagaacagcaagacgtgacgatttgcttcaacaagagcagcgaggtattcaaatggttgttctatgcaccttcaagtggagtacggccaaagccattccttgaaatacgacaaatgaagtgtgataaaggacgtatgctgcttgaaagcataaaggacaaaatgaagactctacctgcagatagatctagtactgagttcgccaaggctattcctgaaatcgaggagcagtggcagaattttctcaaatgttctgtgttggactacagagaagtcattctccaacttgcaagatcattcctatggagagatttaaagaaatgcatgactgaggatccagaacttgctgctaagccgattagtgccgctgatattgatgccatattcactaaagaagttgttaatcctgccagcaatgctgtagagtcttctcaaacagtgggggctcaaatggtcagtggaaattgtcaagaaagtgttcacgacgaaggggacagctctgacaaccatggaaagaatacagaatcgtcagatcagacaactgatatggtggaacgtgagactggccttgctgcaaaactggataagttggagaatggtccaaagatcagtgagagtaatccggaaggtaatgttcacgacaaatgggagagttctaacaaccacggaaagattacagaatcatcacatcaggcaatcggtatggtggaaagtgagactgaccttgctgcaaaatcagtaatgacattctgtaatgttcacgacgaagaggagagttgtgacaaccagggaaagaatacagaatcatcagatcaggccatttgtatggtggaaagtgagaccgaccttgctacaaaactgaataagttggagattgatccaaagatcagtgagagtaaccaggaaagtaatgttcacgacaatggggagagttctggcaaccagggaaagaatacaaaatcactagatcaggcaatcggtatggcggaaagtgagaccgaccttgcgggaaaactagataagttggggactgatccaaagatcagtgagagtaaccaggaaagtgagttacacgctgaacatgagagttctgattccccagtaagcaggagtgacgtggcactaagctcgaaggggacttctgaggccacggttaccgacacaaagttgccacggttacctaccaacacgatggagggagtgagtgactttgacacaaacctcttggcatatacgcttggctccatctagcttgtgagaaattgtattacaaacactaggaagttcatactccctctaacgatgtgcagaagaaacaaaaacaatacaccgtggtggctaataaaaagtctaaaactgttgagaagcaatgtcgtcgcagatcccagatccagactccaaaccttcacattagcaatggaggcacgaggaagatgtagaagaccttcccttcgcgtggtagcaggtagcacaaacacaagagatgagagatgaaagatgggggattctttcctggttattcattatgatagggtacaagtttaataagtagagaagtatagtccctcagaggtacattcggtgttagctcacataatcctttgtagggtttcttaacactc

SEQ ID NO: 121724 - DNA, 1497 bp, Zea Mays
gacgaaaataccctctctgcctcttcgacgcatcgcaacggtttgttttccttcttccacgcgttgggaaggtgaggcggcggcgcgcgctagggaaaggtgtggcgacggcgtgcgatcggggaagggaacgcggcggcgcgtgcagggctacgcgacgccctctgcgcgtctccgtcaggaggaggcgtttccatcagccacctcgctccaagcacgctctgcttggctgcccctccggtttggccttgtgcaaatggacgcaagcaggtccaatttggctggtggctcgaatccatcacaatttgctaatgttgaatcttggaactttgatggatgttattacaacatcatggatgatgagaatttacaacataatgcagatgtgcatgaggttcaagggctgccctcagacgatgtcgaagtacacagtacaagtgcaacaaagaaagtagctaggagagcgaagaacttcagtcatcaagaggatgaggttatatgttctgcttggataaatggtagccaagatgcaataattggaatgaatcaaacgagtggtggctattggaagcgttttgctgattactatgacaagtacaagcctgaaggatcacaaaggacacaaatagctatacaacacatgtggaagacaattcagaaggaagtgaacaagttttgtgcgtacttgtctaaaatagagcatcgaaatgagagtgggaaagtggcagaagatagggtaactattattctacttactcttttattttggtgacatatttggtcgaatggaaataatgttataattttttatagctgaagatgccatgaaaatgtttgagggattacaaaatcatcctttccaattcacacattgctggatattattgagaaatgaaagaaagtggtgtgaaaggtctactgtaacaagaccagggagggtcgtaaatgaagatcaaccctagaacatggtcccttctggtgaacctgaggttacaatacgtcccgaagtgactcatgcaagaggaagcgagggaacaaaaacactgcacctactgattccactacttgtgttgaagtgcttgagtgtatgaccaagaaccgtgagcttgtcgaggttaaacgtgatgagcaatacagggagctacttgcacgcagggaccgtgagcttgatttgaaggaacaagagatggagttcaagatcatggctgtgaacattgacgacgtgccggaggataagcgagcttactacctgaacctgcaacaaaggattatggagaagagtcacagaaacaacaatagttccacttagaatttaatgatgtttcacaatgaactttatggtggaatctttatctatgctatttaaattctgcaagttgtaatagtcaaaactatttgaaagataactatgtacctttttttggaaatttgttcttgatatttgactgaataatatgtgtacaatgggaagttgtatgtgcatctgaatggttgttc

SEQ ID NO: 121725 - DNA, 104 bp, Zea Mays
ggtgaataatggctatagagatcgagttagggtgcgcatggcgcctggttcagggcggtttggtatatgtacctgggtatgtacaaatggcctggaagtggcgg

SEQ ID NO: 121726 - DNA, 160 bp, Zea Mays
atttattcaacacaagagatgtaataaagagagaaaatattgcaaaattcggcagcacctcctttgaaactagcataacaaggggggaaacatgtagttcatacaggatataaagacagataattcacgtagtagaatctaaatgcaaaagtggtaaaac

SEQ ID NO: 121727 - DNA, 984 bp, Zea Mays
ctagcgctcgccgctcgcgtcctccactcctggcagctgctccctcacatgagtacatgaggtcgcaacctaaacctggctgctccgtgtccgtgctccctcaatcaatcccggcggcgggaggcgcctagcgcgagctaccccggttggtggtggtggtgaatccttcacttgcctgtggccttcacgcttcacggatccgacgcagcgaaccgcagtctgcacggatctgcatcatgccgtcgtccaccctcgccgactcgttgagcgcggacggctccacttccacacctccacagcggcgccacagtgactccagtgctccatcgcccctacacggctgcacgtgatcagtcgaccacgtgtctggcaccttcagccctccaacgcccatcggccaatgcggccaacaatgtcgcctgccgcgtcagaagactgtcaagtttcagattgtcagggtccctttcaggtgacatccagtctctatccgaattgcagaccttgcatgtgaggtgattgccacctatatttggcacttcctatattttttatagaatgtttcatcttgttcttgttgtaattatgtcagtgacatttgttcttgcctttggagagggatcatgtttgggcttacaatggggctcgtgtcacttggcctcgtcaagctggagatcctctaatgtagcgacacaggcatctcaggagaccatttatagtatgaagaggtcgatggaataaaataacaacctccttcatcaactattaagcttcaatcgtggtcaagtgtctccatcttaagtctgcttaaccgctataggacctgcagctgtagtagttctagatgtgaagttatactatcattttcaattattcttaatgtttaatactttgagatgaagttataggatttgctttggattttaagttaaaggatttatatatatatatgttttgaagttatatgattctcttatggatgaaata

SEQ ID NO: 121728 - DNA, 252 bp, Zea Mays
ttcatcaaggaataatttattttccatcaaacatcagggtcataaacatctaaattaacacccgaaccctaaatacaatgatggtacacacaaaacattcacatgtatttgtcttgtgccaagtgatgcccccctattccttatacccagtaaatgtcagggaaaatgtacagcctgctccactagccacgttaaaccactcccagttagaaaatatcctgtaccaaccattagatgaactctatggagatc

SEQ ID NO: 121729 - DNA, 2911 bp, Zea Mays
atggagtgcggacccgcggctaatgttggcgtcggcggagtccacctcccccaagaattcggtagaaaggatgaggatccgggcaaggttttcgccacatctgttgaaaccaacgtcgaggagacaacgcggatatcgcaaccgaccgggttgaagaccaccctgaccgtgggccccacacggcagagatttccaccccagaataatcgattcgacgcgcgggactggagctcagccacggactcctgcgcgatcccgagcggtctgcgtggggggaagaagactgatccgacaggatggccccaccatgcagtgaccgaacaccagagcgcaggagggcgagccttgctcaggtatttgggcttcatgacggaggcgcattctggtttccttccagtccggatggctgctgcatcctcaggaggtgatggagaccggcgacaacgtgctgccggctggttggtactccagtcttcgctagagctctaccgtgcttgtccaggagcacgaagcaagggacgtatctgatatcataatgcagaagctgcaagcggttaaaaaacaaattgactgtcagaatattgaattttcatttcagtttttacataaatgatatatgcttggagcagtggtatgatgctccggtgcagagttgcagatgtacattcaagaaataataaggtcataatccaaactaggctggtaaacaaggactgtcattttatggcagcagaagcacaacccacagtgcttattggttgttctatgtggattagcttcaatcatcaagaactattatgatgctgaaacctgtggtcgcttcagcaccttaacgcgataatataaattctaactgcctcagctcatccgaatgggaaatttcgtaattttaaacttggcatttgccaatacctgtaaaaggaagagatatcagcctatagcttacgtgcacagttaatacacagtcgcacaagtccatgttttaaaaaactagcagccccaccagaactatcacatatccgtacacatgcaaaattgtcagagcaggttttccatcaaccctcaagtaaacctatgttgagctctctattcacattcttcttctaaaatgtaaactaacctattggccaattaaaaacgatagtactcattctactctgaatcataatttactttggctttgtattaagccaaatttcactagctttgacagtttttttttttcgaaaaatgtatcaacacctacaatttcgaataagagttatatcaaaatatatttcatgaataatttaatgaaactaatttgatgttgtagatgttagtacatttttctataaacttagtcagagtaaaatagtttgacttaggacaaagacaaagtaaacaataatttgagaacagaggaagtacttatgcatggacaccaattgacgactgtatcataatcaattaattacttgaacagttaagtaaaccgtatgcatcagcaacaactgatataatgctccattagtgaactggtgaagaaagtagatatcgcaccgaagtccctggttgtaacttaacacccttgatggccaggcatgatgcaattcaacaaatcactgcttccatcaccaaggatgaatgttcaaccatctgacatattcacatatcttcaaccagtcatactaatgtggaaccaatgcccacttgatgtcaccaccgttggcgttggtctggcaaacctttagaaatcatatctactcgtggaactaagtaataagagtgatagcatatataccgtatgaagctccttctcaccctttcattgttgtgcaaagtaattaaatactaaggtgacaatcttcacaatgtccaagaatcaaaacaaacgcctgggtattttcatgggaaaaaaatttggtgcagaccagatgcagaccagaatgtttgcagccccccacaaaaaagaatatagaccttacctgtaggtccatcagataatgttttagttgtgttattgctgctatgggtgggtctatcttcctttttgtgagggactgcaaacattcttgtttgtagatgacctgcaccaaattttttttccattttcatggcattgtccctcaagctgcgcaagtcacataactgaatgcaatgtttggtctaaatggtgtgatgaccgaacttaagttttcaaactgacactgtacgaggtaaataagacaaatgaaacatgataaccttgcgcctcgtttggatccttggaattcaatttcattctaataatcgtgatttagacataaatcaattaagctaatatgatttttatagaaagtatttgtatattattgctaaccatatgagagagatatttatgtgctacatttctatcataggggactaagttgaagagcgtgttataagttgcagagtagaaacatagactagtgatatataaaatcaatttcaactctctcatcctatgaatttgagtcttatatctaaactttggaaagtggtaaaatgtcaaattccaaacaaatagcatactttatcaagtagattccaatttctttaaaatggagggatccaaacaccccttaaaagaaaaggggaggatcatttaccatggaacctactgattttctaatcatcaatttctcatcatcaaagtgcaacatagcatctagtcatcataaattgatcagaacatgaccaatatggctaaattaccatagcaaaggcaattaacagaagaagacctatgtggctaaatcactattgcaaaggtttatctttcctctgtagagaacagagcacccaaatcggcatcacaaatctgacaaattgtctgaattttcccagaagatggcaaggggcgacatacctcggggagccaccggtcgtcctcggcgtcagcgagcac

SEQ ID NO: 121730 - DNA, 528 bp, Zea Mays
atggagtgcggacccgcggctaatgttggcgtcggcggagtccacctcccccaagaattcggtagaaaggatgaggatccgggcaaggttttcgccacatctgttgaaaccaacgtcgaggagacaacgcggatatcgcaaccgaccgggttgaagaccaccctgaccgtgggccccacacggcagagatttccaccccagaataatcgattcgacgcgcgggactggagctcagccacggactcctgcgcgatcccgagcggtctgcgtggggggaagaagactgatccgacaggatggccccaccatgcagtgaccgaacaccagagcgcaggagggcgagccttgctcaggtatttgggcttcatgacggaggcgcattctggtttccttccagtccggatggctgctgcatcctcaggaggtgatggagaccggcgacaacgtgctgccggctggttggtactccagtcttcgctagagctctaccgtgcttgtccaggagcacgaagcaagggacgtatctga

SEQ ID NO: 121731 - DNA, 114 bp, Zea Mays
cgaccgcaatgcaagcgtcaaaccaaataaattctactgccctagttgtgaatgttttccacaaaatcccaaatccccaaaacaacaaccggatgaggaaaaaaacaaaaagaa

SEQ ID NO: 121732 - DNA, 1847 bp, Zea Mays
gcgaacggacgaacccacaccatcaccaccaccggccaccctctccctgccctggccccccccgcttcgcctactcctgctcctcctcctcctccgcctccccctccctcctacaaatagccaccaccaccacagtgacgcagccgccgccgcaaacgtcgcccccgaccgaagcctagccaccaccagcagcaccagcaacctcgcgtagcagcgctcgacaccgctggacgccccgcgcccgcgcgaaagcaggaccttgattctgtcgttggcgataccatggatgtgtcctacgagaagtgtgctgatccgtcgaactcggacctgcctagcgctgttgttgatgctgagcgatacgacgatggcggctccgaacacctgggatctgctgtagtagagggagctactggaaacgaagggaattcggggaccgaaagttccgagcagactggtgatgagcgcgctggaggaggtgaaggctctcctgttgatgtcgaaaacagcgctgataaacaagagagccaggagacgacggttccgatggaagaaacagaaacgagcgacggcacctcgatcacgtcgatggaggatgccctggaaccgaaccgtcatcacgatctcccgtcggagcctgaggatgtgggcaaccacactcctgatcctgatcagtccagcggcaagaactccaaaggaaacagtagcgtgttccagagcgcaaggagggtgctggcttcaaccaataagaaaactccatctgcaactgcacggaagccactgcagttgactaacagaggtaaccaggatgacgcgaaatcgtcggctggaaaggccgccacggttccatcaggcccggttttccgctgtactgaacgggccgagaagcgcagagaattttatatgaagctggaggagaagcatcaagctatggaggaagagaagattcagttggaggctaagttgaagaaagagcaggaggaggcactgaagcagctgaggaagagcctgaccttcaaagccaaccccatgccgagcttctaccacgaggcgacgccgtccccgaaggccgagttcaagaagctgcccacgacccggcccaagtcgcccaagctgggcaggaggaagacggcctcgacctccatggagacgtccaactcgtcgtcggagagcgagggcacgaggccgtgctgccgcgccagccgcgacggcctcgacagcagctgcagatgcggcggcaggagcaggccgcaggccgcgaacgccaagccggccgccgggcccaagaagccgccgccgcagcagcagcagccgaaacaccgcgcccacaagatcgccggcgagggcgccatcaacatcgccgtgcactagccgccgccgccgcttcttgaaacttctttccggtcgcatgcatgcaggacgatggcgatggcgtgcggattttccttctaagttatgagagtgctttgtcggcttgtggatttggtgtagataataatataagttatggtgacgacgaacgaacaggggctgctgccacgagtgaggccggtcagtcagacagaggtggtggtgtttattgcttgcttgcttgtttgtctgtttgtttgtttatttatgctaatcttatttatttaatctgctgtcgaggatggcctgcgcattgccactgtgcagcgctgcttgttttttcgtcttcttaatttatggggagtggtaagagagacttgagcgctggatgtaacgtgtacaaacgaaaacgaaggcttgctggtggtggtgatggaggattttatctgaactatgctcactcgctgcatttctattgagttcttcaagagcttgctaaa

SEQ ID NO: 121733 - DNA, 1893 bp, Zea Mays
ctcctccgcctccccctccctcctacaaatagccaccaccaccacagtgacgcagccgccgccgcaaacgtcgcccccgaccgaagcctagccaccaccagcagcaccagcaacctcgcgtagcagcgctcgacaccgctggacgccccgcgcccgcgcgaaagcaggaccttgattctgtcgttggcgataccatggatgtgtcctacgagaagtgtgctgatccgtcgaactcggacctgcctagcgctgttgttgatgctgagcgatacgacgatggcggctccgaacacctgggatctgctgtagtagagggagctactggaaacgaagggaattcggggaccgaaagttccgagcagactggtgatgagcgcgctggaggaggtgaaggctctcctgttgatgtcgaaaacagcgctgataaacaagagagccaggagacgacggttccgatggaagaaacagaaacgagcgacggcacctcgatcacgtcgatggaggatgccctggaaccgaaccgtcatcacgatctcccgtcggagcctgaggatgtgggcaaccacactcctgatcctgatcagtccagcggcaagaactccaaaggaaacagtagcgtgttccagagcgcaaggagggtgctggcttcaaccaataagaaaactccatctgcaactgcacggaagccactgcagttgactaacagaggtaaccaggatgacgcgaaatcgtcggctggaaaggccgccacggttccatcaggcccggttttccgctgtactgaacgggccgagaagcgcagagaattttatatgaagctggaggagaagcatcaagctatggaggaagagaagattcagttggaggctaagttgaaggtaaataaatttatctatatggctgccatttgacatcttcagattgttcagctgacctgaaccttctaggcgtagttgaagttgatccttcactgtccgtcatgaataaagttcagttaaccagaaggggtctttatttactgtttcttcatgcatttcagaaagagcaggaggaggcactgaagcagctgaggaagagcctgaccttcaaagccaaccccatgccgagcttctaccacgaggcgacgccgtccccgaaggccgagttcaagaagctgcccacgacccggcccaagtcgcccaagctgggcaggaggaagacggcctcgacctccatggagacgtccaactcgtcgtcggagagcgagggcacgaggccgtgctgccgcgccagccgcgacggcctcgacagcagctgcagatgcggcggcaggagcaggccgcaggccgcgaacgccaagccggccgccgggcccaagaagccgccgccgcagcagcagcagccgaaacaccgcgcccacaagatcgccggcgagggcgccatcaacatcgccgtgcactagccgccgccgccgcttcttgaaacttctttccggtcgcatgcatgcaggacgatggcgatggcgtgcggattttccttctaagttatgagagtgctttgtcggcttgtggatttggtgtagataataatataagttatggtgacgacgaacgaacaggggctgctgccacgagtgaggccggtcagtcagacagaggtggtggtgtttattgcttgcttgcttgtttgtctgtttgtttgtttatttatgctaatcttatttatttaatctgctgtcgaggatggcctgcgcattgccactgtgcagcgctgcttgttttttcgtcttcttaatttatggggagtggtaagagagacttgagcgctggatgtaacgtgtacaaacgaaaacgaaggcttgctggtggtggtgatggaggattttatctgaactatgctcactcgctgcatttc

SEQ ID NO: 121734 - DNA, 1369 bp, Zea Mays
cccccgcttcgcctactcctgctcctcctcctcctccgcctccccctccctcctacaaatagccaccaccaccacagtgacgcagccgccgccgcaaacgtcgcccccgaccgaagcctagccaccaccagcagcaccagcaacctcgcgtagcagcgctcgacaccgctggacgccccgcgcccgcgcgaaagcaggaccttgattctgtcgttggcgataccatggatgtgtcctacgagaagtgtgctgatccgtcgaactcggacctgcctagcgctgttgttgatgctgagcgatacgacgatggcggctccgaacacctgggatctgctgtagtagagggagctactggaaacgaagggaattcggggaccgaaagttccgagcagactggtgatgagcgcgctggaggaggtgaaggctctcctgttgatgtcgaaaacagcgctgataaacaagagagccaggagacgacggttccgatggaagaaacagaaacgagcgacggcacctcgatcacgtcgatggaggatgccctggaaccgaaccgtcatcacgatctcccgtcggagcctgaggatgtgggcaaccacactcctgatcctgatcagtccagcggcaagaactccaaaggaaacagtagcgtgttccagagcgcaaggagggtgctggcttcaaccaataagaaaactccatctgcaactgcacggaagccactgcagttgactaacagaggtaaccaggatgacgcgaaatcgtcggctggaaaggccgccacggttccatcaggcccggttttccgctgtactgaacgggccgagaagcgcagagaagtatgtgacgctgggcaggaggaagacggcctcgacctccatggagacgtccaactcgtcgtcggagagcgagggcacgaggccgtgctgccgcgccagccgcgacggcctcgacagcagctgcagatgcggcggcaggagcaggccgcaggccgcgaacgccaagccggccgccgggcccaagaagccgccgccgcagcagcagcagccgaaacaccgcgcccacaagatcgccggcgagggcgccatcaacatcgccgtgcactagccgccgccgccgcttcttgaaacttctttccggtcgcatgcatgcaggacgatggcgatggcgtgcggattttccttctaagttatgagagtgctttgtcggcttgtggatttggtgtagataataatataagttatggtgacgacgaacgaacaggggctgctgccacgagtgaggccggtcagtcagacagaggtggtggtgtttattgcttgcttgcttgtttgtctgtttgtttgtttatttatgctaatcttatttattt

SEQ ID NO: 121735 - DNA, 266 bp, Zea Mays
caactcaagtgtcccttccaatgggtctttttctgtgaggtgcttgagactgtaccggtgaaaaatagtatctacatcagcttaatcgggttctatatcgatttgtttgttccacactatatttatcgggttccattgaccaatcgtcggatgaaagcctcaaggctcatccataatcctcctctatcttaaaaaccaccagtaccgtacagaggaaaagaaggcgagaaatgagaggaaatggggaaaaaaagaagagagaaaat

SEQ ID NO: 121736 - DNA, 1292 bp, Zea Mays
ttttattttttcactagaataggggggcagttgggtgaagggcatggagcacatggcaatgccctcttcccccgccactgcgggtcctgctcccctgtcctgcgtgcggtgtcttcctaagcccaaggaggtgaaatggcggttatgaccctctaccttccgtatccgtacgcagcatgcgtgagctgtcccatgtcctgtacgtaggctctagtccttgaatggtgagaattccacaatgtccggcgcagtaggcagacgcagacctctctgtgtcagtatatataatgctctccatcgaggtataacggacctcatctctcattcttcaattcgtcacttagcttcactcggcaaagaaaagaggcaacgacgatggctgctgcggcggcgatgatggtctccggaggacgggcggcgctggcggtggcgggcgtgctctgcgcggtggcggccatggcggcggcgcagcaggcgtcgaacgtgcgggcgacgtaccacctgtacaacccggcgcagaacgggtgggacctgaaccgcgtgagcgcgtactgcgccacgtgggacgccgacaagccgctgtcgtggcggcagaagcacggctggacggccttctgcgggcccgccgggcagaagggccaggccgcctgcggcaagtgcataagggtatgtggctctgctaccttcacttttcctcctgctggattgtcacaggcgatcgttggcctgctgcaggtgaagaaccgtgcgacgggcgcgtccatcgtggcgaggatcgtggaccagtgcagcaacggcggcctggacctggactacgagacggtgttcaagaagatcgacaccaacgggcagggctaccagatgggccacctcaacgtcgactaccagttcgtcgcctgctgagcaacagagctcagccagatccttcctgtgtatgtatgcatccatgcatgcaggcaggcagatgcagagaccgacgtcgttgtaaaacgcgtggccttacttgagatgaataaaacgcaacatgtagcgtcttgcaactgtcgcaagcacagctactactgctactgattaaataaacaggactgcaatgatagtaataaactatttaggcctcgttcgttttgaaaacaggcatgtttttagttctgggccggatggagtgaatcctgctggttcactaaaacatgaaaacttttggtttggtttggtttggttccagttgtttataggtgtagcttcgactcaagccgagaaaaggatgaaaaggtctacaatggcttggttttatt

SEQ ID NO: 121737 - DNA, 1254 bp, Zea Mays
ttttattttttcactagaataggggggcagttgggtgaagggcatggagcacatggcaatgccctcttcccccgccactgcgggtcctgctcccctgtcctgcgtgcggtgtcttcctaagcccaaggaggtgaaatggcggttatgaccctctaccttccgtatccgtacgcagcatgcgtgagctgtcccatgtcctgtacgtaggctctagtccttgaatggtgagaattccacaatgtccggcgcagtaggcagacgcagacctctctgtgtcagtatatataatgctctccatcgaggtataacggacctcatctctcattcttcaattcgtcacttagcttcactcggttctgcttctacacatctatatatcgttagtttggtatgtactaacggctcgatctgcacaaggcaaagaaaagaggcaacgacgatggctgctgcggcggcgatgatggtctccggaggacgggcggcgctggcggtggcgggcgtgctctgcgcggtggcggccatggcggcggcgcagcaggcgtcgaacgtgcgggcgacgtaccacctgtacaacccggcgcagaacgggtgggacctgaaccgcgtgagcgcgtactgcgccacgtgggacgccgacaagccgctgtcgtggcggcagaagcacggctggacggccttctgcgggcccgccgggcagaagggccaggccgcctgcggcaagtgcataagggtgaagaaccgtgcgacgggcgcgtccatcgtggcgaggatcgtggaccagtgcagcaacggcggcctggacctggactacgagacggtgttcaagaagatcgacaccaacgggcagggctaccagatgggccacctcaacgtcgactaccagttcgtcgcctgctgagcaacagagctcagccagatccttcctgtgtatgtatgcatccatgcatgcaggcaggcagatgcagagaccgacgtcgttgtaaaacgcgtggccttacttgagatgaataaaacgcaacatgtagcgtcttgcaactgtcgcaagcacagctactactgctactgattaaataaacaggactgcaatgatagtaataaactatttaggcctcgttcgttttgaaaacaggcatgtttttagttctgggccggatggagtgaatcctgctggttcactaaaacatgaaaacttttggtttggtttggtttggttccagttgtttataggtgtagcttcgactcaagccgagaaaa

SEQ ID NO: 121738 - DNA, 1225 bp, Zea Mays
ttttattttttcactagaataggggggcagttgggtgaagggcatggagcacatggcaatgccctcttcccccgccactgcgggtcctgctcccctgtcctgcgtgcggtgtcttcctaagcccaaggaggtgaaatggcggttatgaccctctaccttccgtatccgtacgcagcatgcgtgagctgtcccatgtcctgtacgtaggctctagtccttgaatggtgagaattccacaatgtccggcgcagtaggcagacgcagacctctctgtgtcagtatatataatgctctccatcgaggtataacggacctcatctctcattcttcaattcgtcacttagcttcactcggttctgcttctacacatctatatatcgttagtttggcaaagaaaagaggcaacgacgatggctgctgcggcggcgatgatggtctccggaggacgggcggcgctggcggtggcgggcgtgctctgcgcggtggcggccatggcggcggcgcagcaggcgtcgaacgtgcgggcgacgtaccacctgtacaacccggcgcagaacgggtgggacctgaaccgcgtgagcgcgtactgcgccacgtgggacgccgacaagccgctgtcgtggcggcagaagcacggctggacggccttctgcgggcccgccgggcagaagggccaggccgcctgcggcaagtgcataagggtgaagaaccgtgcgacgggcgcgtccatcgtggcgaggatcgtggaccagtgcagcaacggcggcctggacctggactacgagacggtgttcaagaagatcgacaccaacgggcagggctaccagatgggccacctcaacgtcgactaccagttcgtcgcctgctgagcaacagagctcagccagatccttcctgtgtatgtatgcatccatgcatgcaggcaggcagatgcagagaccgacgtcgttgtaaaacgcgtggccttacttgagatgaataaaacgcaacatgtagcgtcttgcaactgtcgcaagcacagctactactgctactgattaaataaacaggactgcaatgatagtaataaactatttaggcctcgttcgttttgaaaacaggcatgtttttagttctgggccggatggagtgaatcctgctggttcactaaaacatgaaaacttttggtttggtttggtttggttccagttgtttataggtgtagcttcgactcaagccgagaaaa

SEQ ID NO: 121739 - DNA, 782 bp, Zea Mays
aagcaagtagcagctacatacgtcctcctccattaatattggcagcaagctaggatcatcagcatctgagcttattattactaaatcgatcggttgccatggcggggatgagagtcggcaagctggcgctggctgcggtgctgctgtgcgcggcggcggccatggccacggcgcagcaggcctccggcgtgcgcgccacctacaacttctacaacccgcagcagaacaactgggacctcaacgccgtgagcgcgtactgcgcgacgtgggacgccagcaagccgctgtcgtggcgcatgaagtacggctggacggccttctgcgggcccgccggccccaccggccaggccgcgtgcgggcagtgtctcctggtgaccaacacggcgacgggggcgtccatcacggtgaggatcgtggaccagtgcagcaacggcggcctggacctggactacgacacggcgttcaagcccatcgacaccaacggacagggcttccaggccggccacctcaccgtcaactaccagttcgtcaactgcggcgacaactgaactgatagattattcacctgtgcatgcacctatatgtactagcaccattattccaagagttatatggatgtgatcccacacgtaagagccaataaaacatatatgcccagtggaataaactgaattacctaaataccggactactcatgtatcgtcatgtctcacgaaatactacattcgttctcgaatatgtgtcgtccactaattcatttttaaactaaaatgctttggttg

SEQ ID NO: 121740 - DNA, 273 bp, Zea Mays
cgcgctcgacgacctccgaccgtcacgcacgtctctgaatgccaccggacgccgcctctccgtcgctcaagaaatctgcggagtgcgactgctgcttgcctgctagccgcgacgccgcctctccgtcgctcaagaacgacgaggctgtgctgctgtcgtcggcgccagtgtcgcgctcccggagctcctcgatgcgcgcgagcgcctcctcgaagcggccactggaaccgagtgggcgccgagaggcagaaggcgagggcaggcggcgacaga

SEQ ID NO: 121741 - DNA, 237 bp, Zea Mays
atgattattgtacaaattgacaagatcaccggctcaccgatggagaaaaaaaacatatactatttcagagaaaataaatccggacaaattgaactttcatcggcgcaaacaatcactgggcatgcatgttccatccatccatccatggtcctcggtccaacactgaatctatctatctcgcggtttcgccgccagagaagcacccacaacagctggcgaagaagcccgattccttag

SEQ ID NO: 121742 - DNA, 174 bp, Zea Mays
tctgattgaatgcttcaaacctttgtggtggaacctttgtatgtttgaacctctgttgtggaacttggaactatgtgatggaactagtgtgctggaattgtgtatgacttgtgatgagaatgttgtgtatgatggcttttctgtgtattatgattctgtgagctatcattaaag

SEQ ID NO: 121743 - DNA, 1276 bp, Zea Mays
atgcggagtgctgctggagttggtctaagcatgggatgtcatcttggacttgggatagagataacagagtctgttagagggagaatcacggcgagagcgtgctcgtgggcacccctctccgtcaactggggtgcgcgatcgatcgatcgaaatatcgaactgcagttgccaaaaccccaatccggtcttctatttccgatcgagccgcaaaggaggcaggaagaaggccggcgcaggcgcaggcgcggatggcgatgggagcgacggttcgcgcggcggccgcggacgccgtggtgacgttcctgtgggtgctgtgcgcctccgcgctcggtgcctccacagcagccgtcacgtcgtacctgggggtgcaggagggcgccggccactacgcgctcctcgtcaccacgtccctcctctcggtgctcctcttcaccttcgatctcctctgcggtgcgctcggcggcgccagcttcaaccccaccgacttcgccgcctcctatgccgccggactcgacagcccctccctcttctcggttgcgctccgcttcccggcgcaggccgccggcgctgtgggcggcgccctggccatctcggagctgatgccggcgcagtataagcacacgctcgcgggcccctcactcaaggtggatccccacaccggtgccctagccgaaggggtgctcaccttcgtcatcaccctgaccgtgctctgggtcatcgtcaagggcccccgcaacgtcatcctcaagaccttgctgctctcaacctccatcgtctccgtcatcctcgcaggcgcagagtacacggggccgtctatgaacccagctaatgcatttggctgggcatatgttaacaattggcacaacacatgggagcagctgtatgtgtactggatatgcccctttattggggccatgcttgctggatggatatttagggtggtgttcctaccaccggcacctaagcccaagaccaagaaagcatgattactcgtttatggatgctggtttagaagaaataagaaatagaggaaggtcacataagctcatgtgttgtacttgatttcctcaacttcccacaaactgggtgttgtgctctgttacttatttctcatcaataatttatgtttacttgtaattttgggctagtcaggatgtgtttttgtccttttatttagtttttatatgttttctttatgagtacagtaaaatcattgatctcaactgagttggaaatgagctgaggttggctcggcttgctcctctagtgagcctga

SEQ ID NO: 121744 - DNA, 3401 bp, Zea Mays
gccacctatgcagtttttttgaggctgacattagcctgcctagtccaaaaaaggatgaatagaagttttgaattccttgtcgcttcaactcgtctaatacagtatcaccaggaattggatggttgatgcatcatttgttttccattttcaggtcttctgaatctcaagacatccatgtgatccatttcttcagagatcttccagcaccatctcctggcaatgggtggagggcaaatgcttgcctgccttcctctaggtctgatcacgctcctctcgctctcgctgagctccagctgccaaatcgacccccaaacacatgccctcctccagttcaaggacggtctgaacgaccccctgaaccacctcgcgtcatggacgaacgccacctccgggtgccgcttcttcggcgtccggtgcgacgacgacggctccggcacggtcaccgagatctcgctgtccaacatgaacctcaccggcgggatctcgccctccgtcggggccctgcacggcctggcgcgcctgcagctcgactccaactcgctgtcggggcccgtgccgcctgagctggccaaatgcacgcagctccgcttcctgaacctgtcctacaacagcctcgccggggagctgccggacctgtccgcgctgacggcgctccaggccctcgacgtcgagaacaatgccttcaccggccgcttcccggagtgggtcagcaacctgtccggcctgaccacgctcagcgtcggcatgaacagctacggcccaggggagacgccgcggggcatcggcaatctcaggaacctgacgtacctgttcctcgcgggcagcagcttgacgggggtcataccggactccatcttcgggctcaccgagctggagacgctggacatgtccatgaacaatctcgtcggcaccatcccaccggccatcggaaacctccggaacctgtggaaggtcgagctgtacaagaacaacctcgcgggcgagctcccgccggagctcggggagctcaccaagctgcgagagatcgacgtgtcccagaaccagatcagcggcggcatcccagcggcgttcgcggcgctcacggggttcacggtgatccagctctaccacaacaacctgtcggggccgatcccggaggagtggggagacctgcggtacctgacgagcttctccatctacgagaaccggttctccggcgggttcccgcgcaacttcggccggttctcaccgctcaacagcgtcgacatctccgagaacgccttcgacgggcctttcccgaggtacctgtgccacggcaacaacctccagttccttctcgctctccagaacggcttctccggtgagttcccggaggagtacgcggcgtgcaacagcctgcaacgcttccggatcaacaagaaccggttcaccggcgacctaccggaaggcctgtgggggctcccagcggcgacgatcatcgacgtgtccgacaacgggttcaccggagccatgtcgccgctgatcgggcaggcgcagagcctcaaccagctgtggctgcagaacaaccacctcagcggggcaataccgccggaaatcggccggcttgggcaggtgcagaagctctacctatccaacaacaccttctctggctccataccgtcggagatcggcagcctgtcgcagctgacggcgctgcacctggaggacaacgcgttcagcggcgccttgccggacgacatcggcggctgcttgaggctcgtcgagatcgacgtctcccagaacgcactgtccgggccgattccggcctcgctgtcgctgctgtcgtcgctcaactcgctgaacctttcctgcaacgagctcagcgggccgatcccgacgagcctccaggcgctcaagctcagctccatcgacttctcctcgaaccagctcaccgggaacgtgccgccggggcttctggtgctcagcggcggcacccaggcgtttgcccggaaccccggcctctgcattgacggcaggtccaacctcggcgtctgcaacgtggacggcggccacaaggacagcctcgccaggaagtcgcagcttgtgctcgtgccggcccttgtctcggcgatgctgctgctcgtggccggcatcctgtttatcagctaccggagcttcaagctcgaggagctcaagaagagagacctggagcacggcgacgggtgcgggcagtggaagctggagtcgttccacccgctggacctggatgctgacgagatctgcgccgtcggggaggagaacctgatcgggtcgggcggcacggggcgcgtgtaccggctggagctcaagggccgtggcggcggcagcggcggcgtggtggccgtgaagcggctgtggaagggcaacgcggcgcgagtgatggccgccgagatggccatcctcggcaaggtccggcaccggaacatcctcaagcttcacgcgtgtctgtcgcgcggcgagctcaactttatcgtgtacgagtacatgccgcgcggcaacctgcaccaggcgctccggcgggaggccaagggcagcgggcgcccggagctggactggcggcggcggagcaagatcgctctcggcgcggccaaggggatcatgtacctccaccacgactgcacgccggccatcatccaccgcgacatcaagtccaccaacatcctgctcgacgaggactacgaggccaagatcgccgacttcggcattgccaaggtcgccgaggattcctccgactccgagttcagctgcttcgccggaacgcatggctacctcgcgcccgagctggcctactcgctcaaagtgacggagaagacggacgtgtacagcttcggcgtggtgctgctggagctggtcaccggccggagcccgatcgacccgcgcttcggcgagggcagggacatcgtgttctggctttccagcaagctcgcctcggagagcctccacgacgtcctggacccgcgggtcgccgtgcttcccagggagagggacgacatgctcaaggtgctcaagatcgccgtgctttgcaccgcaaagctgccggcgggcaggccgaccatgagggacgttgtgaagatgctcaccgacgccggcacggggccctgcagcccgcgcggacagccgccgtcaagggtctgcagcaacaagagctgctgctgaatttttggagcaggctctgcgtctcttgccaccgaaccgacacatatgcctctgtttcttcgttggattcctggtgccacctgcgttatgtggtaggacaattcgtaggatcatgtacttgcaggtattttgtacaatgattaaactgcagtactccatcctcattaatgtaagccataatctggttaaaaaaactttgaaagttatgttatcacctttttgtttctcttataagttataatgatatg

SEQ ID NO: 121745 - DNA, 1069 bp, Zea Mays
catggccatgtctccgtgtacatatctccgttccggtgcacatcccgccaccgccggacccgtataccatcgctgaatcttagcctcccacacgagagttaaacacgcagacagctcctcgtcgatcccctgtcagttaaccatacccacgagctaagcccacactaagctagccttattagccctgcaatcgctgcatcctctgctgctcatatctattcgcaaaaccagcagctattcttctccctacaactcttcctcgctcgctcaattggccgctcttcttctccatgctgccgcttgtggtgcgcgcgatatcgtccctcgttgacgtcgaactaggagggctgatcaagagctagggagggagggaggaaggccacagtccagcgtgtgcgtctcccagccagtagtccttttgctcctgcacaagcaagcatgtttcccttgtcggcatgttgaatacttgcaacctcgaatcaaggaagcgccaggtcttctgaatctcaagacatccatgtgatccatttcttcagagatcttccagcaccatctcctggcaatgggtggagggcaaatgcttgcctgccttcctctaggtctgatcacgctcctctcgctctcgctgagctccagctgccaaatcgacccccaaacacatgccctcctccagttcaaggacggtctgaacgaccccctgaaccacctcgcgtcatggacgaacgccacctccgggtgccgcttcttcggcgtccggtgcgacgacgacggctccggcacggtcaccgagatctcgctgtccaacatgaacctcaccggcgggatctcgccctccgtcggggccctgcacggcctggcgcgcctgcagctcgactccaactcgctgtcggggcccgtgccgcctgagctggccaaatgcacgcagctccgcttcctgaacctgtcctacaacagcctcgccggggagctgccggacctgtccgcgctgacggcgctccaggccctcgacgtcgagaacaatgccttcaccggccgcttcccggagtgggtcagcaacctgtccggcctg

SEQ ID NO: 121746 - DNA, 480 bp, Zea Mays
gtggtggacttccggatcgtacttagggatttgcccaaacttccggtgaaggcacctgatttctgctttgggaaagaagagatgtagcagcacgaccactacacctttaataaaggaaccactgcttaataatgttgttaatgagggagggtcaagtctaaggaattattatgttctagcctttcatggtagttgagctgattttttggggtgggctgagttacccatttttttaattggtcatgaatgtgctttactacttttgcattttgattatactacgtgagttatctgtcttttatattctgtatgaactctatgttccccccttgttatgcttctttcaagggaggtgctgccggattttgcaatattttctctctttatttcatttcttgtgttgcataagtttagtgggaagggtatttggtaacatccattgtgtgggatcagtaggggtgttacaataaaaacataata

SEQ ID NO: 121747 - DNA, 91 bp, Zea Mays
ctctctttcacgctttccctgaaaccaaagctcgtccaggcaagaatcttccaacagatgatcaccgcacactcttcttgcttgctgatgc

SEQ ID NO: 121748 - DNA, 2385 bp, Zea Mays
acggatccaaattccaaaccgcgcgaacttctgccgctcaaaattccaaatcgtcctgactacccgcgcttcccataatcctatcccgcccgcgcggcccctctcgggattcaaacgccagccgtttgtcctctcaaacccgatcggatctgaccgccctcccaggccgtaacaggatcccgtcggtcatggccgtgataaacgggcgctcgaagcgtgttcgggtgacggcggtgccgcgccctctggagctgcggtcgttcccggccgccggagaggggccgcgcccgctggtcctgctgtcgttcccggccgccggagaggggctgccgccgcgtggtgcgtttcgcgactgtgtacggtcgttcctggctggatccgcggtgccggcggacggcgcgtggcaggtagcctttggagtcgggaacggggtggtcgtggtgatggaggtggtggaagaggacgtcgctaaaactgggatcgagcggatctactgcgatcactgtaccgtcgccggctggagtagacaccctgtttgtggaaggaggtaccatttcataattcggaatgaatacaaaacctgcaagcattgtgaccattgtggtcttatggcccagtcgtttggaacacggtgcccgacatgcaaatatgtgatctcctctgatgatccggaagattgggactataggcagttggataatccacgtcacttgctgcatggtattgtacatgacaatgggtttggtcaccttgttcggataaatggcagagagggtggctctagtcttctgacggggattcaactgatgggtttctgggattggctctgcagataccttagagtcagaaaggtctccttgatggatgtctctaagaagtatgaaacagattaccggatcttacatgccatcactactggtcattcatggtatggccaatggggattcaaactcaacaaagggagctttggaattacatcagaagaatacttaaaagctatggacaacctttccttaactccattatcacacttcttcccgcactcccgatatcctcgaaaccagctacaagataccatttcattctaccgatctctttcaaagcaacctctcaccacaattcgtgaactgttcctctatgtgctgggccttgccaccagcaagagttcaaatatgcactatggatcaatgcataaggagcactcacatacccatgtgcaagacacatggcctgacgaggaaataaaacgtgcaacagaaattgctataaaggttcttcgtgctgttgagaaaacaaggtgggtgaccatgcgaatcctaaaggcagccatgtaccattcaattggttcaccgcagctagtggactactgcctcaagacccttggtactagaacaattgatggaatgatggttgcagttcgatgcaacagcgatactaacaccctagagtacaggcttatggatgaacccatcgttctgcccaatgtatccatgccaactcaagaccatcttcgccgtgacataaagttcttgcatgatgctctcctccacccacatacaatgcatccatacaaaccggaaaactgttatgagcatggcaagaggtctgccatggtccttttggactgcaagcaattcacaaagcactatgacctggaacaggagttcttgcctcaaaacccatccatgttgcacctgtggtgtcaagtagaggtgttagaccaggttggcgatccaccttgcataccaccagagctcctaactcttccgcagacagcaactgtgtctgatctgaaggtggaggcaaccagaacattccgtggcatctatctaatgttgcattcctttgtagccgatcggcttgttgactgtggaacggcaagtgagtcaactcaactaaagctcttgtttggggcaaatggaactgttcgcgtccaaggcaggtgtgccagtggtgaacgcagggttgggatttaccggatggagagaggcgtggataaatggacagtgcgttgctcttgtggagccaaggatgatgatggtgagaggatgctgtcttgtgactcttgccatgtgtggcagcacactaggtgtgttgggattagtgatttcgatcaggtgcccaagaaatatgtatgtaactcatgtaaattacttaacaagcgtaagagcagaggtcacggaccagtttataacattggcccaagcaaaagattcaagattggcgcaggtggctttagctctaggtgggggatttttttgaggcctccagctgacatgtaaatatcaataaaatgacagtgagtttgtatgagataccggtttgtggatgttaacttgtagagtgcttggtttgagtaataagctagtccatcatcttctcact

SEQ ID NO: 121749 - DNA, 2451 bp, Zea Mays
acggatccaaattccaaaccgcgcgaacttctgccgctcaaaattccaaatcgtcctgactacccgcgcttcccataatcctatcccgcccgcgcggcccctctcgggattcaaacgccagccgtttgtcctctcaaacccgatcggatctgaccgccctcccaggccgtaacaggatcccgtcggtcatggccgtgataaacgggcgctcgaagcgtgttcgggtgacggcggtgccgcgccctctggagctgcggtcgttcccggccgccggagaggggccgcgcccgctggtcctgctgtcgttcccggccgccggagaggggctgccgccgcgtggtgcgtttcgcgactgtgtacggtcgttcctggctggatccgcggtgccggcggacggcgcgtggcaggtagcctttggagtcgggaacggggtggtcgtggtgatggaggtggtggaagaggacgtcgctaaaactgggatcgagcggatctactgcgatcactgtaccgtcgccgacttgacagcctgactcctcattaacctgctcggcctgcttctgtgtgttcgtctgaacatgtgtatacattttttcttctacagatgccaatcggctggagtagacaccctgtttgtggaaggaggtaccatttcataattcggaatgaatacaaaacctgcaagcattgtgaccattgtggtcttatggcccagtcgtttggaacacggtgcccgacatgcaaatatgtgatctcctctgatgatccggaagattgggactataggcagttggataatccacgtcacttgctgcatggtattgtacatgacaatgggtttggtcaccttgttcggataaatggcagagagggtggctctagtcttctgacggggattcaactgatgggtttctgggattggctctgcagataccttagagtcagaaaggtctccttgatggatgtctctaagaagtatgaaacagattaccggatcttacatgccatcactactggtcattcatggtatggccaatggggattcaaactcaacaaagggagctttggaattacatcagaagaatacttaaaagctatggacaacctttccttaactccattatcacacttcttcccgcactcccgatatcctcgaaaccagctacaagataccatttcattctaccgatctctttcaaagcaacctctcaccacaattcgtgaactgttcctctatgtgctgggccttgccaccagcaagagttcaaatatgcactatggatcaatgcataaggagcactcacatacccatgtgcaagacacatggcctgacgaggaaataaaacgtgcaacagaaattgctataaaggttcttcgtgctgttgagaaaacaaggtgggtgaccatgcgaatcctaaaggcagccatgtaccattcaattggttcaccgcagctagtggactactgcctcaagacccttggtactagaacaattgatggaatgatggttgcagttcgatgcaacagcgatactaacaccctagagtacaggcttatggatgaacccatcgttctgcccaatgtatccatgccaactcaagaccatcttcgccgtgacataaagttcttgcatgatgctctcctccacccacatacaatgcatccatacaaaccggaaaactgttatgagcatggcaagaggtctgccatggtccttttggactgcaagcaattcacaaagcactatgacctggaacaggagttcttgcctcaaaacccatccatgttgcacctgtggtgtcaagtagaggtgttagaccaggttggcgatccaccttgcataccaccagagctcctaactcttccgcagacagcaactgtgtctgatctgaaggtggaggcaaccagaacattccgtggcatctatctaatgttgcattcctttgtagccgatcggcttgttgactgtggaacggcaagtgagtcaactcaactaaagctcttgtttggggcaaatggaactgttcgcgtccaaggcaggtgtgccagtggtgaacgcagggttgggatttaccggatggagagaggcgtggataaatggacagtgcgttgctcttgtggagccaaggatgatgatggtgagaggatgctgtcttgtgactcttgccatgtgtggcagcacactaggtgtgttgggattagtgatttcgatcaggtgcccaagaaatatgtatgtaactcatgtaaattacttaacaagcgtaagagcagaggtcacggaccagtttataacattggcccaagcaaaagattcaagattggcgcaggtggctttagctctaggtgggggatttttttgaggcctccagctgacatgtaaatatcaataaaatgacagtgagtttgtatgagataccggtttgtggatgttaacttgtagagtgcttggtttga

SEQ ID NO: 121750 - DNA, 1407 bp, Zea Mays
gtgaaagctttgccataaacattttatgattttattgggtagttctataaattctattgtttgcatgcctgaaccttttccttctcgcagatgatatcacaatcatttaggcaggtcgttcttgatgtgaaagttggacccccttcatttgagaaaggtttagctgaggatattttgtctcttgtaagttctgtgtctcctttctagttttgcctagtgagtaatgacatgctttaaatagaatgtgttcttttctttaccgttcttgtacctcttggctcttcacatgtacctaccgtatctgtatcatattatcaaatttctagatcttaattgcaattactgtgcgctatgtacaggtcattcatcataataaagtgtttatgcacaaatgctttgactagctagtaaaattgttaattgtttattttttcttgatcactttttgcttcagggaatgcatccatggcaagcttactgtggtcctatcagtagatatctagctagactcccctaattttgtgttcatttatctctttctgtgatttcttatttctttatctggaaactggaatgctgctatttttgcagcaattcttgtttggaaaacttatcgtgatctatgacaatttttgttctttgcagctcaggagaacaaattgcaagaattgtcttgtctgggcaaaaagtgatgatataggaagagagataattaaattgtctaaagatgttattgtacattgttctctcttttttatttctttatttgaactatccatctgttatctgtacctaggaccacttttactgcacagtttaacaggcgtctcatatgctgtaggttggctatgttgtcatggtggataaatttaccaatagaagaacggagttagtgaggattgaaggggctaaagttgctggcatatatcatcctttgatccatgagaaggttatgaaggtcatgcgcaggcatgacaggagagtttttgcatggactgttgatgatagcagctccatgaagaagatgctgtatgagcatgttgatgccattgtgaccagtaacccttctcttctgcagcagcttatgcaggagaccagagctgagtgtatggaagatggttttgccttaccataggaatttctagctgtcagaacataagggtttaacttctcagcagagaggaccaactagcgagttgagtttgagggattattcataaattagatgataattactttagtttttggcacattccgcacttctgtcatataattgaaataagaaaatatggttagcttgtcatgaaatatgttgtttccttttacagcttgatcagatcaggtcagtgagaagatcgcaacaataatatcattgattaacagaatcatgctttagttaccattgat

SEQ ID NO: 121751 - DNA, 922 bp, Zea Mays
gaacgggggcgacctccaggaaaatcgcagagaatgagggggatcctcttcgggccccggcggcagccgccgccgctcccgctcttccccgccgccaagcgctcctcggcacccgcgaaccttcttttcgctcgcctctatcgcttcctcccggccagccccatcctccggctatgatatcacaatcatttaggcaggtcgttcttgatgtgaaagttggacccccttcatttgagaaaggtttagctgaggatattttgtctcttctcaggagaacaaattgcaagaattgtcttgtctgggcaaaaagtgatgatataggaagagagataattaaattgtctaaagatgttattgttggctatgttgtcatggtggataaatttaccaatagaagaacggagttagtgaggattgaaggggctaaagttgctggcatatatcatcctttgatccatgagaaggttatgaaggtcatgcgcaggcatgacaggagagtttttgcatggactgttgatgatagcagctccatgaagaagatgctgtatgagcatgttgatgccattgtgaccagtaacccttctcttctgcagcagcttatgcaggagaccagagctgagtgtatggaagatggttttgccttaccataggaatttctagctgtcagaacataagggtttaacttctcagcagagaggaccaactagcgagttgagtttgagggattattcataaattagatgataattactttagtttttggcacattccgcacttctgtcatataattgaaataagaaaatatggttagcttgtcatgaaatatgttgtttccttttacagcttgatcagatcaggtcagtgagaagatcgcaacaataatatcattgattaacagaatcatgctttagttaccattgat

SEQ ID NO: 121752 - DNA, 1359 bp, Zea Mays
atatttgtaaataactgtactattgcaaagagcgaacgggggcgacctccaggaaaatcgcagagaatgagggggatcctcttcgggccccggcggcagccgccgccgctcccgctcttccccgccgccaagcgctcctcggcacccgcgaaccttcttttcgctcgcctctatcgcttcctcccggccagccccatcctccggctccttctcctcctcgcactcctctccctcatcccgccggccttcttccacctccgtctccgccgcttccaccaaatgcgcgagaggaagtgcgggtggatcgcgaggccacccatggtgtgcgcgcacggcggtgactccaccaacgccttccccaattcgatggacgcatttcggatggctctcgacgcgcgggtcgactgtgtggaggtggatgtttcgaggtcctatgatggtgtgctctttgctctgcatgacaggcagggatctacaaaagatgtctggtaattctacagcaaaagttggccactggaccacagatgagataaaagcactaaggacgaggtttcagttgtcaaaaagagtccaaaatgaggaagttcccatggcagaggaagctctggcgatgatatcacaatcatttaggcaggtcgttcttgatgtgaaagttggacccccttcatttgagaaaggtttagctgaggatattttgtctcttctcaggagaacaaattgcaagaattgtcttgtctgggcaaaaagtgatgatataggaagagagataattaaattgtctaaagatgttattgttggctatgttgtcatggtggataaatttaccaatagaagaacggagttagtgaggattgaaggggctaaagttgctggcatatatcatcctttgatccatgagaaggttatgaaggtcatgcgcaggcatgacaggagagtttttgcatggactgttgatgatagcagctccatgaagaagatgctgtatgagcatgttgatgccattgtgaccagtaacccttctcttctgcagcagcttatgcaggagaccagagctgagtgtatggaagatggttttgccttaccataggaatttctagctgtcagaacataagggtttaacttctcagcagagaggaccaactagcgagttgagtttgagggattattcataaattagatgataattactttagtttttggcacattccgcacttctgtcatataattgaaataagaaaatatggttagcttgtcatgaaatatgttgtttccttttacagcttgatcagatcaggtcagtgagaagatcgcaacaataatatcattgattaacagaatcatgctttagttaccattgat

SEQ ID NO: 121753 - DNA, 1383 bp, Zea Mays
aagtgaaaacggagttcttcggagtcctatatttgtaaataactgtactattgcaaagagcgaacgggggcgacctccaggaaaatcgcagagaatgagggggatcctcttcgggccccggcggcagccgccgccgctcccgctcttccccgccgccaagcgctcctcggcacccgcgaaccttcttttcgctcgcctctatcgcttcctcccggccagccccatcctccggctccttctcctcctcgcactcctctccctcatcccgccggccttcttccacctccgtctccgccgcttccaccaaatgcgcgagaggaagtgcgggtggatcgcgaggccacccatggtgtgcgcgcacggcggtgactccaccaacgccttccccaattcgatggacgcatttcggatggctctcgacgcgcgggtcgactgtgtggaggtggatgtttcgaggtcctatgatggtgtgctctttgctctgcatgacagggatctacaaaagatgtctggtaattctacagcaaaagttggccactggaccacagatgagataaaagcactaaggacgaggtttcagttgtcaaaaagagtccaaaatgaggaagttcccatggcagaggaagctctggcgatgatatcacaatcatttaggcaggtcgttcttgatgtgaaagttggacccccttcatttgagaaaggtttagctgaggatattttgtctcttctcaggagaacaaattgcaagaattgtcttgtctgggcaaaaagtgatgatataggaagagagataattaaattgtctaaagatgttattgttggctatgttgtcatggtggataaatttaccaatagaagaacggagttagtgaggattgaaggggctaaagttgctggcatatatcatcctttgatccatgagaaggttatgaaggtcatgcgcaggcatgacaggagagtttttgcatggactgttgatgatagcagctccatgaagaagatgctgtatgagcatgttgatgccattgtgaccagtaacccttctcttctgcagcagcttatgcaggagaccagagctgagtgtatggaagatggttttgccttaccataggaatttctagctgtcagaacataagggtttaacttctcagcagagaggaccaactagcgagttgagtttgagggattattcataaattagatgataattactttagtttttggcacattccgcacttctgtcatataattgaaataagaaaatatggttagcttgtcatgaaatatgttgtttccttttacagcttgatcagatcaggtcagtgagaagatcgcaacaataatatcattgattaacagaatcatgctttagttaccattgat

SEQ ID NO: 121754 - DNA, 1518 bp, Zea Mays
aagtgaaaacggagttcttcggagtcctatatttgtaaataactgtactattgcaaagagcgaacgggggcgacctccaggaaaatcgcagagaatgagggggatcctcttcgggccccggcggcagccgccgccgctcccgctcttccccgccgccaagcgctcctcggcacccgcgaaccttcttttcgctcgcctctatcgcttcctcccggccagccccatcctccggctccttctcctcctcgcactcctctccctcatcccgccggccttcttccacctccgtctccgccgcttccaccaagtgcgccctccagccacctagattcgagatcttcaataaggagccttttacgccccgagatctcacttatccaatttattcggtttcttctctgacacgtttgttaatcctttttggttgctgtgttccagatgcgcgagaggaagtgcgggtggatcgcgaggccacccatggtgtgcgcgcacggcggtgactccaccaacgccttccccaattcgatggacgcatttcggatggctctcgacgcgcgggtcgactgtgtggaggtggatgtttcgaggtcctatgatggtgtgctctttgctctgcatgacaggcagggatctacaaaagatgtctggtaattctacagcaaaagttggccactggaccacagatgagataaaagcactaaggacgaggtttcagttgtcaaaaagagtccaaaatgaggaagttcccatggcagaggaagctctggcgatgatatcacaatcatttaggcaggtcgttcttgatgtgaaagttggacccccttcatttgagaaaggtttagctgaggatattttgtctcttctcaggagaacaaattgcaagaattgtcttgtctgggcaaaaagtgatgatataggaagagagataattaaattgtctaaagatgttattgttggctatgttgtcatggtggataaatttaccaatagaagaacggagttagtgaggattgaaggggctaaagttgctggcatatatcatcctttgatccatgagaaggttatgaaggtcatgcgcaggcatgacaggagagtttttgcatggactgttgatgatagcagctccatgaagaagatgctgtatgagcatgttgatgccattgtgaccagtaacccttctcttctgcagcagcttatgcaggagaccagagctgagtgtatggaagatggttttgccttaccataggaatttctagctgtcagaacataagggtttaacttctcagcagagaggaccaactagcgagttgagtttgagggattattcataaattagatgataattactttagtttttggcacattccgcacttctgtcatataattgaaataagaaaatatggttagcttgtcatgaaatatgttgtttccttttacagcttgatcagatcaggtcagtgagaagatcgcaacaataatatcattgattaacagaatcatgctttagttaccattgat

SEQ ID NO: 121755 - DNA, 823 bp, Zea Mays
aagtgaaaacggagttcttcggagtcctatatttgtaaataactgtactattgcaaagagcgaacgggggcgacctccaggaaaatcgcagagaatgagggggatcctcttcgggccccggcggcagccgccgccgctcccgctcttccccgccgccaagcgctcctcggcacccgcgaaccttcttttcgctcgcctctatcgcttcctcccggccagccccatcctccggctccttctcctcctcgcactcctctccctcatcccgccggccttcttccacctccgtctccgccgcttccaccaaatgcgcgagaggaagtgcgggtggatcgcgaggccacccatggtgtgcgcgcacggcggtgactccaccaacgccttccccaattcgatggacgcatttcggatggctctcgacgcgcgggtcgactgtgtggaggtggatgtttcgaggtcctatgatggtgtgctctttgctctgcatgacaggcagggatctacaaaagatgtctggtaattctacagcaaaagttggccactggaccacagatgagttttttgtagataaaagcactaaggacgaggtttcagttgtcaaaaagagtccaaaatgaggaagttcccatggcagaggaagctctggcgatgatatcacaatcatttaggcaggtcgttcttgatgtgaaagttggacccccttcatttgagaaaggtttagctgaggatattttgtctcttgtaagttctgtgtctcctttctagttttgcctagtgagtaatgacatgctttaaatagaatgtgttcttttctttaccgttc

SEQ ID NO: 121756 - DNA, 863 bp, Zea Mays
aagtgaaaacggagttcttcggagtcctatatttgtaaataactgtactattgcaaagagcgaacgggggcgacctccaggaaaatcgcagagaatgagggggatcctcttcgggccccggcggcagccgccgccgctcccgctcttccccgccgccaagcgctcctcggcacccgcgaaccttcttttcgctcgcctctatcgcttcctcccggccagccccatcctccggctccttctcctcctcgcactcctctccctcatcccgccggccttcttccacctccgtctccgccgcttccaccaagtgcgccctccagccacctagattcgagatcttcaataaggagccttttacgccccgagatctcacttatccaatttattcggtttcttctctgacacgtttgttaatcctttttggttgctgtgttccagatgcgcgagaggaagtgcgggtggatcgcgaggccacccatggtgtgcgcgcacggcggtgactccaccaacgccttccccaattcgatggacgcatttcggatggctctcgacgcgcgggtcgactgtgtggaggtggatgtttcgaggtcctatgatggtgtgctctttgctctgcatgacaggcagggatctacaaaagatgtctggtaattctacagcaaaagttggccactggaccacagatgagttttttgtagataaaagcactaaggacgaggtttcagttgtcaaaaagagtccaaaatgaggaagttcccatggcagaggaagctctggcggtaaacattaaccaaaccaatttaatcagttggaaatttgatagttctgatgaatagtctatgtaatccattaagctttaactg

SEQ ID NO: 121757 - DNA, 734 bp, Zea Mays
agtgaaaacggagttcttcggagtcctatatttgtaaataactgtactattgcaaagagcgaacgggggcgacctccaggaaaatcgcagagaatgagggggatcctcttcgggccccggcggcagccgccgccgctcccgctcttccccgccgccaagcgctcctcggcacccgcgaaccttcttttcgctcgcctctatcgcttcctcccggccagccccatcctccggctccttctcctcctcgcactcctctccctcatcccgccggccttcttccacctccgtctccgccgcttccaccaaatgcgcgagaggaagtgcgggtggatcgcgaggccacccatggtgtgcgcgcacggcggtgactccaccaacgccttccccaattcggtcggtgtgacttgtgagaggctgagacggtctcagtgaattcgaatttgttctataacaagagttatttctccattctgttcggattgaggtaaatgtgttgatgagttgttagttttgtcgggatctcatgagtcagatggacgcatttcggatggctctcgacgcgcgggtcgactgtgtggaggtggatgtttcgaggtcctatgatggtgtgctctttgctctgcatgacaggtaattgaactgccactttgctggtgtggtataatgtatcacaaacgtgttgtttttgtaacatgaacatgcatctaaatggaaaacatcaagatcactatcta

SEQ ID NO: 121758 - DNA, 696 bp, Zea Mays
cccacatgcacgcagatgtttgaaaatataaaataaaatcaacaacactgcaaatttactagctcaactacaagaggcatggagttattattcaaaaatgaagtactcatgatgaattccaaacaaaaaatctgacctaataatcaacataatataaattgttgtagctcagtcctatagtcatactgagctactgattagaatgttcaagaatgaaccattagatttcctgtgctaaaatgaggattgatcataagactgatgacgatcaagactatcaaggcccctacaaacaaagtgcatgggaaattagaaagtgaaatgaaataccatgttgaaaacagggccaaagtagctagcaattcaaagagggaaaatgctgcaaaatataatgcttcatgaggtcagtacatacatatttggtaattccatgctaatacactgatgctttaagatgcctgagacatacagttgtttcaacaatagggtcatactagaaacaccagaccagagagataattagccatctgcaagagtcaatcaattaaaatttgcattcaaactaagttaggggaaaaacaatagtgtatgagtgtttagcaaatgttgatgaacaatgtgcaaataatgctacggtagtgtggtagttacggaaacactgcagtgctttttgtctattgtcttagtgatgatatg

SEQ ID NO: 121759 - DNA, 567 bp, Zea Mays
gcctcatatcacatgacgagagtcgctcaaacctggtactgtcaactccagcgcaacgagccaccattgtcatggaattctttcaagcagtcctgccagcaatggtttggtcctccgctgtgcaacaaccctctcggtgaattggctcggcttcccttccagacaaccgtacaagactaccaagagaggttttgggaccttcttgcccatacggcgcccctcacccaggaacaaaaagtccaactattcactgcaggcctcccagaatgcatcaaaattgatgtcgagttgatggcaccacgggaccttaatcacgcactaagcttggcgcgtgcatatgaacgacgttctcaagtgcttgatggcaacgtcatagcagcacccaccaagccagtgagaccgccccaaccaccatcagttccaatcccagcaacacagccaacagtgccaaccataggcaatgcagcgccgcagcgaccattcaagaagctcacacctggcgagatggcagaacgccgaaagctagggctttgttacaactgtgatgaacaatatgttcgcggccat

SEQ ID NO: 121760 - DNA, 553 bp, Zea Mays
gtggattcgccgtcgattcgagtctgcgatggcggcggcgaagctgacaggcaacgccgtggcggcggcgatggcgggggacaccaacctcaagccggtggtgcaggtcgacctccggagcatcgcggtcaccggggccccgggctccgggcccaggttccgcgccatcatctccgatggcgtcgccacggggcacgcgctcttcgcctcgcagctctgcgacctcgcgcgctccggcgtcgtccgccgcggctcggtcgtgcagctcctcgactacatcgtcaacaacgtcggtccgacccgaaacagaaagtatctctctctcccctcttctctcctcttccgcccctcccacccgactggatcgatgtgtgttccatttggttgcgctcttgtgggtttggtttatggttcacgcctaccaggctaccaggcatacgaaattgggtctaatctgtttgattatgtgcttgtttgttcgatctagtagttgcgtgagagttgcattccgttcaattgggccgttggcttcggattaaccagtgtatgatat

SEQ ID NO: 121761 - DNA, 1605 bp, Zea Mays
aaaatccattcacatcttgtttgtgtcgtgtgtgcgatccgtgcaggccgctgcgtatggtctgcccgtggtggccaccaagaacggcggtccggtggacatcatcaaggcgctgcacaacgggctgctggtggacccgcacgacgaggcggcgataacggaggcgctgctcagcctgctagccgacaaggcgcggtgggccgagtgccggcgcaacggcctccgcaacatccaccgcttctcctggccgcaccactgccgcctctacctctcccacgtggccgccaactgcgaccacccggcgccgcaccagctgctccgcgtcccggccagcccgcgcgccgcgctcgccgagcatggcaccgacgactccctctcggagtcgctccgcggcctctccatctccatcgacgcctcgcacgacctcaaggccggggactccgccgcggccatcatggacgcgctccgccggcgccgctccgccgaccggccgccgagctcggccgcgagggcgatcgggcacgcgccgggccggcggcagggtctcctcgtcctcgccgtcgactgctacaacggcgacggcacaccggacgccgagcggatgaagaaagctgtcgacctggcgctgtcggcggcggcagcggccggcggccggctcgggtgcgtcctgtcgaccgggatgaccatagccgaggccgcggacgcgctcagcgcctgcggcgtcgacccggccggcttcgacgcgctcgtctgcagcagcggcgcggatctctgctacccgtggagggaggtcgcggcggacgacgagtacgcggggcacgtggcgttccggtggcccgggaaccacgtgcgcgcggccgtgccgaggctcggaaaggccgagggcgcgcaggaggcggacctcgccttcgacgaggccgcctgctccgggccttgccacgcctacgccgcggcgggcgcgtctaaggtgaagaaggtggactcgatccggcagtcgctgcgcatgcgcgggttccggtgcaacctcgtgtacacgcgcgcgtgcacgcgcctcaacgtcatcccgctctcggcgtcgcggccgcgcgcgctcaggtacctgtcgatacaatggggcatcgacctgtccaaggtggccgtgctcgtgggcgacaagggcgacaccgaccgcgaacggctgctccctggcctgcacagaacgctggtcctgccggagctagtttgccacggcagcgaggagctgcgccgcgaccaagacgggtttctggcagaggacgtcgtctccatggactccccgaatatcctcaccctcgccgagtaccaggcggcggtcgacatcctcaaggctatttgagagtccgggattatgatacatgatctgctccgacattccagctgttggttccacactctgctggggttattttggacggacagttaaaatttcacagcgaatgactgcaaactttatataaaaaagatacatgtttttgttttcggttacttttattttttttggaaggggcttatggtataagtgtacatgaatcttttggtgcacatagtatacatattaaattatatttcctctatttcaaaataata

SEQ ID NO: 121762 - DNA, 3303 bp, Zea Mays
cagcgaggaggaggaggagcagaggcggcgaccatggcggcggggaacgagtggatcaacgggtacctggaggcgatcctggacgcgggcacgaggctgcgcgggccgtggcagcagcagggcggcgcggcttcgctgacggccgcgctgccgaggctgctggcggaggccggcggccagcagggcgccgcggcgtacagcccgacgcgctacttcgtggaggaggtggtgagccgcttcgacgaccgcgacctccacaagacgtggaccaaggtggtggcgatgcgcaacagccaggagcggagcaaccggctggtgaacctgtgctggaggatctggcacgtcgcgaggaagaagaagcaggtgcaacgggagtacgcgcggcagctggcgcagcggcgcctggagcaggagctgggcagccgggaggccgccgaggagctctccgatggcgagaaggacggcgcccccgacgccgcccagcagcctgtgtcggtggcggcgcccgacggccggatcgccaggatcgggtccgaggcccggatcgtgtcggacgacgagggcggggacggcggcaaggacgacaggaacctctacatcgtgctcatcagcatacacgggctcgtccgtggcgagaacatggagctcggccgtgacgctgacaccggggggcaggtgaagtatgtggtggagctggcccgggcgctggcggcgaccgccggcgtgcaccgcgtggacctactcacgcgccagatctcctgcccggacgtcgattggacctacggggagcccgtcgagatgatcacccatcaggccgacgacggcgacggcagcggcggcggggcctacatcgtgcgcctcccgtgcgggccccgcgacaagtacctccccaaggagtccctgtggccgcacatccccgagttcgtggaccgcgcgctggcgcacgtcaccaacgtcgcgcgcgcgctgggggaccagcagcagcagcagcccgacgccggcgcgggcgcgggcgcggccgccccggtgtggccgtacgtggtccacggccactacgcggacgcggcggaggcggcggcgcacctggccagcgcgctcaacgtgcccatggtcatgacgggccactccctggggcggaacaagctggagcagctgctcaagctgggccgcatgccgcgcgccgagatccagggcacctaccggatcgcgcgccgaatcgaggccgaggagaccggcctcgacgccgccgatatggtggtcaccagcaccaagcaggagatcgaggagcagtggggcctctacgacggcttcgacctcatggtggagcgcaagctccgggtgcgccgccgcaggggcctcagctgcctcggacgctacatgccgcggatggtcgtcatcccgccggggatggacttcagctacgtcgacacgcaggacctcgctgagggcgacgccgacctgcagatgctcatgagtcccggcaaggccaagaagccattgcctcccatttggtcagaggtcctgaggttcttcgtcaacccgcacaagcccatgatcctggcgctgtcgcggccggaccccaagaagaacgtcaccacgctgctcaaggcctatggcgagagccgccacctccgcgagcttgccaaccttacactgatactggggaaccggcatgatatcgaggagatgtccggcggcgccgccacagttctgacggcagtgctcaagctcatcgaccggtacgacctgtacggctgcgtcgcctaccctaagcaccacaagcagaccgacgtgccgcacatataccgccttgccgccaagacgaagggagtgttcattaatcctgcacttgtggagccattcggcctcaccctcatagaggccgctgcgtatggtctgcccgtggtggccaccaagaacggcggtccggtggacatcatcaaggcgctgcacaacgggctgctggtggacccgcacgacgaggcggcgataacggaggcgctgctcagcctgctagccgacaaggcgcggtgggccgagtgccggcgcaacggcctccgcaacatccaccgcttctcctggccgcaccactgccgcctctacctctcccacgtggccgccaactgcgaccacccggcgccgcaccagctgctccgcgtcccggccagcccgcgcgccgcgctcgccgagcatggcaccgacgactccctctcggagtcgctccgcggcctctccatctccatcgacgcctcgcacgacctcaaggccggggactccgccgcggccatcatggacgcgctccgccggcgccgctccgccgaccggccgccgagctcggccgcgagggcgatcgggcacgcgccgggccggcggcagggtctcctcgtcctcgccgtcgactgctacaacggcgacggcacaccggacgccgagcggatgaagaaagctgtcgacctggcgctgtcggcggcggcagcggccggcggccggctcgggtgcgtcctgtcgaccgggatgaccatagccgaggccgcggacgcgctcagcgcctgcggcgtcgacccggccggcttcgacgcgctcgtctgcagcagcggcgcggatctctgctacccgtggagggaggtcgcggcggacgacgagtacgcggggcacgtggcgttccggtggcccgggaaccacgtgcgcgcggccgtgccgaggctcggaaaggccgagggcgcgcaggaggcggacctcgccttcgacgaggccgcctgctccgggccttgccacgcctacgccgcggcgggcgcgtctaaggtgaagaaggtggactcgatccggcagtcgctgcgcatgcgcgggttccggtgcaacctcgtgtacacgcgcgcgtgcacgcgcctcaacgtcatcccgctctcggcgtcgcggccgcgcgcgctcaggtacctgtcgatacaatggggcatcgacctgtccaaggtggccgtgctcgtgggcgacaagggcgacaccgaccgcgaacggctgctccctggcctgcacagaacgctggtcctgccggagctagtttgccacggcagcgaggagctgcgccgcgaccaagacgggtttctggcagaggacgtcgtctccatggactccccgaatatcctcaccctcgccgagtaccaggcggcggtcgacatcctcaaggctatttgagagtccgggattatgatacatgatctgctccgacattccagctgttggttccacactctgctggggttattttggacggacagttaaaatttcacagcgaatgactgcaaactt

SEQ ID NO: 121763 - DNA, 357 bp, Zea Mays
atggagcagccaagaatacactatacatcctactgtaaacagcaacgaagacaagtggctggactttcttctacctgggcgcctgaaagaagcaggagttgtacaggggcagctcaatggcgggtgcaggcccatttggctctagtctccggtctctctctccactctaactgcatgccgacccgcgtctcctcgaccatcaccaccttgacggtctccgtgaagatgatgagggtcatggacaagctcaaagggaagaagcgcggagactgtggtgactcctcgaggtcacggtcgactaggggttcaggtggtggggatacatcctctatgttgttccagggctctaaaccctaa

SEQ ID NO: 121764 - DNA, 2517 bp, Zea Mays
atggccacgctcaggccccagatggggaaggcagtggcacccaccacggcgttgggggcaaggtcgataggagtggcgtccgcgacagccccaatgaggacggcgctcatgcccacaccttaccttaggactacaactcccttctcaagggatgtcgacaacatagcgctcttagcaacattggcaacaaaaaaggcaatcatctacttgaacaaccttgtcattttcgaccaagagcagcgcgaagactcgccagtggcttcgcagcgggctgatccctgtaggcgtcgctcggtgtgggtccagatcagcaaacctgaggctgctgcgatgaaggaagacccccctaggatggctgatgatggggagtcacatagaagcctccgctacaaacgaaagagaagacgatccaagcatggaaaaggatcatcaaggtctgtggtcgcccctggccaggcgttatcggcctcgtcagatgatgcggtacctccgtcgattagacagacccctgttcagagggcaggtgatcaaggcgagaggaactggggggctttttcttcctgtacccttgaattcagtgatgatatggctcgtgaagaagcaaatatgagaagagctctcttcgttacaatagtgggaaccagaccattagtgatggggcctgaggttcttgaggaagttgctcacagttttaacgtcaagtttgaggatatgaagattcatcaaaccaagccagaggattttcttctgtttttacctgacgaagatactgcttcaagggtgcttaatggcggcaagattctaagaggacctcgtttcagcctgatattcaagcggtggacgagatgctcacacgcctcatcttcgataatgtcagggctggtagacttggaaatcagagggatccctgagcatgcttgggcactttctacggcaaagagtattctgattgactcctgtttgatcgctgaagtgcaccctgacactttgctcaagcaagatctatcttcgtttgttgtcaaagtttggtgctttaacccggagaaactccaacgtgattcggttcttcacattattgagcctgggttgcagatgtttgagaaaagatgcctcacatacaagattcaagttagcgtgctgcgggctggttcaagcatcacaccagcggaccccacttcatctgtggctggcagaaaacccccaggtgatgaagacggaaatggaacccaagacccccatcctcgacttccaggtggctctcaggtccagcggaggtcgttgcatcttcgattgggcccacagtcgtctttaggccgcggcaacgaggcgtctgcgcagtcctgcgcctcgaaggaagtgacgggagatactgggcgggatctgcatttaacactgggcactgaagtgtctccgacgtccgaggtgaggtcgctgcaccttcgccagggcccgcagccgcctttgggccgcgacatcgaagcgcccacgccgccatacgcctcgcgggagaattctggagatactctgcgtgttatgcaattaatgccgccgacgaccgaggagccccttcatgctgaagcgcatccagaggcgtctcctcacattgatggcgcaccttcaccagattttgaagcggcgggacaagtaatgatggagaagagaaacagtccccaagcctgctactctgcggtacacgaaactggcggggtgacttcccgccttgagattaatgggcagttaaggattctcaggccggatccggcccgttgcctggttgggtcgctagagacatctgggcctgttcctgtctcgcctcatgagccggctgggccgctggagacatgcatttcattgcctgtctcgccccaactgtgctctgggccgctgaagacgaacaccctcatgatagtctcgccccaactagtttctggtttccctgagtcaacaattccaagtgctggcttgcctctacagatgctgggaatggctgggaggatggcagtaacagtccgacacaacgaagcaacaaaagctctcaaggtctactttcgcagaagaactaaggcacatcctctccaaatcagtcagaatgaggggacagaggccagcataattcagacaaacaacacctttcactcggcctcgagacttctgaaccaatctttatcagggaaggaagaattcctcagaaaaatcagtaaagcagctgacgaaatactgccggctccaaagcaagccatgaatacctcatcagccccacaaccttctcaggtggctgctcctaggcgcagccgacgcattgcgggggctggggttgaatttaatatgcaagattggggtaacaggtctactaaaaaggctatgagagcattgcatatcttatctgatgacaaaggtactacccaggaagcactagacgcgtatgcaaagattttcaagcaaccgttgtcccataaccaggtagaggctttggcagccctctttggttggacccctccacctggacttgtttgttag

SEQ ID NO: 121765 - DNA, 645 bp, Zea Mays
agcaagcgagtaagcaaccaagaaacgcaggcttgggccatggccagtaaccagcaccaccacctcctccttgctctattcctcatggctgctgccggcaccaccacagccaccacctcatcatcaggcaactcgacgacgccgacggcgtacgagatgctggagcggtacgatttcccgcgcggcatcctcccggagggcgtgcagcggtacgagctccgccccgacggctccttcgaggtgttcctctcgggtcgtagctgcgagttccgcgtcggcgaccgctacctgctccggtacgaccgccgcatcaccgggacggcgcgggaaggctccatccgggcgctgcagggcgtgagcgtgaaggtgctgttcgtgtggctcggcatcaccgaggtggaccgctccggggaccagctcagcttcctcgtcggcccgctcgccgcgtcgttcccgtcgcgaaacttcgccgagagcccgcgctgccagtgtggcttcgactgcgcctacggcgcctgggacgccgccgccgccgccgcgtcctgataccaagcttcctcatgagacatacctcctgctgctgctgctgctactgctactgctgctcgtcagttgtcacagttactgttgctgaattcgttcatg

SEQ ID NO: 121766 - DNA, 111 bp, Zea Mays
taactgcagatgagtaaagataggcaaagaaaccatttggttgaagcatatggaatcaagtttgtgtcaattttacgttacaataacacataacccaaatttatttcagac

SEQ ID NO: 121767 - DNA, 507 bp, Zea Mays
tgataaatatataaagatttatttatacactctttactaatacacatttcagtgcaaccaaccaaactaaatctatgtctgatctacacgagtctacaaacacaaccaaacaaaagtgtttgcactaatacacatttcagtgcaaccaaccaaactaaatctatgtctgatctacacaagtctataaacacaaccaaacaaaagtgtttgcacgaactcaccttggttctactaatactggccagactcatacggacctggctcgacttctacggtaacaatcacatagtatgtgattcagcaatgttttccacaatcgcttgcttggggacaagcatgtttgacagagggggcacatgtgacggctgaagtctgaagatcacgaagaaactcgagctggcagtgtgccgggaggtctagtaatccgaggtgtggagtagcagccatgttggcttgtgggtgtgtgggccgttaatgacccagaatactgttgggcctaggagttgt

SEQ ID NO: 121768 - DNA, 639 bp, Zea Mays
atggtgctcgacaacagcgctccgggcgtcgtcgcggccgggcagtcgtaccgcggcgtgaggaagaggaagtggggaaagtgggtgtcggagataagagagccgggcaagaagacgcgcatctggctgggcagcttcgagtctccggagatggccgcggtggcgcacgacgtggcggcgctgcgcctgcgcgggcgcgaggcgcggctcaacttcccgggcctggtccaccgcttccgccgcccggccaccgccgagcccgacgacgtccgcgccgccgcgctggaggccgcggcccaggtccggttcaggcccgacctcgtcgcaatgcaggcctccggcggggagggcggctgctgcttcggcggcgccggcggcagcgacgacaccggcagcccggagccgctggctgcaggcgaggacgatgtggcgtgggacgtcttgctcgggaccgacgtggaggtggtggagtcgcccaagatgtgggatgagctggccgaggccatgctcgtggccccgccagcgtgggagggcgatatggaggacactgacgactgggcccagggtaatctctgggacctacctgtctgggccctgggccccaccggcagatgcagcttcacatcctttggtttttag

SEQ ID NO: 121769 - DNA, 118 bp, Zea Mays
caccatacttaatgtctccttccctaatgtgttgtacttgtatattttagccctcgctggctctcaccttctttttaatataacaggcaattctcttgccagttttcaaaaaaaaaaa

SEQ ID NO: 121770 - DNA, 254 bp, Zea Mays
aaaaggaaaaaaagaaaaagaaaacaacagtgtctgcaacaaataatcgtcgagaactgttagttaaccaatccaaaaaaataatctaatgtttgcacggggaggaaaatccacgattctaaactcttcatatgcctcaaaaaattaacggcagctacggtaagtatgaattcaagttcgaaaaatggataataaaaatagaaggatcactgggaataaatcgctcaccaatggttcccgctgtggaggcgggc

SEQ ID NO: 121771 - DNA, 114 bp, Zea Mays
ccattaaatattctagcataaacatgggtaggaaccaactacccgaccagcgaacacgacgctggaccaccttcgtccatcccaccacatgcgcaccttatgtttacgcaaaac

SEQ ID NO: 121772 - DNA, 1468 bp, Zea Mays
atgcgccatatctctttcttctccccctctctactctcatttactcatgaggtcatataagacatgaaggtgttcaagggaaagatttgggcagcaataggctcactcatggaccctgccggcacagcgtccaccaccaagtcctcctcggcggccgcagttcccgaccgagcgctcctcactgacatcgaagcggccatcgagcggtgcaccggcagcagcggaggcgtcaacgacgacaggcacgtccacgagatcctcttcctcgtctccaacgcgccgggcgcgatcaccttcctctcccgccgcatcacggcgcgcctcgagaacgcacgcgccccggccgccgcgctccggtccttgctcctcgtgcaccgcctcctccgcgccggcgaccgatacttcgagcaggacttccgcggactctgggcctcccgcgagctccgcgtcgacgcgccctgctcgcccctcaccgccggcacgggtgcggcggtcgccagcggagcgtgcgccttcgtccacggctactcggcctaccttgaggagcgcatgcagtgggtcataaaccaggccggcaacctggagcccgcgcggatgacaccacagactgaccacggcgccggcaagcccccgcacttctcttcctcttcttcctcctcctcctcctcctcccacgacgccagcgccgagacgctcctgtccaagctcgctatgtgccagagcctgctagacctcgccatccagctgctgccggacaacaacacgagcgccagcgccgccgtgcggtcggccttcggcattgtgctccgtgagagcttcaaggtctacgttgccttcgcggaaggcgtcgacgtcatgctgctgctgtccaggagcctcgccgggctgagcaagccttcgagggtcaccgctcacgagatactgaagaaggcgtgcgcccagacgccggagctcaaggagttctacctcaagtgcaagaggagtaacgcgagcagcacgagcctcgagtacccgctcgtcagggtcgtcacgccagcgcaggcctttgcgctggagatgatggagccggtgacgatgatcccgatcccggaacaagatggctatcctgaagaggtcgaagccaaacctgaagcagaggcgatcgacagtggtgcttcgccgttcgcgcacaagatggagaccacgatcagcacggtgtgggtccagttcgatgatgaggaccagaagctgatgaccactgctgctgctggccactccttgaaagccgtgcagccaagctagcaagctagccttttggagttcttgcaagtaaattctaagtgtgttaattttgcgttctccggattgagcggtcttgttcctctcttcttgatattcttgtgtgcaaggttgattatttgttttgaaggatttgtaagtgtctcgattcagctgagaataagcaaataattcttcgtctttgccttcc

SEQ ID NO: 121773 - DNA, 2390 bp, Zea Mays
gacctcttctaaaaatcctggtggctggctctcgttgtcctcaagcagtcaagctcctcctcctcctcccccccagtccctcccaggctcccaccccgccttgctcgcagcctccccaaaaccctagccctagccctagccctagctctcccacacccgcactgggagatggacggcggcggcacgcaccgcacgccggaagacgtgttccgggatttccgcgcgcggcgggctggtatgatcaaagcgctcaccaccgacgtggagaagttctaccagcagtgtgacccaggtgagctcgcgcgcgcgcgcgttcctccgattcgccgcgcccgtgcctcggattcgcacgattcggtggcgttcgtgccggaaacttgtggtcctggaggcactagactgggggagggtttgtgtgattttttttttgtgttcgtcgctgagacgaggaactttttttttggtggatttggcactggttttgggggtggcttggcttcttgattcgatcgattccctggggattttaggggaatttgtactctgctggttttcggaattgtttgccttgaagttgaaggcaaagcttctctgctttttaccccaggcagaaaagtttggtcgggattattctctgctggtttggtgcttcgatccagtagcggaggattagtttcgtgctagaaaaaggatgttggacgaatgaggtacaggagggcgctctgttttttctccccttggattgagctaccttctaattggatgacactgtactgtcttgagtacgtatataagactgaaaaaagtagtggcaggtgaccacgttgccagcccacctcacgcggggtatttttgggctttcgtttgggccagccagaactttgggtagctttcagctacaacctcgaaaggaataaaaccaataggaaagtcattggagcataggtagcaccgatagtctggcacaaggttcattggcgtcctagtggaactctcctctctctctctcttcttttataacaaaacatttttaccatttcaactcgtaggttccttgttgctatgtagttcatggctactgttctacattcactaaattaggttatagtaataccttgctggacagttagcaccttatccttgatggatatagctctgtacaaagttgtggattagtaccatggcttcctgtttgttttagcaaagttaggcagagtataaattccaatttgcccacttcttttccttctttggtctccttgtttcactattcttgggtcatttgcagttcttatcgaactttcctggtcctggattcttttaattagatagcatggaagaaaggatcttgacaaaaagacctagaatcttaaggttttgacgttttgtttgcagagaaagagaatctgtgtttgtatggtcttcccaatgaaacatgggaagtgaacttgcctgcagaggaggttcctcctgaacttccagagccagctctgggaattaattttgctcgtgacgggatggatgaaaaagattggctgtcactagtcgcggtgcacagtgatgcttggttgctggctgtggccttttacttcggtgcaagatttggttttgacaaagaatccaggaagcgcctttttgtcatgattaataacctccctacaatatatgaagttgtcacgggaactgccaagaagcaaaccaaggagaaaactccgaaaagcagcagcaagagcaataaagctggcccaaaaccgccacgccagccagaacccaactcaaggggttcgaagatgccacctccgaaggatgaggatgacagcggaggcgaggaagaggaggaagaggaagatcacgaaaacacgctgtgtggttcttgtggtgacaactacggacaggatgagttctggatatgctgcgatgcgtgcgagacttggttccatggcaagtgtgtcaagatcactcctgccaaggccgaacacatcaagcactacaagtgtccgaactgcagcggtagtggcaagagagcccgagcatgatgatgctggatatatccatctctcatgcctgacttgatgtaaaacacccacatggggaccgaatgcccgatggttgttgctttcagtgtaggaccagctgtagggtcttgatgtgctgtttgctgtagtatgtcaaagacgttctagatctattgttagtaactagcaactaattgtagtagcctgtatttcttcaatcttctcccagggcgcctgtgctgaactcaaactgttttagatctaagttgtgcattatgtatcactcatgttagtttgttaaaaaatgtgttagcattcgtatgaaacgccaaccatgtttacaaattaattaacttcaagtctattttgctcgca

SEQ ID NO: 121774 - DNA, 1287 bp, Zea Mays
gacctcttctaaaaatcctggtggctggctctcgttgtcctcaagcagtcaagctcctcctcctcctcccccccagtccctcccaggctcccaccccgccttgctcgcagcctccccaaaaccctagccctagccctagccctagctctcccacacccgcactgggagatggacggcggcggcacgcaccgcacgccggaagacgtgttccgggatttccgcgcgcggcgggctggtatgatcaaagcgctcaccaccgacgtggagaagttctaccagcagtgtgacccagagaaagagaatctgtgtttgtatggtcttcccaatgaaacatgggaagtgaacttgcctgcagaggaggttcctcctgaacttccagagccagctctgggaattaattttgctcgtgacgggatggatgaaaaagattggctgtcactagtcgcggtgcacagtgatgcttggttgctggctgtggccttttacttcggtgcaagatttggttttgacaaagaatccaggaagcgcctttttgtcatgattaataacctccctacaatatatgaagttgtcacgggaactgccaagaagcaaaccaaggagaaaactccgaaaagcagcagcaagagcaataaagctggcccaaaaccgccacgccagccagaacccaactcaaggggttcgaagatgccacctccgaaggatgaggatgacagcggaggcgaggaagaggaggaagaggaagatcacgaaaacacgctgtgtggttcttgtggtgacaactacggacaggatgagttctggatatgctgcgatgcgtgcgagacttggttccatggcaagtgtgtcaagatcactcctgccaaggccgaacacatcaagcactacaagtgtccgaactgcagcggtagtggcaagagagcccgagcatgatgatgctggatatatccatctctcatgcctgacttgatgtaaaacacccacatggggaccgaatgcccgatggttgttgctttcagtgtaggaccagctgtagggtcttgatgtgctgtttgctgtagtatgtcaaagacgttctagatctattgttagtaactagcaactaattgtagtagcctgtatttcttcaatcttctcccagggcgcctgtgctgaactcaaactgttttagatctaagttgtgcattatgtatcactcatgttagtttgttaaaaaatgtgttagcattcgtatgaaacgccaaccatgtttacaaattaattaacttcaagtctattttgctcgca

SEQ ID NO: 121775 - DNA, 1781 bp, Zea Mays
gtggctcgctagctagtgtgcctccgcatgcatccagtgctggccagccggtgagcactgccgctcgccgcatcaggtagtagggcgctagctagccatggctcgcgtcgccgccatggtggtggtgatggtgctcctccagcagttggcctcctcgtactcgtacaccgtcgcggcccacgccgatgctgctggcgtgcttggccgcaaggcgggcgtcgtcgtcgacgagactccggtggagaaatcgccggctgggccggggaggtacgcagtcatcttcgacgccggcagtacggggagtcgggtgtacatcttccggttcggcaggcagatggacctcctccgcatcggcgacgagatcgaattttttgccaagttgaagccaggtctgagctcgtatgctgggcgaccccaggaggccgcaaagtccattctgcctcttctcgagaaggccaagagcattgtcccctcatggcttatgaaaagaacccctgttaagcttggagcgactgctggattacgccttatcggaaaccaacaagcagaccaaatcctcgatgcggtcagagacctggtccacaagaagagcaaattccagtacaagcccaactggatcaatgttcttgaggggtctcaggaagcatcctacctatgggtcgctctgaattacttgctggataaactgggaggggagtattcccagacggtaggcgtgattgatttgggtggcgggtcggtgcaaatggcgtacgctgtctccgcaaacgctgctgcgagagctcccgcggtgcctgacggcgaggatccctacattaccaaggagtattttaaagggaaacagtacaatgtatacgttcacagctacttgcgctatggttcctttgcatcacgagcggagattctgatgtccaagaacggaccattcagctcctgcatgctgcgcggatttagtggtaaatatacctacaatggacagcagttcgatgcgactgctagaccagaaggagcattgtatgacaaatgcaggggagagattgccaaggcgatgaatctcaaggcaccatgcaagacagcaaagaactgcaccttctgtggtgtgtggaaagggggaggtggagctggccaaaacgacatctacgtcgcgtcaggtttctactaccttgcctcacatgttgggttcatagatagcaaagctccaagcgcaaaggcccctcctgccgcattcagggctgcggctaagaaggcctgcaaattcgatgtcaacagagcaaaagtggcctacccagatgtttctaacagtgatgtgccgtacttgtgtatggatcttacttacacgtacacattgctcgttgacggcttcggtctgcagccaatgaaaaagattacatttgtatccaaggtgaagcatggcgaatactacatcgaagccacatggcctttgggtacggctattgaggccgtgtcaccgacaaggcagatcggaaactaatgggctgctgctcgcactgaactgaactctggatttagcgcatgttatcatggttgcagttagcgctcctgacctataatatttgactctcaaataatttctgtactgctgctcggcagcgtgcatgcaaactgagcattttcgagtcagcctctgcgtgtgtgcgggctaattcaactatgaaattcattcgaatttctttccactttcactttggtatcttcagtgaatatgtaaatctttgatgttcttctgctttaatcctgtgacatgtctcacacaaagctac

SEQ ID NO: 121776 - DNA, 291 bp, Zea Mays
gtggctcgctagctagtgtgcctccgcatgcatccagtgctggccagccggtgagcactgccgctcgccgcatcaggtagtagggcgctagctagccatggctcgcgtcgccgccatggtggtggtgatggtgctcctccagcagttggcctcctcgtactcgtacaccgtcgcggcccacgccgatgctgctggcgtgcttggccgcaaggcgggcgtcgtcgtcgacgagactccggtggagaaatcgccggctgggccggggagtcctaaaggtattcgtgaccccgg

SEQ ID NO: 121777 - DNA, 198 bp, Zea Mays
atggcgagatccagcgttaccgtgcgagtgcgagagtccgagactgagagggacgaggaggacacgtccacggaggcgccggagcggagatggagaggccgagagcggagaccggagatggaggagatggacgagaggcgagacggcggtcgcagtcgcagcggagaggagcgactgagcgggtgcgcggcgcgatag

SEQ ID NO: 121778 - DNA, 1953 bp, Zea Mays
aattatttgcaggtttttatatcggcttcgctgtgcgttcggtccaataaccgagtcccacgtagcacgcacacccctctatttaatcgcccactcgcctgtctgcgaggccgcacatcccattccccacatctcaagtgaagagaagtagaactagtggagagaggagaacaggagattagatcagctcgcacgcaagccaaaggaaaaggcaagatgcggagcccaaggggtggaggcggcctggagcacgtggatctgattcccggcatccccgacgacgtcgccgtggactgcctggcccgcgtcccgcacgcctcccaccgcgcgatgcgccgggtctgccgcggctggcgtagcgccgccgcggcgccggccttcgcgtcggcgcgcgccgcggcgggcgccaacgaggacctggtgtacctgatgcagttcgggaacccgtccgccgacgacgggcccaaggacggcgacgaggggccgggcaacgccccggcgtacggcgtggcggtgtacaacgtgacgacgggcgagtggcggcgggagcttggcgcgccgcccgtggtgccggtgttcgcgcagtgcgcggcggtggggacccggctggccgtgctgggcggctgggacccgctgaccttcgagcccgtggcggacgtgcacgtgctggacgcggcgacggggcggtggcggcgcggcgcgcccatgcggtcggcgcgctccttcttcgcgtgcgccgaggccggcggcaggatctacgtggcggggggccacgacaagcacaagaacgcgctcaagacggccgaggcctacgacgcggaggccgacgcctgggacccgctcccggacatgtcggaggagcgcgacgagtgcgacggcatggccaccgtggccggcgaccggttcctggccgtcagcgggtaccgcacggcgcggcagggcgggttcgagcgcgacgccgagtggttcgacccggcggcgcgggcctggcgcaggctggagcgcgtgcgcgcgccgccctccgccgcgcacgtcgtcgtccgcggccgcgtctggtgcatcgagggcaacgccgtcatggagtggatgggcacccgccgcgggtggcgcgaggtggggccctacccgccggggctcaaggccggcacggcgcgcgccgtctgcgtcggcggcggcgagaaggtggtcgtcaccggcgcgctcgacggtgtgggcggctgcggcggccggcacgccctctgggtgttcgatgtgacgagcaagagctggaccgtggtgcccccgccgccggagttcgccggcttcgtgttctccgttgcgtccgtccggatctgagaaaacctagatcttcttcgtcctgtccgtccctccgcgatcgatcaagagacgtaaaggctactgctagtgctagtgctagtacggtagtacctgctgtatgtccgtgcgccattgctggatctgatgaacactgctagttcgagatctgcgctcccgtgtaccatggatctgggcatctgcttggtacccgtacgccctgccatcgattcgtccaaggaagtgtaaggtaaggtggtgacccgacgccagccagatgagatgagatccattgaagccgacagccgagggttgggtgtaaaatatgggtgtggtgtttttgtcccgaggtgaaggacacagactgttgttcgttgctcttgtcctacagccatgcttttggtactgcgatccgagtgcgtgtgatctggatggagcttggagatgacggaattgcgacggatcctcatgtgccagcggctccgcctgcgctgaaccgctgtcatgcctaccatcgttgaacaaaggcagtttgtgttctgccgagcgtccatctcgagaacataatgtaatctccacttggctatcaatcatttctctgtatattattgcaatccaagctggcgatttgtccgctaa

SEQ ID NO: 121779 - DNA, 543 bp, Zea Mays
atgttgtcacaagaccagcgttttgaattacaccgaaaactcaggattacataccgaaggcttatatcatttttttcatggaagattacggtcccagtaaaacactccgacacatgcctcgacaaggcacacaccattccccagaattatatactctccgaagatcgcctgcaggagagccaactcaagatgctatcatttggtgatgtccccccaagcaggaacatggtggcggcactgaagacggcgtggattgcccttgtaagttgttttttgcttgcattgacagcagtggttcagagtggatgcctgcgcttaccttcaagtttggatcatgaatcgtggtatgtggtgctccaagatggccaagagttctctgctttggctatccctttccacttgccggtcctcgagcctgcttgcagcctccacaagctgacctctaagcctttgaggcaaaagtcgcccattggaattcatgcattccttatagagcggcaggtaggccatggcaatcaccagctcaagtgggagatcccctaa

SEQ ID NO: 121780 - DNA, 1366 bp, Zea Mays
agagataatgtagcccagattgcccacccatcccaaagagagaaagtagcagtatcagcgtatcatatggagctcagccccaacaacagcacggaccagagcttgctcgatgcgcagctcgagctctggcacaccaccttcgcgttcatgaagtccatggcgctcaagtccgcaatacacctccgaattgccgatgccatccacctccatggcggtgccgccagcctatcccagatactaagcaaggtccatctccacccgtccagagtttccagcctccgtcgcctgatgcgcgtgctaacaaccaccaatgtcttcggcacccagcagccggctggtggcagtgacgacgacagtgagcccgtctacactctcactccagtgtctcgcctcctcatcgcctcacagtcgtcgcagctggcccagactccgttggcggccatggtgctcgatccaaccatcgtctcccccttcttcgagctcgccgcgtggttccagcacgagctcccagacccgtgcatcttcaagcacacgcacggccgaggcatctgggagttgaccaaagatgacgcgaccttcgacgccctagtcaacgacgggttggcttccgacagccagctcatcgtcgacgttgccatcaagcagagcgcagaggtcttccaggggataagctcgctcgtcgacgtcggtgggggcatcggtgcggcggcccaagccatctcaaaggcgttcccgcacgtcaagtgtagcgtgctggaccttgcccacgtcgttgcgaaggctccaactcacacggacgtgcaatttatcgctggcgacatgtttgagagcattccaccagcagacgccgtactgttgaagtcggtcttgcatgattgggaccatgacgactgcgtgaagatactgaagaattgcaaaaaggctattcctccaagagaagccggtggaaaggtgataataataaacatggtagttggagctgggccatctgacatgaagcacaaagagatgcaggccatattcgatgtctatatcatgttcatcaatggcatggaacgagatgagcaggagtggagcaagattttctccgaagctggatatagcgattacagaataataccggtcttaggtgttcggtctataatcgaggtctatccataaccatttgtgtaagatggttcatatatagtggcatggatcggagcttgtgtggtgtggacatgtaatctaaataagtgggtaccccgctgtgatgctgatctatatcgtgctctctgtcgagatatctattcagtaaacgtatattctatatgcacctatatgaagccgtgtactttataaacctatgttctttggtttgtttctc

SEQ ID NO: 121781 - DNA, 1199 bp, Zea Mays
atataaagaatatgataggatagacaggcgacagctgcacttcagctgttcacccagcgcgcgcgcgcgctcgtccgccgtcgccctgcccagcccttcgccggtcctttcccaggccttcgacgcgtccttcgccgtcgaagagtccccagcagtgtagcaccatgcccttttctcggcccgccgttggtttcttagttagactggttggggtccggccaagctgctgtcctccttcccgtgcatttgcagctgtcagagctcaaaagattcagcttcccaagaaaaaaaggcgattagatgaagtgtgcttagaaaggtttcaacaatacagtagaacatacatccagtcatggattcttcaaggcaaagtcattgtggatggaagagttgtgaataaagctggaacacaagtatctgacaagtctgtcatcgaaatcaaggctgaaatcccaaaatatagcaggacataagcttgaggcagctatcaaaggatttgatattgattgtgatggaaagatagcccttgattcaggattatccacaggtggctttactgactgtttacttcagcatggagcatcacatgtttatggtgtagatgttggctatggacaggtggctgaaaaaattcgcacacatgaacgtgtttcagtgatcgaacgcacaaatttaagatatctatctcaactgccagaaccagttgacttggtgacactagacctatcatttatctccattctcttggtcatgcctgctgttatcaaagtaatgaaaacggattctacattgataacacttatcaagcctcaatttgaagcacgtagatcacaggtaggaggtggtgggattgttcgagatcctttggttcatcaagaggtactggatagaataatttcaggcgtggaagaatttggattctgcaataagggttggatcgaatctcctataaagggtgcagaagggaataaggagtttcttgcttgcttcaacaggatccaatatcagagtcacagccagaggcaaaggaacctgtaacctaggatgtcagcagaacctattctactggtcaacatgttcaattgcaggtgttaaaaattttgtgtatcccttattactttatgaggccactaatttcgaaattaaattactaaattataatttattaaatatgtacttaatttacaatagggaaacaa

SEQ ID NO: 121782 - DNA, 737 bp, Zea Mays
gcttgtgggcagccatggcgcaccaacgccgtggtcttggccggccacctgctccccatccctagtctctacgccacgacccggtaggatccacaatcctatcagactaccatggtaggatcagcttcactaaaactggaatagagttgaaatcatgcgtcaggaaattgaattgcatttctcccatgcaaatatgtggtgcaagcatgtaactaatatttaagcttgctctattttttatttcatttgtatttgggtcatgctttataccaccctagcatggacttatgctatctatgaaatctaggtcatgcctgctgttatcaaagtaatgaaaacggattctacattgataacacttatcaagcctcaatttgaagcacgtagatcacaggtaggaggtggtgggattgttcgagatcctttggttcatcaagaggtactggatagaataatttcaggcgtggaagaatttggattctgcaataagggttggatcgaatctcctataaagggtgcagaagggaataaggagtttcttgcttgcttcaacaggatccaatatcagagtcacagccagaggcaaaggaacctgtaacctaggatgtcagcagaacctattctactggtcaacatgttcaattgcaggtgttaaaaattttgtgtatcccttattactttatgaggccactaatttcgaaattaaattactaaattataatttattaaatatgtac

SEQ ID NO: 121783 - DNA, 1096 bp, Zea Mays
gcgcgcgctcgtccgccgtcgccctgcccagcccttcgccggtcctttcccaggccttcgacgcgtccttcgccgtcgaagagtccccagcagtgtagcaccatgcccttttctcggcccgccgttggtttcttagttagactggttggggtccggccaagctgctgtcctccttcccgtgcatttgcagctgtcagagctcaaaagattcagcttcccaagaaaaaaaggcgattagatgaagtgtgcttagaaaggtttcaacaatacagtagaacatacatccagtcatggattcttcaaggcaaagtcattgtggatggaagagttgtgaataaagctggaacacaagtatctgacaagtctgtcatcgaaatcaaggctgaaatcccaaaatatgtatgtagagcaggacataagcttgaggcagctatcaaaggatttgatattgattgtgatggaaagatagcccttgattcaggattatccacaggtggctttactgactgtttacttcagcatggagcatcacatgtttatggtgtagatgttggctatggacaggtggctgaaaaaattcgcacacatgaacgtgtttcagtgatcgaacgcacaaatttaagatatctatctcaactgccagaaccagttgacttggtgacactagacctatcatttatctccattctcttggtcatgcctgctgttatcaaagtaatgaaaacggattctacattgataacacttatcaagcctcaatttgaagcacgtagatcacaggtaggaggtggtgggattgttcgagatcctttggttcatcaagaggtactggatagaataatttcaggcgtggaagaatttggattctgcaataagggttggatcgaatctcctataaagggtgcagaagggaataaggagtttcttgcttgcttcaacaggatccaatatcagagtcacagccagaggcaaaggaacctgtaacctaggatgtcagcagaacctgtaacctaggattatcaaccataacctctgatattcctgatattcttagactgtctccaacaataaccgctaaatggtccggtttagcgct

SEQ ID NO: 121784 - DNA, 1029 bp, Zea Mays
atggttggttcaaagaacggagacttggagatgacttgtaggactagggcccatgcggtggtgcagaacaagaaggtggttctgaggaggtacgtcaccggccggttccccaccgaaaatgatatggagatcattgtcgacactatcagcctgcgtgtgccgtcggggcagacagccgtgctggtcaagaacctgtacctgtcctgcgacccctggatgcgtggccgcatgaacaagcaagacgacggccccaccgtgccgccccacggagaggccatggtcaatttctctgtgggcaatgtgatggactcgacgcacccagacttcaccgccggcgacctcgtatggggtatgactgggtgggaggagtacaccctcgtcatccagcccgaatccctgagaaagatcaaccacaccgagctgccgctctcctactacacgggcgttcttggcatgccagggctcactgcgtacgcctgcttcttcgaggtcgggaagccgaggaagggcgacttcgtgttcgtctcggcggcgtcaggcgccgtcgggcaactcgtcgggcagctcgccaagatcgccggttgctacgtggtcggcagcgcgggctccgacgacaagtccgaggccgacctcggcgccgcgctcaagcggtgccttcccgacggcgtcgacgtctacttcgacagcgtgggcggcgcgacgctcgacgccgtgctgctccagatgcgccgcggcggcagggtcgcggcctgcggcatgatctcgcagtacaatctggaggagccgtacggcctgcgcaacctctactgcatcgtcgccaagtccatccggctggaggggttctactttacttcctacatgcatgtgtacgcgaggttcgaggaagagatggctggctacatcaaggacgggaaggtcaccgtcgtcgaggacgtcgtcgagggcattgacagcgcaccggctgctctgatagggttgttctctggcaaaaacgtagggaagcagttggttgccattgcaagggcatga

SEQ ID NO: 121785 - DNA, 1412 bp, Zea Mays
agaagacatggccggtcgggctagtagttgtctagtggatataggaaaatgtacaaatgcaggagcatatatgtgttatatatattggtactagctagttatcgaatccgaaaggtagctaggccagtgacgcgcacacaggagattaatatggcgagcagcggcggcgacgagaaggcggctgcggtggtgcagaacaagaaggtggtgctaaggaggtacgtcaccggcctccccaccgaagaggatatggagatcgtcgtggacactatcgttctgcgcgtgccggcggggcagaccgccgtcctagtcaagaacctctacctgtcctgcgacccctggatgcgtgaccgcatgagcaagcacgatgacggcgaccccaccgtcctcgccccggactttgtgatcggagaggccatggtcaatttcggtgtgggcaaggtgatcgattcgacgcacccagagctcaccgccggtgacctcgtgtgggggatgagtggatgggaggaatacacactcgtcacccagacggaatacctgagcaagatcaaccacaaggagctgccgctctcctactacacgggggttcttggcatgcccgggctcacagctttctcctgcttcttcgagctgggcaagccgaagaagggcgacttcgtgttcgtctccgcggcgtcaggcgccgtcgggcaagtcgtcgggcagctggccaagatcgccggctgcttcgtggtcggcagcgccggctccgacgagaaggtcagtctcctcaaggacaagttcggctacgacgacgcgttcaactacaggtccgagaccgacctcggcgccgcgctcaggaggtgccttccagacggcatcgacgtctacttcgacagcgtgggcggcgcgacgctggacgccgccctgctgcacatgcgccacggcggcagggtcgcggtctgcggcatgatctcgcagtacggtctggaggagccgtacggcgtgcgcaacctgtactgcatcatcggcaagaccgtccgtgtggaggggttcaacgttaatggctacttccatctgtacacgaggttcgaggaggagatggcgggctacatcaaggacgggaaggtaaccgtcgtggaggacgtcgtcgagggtattgagagcgcgccagcatctctgatcggattgttctctggcagaaacgtagggaagcaggtcgttgcgattgcgcattcaggaactccgtaacggtgacgagatgagaagaacaaggcttgggccacttgcctacttgttgtgtgtgatgtcatcataagaaggcttggcaccgttatatgcactacactaaaacataaaatctccgacggccaaaaccgtcgcacataagcgactatttccgacagtttcgtgttatctccgacggtctttag

SEQ ID NO: 121786 - DNA, 1188 bp, Zea Mays
atggcatgttatgcacccggtgtttctctccctctcacttggccagaaaatgcttgtgccctaccagatgtcgttgctatcttatacttggccactacgagatgtattgttccaataggcatgccaagccctcgacgcgactgctctggaggcccaaggtacagcacattaatgaggcagtggcttacagtgagaaggtgcaaactggaagttgatcctcatgcactcgagtgccctttggtgcacccggcaaccagtcccacaaaatccaccggcacaagccacctctcgcaccccggggatagcaaatgttcagtccctcctccagagaatactacttcgtttcctcgtcctcttcgcctggggttttctctgaagatcagccggtttctgcagtcttcttccttgatcatggccaactttgttgcggacccaagaccttttatccctcatgagttggtgatcgatgatggtggcaatgatcgccactcgcgggcacgagttcatctcgtgctcggccaagaagcaaggcgtgatgacttcgttattgctactgatgttgaaggtgtgatcccccccttggacactggtatgtggatgcttaggattcgggacttcattgaaaatgaccttcatctccatgtccttaattgtgctgttcatcctttcggtttgggaatctttgagttagggagcctactccaaaaagatagactgcttactggagatatttacaatgtcgaaggcaccttaattcgtttcattcgccaagacatagcacaaaatttcagagaaattgtttatacaaggaaaggttggatcttgatgttgggatttccagtcacctacataaatgacatgtgtatccatcaggtggtggcctcctttggcaaattgttgaggtggcataatagtccaaggatcaagtcttacgtgctggtcaaatgtttatgcatttctgctagtgagttagggaataatgatgcgatagccaacatggaggacatcattccacccaatgggaatccccaccctttaccagaagatgtcaatgataaagattgcctgcaggctaagggggacttcatggaaaatctggttaaccaaaacttaggtggtattcaagatgctaagggtgcccaagatgctcagggtgatcctatttgggacaatggctggcctgcttga

SEQ ID NO: 121787 - DNA, 783 bp, Zea Mays
gggaagatggtggctcagatgatggatatgtacttgttaagcaggaggatgttgttgatgggatgacttcctttatggctgcatgcttggtgtcaattaaaaagaccaaggacctgccccctgatcaacttcaaaaagctcttaggaagacgtttttagctgaaaagaagaaaagtaaaatccggaaggcatgggatgaaactaaagtcatttataatgttgcttcatgggggcgcaactgttgttggggtctacaataatcgagcattacttatggtcgcaactacaacgtttcagacttcctgacgtgtgataaccaagttcctttgaatattgtgtcaactactagggcatgttagaattgcttgcgtgtgtgcttttccattgttcaggcaacataaagcttgagaccatttgtttagtctatgctgatgagttcgactgctaattagcagcgcctcccagtcaaaagcaacatgtgtattgtataactgtaaatattgtattgatttgaacaaacttgttttttgtgctggaactttatttcacgaacttcatacgatagaccctactgtagagtatttctttctcttctcatttcccattattgttatcacttctctttcaacaagaattttctttcttattttattttattttatgtagaagtgtagaaccatatagtctctttggctaatttaatgtggttttgttatctggaaatctggactaatatatttatcctatctttaaaagtggtattttgaattattagatcgacat

SEQ ID NO: 121788 - DNA, 497 bp, Zea Mays
ctctcctcccatgcagatgcttcgcggcggcagcgaagcggatccgcccgctcgccagggccttctgcggcgcgccagcctcgtgagcggatgcgggggccaacgggacgcccagcccgcaggatcacgccgagaaggttgctgccctgaaggatccgcccaatgtgctagacgttgctatcgttggtggaggcatgatgggcttggctgtcgcttgtgcattgtccaatatgtcgttaacgaaacaccttagagtcgctattatcgatagcaatcaagcgctggagtcaagaagttacctgggcaaaaaacagtatacccgattctagggtcagcaccgttacccctgcaaccatttccttcttcaagggtatgattctgaatcaactatgtgcatcgtcatacttaatttcagctgtatttcaactttcaacggtatttggatttaagtttgagcttgtatgttcaggtgttatatcgtcttcaagggtatgttg

SEQ ID NO: 121789 - DNA, 170 bp, Zea Mays
tcacgccttcgtctccgctgccctcagcccccttccgctctcagatttcggcatctcccggactcactagcgtccttctctcctcccgtgcagatgctttgtggcggcggagaaccggatccggctgctcgccagggccttctgcggcgcgccggcctcgcgagcggatg

SEQ ID NO: 121790 - DNA, 231 bp, Zea Mays
atggccggccctcacctccagcccctgctcctactcgagctcgccagcagggagcagctcctccaccgtcgcagccgcacacgagcagcagcacgcagaccgcgcctaggatgctatcttcctcccttctgtgtcgccgtgagctctagctctgtccatgactcacgcgacatggccatcacttctcctcatctcggccagcagctcctctcccccaacgttctaagctag

SEQ ID NO: 121791 - DNA, 1750 bp, Zea Mays
gggacattcttcttcgcccagcctagccacgtccatcccgaggcaaacgaacaaagccacagcgcacctcacttattacgaaccccctctgtgccactgcccactgccacctgaaatccccgcgaacctatacttttccttcccccgatccaggcggttctcttcccagaagccagcccagaatggcggcatccgacgcgctgcagtccatcgtttacagccgtgggtcgctccgcctcctcgatcagaggaagctgccgctcgagatggagtacatcgacgtcaagagttccgccgatggctggaatgcaataagagacatggttgtccgtggtgctccagcaatagccatagcagcggcactagcattagccgttgaagtttctgatttagattttattggtacgcctgaagaagcagcttcttttgtttcaaagaaattggaataccttgtatccagccgaccaactgcagtgaacctatctgatgctgcaacaaagctccaaactttggtatcaaaggcagctgaaactgcaaaagattccaagtctatctttcaggtctacattgaggccgcagagacgatgcttgttgatgatgtggcagataataaagctattggctcacatggagctgtatttcttcaaaggcagcttgcaaattcaaaaaagatatctgttctaacccattgtaatactggcagtcttgcaactgctggttatggaactgcccttggggttatacgcgctcttcattcggggggagttttagagaaggccttttgcaccgaaactcgtccatttaaccagggatccagacttacagctttcgagttagttcatgaaaaaatacctgcaacactgatagcagattctgctgctgctgcgttgatgaaacaagggcatgttcaggctgtcattgttggtgctgatcgaatagcagcaaatggtgacacagccaacaagattggcacatacaacctcgccatctccgcgaagcatcatagtgtccagttctatgtgtcagcgccggtaacttccattgatctctccctcccatctggggatgagatagtcatagaagaaagatcaccaaaggagttgctgaactctgaaggtggtctgggaaagcaagttgctgcatccggtatatcagtctggaacccagctttcgatgttactccagcaaatctgatcactgcaatcataacagaaaagggtgtgatcacaaaaactgatgctgatggatctttcgacatcaaaggattccttctgcccgcaaaataatactctagcgtggcttccattctgaatgacaaatgtctggatcgacactgttgtattctgttttctctattatacacaataataaagtcatgtcctcataggattttggtgtaagttttatggataggagatcgacgctagggtgtgtacccatagcggcgcgtatgagccgtgttttcacacgagtgggcaagtgaaaaagagatgtgggagatgacctctgaggctagggatgttttgtttctagagactaattttttagtctctttattttattttattttagttcctaaattgctaaatatggaaactaaaatagagttttagttttcgtgtttgataatttaggggctaaaaaaaataaaataaaatggaaggattaaaattagtctctagaaattaaaccccccctaagcaagatgattgtcttgcttgctttcaaaataatacattatctctatatt

SEQ ID NO: 121792 - DNA, 1383 bp, Zea Mays
atcccgaggcaaacgaacaaagccacagcgcacctcacttattacgaaccccctctgtgccactgcccactgccacctgaaatccccgcgaacctatacttttccttcccccgatccaggcggttctcttcccagaagccagcccagaatggcggcatccgacgcgctgcagtccatcgtttacagccgtgggtcgctccgcctcctcgatcagaggaagctgccgctcgagatggagtacatcgacgtcaagagttccgccgatggctggaatgcaataagagacatggttgtccgtggtgctccagcaatagccatagcagcggcactagcattagccgttgaagtttctgatttagattttattggtacgcctgaagaagcagcttcttttgtttcaaagaaattggaataccttgtatccagccgaccaactgcagtgaacctatctgatgctgcaacaaagctccaaactttggtatcaaaggcagctgaaactgcaaaagattccaagtctatctttcaggtctacattgaggccgcagagacgatgcttgttgatgatgtggcagataataaagctattggctcacatggagctgtatttcttcaaaggcagcttgcaaattcaaaaaagatatctgttctaacccattgtaatactggcagtcttgcaactgctggttatggaactgcccttggggttatacgcgctcttcattcggggggagttttagagaaggccttttgcaccgaaactcgtccatttaaccagggatccagacttacagctttcgagttagttcatgaaaaaatacctgcaacactgatagcagattctgctgctgctgcgttgatgaaacaagggcatgttcaggctgtcattgttggtgctgatcgaatagcagcaaatggtgacacagccaacaagattggcacatacaacctcgccatctccgcgaagcatcatagtgtccagttctatgtgtcagcgccggtaacttccattgatctctccctcccatctggggatgagatagtcatagaagaaagatcaccaaaggagttgctgaactctgaaggtggtctgggaaagcaagttgctgcatccggtatatcagtctggaacccagctttcgatgttactccagcaaatctgatcactgcaatcataacagaaaagggtgtgatcacaaaaactgatgctgatggatctttcgacatcaaaggattccttctgcccgcaaaataatactctagcgtggcttccattctgaatgacaaatgtctggatcgacactgttgtattctgttttctctattatacacaataataaagtcatgtcctcataggattttggggctaaaaaaaataaaataaaa

SEQ ID NO: 121793 - DNA, 321 bp, Zea Mays
atggagaagggcatgtccgggcggtgtaggacaacccacatcagtgaccagatggcgacgggacccggtgatgaggtggcggaggtggagcggcggtggctggagacagcgggacccgacggtggcgaggcagaggcgtgctgctctggtcgacggcggaaggcgtcgggacccagaggcgaggaggaagactggaagaggtggaggctggcgagaaccgaaggggaggtagctggggcgctggccgtgggagggagggagaccggaggtgataaggatgaagtaaatgagccgcctggatgtcgggttcaatttcgatga

SEQ ID NO: 121794 - DNA, 1229 bp, Zea Mays
cctggattgtgcggttgcttcatcttgctgtgtcatggcttgccttgtgggctatatgttatgaggaggccaagaagaggatgtatgcttttagtacgacgacttatgttggttttcaggctgtaatgaccgaggaaatgtcagaaaaatttcgcggtttgcctggagtagttttcattttgcctgattcatatctatatccagaaacaaaggagtacggaggagacaaatatgacaatggtgtcatcactccaagaccaccacctgttcattatagcagaccatcaagaactgacaggaaccgtaactaccgaggaaactaccaggatggccctccacagcaaggaaattaccagaacaaccgtcctccaccagaaggtggttaccagaacaacccgccgcagcaaggaaactaccagacataccgctcgcagcaagatggaagaggctatgccccacagcagaattatgcacaaggtggtcaggatggtagaggttttggaaggaatgattacacagaccgttcaggctacaatggaccacctgattttcgaagtcaaactcagtaccaagggcatgtaaatccagctgggcaaggtcaaggttacaacaacccccaagagcgtagcaacttctcgcaagggcagggaggaggttttaggcctggtggtccttcagcacctgggtcttatggccaaccatcagcacctggatcttatggtcaacctaatacacttggtaactatgggcaggtacctccatcagtgaatcctggtggtaacagagttcctggtgtgaatcctagttatggtggggatggcagacagggggctggaccagcatatggtggagataactggcaaagaggttctggtcagtatcctagcccaggtgaaggacaaggaaactggcagggaaggcagtaagagctgacgtgttccactgaagacaagaatggcacttgagatttagaaatctccatctgtaaaataaacgactgtgatgcattactcttttttttttcttgcatttgaactctaaacttatgggcatgcgttattaccaaacctacggatgcaaattcattttagttttttgggccaaatgttggcatttttaaatggcgcagaatgtggaactcccctttgtcttcgtgtattgtttgcaggtatgctgtcactgtaaaacacgtgctaattactatagtattttggtgtagtttctcgttt

SEQ ID NO: 121795 - DNA, 1503 bp, Zea Mays
ctagaactccaaaaccttcagccccacgctatggccctcgcactgcgcctccgtcgggtcctcgcggcggcctccaccgcggcacccctgctccgcccgtccacctcggtcgcccggccttgcccgctcgttcccctcgcctccccggcggcggctgcgcggggcgggaccgactatgggacggacgacagcaagatctcccccgacgagatcctcttcgagggctgcgactacaaccactggctcatcaccatggacttcccggaccccaagccgtcgcgcgaagagatgatcgagacatacctccagactctcgccaaggtcgtcgggagttatgaggaggccaagaagaggatgtatgcttttagtacgacgacttatgttggttttcaggctgtaatgaccgaggaaatgtcagaaaaatttcgcggtttgcctggagtagttttcattttgcctgattcatatctatatccagaaacaaaggagtacggaggagacaaatatgacaatggtgtcatcactccaagaccaccacctgttcattatagcagaccatcaagaactgacaggaaccgtaactaccgaggaaactaccaggatggccctccacagcaaggaaattaccagaacaaccgtcctccaccagaaggtggttaccagaacaacccgccgcagcaaggaaactaccagacataccgctcgcagcaagatggaagaggctatgccccacagcagaattatgcacaaggtggtcaggatggtagaggttttggaaggaatgattacacagaccgttcaggctacaatggaccacctgattttcgaagtcaaactcagtaccaagggcatgtaaatccagctgggcaaggtcaaggttacaacaacccccaagagcgtagcaacttctcgcaagggcagggaggaggttttaggcctggtggtccttcagcacctgggtcttatggccaaccatcagcacctggatcttatggtcaacctaatacacttggtaactatgggcaggtacctccatcagtgaatcctggtggtaacagagttcctggtgtgaatcctagttatggtggggatggcagacagggggctggaccagcatatggtggagataactggcaaagaggttctggtcagtatcctagcccaggtgaaggacaaggaaactggcagggaaggcagtaagagctgacgtgttccactgaagacaagaatggcacttgagatttagaaatctccatctgtaaaataaacgactgtgatgcattactcttttttttttcttgcatttgaactctaaacttatgggcatgcgttattaccaaacctacggatgcaaattcattttagttttttgggccaaatgttggcatttttaaatggcgcagaatgtggaactcccctttgtcttcgtgtattgtttgcaggtatgctgtcactgtaaaacacgtgctaattactatagtattttggtgtagtttctcgttt

SEQ ID NO: 121796 - DNA, 1586 bp, Zea Mays
ccaacaaaaaaaccctagaactccaaaaccttcagccccacgctatggccctcgcactgcgcctccgtcgggtcctcgcggcggcctccaccgcggcacccctgctccgcccgtccacctcggtcgcccggccttgcccgctcgttcccctcgcctccccggtcgcgccgctcccgctgccgccgtggcgattcctgcccggcggcggcgccgggttcaggtccacggcggcggcggctgcgcggggcgggaccgactatgggacggacgacagcaagatctcccccgacgagatcctcttcgagggctgcgactacaaccactggctcatcaccatggacttcccggaccccaagccgtcgcgcgaagagatgatcgagacatacctccagactctcgccaaggtcgtcgggagttatgaggaggccaagaagaggatgtatgcttttagtacgacgacttatgttggttttcaggctgtaatgaccgaggaaatgtcagaaaaatttcgcggtttgcctggagtagttttcattttgcctgattcatatctatatccagaaacaaaggagtacggaggagacaaatatgacaatggtgtcatcactccaagaccaccacctgttcattatagcagaccatcaagaactgacaggaaccgtaactaccgaggaaactaccaggatggccctccacagcaaggaaattaccagaacaaccgtcctccaccagaaggtggttaccagaacaacccgccgcagcaaggaaactaccagacataccgctcgcagcaagatggaagaggctatgccccacagcagaattatgcacaaggtggtcaggatggtagaggttttggaaggaatgattacacagaccgttcaggctacaatggaccacctgattttcgaagtcaaactcagtaccaagggcatgtaaatccagctgggcaaggtcaaggttacaacaacccccaagagcgtagcaacttctcgcaagggcagggaggaggttttaggcctggtggtccttcagcacctgggtcttatggccaaccatcagcacctggatcttatggtcaacctaatacacttggtaactatgggcaggtacctccatcagtgaatcctggtggtaacagagttcctggtgtgaatcctagttatggtggggatggcagacagggggctggaccagcatatggtggagataactggcaaagaggttctggtcagtatcctagcccaggtgaaggacaaggaaactggcagggaaggcagtaagagctgacgtgttccactgaagacaagaatggcacttgagatttagaaatctccatctgtaaaataaacgactgtgatgcattactcttttttttttcttgcatttgaactctaaacttatgggcatgcgttattaccaaacctacggatgcaaattcattttagttttttgggccaaatgttggcatttttaaatggcgcagaatgtggaactcccctttgtcttcgtgtattgtttgcaggtatgctgtcactgtaaaacacgtgctaattactatagtattttggtgtagtttctcgttt

SEQ ID NO: 121797 - DNA, 851 bp, Zea Mays
ccaacaaaaaaaccctagaactccaaaaccttcagccccacgctatggccctcgcactgcgcctccgtcgggtcctcgcggcggcctccaccgcggcacccctgctccgcccgtccacctcggtcgcccggccttgcccgctcgttcccctcgcctccccggtcgcgccgctcccgctgccgccgtggcgattcctgcccggcggcggcgccgggttcaggtccacggcggcggcggctgcgcggggcgggaccgactatgggacggacgacagcaagatctcccccgacgagatcctcttcgagggctgcgactacaaccactggctcatcaccatggacttcccggaccccaagccgtcgcgcgaagagatgatcgagacatacctccagactctcgccaaggtcgtcgggagttatgaggaggccaagaagaggatgtatgcttttagtacgacgacttatgttggttttcaggctgtaatgaccgaggaaatgtcagaaaaatttcgcggtgggtgaagtagctaatgttttttttcttgcaactaatgacacaacttttatagtatttacctccctgccttggtattttgatcaggtttgcctggagtagttttcattttgcctgattcatatctatatccagaaacaaaggagtacggaggtctgtcggattcccatttttatttacgagttaataaatcgaatcacctttctttgtataccttgttagcaaatggagtaatctttacatttccttgaattcataaacatgccacatttttatgtttttattgcaaccagcagatgatgcttgctagaagttcattctgatacatgtattgattt

SEQ ID NO: 121798 - DNA, 3248 bp, Zea Mays
gtcaccccaaaccggtctttgtcgcttcaaaccgtccaagggattcaaaacgcaaatcgaaccgccacgtgttcgcttggtttctttctttctccctacgccttgtccgctcctctctccctctctcgttctcgtcctcgtctttctcgagccgcgaggcgatcgcatcggagactcggagccggcaaaaccctaaggggaaggtttctgcaaggaggagggagatgcagggcgccagccacatgctcctggaggagcccttccgcctcgcctccgtcctctcccccgccaagcctaaagtattcccatcactcaccaagatagttgggacgctcgggcccaattcacactcggttgagattattcaggaatgcctcactgctggaatgtcagttgcacggtttgatttctcatggatggatgctgcgtatcaccaggagacccttgataatttgaggaaagcggcacagaatgtgaagaagttgtgccctgtaatgttggatactcttggtccagaaattcaggttcacaattccactggtgagccaattgagttgaaagctgggaatcatgttatcataactccagatatttgtaaagctctctctgctgagatcctaccaattaagtttggtgatcttgcaaaagctgtgaagaagggtgatactctttttatgggccaatatctcttcacaggaagtgaaacaacatctgtctggctagaagttgtggaaacttctggggaaaatgtaaattgtctagtgaagaatgcagctacacttgacggccccatattcactctgcatgcttcacaagttcacatcaatttgcccactttgagtgaatatgataaacatgtcatttcaacttggggttcatgtaacagtgttgacattatatcactttcccatacccgctctgctgaagatgtcagggagctcagggcctttttacaagcacacgcccttcccgacacacaaatatacgcgaagattgaaaattcagagggtttggatcattttgatgacattctcaacgcggcagatggtatcattatttctcgaggagacctgggtattgaccttcctccagaaaacgttttcatgttccaaaagacagctattcataaatgcaatttggagggtaaacctgtgatcatcactagagttgtggacagcatgattgacaatctacgccctacccgtgcagaggcaactgatgttgcaaatgctgtcctagatggcactgatggcattttgcttggtgcggagacacttcgagggctttatcctgttgatgcagtgagtactgtggggagaatatgtgcagaagctgagactgtgtataatcagccgcttcaattcaagaaagtaatgtggcatgtaggtgacccaatgccccacgaggaatctgtggcatcagcagcggttggttctgcaatcaaagtaaaagctgctgccattgttgtgttcacattctcagggagagctgcgaggttagttgccaagtataggccaacaatgccaattttagcagttatcttcccacgtgaaggatccgatccatcaaagtggcgttcttatggcacaacacaggcaagacaatgtttcgcagtgagaggcgtgtaccctttgatggggagtactgatgaggccgaaactggtgggctaacaaaggaagagtatgggataaaacttgcgatgagctatggtcggtcggttggcatagtgaagcctttcgacaggttgataatctttgaaaagattggtgattcttctgttgtcaagatcattgagtgtgaaggttaggcattagatgattgatacctacaacccatgctgtagtttcatgtatcgcatgggagattacctccagttccatctcacttatttaaccaagttccaagtagagtacagcaagagcacaagatatcttgttagggaattttgccctcttttcagattgtcttttgatttgacgcaataaattatgatgtcacagatttatactggaattatgatttgattatgcaaatataggattgttggcaacaaaccatgaataatcgtcgttcctaccttattctattggacattacatgatgcagtgcatgataacatcccaaaagacaatcttagggcattatcagttaatttacctataatgttctgtctatggtacactcctgcaaccttgctgctgttgctggtatgctgctgtcagtactgctccttgaagaaaacagcatagatgatgcagcagatggagatgatgatgataacgatatcgatggtgagcgcagtcatggcctgatcgctaagcttcatgttcttgccgccgaggcggtcaaccatgtctggcacgggtttgtagttgatgatgtcctgctcgtatgggtcctcgagcctggacctgagctgctgcaggcggcggctctcggcctcctgcgccagtgtccagtcgtagaaccgccgtgtctcctccttgctcagcacgttgtacacctctcgcaggcggatgaacttctgcgacgccaccttgagcggcagcgtcgtcgtgtccgggtggtactccttggacagccgccggtacgccgtcttgatctcctcgatgtccgcctctggcgctatgccaaggaacctgggtgatagattttgcagttcagtcatgtgtcgccgttagtaacaaagtattgacatgatgatgacagtgtctcgaacagagctctacaaatttatgtacagctggacggcaatccaaaaggacatatgagcatggattggagatgaactcaactggtagtgagactcggccgcgttgttgatgaggtccgcgaacctccctcccaacggctcgttcttgctgctgccgcggccgtcgccttccttcttggccttgcctcctacccacccttcgtcggggttggaccagtgtatcctggtgtccaccgtcttcttcttccccggccctgcaccgtccgccgtcgcaggagtcggttcggcgtcgggcgggctcgcggctgcgaccacgactgccttcgtgcgccgctggtgccggtggaggaagggcgtgaagatgcgcgaggccgtggacgctgccatgggaaacgtgtgtgttagcgtctgcgcaggcagcattccaaggcgtggaggggagtcgggaggtgatgaggctcgcacgttccagttgtcgtggtaggagggcgaggcgatgaggtgtcgctgttcacttagccaatggccacatgt

SEQ ID NO: 121799 - DNA, 3030 bp, Zea Mays
ttctccctacgccttgtccgctcctctctccctctctcgttctcgtcctcgtctttctcgagccgcgaggcgatcgcatcggagactcggagccggcaaaaccctaaggggaaggtttctgcaaggaggagggagatgcagggcgccagccacatgctcctggaggagcccttccgcctcgcctccgtcctctcccccgccaagcctaaagtattcccatcactcaccaagatagttgggacgctcgggcccaattcacactcggttgagattattcaggaatgcctcactgctggaatgtcagttgcacggtttgatttctcatggatggatgctgcgtatcaccaggagacccttgataatttgaggaaagcggcacagaatgtgaagaagttgtgccctgtaatgttggatactcttggtccagaaattcaggttcacaattccactggtgagccaattgagttgaaagctgggaatcatgttatcataactccagatatttgtaaagctctctctgctgagatcctaccaattaagtttggtgatcttgcaaaagctgtgaagaagggtgatactctttttatgggccaatatctcttcacaggaagtgaaacaacatctgtctggctagaagttgtggaaacttctggggaaaatgtaaattgtctagtgaagaatgcagctacacttgacggccccatattcactctgcatgcttcacaagttcacatcaatttgcccactttgagtgaatatgataaacatgtcatttcaacttggggttcatgtaacagtgttgacattatatcactttcccatacccgctctgctgaagatgtcagggagctcagggcctttttacaagcacacgcccttcccgacacacaaatatacgcgaagattgaaaattcagagggtttggatcattttgatgacattctcaacgcggcagatggtatcattatttctcgaggagacctgggtattgaccttcctccagaaaacgttttcatgttccaaaagacagctattcataaatgcaatttggagggtaaacctgtgatcatcactagagttgtggacagcatgattgacaatctacgccctacccgtgcagaggcaactgatgttgcaaatgctgtcctagatggcactgatggcattttgcttggtgcggagacacttcgagggctttatcctgttgatgcagctgagactgtgtataatcagccgcttcaattcaagaaagtaatgtggcatgtaggtgacccaatgccccacgaggaatctgtggcatcagcagcggttggttctgcaatcaaagtaaaagctgctgccattgttgtgttcacattctcagggagagctgcgaggttagttgccaagtataggccaacaatgccaattttagcagttatcttcccacgtgaaggatccgatccatcaaagtggcgttcttatggcacaacacaggcaagacaatgtttcgcagtgagaggcgtgtaccctttgatggggagtactgatgaggccgaaactggtgggctaacaaaggaagagtatgggataaaacttgcgatgagctatggtcggtcggttggcatagtgaagcctttcgacaggttgataatctttgaaaagattggtgattcttctgttgtcaagatcattgagtgtgaaggttaggcattagatgattgatacctacaacccatgctgtagtttcatgtatcgcatgggagattacctccagttccatctcacttatttaaccaagttccaagtagagtacagcaagagcacaagatatcttgttagggaattttgccctcttttcagattgtcttttgatttgacgcaataaattatgatgtcacagatttatactggaattatgatttgattatgcaaatataggattgttggcaacaaaccatgaataatcgtcgttcctaccttattctattggacattacatgatgcagtgcatgataacatcccaaaagacaatcttagggcattatcagttaatttacctataatgttctgtctatggtacactcctgcaaccttgctgctgttgctggtatgctgctgtcagtactgctccttgaagaaaacagcatagatgatgcagcagatggagatgatgatgataacgatatcgatggtgagcgcagtcatggcctgatcgctaagcttcatgttcttgccgccgaggcggtcaaccatgtctggcacgggtttgtagttgatgatgtcctgctcgtatgggtcctcgagcctggacctgagctgctgcaggcggcggctctcggcctcctgcgccagtgtccagtcgtagaaccgccgtgtctcctccttgctcagcacgttgtacacctctcgcaggcggatgaacttctgcgacgccaccttgagcggcagcgtcgtcgtgtccgggtggtactccttggacagccgccggtacgccgtcttgatctcctcgatgtccgcctctggcgctatgccaaggaacctgggtgatagattttgcagttcagtcatgtgtcgccgttagtaacaaagtattgacatgatgatgacagtgtctcgaacagagctctacaaatttatgtacagctggacggcaatccaaaaggacatatgagcatggattggagatgaactcaactggtagtgagactcggccgcgttgttgatgaggtccgcgaacctccctcccaacggctcgttcttgctgctgccgcggccgtcgccttccttcttggccttgcctcctacccacccttcgtcggggttggaccagtgtatcctggtgtccaccgtcttcttcttccccggccctgcaccgtccgccgtcgcaggagtcggttcggcgtcgggcgggctcgcggctgcgaccacgactgccttcgtgcgccgctggtgccggtggaggaagggcgtgaagatgcgcgaggccgtggacgctgccatgggaaacgtgtgtgttagcgtctgcgcaggcagcattccaaggcgtgg

SEQ ID NO: 121800 - DNA, 672 bp, Zea Mays
atgcctttgtttttccactgttgagactatgctgagaggcatatcttatcaacatctaacttgatttactatatgtaggtaatgttggatactcttggtccagaaattcaggttcacaattccactggtgagccaattgagttgaaagctgggaatcatgttatcataactccagatatttgtaaagctctctctgctgagatcctaccaattaagtttggtgatcttgcaaaagctgtgaagaagggtgatactctttttatgggccaatatctcttcacaggaagtgaaacaacatctgtctggctagaagttgtggaaacttctggggaaaatgtaaattgtctagtgaagaatgcagctacacttgacggccccatattcactctgcatgcttcacaagttcacatcaatttgcccactttgagtgaatatgataaacatgtaacacagacatctttaaatttctttacataatattgagttttatattgccacaacacaatattcctttttactttacatgttctctgtccaaaaagattgtgctagtaacttattttgaacaatagaaaccatagttcgattgcatgtcttttgttattattttatatttccattcgactatgcttttgaagctctttcttaccaaaactcgactagagatattta

SEQ ID NO: 121801 - DNA, 309 bp, Zea Mays
atggcctccatggcccaaatactggtcggcctgtctgagatccaatctcatcaagtggccatggacgacaaggtgacggcactgtccaccgaggtgtcctccatcaaggggtccctcattgagtacatggacgtgttctaccagcgcctcacccgctgcgatgacctctccgagcagcaacagatctccatcttcaccgtaggtctgggcgaaccactgaagaccgacgtcgagcttgacgcactcgccaaactggaggaggaagcaaccctggctcacctacatccaccacaacaccgtggctgctag

SEQ ID NO: 121802 - DNA, 1685 bp, Zea Mays
gtccaggcgttcttgctgcctccctcgtagactagactctagaccactatatatacagtactcgtccccgttttcttcctcaccaacttctcatcatcagccaagtgtaaagagtgcgaagaagcagtagcaaaaggattccattctcgtgttcttggagtggtccatcgatcgagctccgtgaaagagagagagagagagcaagcaatggcgacagcagggaaggtgatcaagtgcagagccgccgtggcgtgggaggccggcaaaccgctgtccatcgaggaggtggaggtagcgccgccgcaggccatggaggtgcgtatcaagatcctctacaccgcgctctgccacaccgacgtctacttctgggaggccaaggggcaaaccccggtgttcccgaggatcttaggacacgaagcgggaggcatcgtggagagcgtcggagagggcgtgaccgagctcgcgccaggcgaccacgtcctcccggtgttcaccggcgagtgcaaggagtgcgcccactgcaagtcggaggagagcaacatgtgcgacctcctcaggatcaacgtcgaccgcggcgtgatgatcggcgacggtaagtcccgcttcaccatcagcgggcagcccatcttccacttcgtcgggacgtccaccttcagcgagtacaccgtcatccacgtcggctgcctggccaagatcaaccccgaggcgcctctcgacaaagtctgcatcctcagctgtggtatctcgaccggccttggcgcgacactgaatgtggcgaaaccagccaagggctcgacggtggcgattttcgggcttggggctgtaggccttgctgctatggaaggtgctagactggctggtgcatcaaggatcatcggcgtggacatcaacccagcaaaatacgagcaagctaagaaatttggctgcactgaattcgttaaccccaaggaccacgacaagccagtgcaagaggtgctgattgagctgaccaacggcggcgtcgaccgcagcgtggagtgcaccggtaacatcaacgccatgatatccgccttcgaatgtgtccacgacggctggggtgtcgccgtgctggtgggtgtcccgcacaaggacgaccagttcaagacccaccccatgaacttcctcagcgagaagacactcaagggcaccttcttcggaaactacaagccccgcaccgacctgcccaacgtcgtcgagatgtacatgaagaaggagctggagctggagaagttcatcacgcacagcgtgcccttctcggagatcaacacggcgttcgacctgatgctcaagggggagagcctgcgctgcatcatgaggatggaggattagagcttcattgcaagcttgctcctcctgcagggcaggcatgtcgcacagcaaatgggcatgaaaagttgaaggcgctccagtcctccagcttgtgtagtacacagtagcaataaaacgttagtgtttgtcctgtgcccatcctgtattattctgttccagggtttcacctttatcgtcagtgtgtggtcaggtttcaacccttctcagaacaaccccctcccagaaaaaaaacaaaggaagaagtttgtgtccaggtttcagaatcccctgtctgtaattaccattttgcatgacaataatgagatactgtagatattaataatgttccagaccttcaa

SEQ ID NO: 121803 - DNA, 608 bp, Zea Mays
atactactcgcacacagcaacagcaggaacacagttacacagaggtcctcggccgtggcagcacgttcacgttgaccaccagagctcaaacgcaacagccgcccatcatcagccagccgagccatcatcaggagagttcaggtcgtgcaagagctgcgggtgaaacaaaacgcatcgatccatccgtcggtcgcccaatcatgattctgggcttgggaggatgctgcggagctgccgccgccgccgccgccgtgtcgccggctgccgtcggcaagcaattgggaggccatctagaggccagtgagcggcagcagaagaagcggggggcaagtgatgagcagaagatgaacaagggaggcgagcagggagcggcggcagcagctgggggtaaggagaggagcaagacgaaggatcgtcacaaggctcccccgatcgttgtgcatcagttccccttccactctcgccccggcttgctctgaattcctctactcatcttggcgtcatgtgcgtgtttgtgatcctgtaattattcgcgatctcgtgtgttatccattgagatatagtattacagtataagaaacaatcattttctcaacaccattgctcta

SEQ ID NO: 121804 - DNA, 644 bp, Zea Mays
tttgtgatctaattcagcgtcaacgccatgtaaattctcagaatacatacctagctagtacaagaaattattactgttttgatccttgaagcattaagaactgaaacaaccacaagcttgctctagaggcagagatatcagtctctccccctgctactgaatgtttgtctaacttctgaaagcaagaacatataactttataagcttctagagaagcgaataccatgcatgtcacaaatcagacagaagacggaagcgctgacgttaaaaagagccaagcaaaattacagcagtccaggccgcgaatgaaaggggaactgatgcatcactatgggtgttgtcttctcctttactaccatggccctgtcaacctgcatcttgggctcagtcgcttcgccagtagctgcttcctgatctctggctgcctgctgcttgttaggttcttcagatggaggtggtggcttcttttcctttatcgcaggagccgctccaaagcatgtgaaaagtcccagaaccatctcacttgcttttctttctttctttcttttttgccggacgacaatctactctgatcttgggttggtgttttgcttttctgtgtgcgaagtgatactagttcaggaacctatttataagggagatgg

SEQ ID NO: 121805 - DNA, 1870 bp, Zea Mays
atggaggaatcccacaccgtcgaggagttcttgcagccgcctttggctacattggcctcaacaggaaggatcatgtggtcatggacaagaagtacttcccttgcagaggtcgacagcctccaaggggactccactagggcgaggaaggtgctaaaatggaagcccaagataatgcgagattctaaaactggaaattctataggctttggctttgtgagctatgagtccttcaaattatctgatcaagtaataaaggccatgaacaaccaacatatttgcaaccatccaatcattgtttcttatgcttacaagaaagacacgaaaggtgacaccatggcacaccagcaggtgtcaaacttgataaggttcatgaggcaagaagaggttgttaaagcaatgaatctttttgaaggagcacaggagcacaacagggtgagcaagagatctctcaagaactgggtggtccaaaacccaacaatttacaaaggcatactgcatagtctttccttcactcacccatctatggaactgcctgcctgtgatgcaggagatcaactttctggacaagatctcttgcggaatcgtcctatttgtcttggaattgtacgaaggctgcaactgatcgggcgggcgcaacacatccttcttccgctgcagacacaaatgagatgcagtgagacgaggggacaccgtgagcagcggacctcaaaggacaataacaagacactacagcgtacctcgaataccaccagatgcctcaacctaggctcctacaactaccttggctttgctgcagcagatgagtactgcacaccacgtgttattgagtctctcaagaaatactcagcaagtacctgcagtgttcgtgtcgatggcggtacgaccaagcttcacaatgagctggaggagttgcctgcgcgttttgttggaaagcctgctgctatcctatttggcatgtgttatgttacaaactctgccatcattccatgcctaattggaaaggagataattcagcaccttaaacatagttgtccgccccatctgtatgctacttccatgtcgccaccaggagtccaacatgttatttctgctattaaagttatccttggggaggatggctccaacagagatttcttcaggtcagagctcaagaagatgggttttgaggttcttggtgacaatgactctcctgtcatgcccataatgctctacaatccggctaagattcctgcattctctagggagtgccttagacaaaagaaatctgcatgtagtccatatccatcattatttgcacccactagtttcattcttcctatctgtcatggttatcagcagagttggcgaccttgtgggcatcaaatattccatgcagaaccaccaaagattgctggagctggtcatgataagttggagtaggaatcaacccttagttgccccatgagtgattgaagttgttagaatcccttggagttgtcaacaaatcattatggaaagaagcacatattgagtcatttcatttggatcttgacatacacaagagtccaggatccatcatattaagttgactactgtttgttgattgtacaactattcttccaattgtgtatagctggttgaaattcagttgttctgttgttaatccattcccaatatgtaatacaattagaggcaatataaacttcgagtagaacattactgagtttcccttgcagatcactgacgactattgctctcttgctttcatgtatttttttaccttttgacatgggattagtagttgtctctctacactttatatgaagataagaattattttttattcagtgaatgttatatgcgaccactgataatgtttatgggtagaagt

SEQ ID NO: 121806 - DNA, 1863 bp, Zea Mays
ccgatgacaatcagctagcagaatatatataaaaaatatatataattaagcagatgaatatatattgcaatataaaaatcaacactttttacagttacagtagacacaacagcaaatgaatttccaaaaccgaacaacaagactcatgtagtaatttctatgtaaacacaaggccgagtaattcatgttataccctatatatacgccacagtgtagctatatatatgtgtaccgcatcagaaggagagctgcacagatcttaaagctaagcaaattgctttttcaaaaccttgtgcagtttccgtttcgtcgatactatacatacacagctagtgaagcactgcttgaacctccctttaatttgcacagtgagacgagagatctacgcgatgtgtgtactctgtactcatgaatggaacgaatggatgaagaagagagaaacactgccatgaaagcaggcaaccaaaccccaccgtacgtacgtgctcttcatgcttatatggatggggccggccagccagctagctgtgtgcaatgaatgaagggacgatctatggacggtacgcgcttgcattgcattggcgggagcggaatcagtcagttgaacttggagcagaccttccggacctcgccctgcttgctgccggtgaccacgccgacgctgcccatgcggaccatggcgtccgcgaagtcctgccggaagtagggcccgaagaagttgctgagcaggccggagtaggagtcgacgacgtcgaccgtggccgtgtcgttgtagagcgcggcgtcggtgccgatgacggcgaagccgttgcggatgttgcggaggatggaggtgtcgaagacgttctcgctgccgcggtccagggccaggcgcgtgttgaagtcccccggcgcgcaccgggccttgagctccgacaggaagcccggcgggatggtcgggtccgagccccgcccgccgcccggcagcgggaagttgtagagccggtcctggaggaagaagcacgccgtcgtgcccaccgtgtgcgcagctgcgtgcatgcatgtgtcggcgcaatggcgtgggtcagctaggtacgtacctagctaattagctaattagctagagagacaggagatgcatgcagcatgcgtaccggtgaggaggacgaggtccttctcgtcaaggccgttggcgcggaacttggagcggagcgcgtcgatgccgtcgtgcacgtccggcagcgcgtcggcgtcccgcaggttggacaccttcccgtcgagccgccccgtgggcacgtcgaacgacggcccgccggtctgcatatacacgtacgccatcgtacgtcacgcgcgcgtacgtgttcacgtcggtcagatcccggccagttatatatcaacgtgacatattacacacatcatgcgcaaacgtacgaaggcgacggcgtctcgggcagcgagcacgacgatgtcggcgcaggagacgacgccggggcactgcgcctcgagctgcgtcttggcgccctcgatgatctccaggccgcggaggccctggtgcttgccgttgtccacctcggcgttgttgttgttgttgccgccgcccttgatgagcaccgacccgtcgcagccgcggacgaagcagtcgtggaactggagccggatgagcgccgggaggatggtggggtcggcggacccggactgccggacgacggacgccacggtggactcggcgtccgggcaggacttggagtagaaccccacctggagctggccgttggagacgcctgcgcccgcgagcagcagcagcagcagcaagcatggcagggccaagccgggagcgttgctgcctctgatactacaccttgtggtgccggccatctttgagtt

SEQ ID NO: 121807 - DNA, 1107 bp, Zea Mays
atgaatgaagggacgatctatggacggtacgcgcttgcattgcattggcgggagcggaatcagtcagttgaacttggagcagaccttccggacctcgccctgcttgctgccggtgaccacgccgacgctgcccatgcggaccatggcgtccgcgaagtcctgccggaagtagggcccgaagaagttgctgagcaggccggagtaggagtcgacgacgtcgaccgtggccgtgtcgttgtagagcgcggcgtcggtgccgatgacggcgaagccgttgcggatgttgcggaggatggaggtgtcgaagacgttctcgctgccgcggtccagggccaggcgcgtgttgaagtcccccggcgcgcaccgggccttgagctccgacaggaagcccggcgggatggtcgggtccgagccccgcccgccgcccggcagcgggaagttgtagagccggtcctggaggaagaagcacgccgtcgtgcccaccgtgtgcgcagcggtgaggaggacgaggtccttctcgtcaaggccgttggcgcggaacttggagcggagcgcgtcgatgccgtcgtgcacgtccggcagcgcgtcggcgtcccgcaggttggacaccttcccgtcgagccgccccgtgggcacgtcgaacgacggcccgccggtgaaggcgacggcgtctcgggcagcgagcacgacgatgtcggcgcaggagacgacgccggggcactgcgcctcgagctgcgtcttggcgccctcgatgatctccaggccgcggaggccctggtgcttgccgttgtccacctcggcgttgttgttgttgttgccgccgcccttgatgagcaccgacccgtcgcagccgcggacgaagcagtcgtggaactggagccggatgagcgccgggaggatggtggggtcggcggacccggactgccggacgacggacgccacggtggactcggcgtccgggcaggacttggagtagaaccccacctggagctggccgttggagacgcctgcgcccgcgagcagcagcagcagcagcaagcatggcagggccaagccgggagcgttgctgcctctgatactacaccttgtggtgccggccatctttga

SEQ ID NO: 121808 - DNA, 1498 bp, Zea Mays
atggcgacaaaaggatcaagcaccctgagtcaagtcttcagcctgaagccacagacccgacgccgccgcacacgcaaaaatcaccgctgctgcgacttttaccggcggctaagcgcggttaaccgccggccaggagcggtttaccagcggtttaccgcccgcttcgccgctgcccccatcgtcgccgcagatcccctcaccgacgggttccatcgcaaaaccggcggtaaaccgcccacggggagaggagacatgtcggatgaagatagagatagagaaagagatagagatagagtctggttgcacggagagaaggttggcgcaggtttcaaatgcaagtattgtagagaaacaaagagcggagggggtggtacccgattgaaggagcatctcgcgcatagagggaagaatgtcaagaaatgtccctctgttcctccagacataaaggcatacttccagcttgacatagataagacaaaggaaaaaaagagttctaggttcaggcagcagctgagggcagatgaggcagcacaaacccattttggggacgatgagtatgaggatgaccttaaagcggctctgcatcagtcacgtgtggagcacgaatttagtcagagggctggtgcaaggcataatgaagccattagagattggatggaaagaggaagatccaatgcacctccaacattggatgaagactcacctatcagtgacactcctcttcctagcacgctttttacatcgcttgtacgtgaacaaggaggcacagaggaagtgcaagaatgggccgatgaaacaattggtgacacccaccttggtaagcggaagacaagacttggtccatcagataggaaaggaaaaagggtcaaaatcatcgatcaaatcgaagaggaagatgaggatgaagacagtgatgataacacaaccgatcctagtgctggtgatgatggcagccatggtgatgctggattatatggtgtaggagggagtggtgcaggagggagtggtatgggagggagtggtgcaggagattggaggtccactggaggaagtcggttcacccattccacacaagattcttaccatgatgcacctcattcacagcgggagacaataagtggtcgacgtcgttcggtttcatttcctgtccaagatggaatccgtagctcaagtagctctggttcttctaactatccgactggacaagacccagtctataacccttatgcatggcaatggcaaccgagtcaaggaacctatggacctcctccaccatcaggcgaagcaccaccatcgatcatgtatgggtatggaaactatggacctcctccaccaccatattcaaatttatcaaatatgtatccaccaggaccacaatatgggtatggacaagttcccgctgcaccggcctatcactatcagtatgacggattggatcaatatcacgacccttccaacatgcctgagtactatcactatgactcgagctgaacatgtg

SEQ ID NO: 121809 - DNA, 1609 bp, Zea Mays
aacattttttttctcgcgtcggcctgtctacctgctctgtctccattccgccacgcaacacttccgtgccctacgccccagaacctcccaccgcatcggagggctccgcgcctccgccacgccgatggcgtcccagccgccgccagagcccgcaccggccgaggcgggtctggaaagcatggagggcctcgtcctcgacacggtcatctcaagagccggcgcgcgccccgcagcggcgctcgcctgcgccagcacgcgcctccgcaccgccgttgccgacgactccctctggcgcagattctgcggtgaggacctggggctcgacgctcccgtcgatccagagggccggcctcttccctccttccaggttgcatataaagtttggtcggagtcttttggcatgtaccctctacctatggtaaagagagtgagacaattctggacttcaatgaaaacttggttgtctgaaaactttcctgaggcatacaaaacgttatgcgaaggtgtttctgaagctcaattaaagtcagcagaggatgatcttggtttcaagctccctatgcccacaaagctgttgtatcgcttttgcaatgctcaactgccttttagtgaggaccatgacacaaataaaagcatttccacttatggattgattgggggctatgcgttttatgatcattgggtgaatgtgcatttgtcaccgcttgagcaaatagttgaagagacgaaggacttctatcgggagttccctgatgtatttcatgggcgcaaattcattgtagtggcaacttcatggtttcatccgaaaacatttcttctagattgctcaaatggtgaactttatgttggtacatacaacttaccgataggaggaatgcttccctgtgtgcccaaagcattgataaagccagcaggtaatgatctagcacaagatggactactcctgtggttagaagaacaccttaggcgtttacagagtggcatgatcaagacccgtatgctgatggcatcgagatatatcagcttatatccagaagcacctccatcatgcagttcagctgttacaaatggcattaaggtacgctcatctgctgtctttgtgccagaacatcctgggaggcctggggaaaaatttatgttcacttactcaattcgcatgtcagttccagaggcatgcatgctaggtggcgtgtactattcttcctgccagctttgctcccgccactggaccatcagatcgtgtgacagggttgtttctgatgtgagcggaggaggggttattggagagtatcctctactgttacctggtgaggatgagtttgtctacgagagttgcacgccactgccccaagtaccaggatctgtggagggctctttttcgtttgtgccgggcaagttgagccgacctgaagggaagccgttcgaagtcatggtggcgcctttccctcttgatgtgccagaatacatcttctgatgatcacagcagaaataaatgtatgtatggttgttgggaaaaagttcggatgcttgtaataaccttattggagtaatgtaaaataaggaaccgtgcgctcttcgtgtaaccagcgaaatgtgcctcgtacccgta

SEQ ID NO: 121810 - DNA, 1713 bp, Zea Mays
aacattttttttctcgcgtcggcctgtctacctgctctgtctccattccgccacgcaacacttccgtgccctacgccccagaacctcccaccgcatcggagggctccgcgcctccgccacgccgatggcgtcccagccgccgccagagcccgcaccggccgaggcgggtctggaaagcatggagggcctcgtcctcgacacggtcatctcaagagccggcgcgcgccccgcagcggcgctcgcctgcgccagcacgcgcctccgcaccgccgttgccgacgactccctctggcgcagattctgcggtgaggacctggggctcgacgctcccgtcgatccagagggccggcctcttccctccttccaggttgcatataaagtttggtcggagtcttttggcatgtaccctctacctatggtaaagagagtgagacaattctggacttcaatgaaaacttggttgtctgaaaactttcctgaggcatacaaaacgttatgcgaaggtgtttctgaagctcaattaaagtcagcagaggatgatcttggtttcaagctccctatgcccacaaagctgttgtatcgcttttgcaatgctcaactgccttttagtgaggaccatgacacaaataaaagcatttccacttatggattgattgggggctatgcgttttatgatcattgggtgaatgtgcatttgtcaccgcttgagcaaatagttgaagagacgaaggacttctatcgggagttccctgatgtatttcatgggcgcaaattcattgtagtggcaacttcatggtttcatccgaaaacatttcttctagattgctcaaatggtgaactttatgttggtacatacaacttaccgataggaggaatgcttccctgtgtgcccaaagcattgataaagccagcaggtaatgatctagcacaagatggactactcctgtggttagaagaacaccttaggcgtttacagagtggcatgatcaagacccgtatgctgatggcatcgagatatatcagcttatatccagaagcacctccatcatgcagttcagctgttacaaatggcattaaggtacgctcatctgctgtctttgtgccagaacatcctgggaggcctggggaaaaatttatgttcacttactcaattcgcatgtcagttccagaggcatgcatgctaggtggcgtgtactattcttcctgccagctttgctcccgccactggaccatcagatcgtgtgacagggttgtttctgatgtgagcggaggaggggttattggagaggtatcctggggaggaacagaactagttttttttttcccgttactgactacagtttcctttgaaaggtgattaggtaatgtgcctgatcaacatatctcgtgcagtatcctctactgttacctggtgaggatgagtttgtctacgagagttgcacgccactgccccaagtaccaggatctgtggagggctctttttcgtttgtgccgggcaagttgagccgacctgaagggaagccgttcgaagtcatggtggcgcctttccctcttgatgtgccagaatacatcttctgatgatcacagcagaaataaatgtatgtatggttgttgggaaaaagttcggatgcttgtaataaccttattggagtaatgtaaaataaggaaccgtgcgctcttcgtgtaaccagcgaaatgtgcctcgtacccgta

SEQ ID NO: 121811 - DNA, 1776 bp, Zea Mays
atggcctcgtgtcgtcgtcgctggccgctgttgcttgctctcgcccagctgctggtcgtctgcggtggcctcggcgccaccgtggagcacaccttcgacgtgcgcaacgacctttccataagccagctttgccagccggcgagggccatcaccgccgtcaacggccggcttcccgggccgacgatccacgtccgcgagggcgacacggtggtggtgcacgtcatcaacaactcgccctacaacatcaccattcactggcacggcctcttccagcgtgggacgcagtgggcggacggcccagagatggtgacgcagtgccccatccgccccagcagccgttacacctaccgctacaacgccacggggcaggagggcacgctgtggtggcacgcgcacagctccatgctccgtgccaccgtccatggcgccattgtcatcaagcccaggaacggcgccctggggtaccctttccccaaacccgaccaggagcggatcgttatgcttggcgagtggtggaacggcaacgtgttcgacctggagcgcaacgccttcctcacgggcaacctggtgcctcaggccgacgcctacaccatcaacggcaagccgggggacttgcacaggtgttcgggcggcagcaaccgcaggcccagaaccttcaagctcaaggtgcggagcggctcgacgtacctgctccggatcatcaacgcggcggtgaacacgcccatgttcttcaaggtcgccggccacagcttcacggtcgtgggagccgacgcgggctacacggcgccgtacgagaccgacgtcgtggtggtggcgccggggcagaccgtggacgcgctcatggccacggccgccgcgccgccgtcgcggcgccgctactacatgatggcctccccctacaacagcgcgcgcccgagcctcccgttcaggaacagcaccgccacagccgtcgtggagtacgtcgacgtcggccaccagcagaacaagcagggaccgcggcggcggcggccggtgctcgcgcccatcatgccgccgcccaacgacacggcgacggcgcaccgcttcttcacgagcctggccgcgctcgtccgcccgggcgcccgtgcccccgccgtgccgctcgccgtcgacacgcgcatgctcgtcaccatcgggctggggctcgcggcgtgcaggccggagcagacgcggtgcagcggcggcagccggcagcaggtgttcgccggcagcatgaacaacgcctccttcgtgctccccgccgccatgtccctcctggaggcgcacttcaggaacgccacggcgggcgtctacacgcgggacttccccgacgcgccgcccctggagttcgactacaccaggccgccgcgcggcatgagcctcgcgacggccaagtcgaccagggtcaggacgctgccgtacaacgccacggtggaggtggtgctgcaggacacggcgctggtggcgcgggagagccaccccatgcacctccacggccacaacttcttcgtgctggcgcaggggttcggcaacttccgacgggaaaccgccgagaagcagtacaacctcgtcaacccgctccagaggaacacccttgccgtgccgacgggtggatgggctgtcattcgcttcgttgccaacaacccaggaatgtggatcatgcattgccacttcgatgctcatctgccgatagggttggcaatggcgttcgaggtgcaggacgggccaactccagagacggcacttcctccaccgccgcctgacttccctcagtgctga

SEQ ID NO: 121812 - DNA, 673 bp, Zea Mays
cctaaattatagaatgctaacaatcctttttgtcagtgcttgtataatcaacggtcaaaagaaaaagtatatatatgcagaggaacgcataaggtactcaaacatgatgatcacagtagagtaattttgacctaatgtggataatctagtatgtctttatgcattacacttgaagaaaatgtggcacggaaaagtgacgactaattgcaaatctgccggtaatgttttgcacaccacatttgaaagtgacactatgacaaggacgacaggcttgactagcccaatacaaaaaatctttgtatgacacatttcgtcaaacaccttctaggcaggaacctgcagctatgatcatgatgcagcagggcttattcatctcttttttcagagaacgtatcctcaactttattatgcaacaaagcgataggcccatgcatctctcagcaaggactccaggcgccatggctgccgaagctctcctctccgctagcacaggcacaacacgactgacgccaccgcctacgtttccctttccctgctccgccatggctacggcgtgctctcactcagaaccaaccgcccccgccgccgccgcgcggccccacttaggtgtcactcctcaaccatagccgccacactgtgttcgcgtcgagggaagggtgttggcgaccaggga

SEQ ID NO: 121813 - DNA, 159 bp, Zea Mays
atggggatcaccgatgggaatttatccccgcggggaacggggatggggaagaaatgtcctccgcaaccgttcatggggatctccacaggaaaaaaattcgtcgcggggatgatgatggggaggattgattcatttcagcagttatgggatatcctatga

SEQ ID NO: 121814 - DNA, 1578 bp, Zea Mays
ggaacaactgaacggccggcagtggcagaggatgcggctgcgtccgacctccttgcttttcgagaatccactgccttcgattcctagtttcccacggcagggcagcctcatcggatcccatgagccggcccacgggcgcgtggcgactagggatggcaacgtgtacaataccagcagcaccgcgtgcgcatgtgggccgcctccccggcattcggcaggcagctcgtcctgctctactgcttccttccttctcctcctccactctcctctgtcaccggcttccccccatcctgcccctcgtgctccagctcctccgggtccgggccaaccacgcgatggcggcgtccgccgggacggtgtacgaggcggacgcggaggccgtcgtgcgccggatcacgccggcactcgaccgcgccagacacaagggccaggcagggaagatagcagtaatcggaggatgtcgtgagtacactggagctccttattttgccgctatctctgccttgaaagttggtgcagatctttcacatgttttctgcacgaaagatgctgctacagtaattaagagctatagccctgaactaattgtacatccaatattagaagaatcttacagtgtaagggttgatgaacgagcatctgtttcttctaagattcttacggaagttgcaaagtggatggagcgctttgattgcattgttgttggtcctggccttggaagggacccctttcttctggaatgtgtgagtaatatcatgaggcacgcacgacaggctaatattccaactgttgtggatggggaaaccctcttgccattttaacaccaaatgtctatgagtacaagcgtcttgttcagaaggttcttaactgtgacgtagatgaggaaagtgcttctgagcagctaatcgcactttgccaaaaaattggtgatgtaacaataatgcagaaaggaaaagctgatgtcatcagtgacggtaaaacagttacacaagtgagtacttttggttccccaagacggtgtggtggtcaaggtgacatcctttctggaagtgtggcagtatttgcatcatgggcacgacactttgtcttgacaaacgaagaacctacagagaaaagagttaatcctatgacccttgggtgcatagctgcctcccttctactccggaaagctgcgtcacatgcttttgagaagaacaagagatcgactgtcacctctgatatcattgagttcttgggcaaaagcttggaagatatctgccctgccgagcactagctcctgccagtaattgtagtcatgcacgcggaagcctaataatgtttatatgtctgttgaacagggtgttaccatgcctaattctaatgttgcccagtgatgttgagaactgtgcagtagaagcgtaagattgaaactggggaacgacgactagaattctgaacacatgtttctagtcgcctaggactatccgtcttcttctcgacaacactatcactatatataaacttgaccttaggattagtactgctattggtgctagtagtttatttgaattgaagtaatttgcgtaggttctgagcgag

SEQ ID NO: 121815 - DNA, 1689 bp, Zea Mays
ggaacaactgaacggccggcagtggcagaggatgcggctgcgtccgacctccttgcttttcgagaatccactgccttcgattcctagtttcccacggcagggcagcctcatcggatcccatgagccggcccacgggcgcgtggcgactagggatggcaacgtgtacaataccagcagcaccgcgtgcgcatgtgggccgcctccccggcattcggcaggcagctcgtcctgctctactgcttccttccttctcctcctccactctcctctgtcaccggcttccccccatcctgcccctcgtgctccagctcctccgggtccgggccaaccacgcgatggcggcgtccgccgggacggtgtacgaggcggacgcggaggccgtcgtgcgccggatcacgccggcactcgaccgcgccagacacaagggccaggcagggaagatagcagtaatcggaggatgtcgtgagtacactggagctccttattttgccgctatctctgccttgaaagttgtcagtatcatctagaactttcatcacttcaaactatcattgccaatatttcacatcgtgtctttcagggtgcagatctttcacatgttttctgcacgaaagatgctgctacagtaattaagagctatagccctgaactaattgtacatccaatattagaagaatcttacagtgtaagggttgatgaacgagcatctgtttcttctaagattcttacggaagttgcaaagtggatggagcgctttgattgcattgttgttggtcctggccttggaagggacccctttcttctggaatgtgtgagtaatatcatgaggcacgcacgacaggctaatattccaactgttgtggatggggatggcctatttcttgtaaacaataaccttaatcttgttgaaggaaaccctcttgccattttaacaccaaatgtctatgagtacaagcgtcttgttcagaaggttcttaactgtgacgtagatgaggaaagtgcttctgagcagctaatcgcactttgccaaaaaattggtgatgtaacaataatgcagaaaggaaaagctgatgtcatcagtgacggtaaaacagttacacaagtgagtacttttggttccccaagacggtgtggtggtcaaggtgacatcctttctggaagtgtggcagtatttgcatcatgggcacgacactttgtcttgacaaacgaagaacctacagagaaaagagttaatcctatgacccttgggtgcatagctgcctcccttctactccggaaagctgcgtcacatgcttttgagaagaacaagagatcgactgtcacctctgatatcattgagttcttgggcaaaagcttggaagatatctgccctgccgagcactagctcctgccagtaattgtagtcatgcacgcggaagcctaataatgtttatatgtctgttgaacagggtgttaccatgcctaattctaatgttgcccagtgatgttgagaactgtgcagtagaagcgtaagattgaaactggggaacgacgactagaattctgaacacatgtttctagtcgcctaggactatccgtcttcttctcgacaacactatcactatatataaacttgaccttaggattagtactgctattggtgctagtagtttatttgaattgaagtaatttgcgtaggttctgagcgag

SEQ ID NO: 121816 - DNA, 1621 bp, Zea Mays
ggaacaactgaacggccggcagtggcagaggatgcggctgcgtccgacctccttgcttttcgagaatccactgccttcgattcctagtttcccacggcagggcagcctcatcggatcccatgagccggcccacgggcgcgtggcgactagggatggcaacgtgtacaataccagcagcaccgcgtgcgcatgtgggccgcctccccggcattcggcaggcagctcgtcctgctctactgcttccttccttctcctcctccactctcctctgtcaccggcttccccccatcctgcccctcgtgctccagctcctccgggtccgggccaaccacgcgatggcggcgtccgccgggacggtgtacgaggcggacgcggaggccgtcgtgcgccggatcacgccggcactcgaccgcgccagacacaagggccaggcagggaagatagcagtaatcggaggatgtcgtgagtacactggagctccttattttgccgctatctctgccttgaaagttggtgcagatctttcacatgttttctgcacgaaagatgctgctacagtaattaagagctatagccctgaactaattgtacatccaatattagaagaatcttacagtgtaagggttgatgaacgagcatctgtttcttctaagattcttacggaagttgcaaagtggatggagcgctttgattgcattgttgttggtcctggccttggaagggacccctttcttctggaatgtgtgagtaatatcatgaggcacgcacgacaggctaatattccaactgttgtggatggggatggcctatttcttgtaaacaataaccttaatcttgttgaaggaaaccctcttgccattttaacaccaaatgtctatgagtacaagcgtcttgttcagaaggttcttaactgtgacgtagatgaggaaagtgcttctgagcagctaatcgcactttgccaaaaaattggtgatgtaacaataatgcagaaaggaaaagctgatgtcatcagtgacggtaaaacagttacacaagtgagtacttttggttccccaagacggtgtggtggtcaaggtgacatcctttctggaagtgtggcagtatttgcatcatgggcacgacactttgtcttgacaaacgaagaacctacagagaaaagagttaatcctatgacccttgggtgcatagctgcctcccttctactccggaaagctgcgtcacatgcttttgagaagaacaagagatcgactgtcacctctgatatcattgagttcttgggcaaaagcttggaagatatctgccctgccgagcactagctcctgccagtaattgtagtcatgcacgcggaagcctaataatgtttatatgtctgttgaacagggtgttaccatgcctaattctaatgttgcccagtgatgttgagaactgtgcagtagaagcgtaagattgaaactggggaacgacgactagaattctgaacacatgtttctagtcgcctaggactatccgtcttcttctcgacaacactatcactatatataaacttgaccttaggattagtactgctattggtgctagtagtttatttgaattgaagtaatttgcgtaggttctgagcgag

SEQ ID NO: 121817 - DNA, 1467 bp, Zea Mays
ggaacaactgaacggccggcagtggcagaggatgcggctgcgtccgacctccttgcttttcgagaatccactgccttcgattcctagtttcccacggcagggcagcctcatcggatcccatgagccggcccacgggcgcgtggcgactagggatggcaacgtgtacaataccagcagcaccgcgtgcgcatgtgggccgcctccccggcattcggcaggcagctcgtcctgctctactgcttccttccttctcctcctccactctcctctgtcaccggcttccccccatcctgcccctcgtgctccagctcctccgggtccgggccaaccacgcgatggcggcgtccgccgggacggtgtacgaggcggacgcggaggccgtcgtgcgccggatcacgccggcactcgaccgcgccagacacaagggccaggcagggaagatagcagtaatcggaggatgtcgtgagtacactggagctccttattttgccgctatctctgccttgaaagttggtgcagatctttcacatgttttctgcacgaaagatgctgctacagtaattaagagctatagccctgaactaattgtacatccaatattagaagaatcttacagtgtaagggttgatgaacgagcatctgtttcttctaagattcttacggaagttgcaaagtggatggagcgctttgattgcattgttgttggtcctggccttggaagggacccctttcttctggaatgtgtgagtaatatcatgaggcacgcacgacaggctaatattccaactgttgtggatggggatggcctatttcttgtaaacaataaccttaatcttgttgaaggaaaccctcttgccattttaacaccaaatgtctatgagtacaagcgtcttgttcagaaggttcttaactgtgacgtagatgaggaaagtgcttctgagcagctaatcgcactttgccaaaaaattggtgatgtaacaataatgcagaaaggaaaagctgatgtcatcagtgacggtaaaacagttacacaagtgagtacttttggttccccaagacggtgtggtggtcaaggtgacatcctttctggaagtgtggcagtatttgcatcatgggcacgacactttgtcttgacaaacgaagaacctacagagaaaagagttaatcctatgacccttgggtgcatagctgcctcccttctactccggaaagctgcgtcacatgcttttgagaagaacaagagatcgactgtcacctctgatatcattgagttcttgggcaaaaggtctgtgtgcctgcacagcgtcttgaacgatctgtgctcaagttcttcgttctgatgtgctgctccatctttttttttttaccttgcagcttggaagatatctgccctgccgagcactagctcctgccagtaattgtagtcatgcacgcggaagcctaataatgtttatatgtctgttgaac

SEQ ID NO: 121818 - DNA, 237 bp, Zea Mays
atgatcagtcacaaaagcaccacagcgacatcactccagcttgaagcagttcaaaagcccacaactacatcactaatattttatatcactccagctattgttcaaaagcccacaactacatcactaattttcatggtgtctcatgttttatcttctcccgcagacatccatcagcagcattgcggcagttatacaagggagtatcagcaaagcattaagggtactcatgagaattga

SEQ ID NO: 121819 - DNA, 1494 bp, Zea Mays
ccttgttgtgagagcattgtgcacactcctctttttagccctagaagagaccgtcttgaccagtgagctcaccaaattcactgaagagattattaccttagttatttttgtcctttgtaagcattaacaagttgcatacctgggtggcttagcagcattttaagcttccatgttactttattcgagacctcattcggttagtgcataatagatactaaacctaataacctattagcatttgaagggattccttaatacatgattaagttttgatatgaaatatgaatctggacttttggattagcaagggttctttaagcagcttgtctaatttgttacttgtttcattatctgccttatgaaggatatatatttggttttgataagggaaggggggggggtgttattacctatgctgttctgcaaacaaaaggaagcgaacacagcttattttataatctgtgctatgtttttgaactgtagcttgcaattcttactgtatcaagctgatcttctaatactttaaaatatggttaagaattacttgcaagctaagttgatgagttttcctctttaaattgcaggcactggatacatttaatacagcagtagtctcaccaatatattacgtgatgtttacatcactaacaattatagctagtgtgataatgttcaaggattgggaccatcaaaatccaacacaaattgttacagagatgtgtggcttcatgactatcctatctgggacgtttcttcttcacaagacaaaagatatgactgagagtcctggacaatgtttgtccacacggcggtcaaagcatgctagtcagaatgcgtttgcaattgaagtcgtgccactaaaatgtcaagattctatagatgatgagaccttgactttgtcacttccccaggttgaaaatggttacctaaaggaagagcatcttcttagatacaaggactcgagtattgtctgatagataattctccgccaacatttggcaggaagctcttggggaccattttgctctcagacatgattgattgatgtagaactggagttcacagttttacatcaacctggcctgggatagattgatattgcagattataagttgtcaactgtggtttgcctgtatctaggtgatgattttgacaaagaagcaaaccataaggatgccacattcaggccaattaagtgctagtcatccaagaatactggttctggaaaaggaaaagcgttcgaagtgtacttagtagatggtggtgttgccaactatactaccccccccccttcatttgaggacgtcatgtggtagctgcaatgcaatcttatctggtttctatcaggacgacgccaaatagaaaatcagtcttcatttttacctgtaattacctcaaattgctgcccaggtgtcattgtgtatatttggtctgtgtaagtacttaagggaccctttcatataaactgttaatcattctaattcatgtctgaca

SEQ ID NO: 121820 - DNA, 1731 bp, Zea Mays
tcccacttatttgtcttccctctttttttcctcccgcttccgaccactcctcgtctcctccgctcacactccacatgccgacggtggtggtggcggcagcggcggcggagtcgtaggcgcccgagtaagcggtcttgtagtgacgccggaaccgggggcgtgcggggggacacgatggcggcgccggcttccgcggcggccgggcgcgccgggggcatgtcgtcggacaacgtcaagggcctggtcctcgcggtgtcgtcgagcgccttcatcggggccagcttcatcgtcaagaagatggggctcaggagggccgccgattccggcgtccgcgcgggatatggagggttttcttacttagtggagcctctttggtggataggcatggtttctatgattgtaggtgaaattgctaattttgctgcttatgcattcgctccagctattcttgtcactcctcttggtgcactaagtataatcataagcgctgcactcgcacatgccattctacaggagaaactgcacacatttggtatactcggttgtgttctctgtgttgtcggatccatcacaattgtgctccatgctccacaagagcgtgacattgattctgtaaaggaagtttgggatcttgccactgaaccagctttcctttgctatgcggctatagtagttgcgtcagccttagtgcttatatattttgttgtccctcatcatggacaaacaaacataatggtgtacattggagtttgttctcttctaggatcacttacggttatgagtgtaagagctcttggaattgccttgaagctaacattctcaggaacaaatcaattattctatcctcagacttgggcctttgcagtaattgtagctacctgtgtgagcacccaaattaactatctgaataaggcactggatacatttaatacagcagtagtctcaccaatatattacgtgatgtttacatcactaacaattatagctagtgtgataatgttcaaggattgggaccatcaaaatccaacacaaattgttacagagatgtgtggcttcatgactatcctatctgggacgtttcttcttcacaagacaaaagatatgactgagagtcctggacaatgtttgtccacacggcggtcaaagcatgctagtcagaatgcgtttgcaattgaagtcgtgccactaaaatgtcaagattctatagatgatgagaccttgactttgtcacttccccaggaagctcttggggaccattttgctctcagacatgattgattgatgtagaactggagttcacagttttacatcaacctggcctgggatagattgatattgcagattataagttgtcaactgtggtttgcctgtatctaggtgatgattttgacaaagaagcaaaccataaggatgccacattcaggccaattaagtgctagtcatccaagaatactggttctggaaaaggaaaagcgttcgaagtgtacttagtagatggtggtgttgccaactatactaccccccccccttcatttgaggacgtcatgtggtagctgcaatgcaatcttatctggtttctatcaggacgacgccaaatagaaaatcagtcttcatttttacctgtaattacctcaaattgctgcccaggtgtcattgtgtatatttggtctgtgtaagtacttaagggaccctttcatataaactgttaatcattctaattcatgtctgaca

SEQ ID NO: 121821 - DNA, 1813 bp, Zea Mays
cttaaaattcccacttatttgtcttccctctttttttcctcccgcttccgaccactcctcgtctcctccgctcacactccacatgccgacggtggtggtggcggcagcggcggcggagtcgtaggcgcccgagtaagcggtcttgtagtgacgccggaaccgggggcgtgcggggggacacgatggcggcgccggcttccgcggcggccgggcgcgccgggggcatgtcgtcggacaacgtcaagggcctggtcctcgcggtgtcgtcgagcgccttcatcggggccagcttcatcgtcaagaagatggggctcaggagggccgccgattccggcgtccgcgcgggatatggagggttttcttacttagtggagcctctttggtggataggcatggtttctatgattgtaggtgaaattgctaattttgctgcttatgcattcgctccagctattcttgtcactcctcttggtgcactaagtataatcataagcgctgcactcgcacatgccattctacaggagaaactgcacacatttggtatactcggttgtgttctctgtgttgtcggatccatcacaattgtgctccatgctccacaagagcgtgacattgattctgtaaaggaagtttgggatcttgccactgaaccagctttcctttgctatgcggctatagtagttgcgtcagccttagtgcttatatattttgttgtccctcatcatggacaaacaaacataatggtgtacattggagtttgttctcttctaggatcacttacggttatgagtgtaagagctcttggaattgccttgaagctaacattctcaggaacaaatcaattattctatcctcagacttgggcctttgcagtaattgtagctacctgtgtgagcacccaaattaactatctgaataaggcactggatacatttaatacagcagtagtctcaccaatatattacgtgatgtttacatcactaacaattatagctagtgtgataatgttcaaggattgggaccatcaaaatccaacacaaattgttacagagatgtgtggcttcatgactatcctatctgggacgtttcttcttcacaagacaaaagatatgactgagagtcctggacaatgtttgtccacacggcggtcaaagcatgctagtcagaatgcgtttgcaattgaagtcgtgccactaaaatgtcaagattctatagatgatgagaccttgactttgtcacttccccaggttgaaaatggttacctaaaggaagagcatcttcttagatacaaggactcgagtattgtctgatagataattctccgccaacatttggcaggaagctcttggggaccattttgctctcagacatgattgattgatgtagaactggagttcacagttttacatcaacctggcctgggatagattgatattgcagattataagttgtcaactgtggtttgcctgtatctaggtgatgattttgacaaagaagcaaaccataaggatgccacattcaggccaattaagtgctagtcatccaagaatactggttctggaaaaggaaaagcgttcgaagtgtacttagtagatggtggtgttgccaactatactaccccccccccttcatttgaggacgtcatgtggtagctgcaatgcaatcttatctggtttctatcaggacgacgccaaatagaaaatcagtcttcatttttacctgtaattacctcaaattgctgcccaggtgtcattgtgtatatttggtctgtgtaagtacttaagggaccctttcatataaactgttaatcatt

SEQ ID NO: 121822 - DNA, 1804 bp, Zea Mays
cttaaaattcccacttatttgtcttccctctttttttcctcccgcttccgaccactcctcgtctcctccgctcacactccacatgccgacggtggtggtggcggcagcggcggcggagtcgtaggcgcccgagtaagcggtcttgtagtgacgccggaaccgggggcgtgcggggggacacgatggcggcgccggcttccgcggcggccgggcgcgccgggggcatgtcgtcggacaacgtcaagggcctggtcctcgcggtgtcgtcgagcgccttcatcggggccagcttcatcgtcaagaagatggggctcaggagggccgccgattccggcgtccgcgcgggatatggagggttttcttacttagtggagcctctttggtggataggcatggtttctagtgaaattgctaattttgctgcttatgcattcgctccagctattcttgtcactcctcttggtgcactaagtataatcataagcgctgcactcgcacatgccattctacaggagaaactgcacacatttggtatactcggttgtgttctctgtgttgtcggatccatcacaattgtgctccatgctccacaagagcgtgacattgattctgtaaaggaagtttgggatcttgccactgaaccagctttcctttgctatgcggctatagtagttgcgtcagccttagtgcttatatattttgttgtccctcatcatggacaaacaaacataatggtgtacattggagtttgttctcttctaggatcacttacggttatgagtgtaagagctcttggaattgccttgaagctaacattctcaggaacaaatcaattattctatcctcagacttgggcctttgcagtaattgtagctacctgtgtgagcacccaaattaactatctgaataaggcactggatacatttaatacagcagtagtctcaccaatatattacgtgatgtttacatcactaacaattatagctagtgtgataatgttcaaggattgggaccatcaaaatccaacacaaattgttacagagatgtgtggcttcatgactatcctatctgggacgtttcttcttcacaagacaaaagatatgactgagagtcctggacaatgtttgtccacacggcggtcaaagcatgctagtcagaatgcgtttgcaattgaagtcgtgccactaaaatgtcaagattctatagatgatgagaccttgactttgtcacttccccaggttgaaaatggttacctaaaggaagagcatcttcttagatacaaggactcgagtattgtctgatagataattctccgccaacatttggcaggaagctcttggggaccattttgctctcagacatgattgattgatgtagaactggagttcacagttttacatcaacctggcctgggatagattgatattgcagattataagttgtcaactgtggtttgcctgtatctaggtgatgattttgacaaagaagcaaaccataaggatgccacattcaggccaattaagtgctagtcatccaagaatactggttctggaaaaggaaaagcgttcgaagtgtacttagtagatggtggtgttgccaactatactaccccccccccttcatttgaggacgtcatgtggtagctgcaatgcaatcttatctggtttctatcaggacgacgccaaatagaaaatcagtcttcatttttacctgtaattacctcaaattgctgcccaggtgtcattgtgtatatttggtctgtgtaagtacttaagggaccctttcatataaactgttaatcatt

SEQ ID NO: 121823 - DNA, 2250 bp, Zea Mays
aaccattccttaaacccacggagggtccaggtccagccgtccaggctccagaaagaggagaggagagagagagagagagaggaggacgaggagtttgtttggacgctgctccaaactccgagaaaggcaggcacagccagtgataactgtcaacagtcagtctatttaccgcgtctgctgcctgctggctgctgcctcgccccgcgtgaatcaataatcattgaatccattctaccgctgctcctcctccttgctctgccgagaagccggcgatgaggggccgcaagaggcagcaggtgagcgccagctcggccgccgcgctggtgaaggggagggagagcaccaagcagaaggagaaagaagctaggaaggagaaggaggcgagggaggccggcagggagccggcggcgaaggagaggcagatgaggcgcaaggccgggaaggagaaggagacggagacgggcggagaggggaaggagccagccaaggagaaggaggtcagggaagagggcaaggagaacgacaagcacaaggagaaggcgaagacgaaggccaacgtctgcccgcagttcttcaaggtcttcttccccgagcagtccacggagcggctgagaatcccacccatgttcaaccagcacctcaaggagcagcagccaaccggagcagtttccctgagaggcccgagcggcaacagatggcaggcagcgctcgcttcagagtccgagtcggaggccgcgtggtgcttcgaccagggctggaaggagttcgtcacggaccactccctcaggctaggccacttcctggtcttcacgcgcgacgggcccgcccagttctccgtggcggtgttctcgtcgtcaggcgtcatcgacccggcagccctggacgcgaggcctactgcgaacggcggcgcggccgtcaagctcgaagatggcgaaggcgtcggcgtccgaggggacgtggacgcaggcggcgacaccagctccgaggtgtcgcttctgcccgcggaagagggcgatggaggagcgacagggaggagaacaggagcgacgagtggtggcgctggcggcgcctctgagatgtcacttgttcttagagaagagggccgtggagtgacagggaagagagcgagagcgacgacgagtgatctcccggcagatgccagtgcgccaaagaagcactctgccctcgcgaagaaagctggtaaaaggaggcctcaagctgccacttcaaaggatgtgtcgatgattgttcacaatcccaccttcagtttgttagacgaatccaagactttcaacaagactcagatcagagacaagaacgtgcctaggagcggtaaattccttctgaggaccaccaaagcaccagttgtaatatcccaaaggcgccgagtaaccgaagaagagaagtgccttgctctcagaaaggcaatggagttcaagtcgaagcaccctttcaccatgcagataatgatcgagtcttatgtctacgtgggatttttcatgaacatcgcctgcgagttcgtcagggagtcgctcccccgcacgagcaagaagatgacgctctgggacccgatggggaagccgtgggacgtcagctacgtctactacggcgaccgcgccgccggctccttcggtggcggctggggtaggttcgctctggggaacaacctggagaagtccgacgtctgcgtcttcgagctcttcgaggaggacaacatgcgggtgcacatatacagggtcgtcccggaaattaccccgctcctgcgcgccagcaacaaggactaggcttgcggctttcctgtcgatctgcggctactagagaataacaagaagaccggttggtcattcacaatgctggaatggaattcggtgctcgttcaagagagagagatgctaataatttcccggaataaataactgactatgaacagaggagtctattagtctatgttcgcttagatttaattcgtaccggtttctactgtttatacaatgtttataaattacagttgcagcagtccaattagctggctttaatcgtgcccatattttggttggaagttggaaccctggtgactggtgtgtttgcttaactgatatcgctgtgaacttgcagccgtcggcgtgatgattcgctacatgaacattattgttgtccccattgattttttttcttcttcttcttgcggtttatggcagaaactttacttaggggtacaaaaacaggagagctgtcgcgatttatctgatc

SEQ ID NO: 121824 - DNA, 1958 bp, Zea Mays
tctgctgcctgctggctgctgcctcgccccgcgtgaatcaataatcattgaatccattctaccgctgctcctcctccttgctctgccgagaagccggcgatgaggggccgcaagaggcagcaggtgagcgccagctcggccgccgcgctggtgaaggggagggagagcaccaagcagaaggagaaagaagctaggaaggagaaggaggcgagggaggccggcagggagccggcggcgaaggagaggcagatgaggcgcaaggccgggaaggagaaggagacggagacgggcggagaggggaaggagccagccaaggagaaggaggtcagggaagagggcaaggagaacgacaagcacaaggagaaggcgaagacgaaggccaacgtctgcccgcagttcttcaaggtcttcttccccgagcagtccacggagcggctgagaatcccacccatgttcaaccagcacctcaaggagcagcagccaaccggagcagtttccctgagaggcccgagcggcaacagatggcaggcagcgctcgcttcagagtccgagtcggaggccgcgtggtgcttcgaccagggctggaaggagttcgtcacggaccactccctcaggctaggccacttcctggtcttcacgcgcgacgggcccgcccagttctccgtggcggtgttctcgtcgtcaggcgtcatcgacccggcagccctggacgcgaggcctactgcgaacggcggcgcggccgtcaagctcgaagatggcgaaggcgtcggcgtccgaggggacgtggacgcaggcggcgacaccagctccgaggtgtcgcttctgcccgcggaagagggcgatggaggagcgacagggaggagaacaggagcgacgagtggtggcgctggcggcgcctctgagatgtcacttgttcttagagaagagggccgtggagtgacagggaagagagcgagagcgacgacgagtgatctcccggcagatgccagtgcgccaaagaagcactctgccctcgcgaagaaagctggtaaaaggaggcctcaagctgccacttcaaaggatgtgtcgatgattgttcacaatcccaccttcagtttgttagacgaatccaagactttcaacaagactcagatcagagacaagaacgtgcctaggagcggtaaattccttctgaggaccaccaaagcaccagttgtaatatcccaaaggcgccgagtaaccgaagaagagaagtgccttgctctcagaaaggcaatggagttcaagtcgaagcaccctttcaccatgcagataatgatcgagtcttatgtctacgtgggatttttcatggtataacaacgtcaactatttcccacacttccattccattggcctgctcaacaaacacatctcctccattgcttctctggccgctactgtgtttcagaacatcgcctgcgagttcgtcagggagtcgctcccccgcacgagcaagaagatgacgctctgggacccgatggggaagccgtgggacgtcagctacgtctactacggcgaccgcgccgccggctccttcggtggcggctggggtaggttcgctctggggaacaacctggagaagtccgacgtctgcgtcttcgagctcttcgaggaggacaacatgcgggtgcacatatacagggtcgtcccggaaattaccccgctcctgcgcgccagcaacaaggactaggcttgcggctttcctgtcgatctgcggctactagagaataacaagaagaccggttggtcattcacaatgctggaatggaattcggtgctcgttcaagagagagagatgctaataatttcccggaataaataactgactatgaacagaggagtctattagtctatgttcgcttagatttaattcgtaccggtttctactgtttatacaatgtttataaattacagttgcagcagtccaattagctggcttt

SEQ ID NO: 121825 - DNA, 288 bp, Zea Mays
atgtaccatttacatcctacacgagaactttgggattttttttttaaaaaaaggccaaaatcggttactgtcatggagagaagtacatactgcagttccctattgattgtatggtacattttctgtaagaccacagagaattgcaggagaatcatggcctcactacagtcctacagtggtgtggcaataataatacatctgggaagtccatgcccagccacaactttcccatattatccaaagaataaacagagctttacggagaataaagaaaaaccaaacaactag

SEQ ID NO: 121826 - DNA, 1542 bp, Zea Mays
ctcctcatcttcctccctcccccttggaaataatcttccctactcttccaagaaacctagccaccatttgcaaacatgcatgcaggtgcgcccttgctggatttcagctgccctcaccatatgcacacgagcactctcacatgagcaagtgggcatggatatatagacctatatatccgtcgacggattagccttgcaaacagcagtatttggccatgcataagcacgggcaatcgggcatgagaataaggtgccgcctccggcctagtagtcgccggagatgtcggcttcttggcggcgacacgacggccttctgcgcctcgctcgtcgaggggctggcacacctcgagagcacgctggaggttgatcatcacggcggcggcggtggtgtggcgtcgccggggacggtgtccatgcgatggtgcgcggacgccatgcggctcgtgaagcggatgcagcgtgagatgctggccatcttcaggaaagccgatgtgccggtggccgccgccgccgtctcctcgtccggcgctgccgcggactggttcgagcactacatgcaggagacggcggcgctgctcgacttctgcaacgcgttcaaggccgccgtgtcgcggatgcaccgctactgcatggtcgtcgacttcgccgcgcaggtcgcgggccgcgccgccggtggccgcgacggcggcgcagcagccttcctcgtcgtggagagcgccggcgccgcccctgaaccgtgccaggcccagtcgtcgtcaccgccggccgccttccgcgaaaagatggcggacgcgaaggcggcggtggccgaggcggagcgtctgggaagggcgatcatcgtctccggcggcgccggcggggacgctggcggcatggtcgtcgtcacgctcgtcgccaagatcacgacgtccatcctatccatgttcgtgctccaggctctaaccgccccggccaccgtcgacagcggtggcgtccggaccacgatcgcctccgccgttggcgtcgtccctgagcttgagccgtggcgcgaatcgttgtcgttgatccacgcccggttcccgagccctgcggccgtggcagagcacgagaaggtcgccactgcggttcgagacctcgtcaatggcaaggtcgacggcggcgagcagctgctgagggcacggtcaggtgagctcagggaaggggtggagatgttcgactgtgtccttgacgaagtatttgatgaggtggtcaggggaaggaatgagatgctggggatcctcagagacaaggctctaacttgaccttgaggtgagctttagattacccactggatcaatccattgattgaccttgcgcaggttggagatcttcagaattaatgctgggctttatgctgatttctatttgatcagctggatttgttttgcaagtggtgtagaaatgtaaaaaatcttcagtgtcagatatgtgtatgcagatgtccagatttgttttcatttccaatggtttgtaattttacttgtattgaccttctgtctgaagtgaaattatttttgcatgtct

SEQ ID NO: 121827 - DNA, 2150 bp, Zea Mays
ggacccaactgcaaacgtggcctgcaaatatctcgtgacctgcgcgggcggaggggacccgcagcccaggccctggtggacccggggcgccagtcccagtccagtccctcactgtggactcctcgcgtgccccgccgcccttaaatcccccggcagcagcgtgctgcctcgtgtctcacccctccggacgaaatctgacccgggccacactccgctgctccgccatggcgatccgctccaaggcctggatctcgctgttgctcgcgctggccgtcgcgctctccgcccgggcggaggaggagcccgccgccgccgcggagggcgaggccgtgctcaccctcgacgtcgacagcttcgacgaggccgtcgccaagcaccccttcatggtcgtcgagttctacgccccctggtgtgggcactgcaagaaacttgctccagagtatgagaatgcggccaaggcacttagcaagcatgacccaccgattgttctcgctaaggttgatgctaacgaggagaagaacaggccgcttgctaccaagtacgagatccaagggttcccaaccatcaagatattcagggaccaggggaagaacattcaggaatacaagggccctagggaggctgatggcattgtggattacttgaagaagcaggttggccctgcgtccaaggagatcaagtcaccagaagatgcgacggcccttatcgatgacaagaagatctacattgttggtatcttcgctgaattcagcggcaccgaatttacaaacttcatggaggtcgcagagaagctgaggtctgactacgactttggccacactttgcatgccaaccacctcccacgtggtgatgcagcagtggaacggccattggtcaggctgctgaagccatttgatgagcttgttgttgacagcaaggattttgatgtcgctgcactgatgaagtttattgatgctagcaccatccctagagttgtcacttttgacaagaaccctgacaaccacccatacctcatgaaattcttccaaagctcagcccccaaggctatgctgtttttgaacttctccaccggaccttttgattctttcaagtctgcctactctgctgccgcggaggaattcaaggacaaggaaatcaagttccttattggtgacatcgaagccagccagggtgccttccagtactttggcctgaaagaggaccagacaccccttatcctcatccaggatggtgactccaagaagttcttgaaggttcacgttgaggctgaccagatcgtcgcttggttgaaggagtactttgatggcaaattgacgccgttcaggaagtctgagcctattcctgaggtcaacaatgagcctgttaaggtggttgtcgctgacaacgtccacgacttcgtcttcaaatctggcaaaaatgtccttattgaattctatgccccctggtgcggacactgcaagaagctggcgcccatcttggacgaggcagccaccactctccagagcgacgaggaagtcgtgattgctaagatggacgcgactgccaatgacgttcccagtgagtttgacgtccaaggctacccgaccttgtacttcgtgaccccgagcgggaaggtgacatcctacgacagcggcaggacggcggacgacatcgtcgacttcatcaagaagagcaaggagaccgcaggcgccgccaccaccaccaccacccaggcgccaccggcatccgagaaggcagccgccgccgagcccgtcaaggacgagctgtgagcatccaaggtgtggacggctgtggctgcgtaagcatgggaggaaaacctggcgctaacgtgcctccaacgcctagtttttgcgggaccagagggagagagagagagggacggagttagagagagaggggatctgcgacgtgttttgctctgcggcggcatgtctgtgtatcccattgaggttatgtacacaattacaccgcggtcggtgggtgttttttagttaattatcacaagtgacagtagaaaggaacagattgtgatgaggttgaatggatgaataaatcgctagtccgccccgcctcgttggatgcgtcaatgaaacaggcgcttttgtgacgtgtccaccagcactaacgctggaagcaaactcgaacggaga

SEQ ID NO: 121828 - DNA, 2437 bp, Zea Mays
aaaaaaagtccatgaccgcgtttttctcttctgcctttcctgccgccggccgggtctactcgtcccatcttgtagctgcagcggcaccccctcaaaatcgtccaaccaatcccaccagctgctcatctcgaatccagcccgaaacctcgcgccacgcgtgccgtgggcccagttcgtgcgcgttcagctgctgccccgcgcccagggatcgggaaggcaagctctttggtggttcctaagggcgaatctcgtggcgattcgctcagatttggatttagggtttaggaggcggtgctggtgatcggtttgtgccgccgggagagatgtcggcggctgtggcgtgcgcggagagggcgactaacgacatgctgatcggcccggattgggcggtcaacatcgagctctgcgacatcatcaacatggatcccggacaagcaaaggatacactcaaactcctaaagaaacgtcttgcaagcaagaatacgaaagtgcaaattctaacactttatgtgctagagactctaagcaaaaattgtggggatattgttcatcaacagattgttgagcgcgacatattgagtgaaatggttaagatagtaaagaaaaagccagacttgagcgtccgagagaagatattgagtttgattgacacatggcaagtggcttttggaggtccatctggaaaatatcgacagtatcatgcggcttaccaagaactcagggctgctggtgttgattttccgcctcgcgaggaaaattcagtcccgttgtttacaccacctcaaactcaaccattaagacatccacatctatatacacctccaggtcaaagctatgaagatgctgctatacaagcttctcttcagtctgcccctcctgcatctgccctcagtctgagtgagattcaaagcgctcgagggattgtggatgtgttagatgaaatgttaaatgctctggaccaccggcatcctgagggtgtaagggaggaggtcattgttgaccttgttggccagtgccgatcctatcaatctcgtgtcatggatcttgttaacagtactggcgacgagagccttttatttcaggctctaggactaaatgatgagttacagcgtgttgttcagcgtcatgatgacatagcaaaggggatccctcctggtactggagcacctttacctgcttctggaaatgtcaaccaagggactgccccacctaggcccactgcggtttcattttctccacttctaaatgtacatgaggacgatgaaccagaagacgagttctctgtgctttcccgcaggtctgcgagggatggtgcagtagcacagaacaatgtgccctctgctccaagaaatgagaggtcatacccaagcccacttcttcctccaccaccagcatctaagaggcctgtttataccgaggcaagcagtgttgactatcttagtggtgactcctacaagtcagagaaggtttcagatgatttcatcaacccaactgctccagctaacatatccacatcatcccattcaaaggcagaagcacatccacctccgagttatggtggcaggccagacagagtatctgacgacttcataaacccaactgcacctagcttctcggcgccttctcgtcctacaaatgaggagccagcccgcccatccgtgaagcggcaagagagcctacctgacgacgacttcataaacccaactgctcttcctggtttctcgtcgtcttcagctactaaggagtctggcgaggaccttccaaaggctccatgggaagcacaagctgccgcgggttccctaccgccgcctccggcgaggtacggccagagacagcagtacttcgagcagaacgtgtattctggcgggagcaacgaaggcggctacaatggactgacgacacagaccgaaggtctctcgctgaacccgcggagcagcgagaacgagaggagcgcggcacggccggcagcgtcccgccctgccaaacctgaggactcgctcttcaaggacctggtcgacttcgcaaagaccaagccttcgtccccgtcgaaaccggccaacagccgcaggacccgctagaacgactcgtgcgatgcatggatggacattgggtcgttcggatattcatttcacaggttagcggcttttagatggtaccatgaaataaggccgtctggagactggttttcattgcatatttgcattgcatgggaaattgttttggttgcgtttagagtggcagatgtcagaaacgttgcttgctcataatcctgggtgtgtgatgtctagttagctgctcctaaatttctgtgtcgttggcttccgattctcattttctttttctttcacttagctgtgtatatatatgttacccgattcgacagcaaatattcatagttgagtttgtgacttgaggaatgaggtgttcctattttcgg

SEQ ID NO: 121829 - DNA, 2440 bp, Zea Mays
aaaaaaagtccatgaccgcgtttttctcttctgcctttcctgccgccggccgggtctactcgtcccatcttgtagctgcagcggcaccccctcaaaatcgtccaaccaatcccaccagctgctcatctcgaatccagcccgaaacctcgcgccacgcgtgccgtgggcccagttcgtgcgcgttcagctgctgccccgcgcccagggatcgggaaggcaagctctttggtggttcctaagggcgaatctcgtggcgattcgctcagatttggatttagggtttaggaggcggtgctggtgatcggtttgtgccgccgggagagatgtcggcggctgtggcgtgcgcggagagggcgactaacgacatgctgatcggcccggattgggcggtcaacatcgagctctgcgacatcatcaacatggatcccggacaagcaaaggatacactcaaactcctaaagaaacgtcttgcaagcaagaatacgaaagtgcaaattctaacactttatgtgctagagactctaagcaaaaattgtggggatattgttcatcaacagattgttgagcgcgacatattgagtgaaatggttaagatagtaaagaaaaagccagacttgagcgtccgagagaagatattgagtttgattgacacatggcaagtggcttttggaggtccatctggaaaatatcgacagtatcatgcggcttaccaagaactcagggctgctggtgttgattttccgcctcgcgaggaaaattcagtcccgttgtttacaccacctcaaactcaaccattaagacatccacatctatatacacctccaggtcaaagctatgaagatgctgctatacaagcttctcttcagtctgcccctcctgcatctgccctcaggtttctgagtgagattcaaagcgctcgagggattgtggatgtgttagatgaaatgttaaatgctctggaccaccggcatcctgagggtgtaagggaggaggtcattgttgaccttgttggccagtgccgatcctatcaatctcgtgtcatggatcttgttaacagtactggcgacgagagccttttatttcaggctctaggactaaatgatgagttacagcgtgttgttcagcgtcatgatgacatagcaaaggggatccctcctggtactggagcacctttacctgcttctggaaatgtcaaccaagggactgccccacctaggcccactgcggtttcattttctccacttctaaatgtacatgaggacgatgaaccagaagacgagttctctgtgctttcccgcaggtctgcgagggatggtgcagtagcacagaacaatgtgccctctgctccaagaaatgagaggtcatacccaagcccacttcttcctccaccaccagcatctaagaggcctgtttataccgaggcaagcagtgttgactatcttagtggtgactcctacaagtcagagaaggtttcagatgatttcatcaacccaactgctccagctaacatatccacatcatcccattcaaaggcagaagcacatccacctccgagttatggtggcaggccagacagagtatctgacgacttcataaacccaactgcacctagcttctcggcgccttctcgtcctacaaatgaggagccagcccgcccatccgtgaagcggcaagagagcctacctgacgacgacttcataaacccaactgctcttcctggtttctcgtcgtcttcagctactaaggagtctggcgaggaccttccaaaggctccatgggaagcacaagctgccgcgggttccctaccgccgcctccggcgaggtacggccagagacagcagtacttcgagcagaacgtgtattctggcgggagcaacgaaggcggctacaatggactgacgacacagaccgaaggtctctcgctgaacccgcggagcagcgagaacgagaggagcgcggcacggccggcagcgtcccgccctgccaaacctgaggactcgctcttcaaggacctggtcgacttcgcaaagaccaagccttcgtccccgtcgaaaccggccaacagccgcaggacccgctagaacgactcgtgcgatgcatggatggacattgggtcgttcggatattcatttcacaggttagcggcttttagatggtaccatgaaataaggccgtctggagactggttttcattgcatatttgcattgcatgggaaattgttttggttgcgtttagagtggcagatgtcagaaacgttgcttgctcataatcctgggtgtgtgatgtctagttagctgctcctaaatttctgtgtcgttggcttccgattctcattttctttttctttcacttagctgtgtatatatatgttacccgattcgacagcaaatattcatagttgagtttgtgacttgaggaatgaggtgttcctattttcgg

SEQ ID NO: 121830 - DNA, 264 bp, Zea Mays
cacctttgcttgttcggcatacatgagctatatgagggtggcgatcagatttgcttatggttggtggcctactaggatggttgtatggccagtcactaactggaaagctaaagcggactcaagcttctcccaggtaagtttatgcttcgcttctagcgacgcgtgtttttcttctttgtccttatacttggccaggcatgacgagaagagatcatcgtccatcttagacaacattttcttgacatttaccgtcagattcaggac

SEQ ID NO: 121831 - DNA, 102 bp, Zea Mays
ttcttttattcatttattatcgttacaacagttcgtaatagaacactgcacaattaggacagaatgcatggagctttacactttccagatgtttggttaccg

SEQ ID NO: 121832 - DNA, 294 bp, Zea Mays
atggcgggcgaggccggggcgggtgggagcaggtctgctagagctgcagagaacgtcaaggacccatatgtccagggtgtcggcgaatgggctgtcaaggagcacaacaggcagaccggcgagagcttgcagttcgccgaggtggtcagtggcatggaacaggtggtcgccggcaccaactacaagctcaacctcgcaaccaaagatccaacatcgtcttaccaagcagttgtgtttgatccgttgccaaactccaccaaaaaacgccagctcatgtccttcaagtctatttga

SEQ ID NO: 121833 - DNA, 289 bp, Zea Mays
aggcagcaagccagcagcacaagaaccacaatccatagacatccatcaagccaagaagaatggcattcctcagcacgaacccgttgatgagcgtccccatcacggcgacagccgctcctcgccgccgccttagcctggtcgtggtcagggccacggccgccaaatctaacgagcacctgcaggaagagcaagcatccgtggccgacggagctcgtcacgacgccggtgggcgtcgccgagccatggtgttgttggccgccaccgctgctgtcactggatcatccgtagc

SEQ ID NO: 121834 - DNA, 414 bp, Zea Mays
atgacaaaaacaatagcgtccccatcacggaggcagccgctcctcgctgccaccgcagcctggtcgtggtcagggccgcgaccgccaaatctaacgagcacctgcaggaagagcaagcatatgtggccgacggagctcgtgggcgtcgccgagccatggtctgctagagctgcaggtgtcaccacgctgagcggacagtatgtcaaaatagagaacgtcaaggacccatatgtccagggtgtcggcgaatgggctgtcaaggagcacaacaggcagactggcgagagcttggagttcgccgaggtggtcagtggcatggaacaggtggtcgccggcaccaactacaagctcaacctcgcaaccaaagatccaacgtcgtcttaccaagcagtcttaccaagcagttgtgtttga

SEQ ID NO: 121835 - DNA, 1609 bp, Zea Mays
gtggccagaagccgcgagaagctgaaacaaacaggcactttctctccccaagccgcctccctgcgaccctgccgttccgtggagcaccaggccagtgccgttccgatggtcattccaagccagtgccgttctcctttggccgtccctgctccagccgtgagctcacccaggccacggcctcgtcgaaccgcacagcccctgcgctccttccccagccgcgcttggcccagccctccctgctcgatctccttcgagccgtaacggctccctggcgtgtccggctccctgcccctctccatggcgtcgcccagctctagctcgccccccctctgatctgtgcgcaggggtttcttccatggcgagctcccctgcaaacttcatctagccgccggccgagtttccttggtggtcgcttacccccagcatcggccagagcttgctgtcattccccaacaaacatgtggttgtaggtgagagatttcagaagtctgttggatgaagaaaagagaagtgaaatttgtgcagcgcccgtcaggtgttaggtttaatagatattgtgtctaccgtgtgaggcaatcgcgccagcttcctttgggtttgggactgggagctccatcgctctatgcggcggtgctcgcccgtgtctcagctgccttcaatggcccccttgcccgcgcagtcgtctttggggtccatattgatggtcacttgatcgtggaagggcttcttattgcagtcatagtgttccagctctccacgaagagctacaaaccactaaagaagccactcactgaaaaggagattgatgagctatgtgatgagtgggagccagagctgctatgccctccaatcaaggagggggccaaaatagatgctccaacattggaaagtgccgttggaccacatacgattgttgattgttgatggtaaagaagttgtgaactttgcatcagcatgaggtctggagtctagacacagtgttgcaaactgaggtttaatcatcttagcaactacggtacgtgaccctgagcgcgtgattgttgcgaaacaacgaccacctcggtctacaccttaaaggtttgcgcgacatggcttttcatagtgctcaattggatctatcccctgagcataggagaaaagtatcaatttgtacagtggatccaagtattctataaagcatgcatcctccaatttcccacaagcgagaatggcatgatatgatggatgaaatggctgttgcggtcaattgtctttatcaattgtctttcaagaaccacactttgtattggtttgtgtgcagttcaagctctgcaaggtgaggtctgttcagtttggccagaaagtcatcccctacctgaacacctacgacgaccgcaccatccgctaccccgaccctctcatcaaggccaacgacaccatcaagatcgatctggagaccaacaagatcatggacttcatcaagttgacttcatcaagttatatacttagttaggctcaatgttagcacaaacagttgatgagcaagtttaaatttagagtacacttatgtatgagttatttgacaatacttatttatgagatattgaatattatttatctatattatatt

SEQ ID NO: 121836 - DNA, 471 bp, Zea Mays
atgcaggtggctcctcacattcctgttgagccgcagcatgtcggactggtgcgttcccttgtactcgtgctggacgttcatgacccactggttgatccgcttgttcgccctggccgtatccagccagtcgctctggtaggggagcccggagaggatcctcctcttcttctgtcggtccgtgcggccgaggtacttcacgatcctgtcgtgcagcatcaggaaggcctccgtgcggtttttcatcggcagcagcgcggcgttgttgacgatcaagaactcgtcttccatggcgagggtgtccctccccaggagcgcgaggaactcgcggtagtcgggaggcagcctggcgatggcggtatcacccccaccggagattctgatgatcgcgtgcaggagcctggacagctgcctgtagtcgtctctcacgcgctcgatgccgaagcccttggcggtgaagctgacgcctcttag

SEQ ID NO: 121837 - DNA, 96 bp, Zea Mays
gttcctcaccagctttgtcttgccgactccactttcccccgtcacggtgatcacatttttatgattcccgctgcctttataaagccaattcttaag

SEQ ID NO: 121838 - DNA, 1927 bp, Zea Mays
tctatcgatgaaaacatgagggtcctcccccatgtggtggagcagatcaagtccaccctcgtccaccggtacacccgcctcatcactgctgcctccgcctcctccccagtttccctacgtgccctcctccccatccatgcccgtgccatcgtcctcggtgtatccgccaacccggccttcgccaccagcctccttgccggtgtggcgcctgcttccctcgcctacgcacgcagggtgttcgatgccacgcctgtacgcgatgcctacatgtggaacactctcctccgtgcacactcccactcccagttgtcacacgccgctgacactctcgccctttacaagcggatgcgtgccgccggtgttgcgccggaccattacacctacccaattgtgctcccggcttgtgcggctgcgcgtgagctgtggcttggacgggccgtgcatggcgacgtagtgcggttcgcgctcgcaggggacgggtttgtgcacagcgctctcatcacgatgtactttcaggaaggggaggtggccgacgctgagctggtctttgcagagagccatggctcatcccggacggtcgtgtcgtggacttccatggttgctggctacgtgcaaaactactactttggggaggcagttgcgctgttcggcacgatgattgctgagggtgtccttcctaatgagatcactctgatcagtttcctgccctgcttgcagggccaagaatggctggatgccggggaaatggttcacgggttcgtgatcaggttggggtttgatgcaaacattccattggctaatgcgctcatcgcaatgtatgggaagtgcgggagcattcccatggcacaaactctgtttgagggaatgccagcacgcagtctggcttcttggaacacgatggttgcaatgtatgaacagcatgctgatgtggttgaggcaatcaagttcttccgcaggatgcttactgagaaagtggggtttgattgtgtgactttggtcagtgttctgtctgcttgcgcacgttcaggagccttgcagactggcaaatgggtgcatgagcttgcccggaatcatgggcttgacacagatgctaggatcggcaatgttcttgttgacatgtatgcaaagtgcggtgagattgctagtgcaaggaatgtctttgactgtttgcgtatgcggagtgttgtgtcctggagtgccatgataagtgcatatgctaaccatggggcttctgaagaggctctcaagctcttctccctgatgaaaaacgaaggggtgagaccaaattctttcacattcactgcagttctagtggcatgtggtcactcaggccttgttgaagaaggactgaagcatttcaacagcatcctttctgactaccaaatgtcacctacactggagcactatgcctgcatggttgacatgctagggcgtgctggtagacttatcgaagcatatgaaatcatcaggggaatgtcgttgtgcccagacaagtgtgtgtggggtgcattccttgcaggttgtaagcttcatggtaatcttgagctagctgaattcgttgccagggacctcttccagtcaggctccaatgatgtcacattctatgttttgatgtcgaacatgtactttgaagctggaatgttgaaagatgcagaaaggatgaggtgggccatgaaggagatggaactcaataagacagctgggcgtagcgcaattaaccaatagggaaagaataaccgccatgaggtagcagactttgtaatctgatattgattagctttattatttccattacatgtactaacatgcagttttgatagtcaaattgttttatctgtacttctgtagtaatttagggtatatgatagactagttattgtaaactcaatacatggggcttgttcctcctttcaagctttgtttggat

SEQ ID NO: 121839 - DNA, 1916 bp, Zea Mays
gccggccgaccaagaacggagtcgcatacacgtctgccgccggccgcgcgtccatcgaacttcgaagccaagattgccaagtcatttcccccaaattcctttccccttcgatcctcccctgcaaaccaagtctcaacgaccatggacgtcttcccctgaccgcgccccactgccccagacgccgtcgcctacatccatgagacttcccgatcttcctgcggccgaggatgtcccagcgcgacgtcgactacagttgcggattctgtggataccctctaaacctttcatcttctaaccgaagcacgtctgaagtaggctcctcatataagaagtctctgaagaagggattgatttcattcatttctgttgatctaagccgatttactcaggtggacaaggtatcttgctttcccctcacctggcgcagttacaggccaaaaactaagcttctctgccgaaaatgcggagcatcgatcggctatggatacggtgagccagctgctttgtgcagttttgatccagcaagttcatcttcctccagtacatcccagaagtatttaataaagatccaagcactccaaccttcagacgggacccagtaagtcagatatggaaagagagacaatagatgccagcttacagaactccatcagttacctatctgacgactgcttgctttctatatttaacatgctagaaagcgagtcagagaggagtgcttttggtttgacctgcaagaattggttcaaggttcggaaccttggtcggaaatcactaacattccattgttgttttaaccctgcaatagacaaggagcatgccaagtgcatccctaaggtactggctcactcaccttggcttaaccggatatcccttgctgggctcacagagctacctgactcagctctgagcacgctgagaatgtctggatcgtctctaaaatccctttcattctactgctgttctggtataacagacgatggcctagcacaggtggcaattgggtgccctaatttggtggtggtggaactccaaagctgctttaaaattacagatgttggcttggaaagcctttcaaaaggctggcgtgcccgtgctttgaagagtctaaaaccttggttcttgcatgggcatttcggaccaagggatctctggagtctttagcaactgttcaatcatttgcacactaagcattacaggttgcaggcgtctgtctggtgctggattcaaaggctgttcgagttcgttttgttgccttgaagctgagtcttgcatgctttctccagatggtttattggtaaccttgcttttgctaaaagcctctgcgttctgaatctcaggatgtgtcgctacctcacagatgattagcaatagccagtgggtgcccactgcttgaggagtggaaccttgctgtttgccatggtgtccatttacctggctggtctgcaatcgggttgtactgcaataagctaagagtgctgcatatgaaccgcggccggcacatctgtgaccagagtttgctggccctcggcaatggctgtctgtgccttgaggttctgcattaaatggttgcgtcaagatcaccaacaatggcctggctgatgaagtcatatccattggcccttccattgagaacttgttccggctgcattgaggagaaactgtagttaggttttctaagcctggggctaaaagtttagtagccccgtcccattacagctgattatgtgcattgtgtttgctctagtgtatacataacaagacccaccctactcatgtgggaaacatgggcactgggccagccctttaacaatagtgaatcgtaatatacaaatgaactgagcttatgtaaggtgtatttttttcctaatatgctctggcttgctctggtttactggtgcagcagattacttacg

SEQ ID NO: 121840 - DNA, 1555 bp, Zea Mays
cgtataagagtgcctgctctccatggtcagagagcacacacaacacacaaattcatctccatctccagccatcttgatcactgccgtctatagcttgactacacgcactagctcacctcgaccggccggccggccggtagtcttagcatcagcacgcagcaataatggcggcggtccgtggagccattgccactctgctggtggtggtggtggcgctggcgctcggcacggcttcggcgttggacttttccgtccggaagaccaagccgcagcctccccggatgtcgacgccgggggaccccaagaaggccccgggcaacggcaagttcaccaccgtcatcaacaagtaccacaagaagaactacgagatcacatgcaccaccgactggggcgcctcctgctacgtcaagtgccccgcccgctgccccaacaagtgcctcgcctactgcgcctactgcctcaccttctgcatgtgtgacctgatgccgggcacctcgtgcggcgacccgcgcttcacgggcgccgacggcaacaccttctacttccacggcaagaaggacgagagcttctgcgtcgtgtcggacgaccgcctccacatcaacgcgcgcttcatggggaaccacaacgccgactccggccgcgacttcacctgggtgcaggcgctcggcgtcaccttcggcggcgctcacagtcacaggctctacgtgggcgcccgcagggccgccgagtgggacgaggacgaggaccacgtcgtgatcgcgctcgacggcgaacccgtcgacgtcgaggccgccaaggacgcgcgctgggtgtcgacggccgtgcccgggctgtccgtcacccgctcccacgccgtcaacgccgtcgtcgtggagctcaacggcgagttcagcatctccgccaacgccgtgcccatcaccgacgaggactcccgcgtccacggctacggcaagacggggaaggactccctcgtgcacctcgacgtttcctacaagttccacggcctcaccaaggacgtcgacggcgtgctcggccagacctaccgtccggactacgttaacaagctcgatatcagcgccaagatgcccgtcatgggcggcgccgacaagtaccgctcgtcgggcctcttcgccacggactgcgccgtctcccggttccaccgcgtcggcggtggcgctgacgccggcttcagctccttcgcctcgtaaatggcacccacgctggctctgatccgtaattccggtccaggaaataagccaacacctgccaacttacgctgggccatataaacgtaacaggtcttgtgtatttatttttgtatttgtgacggaaatttatatatattatgctaatgcaactattgttcgattgtaatcttgctgacgaataaattgggatgtgtaaactattctcgtaacatcctgttgggggagaaggtagccaaacgcaaaaagggctatagtgtgtaatggttaaagcttcggagtaatttcttcaggtttcgtggtcgaatttcagacttaattaaaaaaattctctccttgtacttcatccg

SEQ ID NO: 121841 - DNA, 376 bp, Zea Mays
atccatgatcatgtcatttcatatagaactcctaccagaaggagtgaagattcaacctgaagtggtgactgaagaggaatctactccagtggctgctgatcaagtggaggatccatctaactggggtttaatagagggatcgagtacctcttcactgcaataaggtgatgaggagtactctagttgttcctgtggctggaaggcgtttccagttctggaggaggattagttaggattgtgtataagctttggagggttcctaccttcctgctattgtaataagttatgcactttgagtatatcaggacttgtaataaatgtaactcttcctatgcaataaacttcagttttagaaatgaaaagaatcttttataaa

SEQ ID NO: 121842 - DNA, 872 bp, Zea Mays
actgaggattgtataccagtctaacacagaactaccaaaccgaccgagccgcgaacttcacccctgccttctctcccttctccgtccaggccctagtgcccgcgaatctcgtgcagcaagtgagcgccgccgccagactacgccaagtgtccagttcctcgtcgggtataccctttctcttccttttctgctgtgtggtacctagcaccatcggaaccctaacttgagctatctggctatttgcatccggatctaatctaattaccaagcatgtacatacatactaacttcgattttttggaaaaatattggaacatctgtgtcctttactgggttctccccctatagaaaatttgagtattagactctacatgtcaagaaagtatggcgccaagaagcaaggcagagcggaaagcagtactaggtgctggcgcatggatgttcaatgtcgtcacatctgttggtatcatcatggtcaacaaagccttaatggcgacacatggttttagttttggtaggagcatgccaaatcttcattcctaactgcatgcaatgcttgattcacatgcgccttcttttctgtctaaaagtgaactactattgtgcagaaaaatcagtttgcttgtcttgtgctaatttgttcactactttttgctcctacagctacaacactgactgtacttcatttttgcaatgataaccttgatgacgttagtaatggaaacgtgtcacatgatgaatgtcctcagtcctctgctatataaaaagaagaaaatgagtggagtctgccaagcaaacagtctgctaggcaaaataccaaagaccaaaggagactcgcggaaagaaaagagagagtaaaaaagataaaaaga

SEQ ID NO: 121843 - DNA, 641 bp, Zea Mays
gtgacaaccagcacaattccacttacattgaggtgattaggtggtgctgcaagagaagtgagaagtcggtttgcatggtagaataagggtgattctgagcctttttgtgttttacagacttatcacttgtctgttctcatagtgttgctatttgtattttatttctgaaaaattttacgggttgcttgcctaagtaagccttcataaacatttaagtggtgtgtacttttggattgttggcagggtccgattttgtgaaaggaatgcttttgctccccttgccttttcggatcgaaatcttggtgttgattgctaatgcagttttagattgttggtagggtccaattttgtgaaaggaatgctgaactgctgatgagtgatgaggggcgatgatgctcaaccttttccaaaatgcatggcactaagcaatgaaggctgctacaagtgtctactttgagctaaccctctccccacatgaagcctattttaatcacccctttttggtttgtggttgtgcctaggatggtcattcggatatgtgacaaccagcacagttccacttacattgaggtgattaggtggtgctgcaagaaaagtgagaagtcagtttgcatggtagaataagggtgatgctgagccct

SEQ ID NO: 121844 - DNA, 1177 bp, Zea Mays
ttttacctgtttgaatattcccattgaaacttgtatatgtgtctcatctaccttccggaaaagaggttaaaagagtatatcatgttttatgttagtctgaaaagacgtttcaacgttcgtttaaacgtttaaacgttgaaaagttggttcataacgttttaacgttttaccgctttaataaccatgttgttcgtgttttttcttggagaatcacagtccgctgctcgcccgaccggagtgaggcggcgcggcgatggagcacgggtcgttgacagactcgacgtcgtcgactttctccatcatggacgaggaccacaccctcgccaactccgccagattcgtcctcaaccaggacccaagggtagcattttgtggatataccatccctcatccttctgagaagaaagtgaacataagacttcagacaacaggagatgcagcaaaggatgtactgaaagatgccttgcagaatctgatgattatgtgccagcatgtcagagggacaatggacaccgcggtggttaaccatagagcaaaaaatgctgcagaagaaatggatgttgatcagaactagaatgaacgcagtgtttgttgagaccaaacacaatatcattacagcttttagtactggtcagaagctcggagagctcagtcattgttccagttgtttgtaggagtaacggtcgtattcattggcttccacttctgcaatactgaaacttcttcagtttactgcataattgcttttagcaacatctatactactgcttatgtctttagtgtaggcgtccatattttttgttctgccatcgtgcggtctgcctccctccccgtgcccacagtccccaccgccgagcacagccgccgcgcccgcagtcctgcggtccccgccgccgagcacagccgccgcagtctcgccgcgcccgcagtgcgacggcggtgccggtgagggggagccgtggttctacttctgcccgtggcaggagcgggaggcgcggggcgggcggcccagccggacgacgctgttggggtactggaaggccgctggtacgctcggggccgtctactccgccgaccgccgcgccatcggggtgaagaagaccatggtgttctattacggccgcgcgccgtcagggaccaagaccaagtggaagatgaacgagtacatggcgttcca

SEQ ID NO: 121845 - DNA, 970 bp, Zea Mays
ttttacctgtttgaatattcccattgaaacttgtatatgtgtctcatctaccttccggaaaagaggttaaaagagtatatcatgttttatgttagtctgaaaagacgtttcaacgttcgtttaaacgtttaaacgttgaaaagttggttcataacgttttaacgttttaccgctttaataaccatgttgttcgtgttttttcttggagaatcacagtccgctgctcgcccgaccggagtgaggcggcgcggcgatggagcacgggtcgttgacagactcgacgtcgtcgactttctccatcatggacgaggaccacaccctcgccaactccgccagattcgtcctcaaccaggagtaagtgaaggctttctctttcccccctttgttcaatctccaaagaatcagtatctattcgcttgttatctgtggatcgttgcgattatgttgggatagtcaaatagatgcaacagagcgttcttggaggagaaagtagccctctttattttgttcatcatagtgttttgcgatttataggggggttagggttccgtaatagctgatgggaggatggtcagttatgtcttaattttgaaggtctgttggtgtctctagctcgactgcatagggaaatctaacgctattttgataagagccaccggccacaaataaaattcttgtagatgaccacatagtcacaatgtttccgggtcgaggaacgggatggtggaacgttgtacgctacttggaagaggtttttacactttgggtcgaaaatgaacccgtgaatctgggtcggggtcaacgaatctggcttgatggtcaaaggcatggaccccgttttatgtgactatgaattaccatggttcatggtttttgttcctggcaagggacatgatgtgcaattcttttgggattatgcactagaagggttaatcactaaattgtgattttagcaaaattattgctacat

SEQ ID NO: 121846 - DNA, 716 bp, Zea Mays
ccccggccccggccccggccgcggccatggcggcctccgctcccatccacctcctcctctcgccctcccgctctacatggccgccacaagatccgagcctgaggcccataccgcccctccacgcgtggccggcgcgccaacgccatctccgcgctgcccgctgcgcgttgtcgccgcctacgccgtcgctcgacctcccgctcctcccgttccagcctgcggaggtgttgataccatctgaatcgaagactctacacttgtatgaagcaagatatatagcattgcttgaggaggccttgtacaagagggaaaaatcttttgttcactttgtgcttgatccagttgtagatagctctactaaagcttcatttgctgtaagatatggctgcttggtccacatagaaagtgttcaaaagctggagattggagcgttgttatcaattagaggagtgtgccgtgtaaacatttcgaatcttttggatatggagccctatttccgtggtacagtttctccaatgatggatgggccttatgacgctattgaattagagacaagaatttccaagctaaaagaatccatgtgcaatttacacagcctacaaatgaagttgaaggtacctgaggatgaaccactgcaaactaacatcagggcatctctactgtggtccgagaaagaaagttttgaagagtataatgagtcttttatccctggacgc

SEQ ID NO: 121847 - DNA, 553 bp, Zea Mays
aaagccagtccatctcagacatgtgacggtggcgtcttcgacgtcactcccttcctaaaggtgtcgatattgaagttcgtcttggccatgacgtcgccttcggttgatgatttcgcttcttgacgtccggtcagcgggtagagtaagggacttgcaacgtgaagtcggagctgctacggtagaggatgtggttcggcaatgatgacatgtgatgaagcctcttctttttggattgaattgttttggaggttaggcataagccgggagtgggcggaggatcaagattggaagttggagatgctcttttgtttgaactcgacgacaatgacctgttgtgacctttctcttcgggccgtctgcctattttcatttggatctagggtgtgccctgggaagtcaaggttgttggatgctttgcaatcatgctcggcaacgatgtctcatggcagttttgtgtgctcttccgtgttgcgttggtgggttagcctttcgtgtgtctagtgttggctccacgttgggcaaccttcttgtactacaattttttcgtcttaat

SEQ ID NO: 121848 - DNA, 1297 bp, Zea Mays
atgagcctcctccgcaaccgccgcgccgccgccaccgcggctgcagcggcggcggcgggaggaggggggtacccggagccaccggcttacaacatcatcccgatccacgacatggtgatgcaaggggagcacccgtcgctagtcgctacggttcccggaggtgcgcgcggccgtggaggcgctggcgcacgcggcggacctgccgccgctcgcccgcggctgggacgccttccgtgccgacctcttcgactggctcggcgccacctgcggcttccagctcgacaacgtccgtaaccagcgggagcacctcgtgctcctcctcgccaacgcgcagctccgcgcaggcggcaccctccccaccgaccaccccgccgacgtgctgcaccactccatcgcgcgggacatccggaggaagctcctcaagaactacaagacctggtgctcctacctcggcaagaggccgcacgtccatgtgcccagcggcggacgccgtgtcgctcagggggtcggccctgacacacgccgcgacctactgtacaccgccctctacctcctcatctggggcgaggcggccaatttgaggttcatgccggagtgcctctgctacatcttccactacatggcactcgatctcaaccatgtcatcgaccagtcgattgatatcgagactgggcgaccatcagttcctgcggtgcacggtgtggatgctttccttgacaaggttgtgaagccgatatatgacgtgctcgaggctgaggtgaagttcagccggaatgggaccaagccacactcggcctggaggaactatgatgatgtgaatgagtacttctggagccgcagagttttcaggcggctccagtggcccctgtcaccagcgaggagcttctttataaagccaggaaaccccgggcgtattggcaagactggttttgttgagcagaggtcgttctggaatgtgtaccgcagctttgatcgggtatgggtgatgctcattctgttctttcaagcagcaatgatcgttgcatgggatggccacactccgtggtttagcctacgctaccgtgacatccagatccgggtgctgtctgtgttcatcacctgggctgcgctgcgcattgtgcaggcagtgcttgatgcaggcacacaatacagcctcgtgaggacggatactatatttctcgcagtacggatggtgctcaaggtgcttgttgctgttgggtggactatcacattcattgtgctctatgttcgaatgtggaatcagaggtggcatgaccgcaggtggtctttttctgcc

SEQ ID NO: 121849 - DNA, 282 bp, Zea Mays
atgctgccattagctatccaggacattgatgaatctgacgaacacattgaagaggataccactgcgcctgctgacagtccatgcgaagttgaggaacggtcacctgtggatcctgtgcctgatcgaccagaaaatgagtgtgcaagttcagatatcaggactctgactgtaaaagcctctaagaagcacgagcaacccttgcttgggactaaatcagagggccacattgagtatgacgagagacaggctcaagtcagaaaactggaagaacatcgcatctga

SEQ ID NO: 121850 - DNA, 1678 bp, Zea Mays
aagaaccctaggaaataacaggagaggggacgcgcgctcactagcaaaatgcaggcctcttccctccggcgagccctccttctgcggggaccgcgaggcgcccagctcttccccattcccgtaggcaacaagccccgtgccttctcctccgcgtcccccgcggcagcgcgctctcccaaagacgctcataatgcgccgccgccgattatgccgacgctgccgtggggtgatgcgctcgcagccacgcagcgcaccttctgcctgccgctcgctgggcgcgtcctcgccgcctcggcgaccgagaacgcggccgtggcccccgtcgcagtctacgcctcgctggccctggccgccgccggcgcgcgcggcgacacgcggcggcaggtcctccaggcgctgggcggcggcggcgggggcaggggcgccgcggttcaagcggccaacttggcgtcgcgcgtggtcaagcgggtgttcaaggaccggtccacgtccggcggcccgcggctggccttcgcaggaggaatatgggccgacacctcaacgagcctatcgccggggttcgtggaggccgcccgtagtgtctacagctgcacggcgcggacggctgacttcattaacaagcctgaagatgccgccaagctaattaacatgtgggtcaaacaatccacaaaagatactgttacctcgctccttccggatggactaattgacaagaatacaggacttgttattggcagcgcactgtattttaggggaagatggcttgacaggactgatacgaggagtgacgcggtacaaaaattctgctgtctggatcgaacttgtgttgacgttccttttgtggaatatgatagaactcgacctttcgcagtccacgatggatttaaagtgattaagcttccttaccagcaaggaaataatgaacggaagttctccatgtacatcttcctgcctgatgctcatgatggcttgtttgaattagctaagaaagttttcgcggaaccatcattcttagaacaacacttgccaactgagaagcggcacgtggatatcaagattcccaagttcacagtgtcattccaggtcaatatgaagcagtttctgaaagaaatgggcctcgaattacccttcctccgtgatgcagatttcactgatatggtcaaggaagatggatccagaaatccgttgtatctatccgacatacttcataaagcagttttggaggttaatgatgaaggcgttgaagaaacttctgtgagaattggcatagggaagccctcaccaggagagcactttgttgccgaccatcctttcttctttgtcattagggaggaggtgtctggctcagtaatgttcatggggcacatactggacccatcatcacaatcttaatttcgggctctgcacttttgtcacctatatattacacatatatcttgtatgatctgactttgtcagtctggttcaatgagatttttagtacttgagtaattcatgtagtggttcgtagttgtttgctttgtttttagtaacatatgagcatatagctactgtactaaactttacatcgtctcctgtgggaaaccatatgaagacaatgcatgcatgtgctcatgtatatcagttttgctttgcagaaatctgtagtcttgtccaatttataaaatagatttttttt

SEQ ID NO: 121851 - DNA, 790 bp, Zea Mays
aagaaccctaggaaataacaggagaggggacgcgcgctcactagcaaaatgcaggcctcttccctccggcgagccctccttctgcggggaccgcgaggcgcccagctcttccccattcccgtaggcaacaagccccgtgccttctcctccgcgtcccccgcggcagcgcgctctcccaaagacgctcataatgcgccgccgccgattatgccgacgctgccgtggggtgatgcgctcgcagccacgcagcgcaccttctgcctgccgctcgctgggcgcgtcctcgccgcctcggcgaccgagaacgcggccgtggcccccgtcgcagtctacgcctcgctggccctggccgccgccggcgcgcgcggcgacacgcggcggcaggtcctccaggcgctgggcggcggcggcgggggcaggggcgccgcggttcaagcggccaacttggcgtcgcgcgtggtcaagcgggtgttcaaggaccggtccacgtccggcggcccgcggctggccttcgcaggaggaatatgggccgacacctcaacgagcctatcgccggggttcgtggaggccgcccgtagtgtctacagctgcacggcgcggacggctgacttcattaacaaggtgtggcatattcagacgttcccgcttataccacatgctcattaggtgctcgacaatacgcttgttccaggggtcactgtagcagaacatcttaatttgttgtttgatgttattgcagttcctcactaagctttttttatagatggcatttgactggaccgagccaagt

SEQ ID NO: 121852 - DNA, 1745 bp, Zea Mays
aaaccgccaagaatggaatggatagatctgcagcaacccctcccagaacctctgactttgcttcccatcgcttcgtttccaagaggagaatgtttctctcccttgcccagtcgcctgcctgcgccgtcgtctccttcccatggaggtcctcgtcccaactcatcccacgggtcccctcccgctgcaccctcgcatgccacgcagcggtgcccaaagtgcccctccccatcgcctcgccggcctccctcggggacgaccctagcaagtgggaccccgccgagtgcgacgctctcctccgcggcggggagcaggtcgcctccgtgctgcaggagatggtcacgctgatggaggacatggagatggatggtgcatttgagcaggttgctgtggagctggtggcacaaggagttattgggaagagggtggatgagatggagtcaggttttcttatggcacttgattacatgatacaacttgcacagaaggacacagatgatgagcgtaagtctattcttgaggtaattaagcagacagtgctagaccatctgacgaagaaatgtcctccacatgtccaggttgttgggctactttgccagactgaaaagaaagagagcagacatgaattgttgcgccgcgtagctgctggtggaggtgtttttaagaacgataaaggtcttaagtgccaaattcctggggcaaatcttaatgacattgcaaatcaggcagatgatctagtagagtcaatggaatctagggacaccattcctgatcgaaaacttcttgcaagattagttatagtaagagaagaagctcggaatatgatgggaggtggcctgttagatgagagaaatgatcgtggtttgactaccctccctgaggcagaggtaaactttttgagcaagctcgttgctcttaaacctgggaaggcattggaaaggatgataaagaatgttatgaatggcagaggggaaggtgctgataacgttgaacaaccaagtgctgattcacattctgaacaggagagtctaacaggagtattaggaaggggaagtgtatctggccacaagccacggccagtccgccctggaatgttccttgagactgtttccaaggtcctgggtggcgtatatgcaagtaacacatctggtattacagctcaacatctggaatgggtacatcagacaacactcaaaattcttcaggaaatggccttctagcattgttatcagggttcactgatatagtttgtaacataagaagtataatgctgcacatccgtagctattgaaggtacatgatatcaaatagccttgtgtgcaccaaggtatgttctgttttcttcttaccggatgcactggtcctactgatccctctgtgtttgttattacagagcctttttaagtggtcacatatctttttgttgagaagtggagtggaagaaacgataatgggttatctaaagccatagatcactcaggggaagaatgttgccacgttgtgcagtccagaagtaacttacaggcttggaattgatatgaccatgtggttgcccttgccaattgactaattttaagtactagactcagtaacatatttgaggcgtaatatcattattattgacattagtcttgttccttggcaatctgtcttatcttttcgcacatttttctggacttgtgattctttattcgtcatgggtgatatatggttagaagaagctacaattaacagtggtatattggaat

SEQ ID NO: 121853 - DNA, 927 bp, Zea Mays
agacgcggctaggagcagctgctgggcagctatccagcgggccactgagtttaccttactcttactcttacatactaagatcgctaccagagcatggcgggaacttcgtcgtggtcgtcgtcttcatcctgcgcgtcgtcgttcgggtcgcccgaccacgacgtcgtctgcgtcaccgagccggactctgtgggcgccgcagccgtcgccgtcgccgacgccgagggaagcgtcaagttcctgtgcagctacggcggcaggatcctgccccgccgcaccgacggcacgctgcgctacgtcggcggcgacaaccgggtcctctccgtcgaccgtcccatccggttttacgtgttgcagcggaagctgagggaattgtgcggcggctgggaagcgcacctgcggtgtcagctaccgacggaggacctggacgcgctcatctccgtcacctgcgacgacgacctcgccaagctgctcgaggagtacgacgaggctagcaaggaccgcctccagtcgctcaagatccgggcgttcctgttcccgactaggacgccggcgccgtccatactacagcgtaggagcccgccgtcgattgctcacctccactggcaaaacacttccccgccggccgcagccggcgtctcgctgacgtgcgcgccgcggtggtgggcagcgccccaggcctctcgccaggcgcaggcgccccaggcgcagaactacgaccgacacagcctcggtgaggagcggccgcgcctgtactattcatatatgccacggacataattagatcagatttatcattagaccctgaccaaatatggtccaaaattttgttgaagttttaatagacctacatgaacaacttattgtaacatatatatacggagtaatataaaaaaatgggcgcttacagttgagttaaaattataa

SEQ ID NO: 121854 - DNA, 919 bp, Zea Mays
agacgcggctaggagcagctgctgggcagctatccagcgggccactgagtttaccttactcttactcttacatactaagatcgctaccagagcatggcgggaacttcgtcgtggtcgtcgtcttcatcctgcgcgtcgtcgttcgggtcgcccgaccacgacgtcgtctgcgtcaccgagccggactctgtgggcgccgcagccgtcgccgtcgccgacgccgagggaagcgtcaagttcctgtgcagctacggcggcaggatcctgccccgccgcaccgacggcacgctgcgctacgtcggcggcgacaaccgggtcctctccgtcgaccgtcccatccggttttacgcggaagctgagggaattgtgcggcggctgggaagcgcacctgcggtgtcagctaccgacggaggacctggacgcgctcatctccgtcacctgcgacgacgacctcgccaagctgctcgaggagtacgacgaggctagcaaggaccgcctccagtcgctcaagatccgggcgttcctgttcccgactaggacgccggcgccgtccatactacagcgtaggagcccgccgtcgattgctcacctccactggcaaaacacttccccgccggccgcagccggcgtctcgctgacgtgcgcgccgcggtggtgggcagcgccccaggcctctcgccaggcgcaggcgccccaggcgcagaactacgaccgacacagcctcggtgaggagcggccgcgcctgtactattcatatatgccacggacataattagatcagatttatcattagaccctgaccaaatatggtccaaaattttgttgaagttttaatagacctacatgaacaacttattgtaacatatatatacggagtaatataaaaaaatgggcgcttacagttgagttaaaattataa

SEQ ID NO: 121855 - DNA, 1482 bp, Zea Mays
cctcgtccgtctccgccgcctctccgatctactctgcagctagctatagctagctagctctgtacgccaccggccggcccggtagcagcattgtcggaggggctgggctggtggtggcgcaggcaggcaggcaggtagaagaaggagatccaaccaagggatcggataggataggataggagctgggatcgtcgtcgtcggaacgaagatgagcagcaaggacgctgtgttgaacgcgttcctgagctgcttcatgcacgtgggcctggcgctggtgctcctcgtctacctccccgccgcctccgtcctccgcctcctcgtccgccccttgttggccaacaagcaggccgaggacctccgcggcaaggtcgtcctcgtcaccggcgcgtcatccggcatcggcgagcacctggtgtacgagtacgcgaggaacggcgcgtgcgtggcgctggtggcgcggacggaggtggcgctgcgcgccgtggccaaggcggcgcgcgacctcggctcccccgacgtgctggtcgtgccggccgacgtcaccaaggtggacgacgccaagcgcgccgtcgacgagaccctcgcgcacttcggcaaactgaatcatctggtggccaacgcggggatctggtccagctgcttttttgaggagatcaccaacataaccgccttccataatgtgatggacctcaacttctggggtgccgtgtacccgacctacttcgcgctgccgtacctcaaggccagccggggcaacatcgtcgtcaccgcctccgtcgccggcagggtcccgacagccaggatgagcttctacaacgcaagcaaaggcgccgtgatacgtttctacgagacgctaagggccgagctggggtcgcacgtgcgcgtcaccatcctcatgcccggctacgtcgtctccaacctcaccaagggcaggggcctccagaaggacggccgcgtcggcgtcgacgaggaggcccgcgacatcaacgtggggccgatgccggtgggcaagacggagtcgctggcggaggtggtggtggcgagcgtgcggcgcggggactactacgtgacgtggcccggctggtactggcccttccacatggtcatgtgcgccgcgccggagctgctcgactggttctcccgggccttctacgtctccaagtccggcggccaggacggcggcgccgcgctgagtaagaagatcctggaggccgtcggcgggaagaagttcctctacccccagaccatccgctgccagcagaccaccatgggtgccagctaactactgactcgctcaagatgttagccagacataaagataccacattttacatgtataaactcgcgcatggttgatgtgctgttggattagcacggcatgaggatcaaagggccggctgggtgaagttgatgaaatgcttttattcgttttctttctttctttttttttcattttctctacctttaatttctcccctttcc

SEQ ID NO: 121856 - DNA, 1252 bp, Zea Mays
attcctctccgcccccctcctcccttttccaccacctcgcagggagccgaagcaatccaatcggagcaagcaggcagctcatccaactctcaggcagccatggacgccgccgaggcgaggaggagcagcagcgcgtcctcctccccggagttcgagttctggccgctccaccccaaccccgccgcctcgccctcctgcgccgacgagctctttgccggcggggtactcctcccgctccccgtcctcacaccgaaacccgcatcaagtaacattggcagcggcatcagccaatgcgtgcccgtcgcggagccggagccggagccaggagaggcgttccttctcgcgaccgtctcgccgcctccggcctcgatcacttccacagctctgcccaccgccaccggaggaggaggaggagggtccaagcgctggaccgacatcttttccaagaagccggcgccgggagccgaggagaaggaccgggacaaggagagggagaagcgcaaggacggcgccgggaaccggaaacagggcgggcactcccactccaacggcgcgggctccgagctgaacatcaacatctggcccttctcgcggagccgctcggccggcggcgggtccgggtccgggtccggcacgtccaagccgcggccgcccgctcggaaggtcagcagcgcgccgtgctcgcgcagcaactcccgcggcgaggccggcgcgcccccgctccggcggtgggtggcgagcccgggccgctccggcggcggtggcgtggcggtgggccgatccagcccggtctggcagatccggcgaccggctgccaagcctgcacccgtccccacctccgccccttcagcctcagagccgttcaccgacaggcgggcgccgccgccgcggcacaaggagaaaccggccagcgctgctcggaagcctggccttggcagcggcgtccgcggcttgaacttgagcgtgaactcctgcatcggataccggcaccaggtcagctgccggcgcgcggacgtcggcgccgcccgcggcggcggcgggctgttcggcatcaaggggctcttctccaagaaggtgcattgatgatcagccagttctgtgttttactagtactttttgtagactttctgagttatataaattgtatgagatgtgtgttaattacatgtaaaaaaatgcatggttagccagtaaccggtttttgtaaaaaagtttagcaacgctaaccagcactgcttatgctcgtgagcaa

SEQ ID NO: 121857 - DNA, 1601 bp, Zea Mays
cgcagacccgtggacggcgcaccggtccaaagtcaaaagggcaagagggggcaaaaagggagaaatttcctctcacaaaaccctcgccagcttatcccccttcctccctcacacgatctctcctcgacggctaacccggattgccgtctcaggctcgggatccgggcgctcgcggcgatggacggcggcggcggcgctggcggcgcggagggggagctcacggcgcaggagacagcgctctacgaccgccagatccgcgtctggggcgtcgatgcccagaagagactaagtaaggcgcacgtgcttgtgtgtggcatgaacggaaccaccatcgagttctgcaagaatattgttctagctggagttggaagtttatccttgatggatgataatgtagtcacagaggaggatctgaatgcaaatttcctaattcctcctgatgagagcatatatggtggtagatctcgagcccaagtttgctgcgagtctttgatagatttcaatcctatggttcgagtttttgttgaaaagggtgatccatcattaattgatggagaattccttgacaagtttgacattgttgtacttagccgtgcatctcttaaaacaaagttgttgattaatgaaaactgtcgaaagagaagcaaacacattgcattttatactatagattgcaaggattcatgtggtgaaatatttgttgatttacagaagcatagctatgttcagaaaaagcctggaggagcaactgaacaacaggagttgacatattctagccttcaggaagctatctctgtgccttggaatagtctaccgaagaagacggcaaaattatactttgctatgagagtactggaggattatgaattatctgaagggcgcagccctggcgaaacaacactttctgatatagatgcagttctggctcggaggaaggatatgtgtgataaaatgtctttgaatgagtctcgtattcctactactctcgtggaacgactgctagcagctggaaagaaggagcatcctcctgtatgtgctatccttggtggtattcttggtcaggaggtgatcaaatcgatatcctgcaagggcgatccagtcaagaatttcttctatttcgatgtggctgacggtaaaggtgtcatcgaggatatcccaccaccaccacctgcaaaataaagcactcagctgcgtaactctcgactcgacttggttcactaatcgttttctgtacccactcagcttcgaacatgtagtagcaacttttagatctagagccatgtgaaaaaaggcaggtttgactttaacccagatgtttagggatttttcgagcagcaaactgtgacagtatgtatgcattgacaatttaaagctgaagtctggaccggtttccatgcttttgggggcggatttcctttgtcgtccctttacccatttgtcaaatttggtagcggtggttgtggggaggggggaatgaagtgagaaggctatgtttataactgtgaaccgacggttgcagctatacatatcgtcatgcctgtgtactcatgtggcatgtttcatgcttgattacaatgcctgttgcttgaatggctccctgc

SEQ ID NO: 121858 - DNA, 1521 bp, Zea Mays
cgcagacccgtggacggcgcaccggtccaaagtcaaaagggcaagagggggcaaaaagggagaaatttcctctcacaaaaccctcgccagcttatcccccttcctccctcacacgatctctcctcgacggctaacccggattgccgtctcaggctcgggatccgggcgctcgcggcgatggacggcggcggcggcgctggcggcgcggagggggagctcacggcgcaggagacagcgctctacgaccgccagatccgcgtctggggcgtcgatgcccagaagagttctgcaagaatattgttctagctggagttggaagtttatccttgatggatgataatgtagtcacagaggaggatctgaatgcaaatttcctaattcctcctgatgagagcatatatggtggtagatctcgagcccaagtttgctgcgagtctttgatagatttcaatcctatggttcgagtttttgttgaaaagggtgatccatcattaattgatggagaattccttgacaagtttgacattgttgtacttagccgtgcatctcttaaaacaaagttgttgattaatgaaaactgtcgaaagagaagcaaacacattgcattttatactatagattgcaaggattcatgtggtgaaatatttgttgatttacagaagcatagctatgttcagaaaaagcctggaggagcaactgaacaacaggagttgacatattctagccttcaggaagctatctctgtgccttggaatagtctaccgaagaagacggcaaaattatactttgctatgagagtactggaggattatgaattatctgaagggcgcagccctggcgaaacaacactttctgatatagatgcagttctggctcggaggaaggatatgtgtgataaaatgtctttgaatgagtctcgtattcctactactctcgtggaacgactgctagcagctggaaagaaggagcatcctcctgtatgtgctatccttggtggtattcttggtcaggaggtgatcaaatcgatatcctgcaagggcgatccagtcaagaatttcttctatttcgatgtggctgacggtaaaggtgtcatcgaggatatcccaccaccaccacctgcaaaataaagcactcagctgcgtaactctcgactcgacttggttcactaatcgttttctgtacccactcagcttcgaacatgtagtagcaacttttagatctagagccatgtgaaaaaaggcaggtttgactttaacccagatgtttagggatttttcgagcagcaaactgtgacagtatgtatgcattgacaatttaaagctgaagtctggaccggtttccatgcttttgggggcggatttcctttgtcgtccctttacccatttgtcaaatttggtagcggtggttgtggggaggggggaatgaagtgagaaggctatgtttataactgtgaaccgacggttgcagctatacatatcgtcatgcctgtgtactcatgtggcatgtttcatgcttgattac

SEQ ID NO: 121859 - DNA, 1423 bp, Zea Mays
caacactctccctaccacaccgaaccaacaagaggagcaagaggtagctatagcagcctagcacacaccaccacccaccaccaccgcgccacagagctgccgagagtgtgctgtgcttcgctcatcgaccgaccgatcgatctcggcatggcggactgggggccggtgctgatcgggctggtgctcttcatcctgctctccccgggcctgctcttccagatccccggcaagggccggatcatcgagttcggcaacttccagaccagcggcctctccatcctcatccacgccgtcatctacttcgccctcctcgccatcttcctcctcgccgtcggcgtccacatttacctcggctagctagtcgcccgtcgtcgccgccgggctgagcgaggctagctgctggcgcgcggcggcccggcccggcctggctttatttgacatcaatctgggtggctggattaggtactgcgtggtgcggaggcatatactactatatacatttacatgttcatctccatctgcttgctagctgtatgttgatttatttagctactactttatcaacgacatcctcgagtccagatacagtatatccaattaatcccttatgagcatgcttctgatagatggccattaataatacatatgtcatgtttttttattatcatggtctcaagttctggaattcttttttgccagatccgctaataatcgtattcaattaatttggtcagcttttcaaaggttggttcaatttgttgttgttttttcctttctttttccaaaggccgcttctattttcaaagtcgcatcaccctcagcaactattccctcggttttaaattacaaggcattctaattttcttaaagagccaaagcatatcttaggtttgatcgaagttgctgagagatcgaattgcagggatttacaacatcaaataggcggtgaacgtaggatgaaaatataattggtaaaggacctaatgatacttaattggtactataaatgttacacttttattatataaatttaatctaatttgagatgttttcattctctgactaaatcggaatgacttgcaatttaaaagtgagggagtacctcgcttcatcgtcgtcttttgcactgtgtatggtattctacagaagttgacgtttcaccgaaactttgctggagagtcaactaaaatggaacggctccattctagtttttttataatagagttgttctattccgtgtttagcaaacagaatagagcctctccattttttatttagttgccacttcgttatctatttggttgaatagctatatgaatgtgtagaagataggagagggaggagagctctcgcatccgagagagcgcttgtatccattcgttttttagagttggagcattctaattatttatggtaaattatt

SEQ ID NO: 121860 - DNA, 315 bp, Zea Mays
atgcagcaaggatcatggatgagatgggagctgctgcctgctggggtgcagccacaaagaataccaaagttccagaaggccactgtttatcaaggaaaaaagtgcatgacgaatgaggaatctacaagtagcaggtgtattttatttggagctgaactaccatcgcttcagtttgagtatggagtgaaactgaagccgctggttcgtatttgtgacacaactaagtttatcaaggaaaaaaagtgcatgacgaatgaggaatctacaagtagcagaaacaatcatgagcctaatgtgtatcctaaagacatgtga

SEQ ID NO: 121861 - DNA, 1832 bp, Zea Mays
tatatagaaccaatgcaaccaatagaacgaagcatgcagcaataccatcggtcaacaatggctgcatccggaaggaaagctgtagtagttctcatcctgtgcatgttgtgttgcaatacctcgctgctaccttgctcagcttcctccgattccttcctgcaatgcctgtcggcgatgatgccgagcgagctggtgtaccagcagagctcgagcagcttcacttccgtgctgcagtcctccgtgcagaaccccaagttcgtgaccaacaccacggtgaggccgttgtgcatcatcacggcgtccgacgtctcccacgtccagaccgccgtgcgctgcggccgctggaacggtgtgcgcctccgcgtgcgcagcggtgggcacgactacgagggcctctcctaccgctccgtccagcccgaggtgttcgcggtgctggacctagccaggctccgcggcgtgcaggtgcgccccggggacgacagcgcgtgggtggacgccggcacaacgctgggcgagctgtactacgccgtgggcacgaccaacccggggttcctgttcccgggcggcgcgtgcgcgacggtcggcgtcagcggcttcatcagcggcggcggcatcggtctcatgatgcgcaagtacggcgtcgggggcgacaacgtcgtcgacgccaggatcgtcaacgccaacggcgacgtcctcgacaggttcgccatgggggatgacctcttctgggccatccggggcggcggcggcgagaccttcggcgtcgtggtggcgtggcggctgaagctgtctaaggtcccgccgacggtgacggtggtcaacgtcctcaggaccatggagcagggcgccgccgacctcgtcgccaagtgggagacgaccatcctccagccgccagtcctcccggacctcaccatccgggtcgtcctgcagtacaggcaggccttcttccagacgctcttcctcggcgggtgctcggacctcctcaacacgatgcgcggcctcttcccggagctcggcaccacggcggccgactgccacgagatgagctggctgcgcgcgatggcgttcatctacttcggcaacaccgacacgccggtggaggcgctcctgaaccgaaccaacaacgtgggcaactactacttcaagagcaagtcggattacgtgcgccgcgccgtcggcaaggccgggtgggacagcctgtaccagcagtggctctcccagaacggcaacgggcagatcatcctggagccgcacggcgcggcggtcggcggcgccaacacgatgaccacctcgccgtacccgcaccgcaggggcgtgctgttcaacatccagtacggctccaactggtgctgcggtgccaacggcacggaggcggcggcggcgcttgggtggctcaacggcctctacggcttcatggcgcagttcgtcaccagcaatcccagggaggcgttcgccaactaccgcgacctggatatgggccagaacgtcatcggcagcgacggcttgtcatcgtactggagcgccagggcgtgggcggagagatacttcatggggaactaccggcggctggcggcagtgaaggcggcagtggatcccactgactacttcaggaacgagcagagcataccgccacttcccaagtagacattttttaggccatagcgcgttgacatttgcatcttgatatgcattgttttgggaggattcccagtggcgtcaagttgtttggttttagtaactaatatttggtctctctattttattttatttttgttcttacatgctatttatggaaattaaaatattcttttagtttctatatttttaattta

SEQ ID NO: 121862 - DNA, 738 bp, Zea Mays
cagatgctagacatgggcattccgacgacagtgatgttccgagtagtcgtcatcgccgttttcaccctatcgaccgctgcagccgcaggcaatgcgacagcgagtccgagctccgtgaccaattcaacggcgagctcgaccaagaacaccacggcgccactgttgccgccgtttggcacgaaccacgcggtgggcgacggcgcggggtggatcttcgactggaaggcgaacgcctcggccgccaactactccgcctgggctgcgaaccgcactttcttcctcggcgactacctcagcttcaggacggacaccagcaacacggtggtgcacacgaccaacgccacggcgtacaggttctgcagcgccggcgtcgcggcgagaggcggcggcggcgggtggaagccggaggaggcgttcctcgtcgtgatgctcacggcggagggcaccaactacttcttctccgacgccttggacggggaacactgccggaaggggatgcggtttcaggtcggcgtggcacatggccgcggtctcccgtcggtgcccccgtcgtactacgagccactctccggcgcgccggcggggacgcgagcgcgacacgatggagctgtggccgtgtggggcgttgcgatggttgcagcctttgctgcacttgcgttttcttgatttttttttattattcataacacaggttgttgacaaccaaaaatggctaatagtacgaggaaggcttttgca

SEQ ID NO: 121863 - DNA, 2043 bp, Zea Mays
tcccacccacgtgtctttctccgccgccgaactcgaacgcggcacgcctcttgcctcaccacaggccagacgaagaagcggaccacacgccaccagctccacctccacggaatcagacggtctcctcctccttttctttctcccgtggactgcagcgccgccgggtagagatcccaaatctgcgcctcgaccaattcctccttcctccgagaatggtgatcctctatccagggtgtgttgctccaacagttcaccgtgattttctgcccagatgggtgctgctgaacaacagctcgagaatgtactgccatgtctttccagatagaacgaaaccgaaaaggcaatacaggcatcagtgggtgccttgcttctccaagggatcttcgttccaagatccactgccctctgtaaagccttcacgccttcttccagcagaggaactaaagacatatcccaacactgttcctgaggagatatttaacacgatcatactagatgactccgatgcattctatgtgctagaactgagcacgagtagagaatttagttcctctttggataaaaattctgcaatcttaatctgcctatttgatgtcgatggtgactccctattacaaagagtaccggcaatctatttgggtcaacctacacatggatttaagacagagcagcagatacccttccaaagtggttcagttgatatcgttactttcaaggggtcaaaactgaaaacgattaaagaagtctggatcggtcttgaatcaggttcatggagattagatggtttgagcttgaaagtaatacatggaccagttggtcagcctaaagaaataaatggaactccagaacagaagttcagcggtttgcagtacacttttgagaacgtaaatgtgttccttggagatgatggagcttcagtagctgaagcaaggccgacggctatcactgacctctcaggagtcggcctttctgatcttcaacaagggatgttatcctcaagaagcaaagcttcaagcattcaggaagtaagagaggatgggttgagagagtacgccgaccttaaacaatctctgctgctctatgacgcatctatagtgataaccggcttctctaccttcatcttggcttcaaatgacagcgctgcctattcgttcctgataggtggcattggagggttcctgtacctgttgctgctccaaagatcggttgatggtttgcctgtgatcggttcaccttcagaagctggcggtgcacagccttcggtaaaaagtttcagcggtgtaaggaggccatggttgatactatcactagtactggttgcaggtgcagttgcactgaagtatggtgctggaggcgacagctttgcgctcacacccaccgacctctttgttggcactgcagggttcctagcaaacaaggttgctgttcttcttgcagcgttcatgcctatgctaagtgactcaaagagtgaagatggatctggtgacagcagttaattggacttctttaaaaatatgttagtaatagtttcctatagaagatctgtattcaagactggaacggaattagctgaagtgcaaaggacaagtcctagtttctgaactggaaaaaagaaccctctcatcttggtgactgtgtcatccttgcaagggttcaattcacagcaagagttcaagtgttgtggcagtttgaagtcagaaacttaagttgtatttttcagacatgcaggacagctgtgtatcattatatcaagaagaagaagaacaaaagtctaggatactttgaagcacccttagaaaggcatgaccagtacagcagaagaaaaacagagacacaaaaactaaggacatggccataaactacggagcgttttggcttttgccatacagcacaacttgatttcatcttagaaacttgagttgtagtatagtatactcacctatcggacactgaactgttaagatgatataccgactacagctttgttgtatgtaaaaatatgacatttgtgaggttaaatacacagtaactatcgaaacaaaa

SEQ ID NO: 121864 - DNA, 2048 bp, Zea Mays
tcccacccacgtgtctttctccgccgccgaactcgaacgcggcacgcctcttgcctcaccacaggccagacgaagaagcggaccacacgccaccagctccacctccacggaatcagacggtctcctcctccttttctttctcccgtggactgcagcgccgccgggtagagatcccaaatctgcgcctcgaccaattcctccttcctccgagaatggtgatcctctatccagggtgtgttgctccaacagttcaccgtgattttctgcccagatgggtgctgctgaacaacagctcgagaatgtactgccatgtctttccagatagaacgaaaccgaaaaggcaatacaggcatcagtgggtgccttgcttctccaagggatcttcgttccaagatccactgccctctgtaaagccttcacgccttcttccagcagaggaactaaagacatatcccaacactgttcctgaggagatatttaacacgatcatactagatgactccgatgcattctatgtgctagaactgagcacgagtagagaatttagttcctctttggataaaaattctgcaatcttaatctgcctatttgatgtcgatggtgactccctattacaaagagtaccggcaatctatttgggtcaacctacacatggatttaagacagagcagcagatacccttccaaagtggttcagttgatatcgttactttcaaggggtcaaaactgaaaacgattaaagaagtctggatcggtcttgaatcaggtcaggttcatggagattagatggtttgagcttgaaagtaatacatggaccagttggtcagcctaaagaaataaatggaactccagaacagaagttcagcggtttgcagtacacttttgagaacgtaaatgtgttccttggagatgatggagcttcagtagctgaagcaaggccgacggctatcactgacctctcaggagtcggcctttctgatcttcaacaagggatgttatcctcaagaagcaaagcttcaagcattcaggaagtaagagaggatgggttgagagagtacgccgaccttaaacaatctctgctgctctatgacgcatctatagtgataaccggcttctctaccttcatcttggcttcaaatgacagcgctgcctattcgttcctgataggtggcattggagggttcctgtacctgttgctgctccaaagatcggttgatggtttgcctgtgatcggttcaccttcagaagctggcggtgcacagccttcggtaaaaagtttcagcggtgtaaggaggccatggttgatactatcactagtactggttgcaggtgcagttgcactgaagtatggtgctggaggcgacagctttgcgctcacacccaccgacctctttgttggcactgcagggttcctagcaaacaaggttgctgttcttcttgcagcgttcatgcctatgctaagtgactcaaagagtgaagatggatctggtgacagcagttaattggacttctttaaaaatatgttagtaatagtttcctatagaagatctgtattcaagactggaacggaattagctgaagtgcaaaggacaagtcctagtttctgaactggaaaaaagaaccctctcatcttggtgactgtgtcatccttgcaagggttcaattcacagcaagagttcaagtgttgtggcagtttgaagtcagaaacttaagttgtatttttcagacatgcaggacagctgtgtatcattatatcaagaagaagaagaacaaaagtctaggatactttgaagcacccttagaaaggcatgaccagtacagcagaagaaaaacagagacacaaaaactaaggacatggccataaactacggagcgttttggcttttgccatacagcacaacttgatttcatcttagaaacttgagttgtagtatagtatactcacctatcggacactgaactgttaagatgatataccgactacagctttgttgtatgtaaaaatatgacatttgtgaggttaaatacacagtaactatcgaaacaaaa

SEQ ID NO: 121865 - DNA, 580 bp, Zea Mays
gtcagggttatccccaatctccggttgtttgacccggcgccgtgcaagattccgcctgggacttcgccggtcgtttcgcccaccgtagcctcggccgcgcgcgcattaccgggtccccactcactggcggtgtgagccgctggccagagctgctccaaccgcgcgcgcaccccgccgccatagtcgggaccttcctaacgactcggccgcctatccctccgtgcatgtcgtaccagctgcgcccctcttgagtgctgggtggcggttgggagtcggcaacagactataaacgacagagtagactcgccccgttgtttcctttgcgccattaccgtaaatccgagcaccttcgccgagcagagaaaggaagagagaggggagcgtcgggggaaattgccctcccgtcaccgttgaacctcaatgcccggacccgggggtttggttccgtccactgatcgagtgcaaccgctcaattgcgggcgtgggaggtcggtggatcgtggattcgtcgtcggagatagcacaccgtcgcagcaacgccccacaccgcggactgaccccgccgccgctcggaaacccg

SEQ ID NO: 121866 - DNA, 1154 bp, Zea Mays
agcattaccattatactaattaacccctctatataaccctggttgtaacttgtaaaactctttcagcctcccctccctcacaagctctccagattccgctcccggccgcgcaactagccagcagagcggctctgagccatggagaattatcacatgctcttcggacggccgtccacgcagccgtcctctgccgccacctccaactcctacaacttcatgctgcccactgccggcagcaccagcggcggcggcggcggcctgcgcgatcacgatagaggcggcggccagcacagcgggcatgccggcggcgtaccgtcgtcctcttccttcttcgcggagccgtccaacacctcctccaaggacagtggcgcagcagctagcagccctcctccagccgcaggtatcggccgcggggaagaacccgcggcggggacgccaccagcagcagccgaggtggacggcaggctgcaggcgggcaagaggaagggggagaagaaggagcgccggcctcggttcgccttccagacgcgcagccaggtcgacatcctcgacgacggctaccggtggcggaagtacggccagaaggccgtcaagaacaacaagttcccaagaagctactacagatgcactcaccaagggtgcaacgtgaagaagcaggtgcagcggctgtcaagggatgagggcgtggtggtgaccacatacgagggcacccacacacaccccattgagaagtctaatgacaacttcgagcacatactcacccagatgcagatctactccggcatgggatcaaccttcagcagtagtagccacaacatgtttcactgaaaccgtccaaattaaatcacttcaattcaagcatcggcggaccatgcaaactaattaattaagcaggaaaatacatacatttcattagtttgtacattaagtcttagatttttaagagatcaataagcgtgattagatagctaagtgcaggtaatattactcacgcagtggttctttttctctccttggtcttctttttgtttattttaatttgtaattgtaggccatggatagagaccgatatatacaccgccacaaatttaaaagatgcatgttattagatggcatttcaatggaaaatgtgataccacccctcattatattgg

SEQ ID NO: 121867 - DNA, 1851 bp, Zea Mays
gactgatggatcactcctgcagctgcagctgcagtgcgtcgccgctactccatcgtctattaatggctcgtgtagctccagcgctcggcttagacaagcctctccaacatgaagctcctgggttggatgcaccggaagttacgacagaacagcaatgatgtgttcaaagagttcaacaacgctgcaggtgggacctgcaactgcatcaccgggctggccgcgtcggacccggccactttcctcgccaccgccaacgaatacttcaccgccgacaacgacttcaccaacaaccatccatcgtcgccggccgccgacctcttcacctttggtggcagcggcctcctcaccattggcacgctaggcatcgccgccgtcgcggtgtctgcagacgctgatgaagttgattacgacgtcgacgccgatgctgactccgactttgacgacaacgacgacaccgccggtgatgacgaagaccaggtcgacagcgccgtcacgcccacgttcacatatgcagcgccgcctccgatagaggacgccacggtcgtcgagaaggctgcagttgccgtggttgaggccattgccgagaaggacgacgacaccaccactgaggatgacctcatggtggtgagcgccgagctggagaaggtcctcggtggccgcaacagcggcaccgccggtgatctggtggcgtcggcgcgggtgagctttgccatgggcgtggactgcccgctacagggcttcctgttcggttccccggtgagcgacgccgagtcgcgcctggagcagccgcgggatagcaacggcggccggcgcacctcgctcggcgagctgttcatgcgcacgcgctttgccgaagagaaggtggcgctcgtcgccgtcgaggaaggtgaggacggcggggacattggtgctggcggtgaaagggacgacaggaaagcagggaaaggcggcggcggccacaagacaacgaagaagaggagtgcaaaggatgaaaaggtccccagaggtgacggagcgcaggcgagtgcaacagtgaccaagagcaagtttcacaagatcctccagatcttccacaggaaagtgtaccccgagagcgcggccctggcgcggaacctgaccaagaagagccgcaagcgcggcagcggcgcctaccacaagccggagccggcggcgtccaagctccggtgcctcaaggagcagcgcgcgccggggttcggctgctgcgccagccgggcctccttcggcggcgccgcctctcccatcgacggcgacgacgacgacgagctcaacggcagcaagagcggccactggatcaagaccgacgctgaatacttggtgctggagctgtagaatgagaaataacaagagagagatcaggatctgttggctggtcagcatcaagcatatatagtgagtatattgagcataatgcctgcttatgtttctgtgcttgctcttcacagaaaaaaaaaacccccatcatacatatgtttgttcatgtgattacctgacggatgagttgtacgtgtccgtctatatatctgtataaaggggaaaaggactgcgagtgtatgaacttaatgtatggtttgcgtcaagatgtgatcgctgcctcctctctactcctagttgatagcctcctgttggtgcatgtgggggcttaggcacttggctggccccccaaatcatgctgcttcttgaactcttgttggtggcctgattgcagaggaatatcctgtcacagggactgtgctaacgacagttgccatttcccgcaataggctggatgcagctttgatatgcatcattattcatatagcccgtttaatttaaatcaggaccttttatata

SEQ ID NO: 121868 - DNA, 1075 bp, Zea Mays
gagggattattcattttccgaccaaaaaacgaaaaaggcaaatccaaagacggagaagaagaagagtcgcgaaggaatggggaagggcaaggtgcatccctcgccgccgccagctgccgcggccgcggccgcgggcggcggagccggggagacgacggcggaggcggtgctgatgcggctgatgccggcggcggtgctcgcggccgcggcgccgctcggggccgaggggaaggaggtgctggcgtacctggtgctggcgtcgctgcggtcctcggccccgccgacgccggcgcgcggggacgggcaccgcccggagctcgggtgcggctgcttcgggtgctacacggcctactggtcccgctgggacgggtcccccgagggcgaccgcgaggccatccaccgcgccatcgaggcgttcgaggagcacctggcggaggaggagaagggccgcgggaagggaggcgggccccgccgcgggcggaagaagcgcgccgagggcaaggggaggtggaaggtgaagaaggaaaaggaggtggaggtcggcgccgatccactcccgcccccgtccgatctccccgccccggaggaggcccccaaggcggaggacggcgcggagtacctgacggcggaggacgagaaggaggaggacgctccgaccgcggccgccggcgccgaggatgagaagcggcggcgctggtggggctccgtgctgagctggaaggcgtggggcctctgagggtcccactagtcaggtccctcccctcgctacgcttcgccctgttcaattagttaggtttggtgctttctttgcttgctgctatcgctggggtttagctgctgctgctgctgctgcaggtggattagttggtgatggttagtactcctacgctatttggcagtctggatggggatgctgtgttttagtatctgttggtgcggtgtgtcacgtgttaggctcttctcttgtgtactgtacatacacgcaggcatggagtgtgtggtttggttggtgtaaattatcattgtaatgtaatgtactcctactaatgtaaatgcggcagtagttgtgatacga

SEQ ID NO: 121869 - DNA, 120 bp, Zea Mays
gccaagccaaccggctcaaagaatactcaacaccggcctacgaaaacgctggcgtaatcacttttaaaaaacatctaatagccaccaaaaacaattgtaaagttaagctcgctcagtaga

SEQ ID NO: 121870 - DNA, 1419 bp, Zea Mays
cgaagaacagacgacatactctctctctctctctctttgtctctctctactctctagacagtcgattaaaggtgcacaaatgtgcggaaagatggagcacatccacatggaacacaagggcttactaggtggagaatttaaagatggaatctgcgcctcagttcccagcccccttcctggcacatcaagcaggccgaacagcatggttgtgaagaaggtttgcccgcgggagttcatcccggcgcacatcatcgcggaggcgatctcgacgctgcacgggctggacctgcggtggtcggggcccatcacgcccagcgagcggcagtacgtggagcagtacgtgctggccatgtacccgcagtactcgcacggcctcatcgaggacggcagctgcgacaaggacgacctctactccacctactacatgtcgccggaggccggcggcgagcggcagcgttcgtcgccggcggggtcgccgtcgtcgtcggccggcacgaggcccgactcggcggacacggtccggctggagccgtcgcggctgctggacatgctcaccaagaagtcgtccttcccggggagcttcatctcgatcccggagatccaggccaggaaccgcgtgctcagccactgcggcctcaccgacgacgagtacctcgtcctcttcgcgcccacgccgagggacgccatgatgctgattggcgagagctacccgttcttccggagcagctactacatgtcgatcctggacgaggagagcgacagcatccgcgccttcgcggcgtacaaggaggcgaaggtgatcgcggcgccggagtcgtggctggacctgcgcatcaaggggtcgcagctgagccagtacttccggcgcaagtccaagcacgcgcccaagggtctgttcgcgtacccggccgtcgtctccccctcctcttcgtcgccgtccgccgccgccgcctcgcggtactcgctgcactgggtgtccgaggcgcaccgcaacgcgtggcacgtggtcctggacgccaccgcgctggccgtcggcgaggaccgcctcccgctctcgctgcaccgcccggacttcgtgctgtgcacgctcggcgacgccacgcggcagcagcagcagcagcagccagctgcgagggtcacctgcctcctcgtcaggaggcggtccttcgatacctccctctcctcccagccgcagaggcagtagccactagccacagcgaattggtgtttgcgagagaaatagaaatcgaagcaggcgcgcgtgttgcaagattgctgcttcttgcctgtgactgtgagctagccgtttggcttgtgactgctgcaagcaaattggtgtttagccgattccgttatcgtgtgatgcatggtgaaacattacaataataaataaatacataaacaccattttgacagagt

SEQ ID NO: 121871 - DNA, 198 bp, Zea Mays
atggccccgctcctccagggttgctgtgcggatattgtgtggtcacggatgatcaccggtgtgcaggcaagctttccgcgtcgttggtgggcgggttatggcctcgggtcaccggcaattgctcaccggagccatatcgccgccgcgaatccactcaccgctgggggcagcggcatctgtgctaccaaccgtcagtaa

SEQ ID NO: 121872 - DNA, 522 bp, Zea Mays
ggccgcgtcgtcctccacgcacgcccacatcccctgccggtgcaccgtctcgtacagcgacacggacgccgcgctctcgtccttcatccactcgcccatgctgaacagcagggagatggtgttggggcggaccaggcgccggcgccggcggcggcggcgtcgacgctgctgctgctgctgctgacgagcagccgggacgccggggtgagctggtaagagatggcggccgcgtcgtcggccttggcggggtcgtcgtggctgaccgcgaagatgcgcatggctgtcagcgtgcgcatgacccgtcggaggtagtcgtggttggacgccgggatctcgcttgcggcgagcagctcgcccagggtggcgctcccgccgcagcggtcgatggtgtcggggatgcgcaggtccagggcgcacttgagcgccatggacttgacgtagcccagggcatggcaccacagctgccggtgggctgcaagcagctcctcggtgtcgtccgtgccgtgctgcgcctggtgcccc

SEQ ID NO: 121873 - DNA, 93 bp, Zea Mays
gaggcaagctccaaaagctcctggtagaatttgtacctcctaaactaatactccagaagctcgtagaactcttcctgaagggaattcagactg

SEQ ID NO: 121874 - DNA, 1923 bp, Zea Mays
acttccgtccgttcccccgaactctctctctcctcctcggccacctcccatccccgttccttcccctccatctcatcaccgccgccagcgccaaaaccctacccacccacccaccgatggcctccccggcgccggcgtcccccgcggccgcggcggcgcactgccccccgccgcgcatcgggctcgcgggcctcgccaccatgggccagaacctggccctgaacatcgccgagaaagggttcccgatctccgtctacaaccgcaccgccgccaaggtggactccacgctgtcccgcgcgcgggacgagggctcgctgccggtgctgggccaccgcgacccgcgcgggttcgtgctgtccctcgcgcgcccgcgcgccgtcgtgctgctcgtccaggccggccccgccgtcgacgccaccatccaggccctctccccctacctcgagcccggggacgccatcgtcgacggcggcaacgagtggtaccagaacacggagcgccgcatccaggaggcggcggcgcgcggcgtcctgtacctcgggatgggcgtctccggcggcgaggagggcgcgcggaacgggccctcgctcatgcccggcggcagcgccgacgcctacgccaacatcagggacatcctccagaaggccgccgcgcagacggaggacggcgcctgcgtcaccttcgtcgggcccggcggcgccggcaacttcgtcaagatggtgcacaacgggatcgagtacggcgacatgcagctcatcgccgaggcgtacgacgtgctccgcaggctcgggggcctgtccaactccgagatcgccgatgtcttcgctgagtggaacaggggggagctcgagagcttcctggtccagatcaccgccgacattttcaccgtggctgacccgttggacgggagcgggagtggcggcggggcgctggttgacaggattctggacaagactgggatgaaggggaccgggaaatggaccgtgcagcaggcggcggagcttgcggtggcagcgcccacgattgccgcgtcgctggacgggaggtacctgtcagggttgaaggacgaacgggtcgcagccgctggggtgctggaggaagaggggatgccggcgggcctgttggagacggttaatgtcgacaagaaggtgctggtggatagggtcaggcaagcgctctacgcctccaagatttgcagctatgcgcagggcatgaatctgctgcgagccaagagcgtggagaagggatggaaccttaacctcgcagagcttgccaggatctggaagggcggctgcattatccgtgcgaggttccttgataggatcaagagcgcgtacgacaggaatcctgagctcgccaatttgattgttgacagagagtttgcaagggagatggtgcagcggcagaacgcgtggaggtgggttgtggcacgcgcggtggaggctggcattagcacgccaggaatgactgctagcctttcgtacttcgatacctacagatcaagtcgattgcctgcaaatctgatccaagcgcagagggatctgtttggtgcacacacctatgagcgcattgactgtccgggttcattccacaccgaatggaccaagctggcgaggaggagcaatggcgcagccatttgaggaattggttggtatgagaagggatgttttctgctttgtgtgatttctctctgtgggttatcttttgttttactattgttatctttatgcttctagatccaagtcgagtacttcaaataatgctgtactgtatggttggcaagtgaagaacattgtgtagcttcagttttactgtgatgtaggtacacacagtttgattctcttaattttggtatgcaattgctatgatgcctctcaaactccaatgttgtgtgtttaaagagttatctgaaatgtgttgaaa

SEQ ID NO: 121875 - DNA, 2086 bp, Zea Mays
atgcaggttgcaatattttccagcatagcttgctcacctacttctcaatttagaagacttcaatttctggatctgagcatcaaatcaagaccataccactttagtcagtcctgtctgatggcactggctgcagctccagccagtggtgattcacagagtggtcctcagaggaactatcaggttgttgtggctgccactcgtgacatgggcattggcaagggtggggtcatgccatggaagcttcttggtgatcttaaattcttcaaagaacttacactaactacaactgatcctgccaaaaagaatgcagttataatgggaaggaaaacatgggagagcattcctgttaagtcaaggccactgcctggtcgtttgaatgtcatacttactcgatctggtagttttgattttgcaacagtagagaatgttgttatatgtggaagtatgaagtctgccttagagctgctagcatcaactccatactgcttatcaattgagaaagtttttgtcataggaggtgggcaggtactgagagaatatttgaatggacctgcatgtgaggctatccatctgactgatattcagtcaagcattgagtgtgatactttcatccctccagttgacttttcagtgttccagccatggtattcatctttcccagtggtagagagcaacattaggcattcttttgtgacttttgttcgtgttagaaagtcagtggcagaaactcatgagtcaaatggcaaggaatcaactgagattgataccaagaatgacaaatttgaaatagagaatttctcttttctccccaagatagtatatgaccgccatgaggagtatcaatatctcaatcttgttgaagatattataaggttcggtgctcagaaaaatgacaggacaggaactggaacattgtcaaaatttgggtgtcagatgcgattcaacttaaggaaaaattttcctctgctgacaacaaagagggtgttttggcgtggtgttgtcgaagaactcctttggttcatcagtggctcaacaaatgcaaaggttttgcaagaaaagggtattcatatctgggatggcaatgcttcaagagagtatcttgaccgtattggcttggcacacagggaggaaggtgatctaggtccagtttatggatttcaatggcgacactttggtgccgaatatactgacatgcatgctgactatactggaaaaggctttgatcagctaatggatgtgattgacaagattaagaacaatcctgatgaccgccgaataattttatcggcgtggaatccttcagatctcaagaagatggctcttcctccttgccacatgtttgcacaattttatgtggagaacggggagctatcctgccagatgtatcaacgctctgcagacatggggcttggtgttccattcaacatcgcatcatattctcttttgacatatatgattgctcaagtttgtgatctttctccaggagattttgtccatgttataggggatgctcatgtctatagaaatcacgttcgagctctggaggaacagattcagaagatgcctaaaccatttccaattttgaagataaatccttcgaaaaaggatatagattctttcatggcgtcagacttcaagctggttggctatgatcctcaccagaagctagagatgaaaatggcagtgtaacggtggcttagctctggagcccccagccttggaacctcggtgggtgaaatcagtcgaacgaactggtactacataaaaaatgaaccggacatcgcactagcttgtttttggtgatggtgctgaatgttgtgcgggaggcgttttcccccgttattagtagcgatctgcgtgctatatatggtcgctgaagtcaaaattggctctcttttattttttatctactactactactcatttgcgagtgagagatggtctgggcacaccattcaattgcaacggcctactggtgtgttgccccccaatgagggctgtgacgattgcgccactacctcgtgagaaacatgatgtgaccgaaattgctgtgtacctgcatggtagaacaacgcactctttggta

SEQ ID NO: 121876 - DNA, 3445 bp, Zea Mays
ctgccctccgccccctaaaccctagccgtttcccatagccgctcgccccagcctcctctgcccagagacttttctttgcggccgaaatggatgactcggagaacaacgcaccctcgacgccggggtcccccgggttcagcaccgaccggctgccacccaacaccaccaccagccgcggcgccaccgacccgtcatcttactccgacgacgatggcgaagctgaggtcgatcctcacgtgctacccgatgacgacgaccccgccgctgtagcggctcccgacgaggacgaggagggggaggacctcttcaacgacaactacctcgatgattaccgaaggatggatgagcatgatcaatatgagtcagttggtttagatgattcactcgaggatgagaggaatcttgatgaaatcatggctgatcgaagggccgcggaagcggagcttgatgcaagggaagtgaggactggtgcaacagctgataggaagctgccacgaatgctccacgatcaggatacagatgatgatacgaatttcaggcgtcctaaaaggcacagggctagttttagacaaccaagtggaccaagaacaccaagaagtgatgatgatggtgatggtgccactcctagttcacctggaagatctcatcgtggaatgtcatctggtggtgatgtgcctatgactgatcagactgatgatgacccatatgaggatgaatttgatgaagaagatgagatgaacatgtaccgtgtccaaggtacattgagagagtgggtcacaagagatgaagtccgtcgctttattgcaaagaaatttaaagaatttcttctgacatatgttcatccgaagaacgatcaaggagagtttgagtatgttcggcttattaatgagatggttttagctaacaagtgtagcctggaaatagactacaagcagtttatttatatacatccaaacattgccatctggttggctgatgcgcctcaatcggtgcttgaagttatggaagaagttgccaaaaatgttgtttttgatcttcacaagaattataggaacatccaccaaaagatctatgttcgaatatcgaaccttcctgtctatgatcaaatacgcaatatcaggcaaatccatctgaacacaatgattcgaattggtggtgttgttacccgacgatctggtgtattccctcagctgcagcaggtgaagtatgactgtaacaaatgtggaactatcctgggccctttcttccaaaactcctacactgaggtgaaagttggatcatgccctgaatgtcaatccaaagggccattcacagtcaatgtcgagcagactatatataggaactaccagaaactcactcttcaggaaagcccaggaattgttcctgctggaaggcttcccagatacaaggaagtcatacttctgaatgatctgattgactgtgctcgtccaggagaggagattgaggtcactgggatatacacaaataattttgacctgtctttgaatacaaagaatggtttccctgtttttgccacagtggttgaggcaaactatgtggcaaaaaaacaggatttgttttctgcatacaaattaacggacgaggacaaagcagagattgagaagttgtcaaaggatccaaggattggagaaaggattatcaaatcaattgcaccatccatttacgggcatgaagatatcaagactgccattgcacttgctatgtttggtggacaagagaagaatgtgaagggaaaacatcgcctgagaggcgacatcaatgtcctcctcctgggtgatccaggcactgcaaaatcacagtttcttaagtatgtggagaaaacaggacacagagcagtatatacaactggaaaaggagcctctgctgttggtcttactgctgcagttcacaaagatccagtaacacgagaatggacacttgagggaggtgcactagttcttgctgataggggcatttgcctcattgatgagtttgacaagatgaatgatcaagatagggtaagtattcatgaagctatggagcaacagagtatcagtatatcaaaagcaggaatcgtcacatctcttcaagctagatgcagtgttattgctgcggcaaacccagtagggggaaggtatgattcatcaaagacattcactcagaatgtcgaattgacggatcccattatttcacgttttgacgtcctctgtgtggttaaggatattgtcgatccatttacagatgaaatgctcgcaaggtttgttgtagatagtcacgccagatcccagccgaagggggctaaccttgaagacagggtttcaactgatgtggatgatgatccactggctgctgcaaggcaagctgacccagatgtcctttcccaagacatgctgaagaaatacataacctatgctaagctgaatgtgtttcccaaaatacatgatgccgatctagacaagattagccatgtttatgctgaactccgccgtgaatcctctcatggccaaggggttcctattgcagtaaggcatatagagtcaatcatccggatgtcggaggcacatgcaaggatgcatctgaggagctacgtgtctcaggaagatgttgacatggccatccgtgtcttgcttgactcttttatttcgactcagaagttcggtgtgcagaaagcacttcaaaagaatttccggaagtacatgacattcaagaaggactacaacgagctgctcctgctgctcctgcgcacactggtcaaggacgccgtgcacttcgaagaaatcatggcaggatcagcctcacgtcttactcacgtcgaggtcaaattggaggacctgaggaacaaggcccaagaatacgagatctacgatctgaagccgttcttctccagcgcgtgcttcagggacaacggcttccttctggatgaagggcgtgggatcatcaggcatccactggcggagtaacaactgagaactgatcttcctcatgtctagaaccggcctttgtctgttacggccctgagatgaagagtgatgatatctgacctcatttgttataggcatacaattgacacttggctggtcgccttttggatttagtatctgttgtgtcttgtttgagagtttcgtactatatgcacttgctgccatttaggcgtgactgtatggtgtgtgaaatcattcgttagatagaatgatcggtgtggctgcaagcaacaaatagttagaaaaagaaacaaaaacgaactgcagccaaaagaccctgagggttattgaagatgatgaatgcatcagttgccatgccttagaagaagagtatgctaagcttttccatcaacccttgtctgacgaatatgtggctgccttagctgccctctttggctgttctgttcagttacaaccttttgtagatagaattgtagatcaactctccggatggaaatcatatt

SEQ ID NO: 121877 - DNA, 3381 bp, Zea Mays
cgccccctaaaccctagccgtttcccatagccgctcgccccagcctcctctgcccagagacttttctttgcggccgaaatggatgactcggagaacaacgcaccctcgacgccggggtcccccgggttcagcaccgaccggctgccacccaacaccaccaccagccgcggcgccaccgacccgtcatcttactccgacgacgatggcgaagctgaggtcgatcctcacgtgctacccgatgacgacgaccccgccgctgtagcggctcccgacgaggacgaggagggggaggacctcttcaacgacaactacctcgatgattaccgaaggatggatgagcatgatcaatatgagtcagttggtttagatgattcactcgaggatgagaggaatcttgatgaaatcatggctgatcgaagggccgcggaagcggagcttgatgcaagggaagtgaggactggtgcaacagctgataggaagctgccacgaatgctccacgatcaggatacagatgatgatacgaatttcaggcgtcctaaaaggcacagggctagttttagacaaccaagtggaccaagaacaccaagaagtgatgatgatggtgatggtgccactcctagttcacctggaagatctcatcgtggaatgtcatctggtggtgatgtgcctatgactgatcagactgatgatgacccatatgaggatgaatttgatgaagaagatgagatgaacatgtaccgtgtccaaggtacattgagagagtgggtcacaagagatgaagtccgtcgctttattgcaaagaaatttaaagaatttcttctgacatatgttcatccgaagaacgatcaaggagagtttgagtatgttcggcttattaatgagatggttttagctaacaagtgtagcctggaaatagactacaagcagtttatttatatacatccaaacattgccatctggttggctgatgcgcctcaatcggtgcttgaagttatggaagaagttgccaaaaatgttgtttttgatcttcacaagaattataggaacatccaccaaaagatctatgttcgaatatcgaaccttcctgtctatgatcaaatacgcaatatcaggcaaatccatctgaacacaatgattcgaattggtggtgttgttacccgacgatctggtgtattccctcagctgcagcaggtgaagtatgactgtaacaaatgtggaactatcctgggccctttcttccaaaactcctacactgaggtgaaagttggatcatgccctgaatgtcaatccaaagggccattcacagtcaatgtcgagcagactatatataggaactaccagaaactcactcttcaggaaagcccaggaattgttcctgctggaaggcttcccagatacaaggaagtcatacttctgaatgatctgattgactgtgctcgtccaggagaggagattgaggtcactgggatatacacaaataattttgacctgtctttgaatacaaagaatggtttccctgtttttgccacagtggttgaggcaaactatgtggcaaaaaaacaggatttgttttctgcatacaaattaacggacgaggacaaagcagagattgagaagttgtcaaaggatccaaggattggagaaaggattatcaaatcaattgcaccatccatttacgggcatgaagatatcaagactgccattgcacttgctatgtttggtggacaagagaagaatgtgaagggaaaacatcgcctgagaggcgacatcaatgtcctcctcctgggtgatccaggcactgcaaaatcacagtttcttaagtatgtggagaaaacaggacacagagcagtatatacaactggaaaaggagcctctgctgttggtcttactgctgcagttcacaaagatccagtaacacgagaatggacacttgagggaggtgcactagttcttgctgataggggcatttgcctcattgatgagtttgacaagatgaatgatcaagatagggtaagtattcatgaagctatggagcaacagagtatcagtatatcaaaagcaggaatcgtcacatctcttcaagctagatgcagtgttattgctgcggcaaacccagtagggggaaggtatgattcatcaaagacattcactcagaatgtcgaattgacggatcccattatttcacgttttgacgtcctctgtgtggttaaggatattgtcgatccatttacagatgaaatgctcgcaaggtttgttgtagatagtcacgccagatcccagccgaagggggctaaccttgaagacagggtttcaactgatgtggatgatgatccactggctgctgcaaggcaagctgacccagatgtcctttcccaagacatgctgaagaaatacataacctatgctaagctgaatgtgtttcccaaaatacatgatgccgatctagacaagattagccatgtttatgctgaactccgccgtgaatcctctcatggccaaggggttcctattgcagtaaggcatatagagtcaatcatccggatgtcggaggcacatgcaaggatgcatctgaggagctacgtgtctcaggaagatgttgacatggccatccgtgtcttgcttgactcttttatttcgactcagaagttcggtgtgcagaaagcacttcaaaagaatttccggaagtacatgacattcaagaaggactacaacgagctgctcctgctgctcctgcgcacactggtcaaggacgccgtgcacttcgaagaaatcatggcaggatcagcctcacgtcttactcacgtcgaggtcaaattggaggacctgaggaacaaggtaagccttcatgagtgcttccacacaaaagacaaccgagctgagtgacctctctaacatctggactgcacctgtgttgacccaggcccaagaatacgagatctacgatctgaagccgttcttctccagcgcgtgcttcagggacaacggcttccttctggatgaagggcgtgggatcatcaggcatccactggcggagtaacaactgagaactgatcttcctcatgtctagaaccggcctttgtctgttacggccctgagatgaagagtgatgatatctgacctcatttgttataggcatacaattgacacttggctggtcgccttttggatttagtatctgttgtgtcttgtttgagagtttcgtactatatgcacttgctgccatttaggcgtgactgtatggtgtgtgaaatcattcgttagatagaatgatcggtgtggctgcaagcaacaaatagttagaaaaagaaacaaaaacgaactgcagccaaaagaccctgagggttattgaagatgatgaatgcatcagttgccatgccttag

SEQ ID NO: 121878 - DNA, 790 bp, Zea Mays
gtaatcccctgatatatcgatccaactcgaactattctgtttccaggaagacgctgtcagctagaaaagttagtgcagctagaggggctgcctcggtccctgaagaagttttccacagagccaaaggagtgcagctatgcaacatacaggcataccagtgcactcctgcattttttgctgattcatacccactcaaccagttctcctcagaagtcatcgctagccggctgccagttccaccatctgcaagggttatttccgagagacacatcatttcagttgtgcctgtaacccgtgtcacaatggcgcgtcgcaagcagtcatttagcttctatgtcgttggctacagcagggatgtgttcataagagactatccttcgaagttttgctggggcctctgctgctgcttcgagtggctggggaaatagttatttcctgggcacgaatgaatgccttctttcagtgtgcagtgtttcattgtacagaaggctgcgtgaaagcttaaaataagcattgcgaattcttgtattttctattaaagaatatatctgtgcgtattgcagtattagattctgcatatttggatttcctgtgtataagtacatcactgtatatattgttcagtgaaaataaaaaatggcgacgtctggccatttcaaacgtgatgtatagtattttgaaatggcttttgatcagtttacacatgcacagtgcagtatcgttttattcactattagtcccggatacgtttgtttaactgtttttttctagtaaagcatatattgttgtt

SEQ ID NO: 121879 - DNA, 1950 bp, Zea Mays
ccttttgcgcagcggagtctttggactcggtaatcccggccctgtcctcccccgaccaaacacagtccctggatccatgggtgtcgaggaggagcgcgacggcgaggagcaacgccgccccctcctctcctccaccccgccagccgcggcggacccgcagcagcaacagtaccagttcctgggccggagcacctcttcagtgctgcgcggcggtggcgggggctgggaagggcctgaggtgagcgccgacgaggtcaggtccgccgctggcttccacacgttccagggcccacctcccaacggcgacaacgcctatgcttacccgccgtccattcatagcgccatgctctccccgtccccatctcatgccccaccgtctccccatccaaatggtaatttgccgccgtcggtgctctgcttctcccccaccggcctccacataatcgtcctttttcccttccgatttttcaccaactgaaggagttgttgtcttgttgaaactgctggtgctgggttgtgggttgcatctgcagaagggttggcgattgttcctcaagggccatatccgtatggtggcagttaccaaccttctgagagcgtcgggagggatgtactggatgaggtggagatccgacagctactcattgaccatattggacatcgatgctgttggggaagtcaccctgcccgcacatggaaaattacctccattgaggactgcaatgtctatgttggcaccttggaaaccttcatcgaggaaagatacattattacaaaaaaggagccctttgaaagtgggaatatagatggaagagaaaaaggtcctttgcctggattgtgggaacttgatttgaggtctaagtttcctgtactttttgtaccagagaaagaagtgactgtcaagattccacattcagatattattgaaaagtgctcagattgtgagggtcgtggagagaaaccatgccctacatgcaatgctggtcaggctcacgggttttataaagcaaatcagatgacccagtgtggtgcatgtcatggcagaggtttacttgctcaccaagatggatctgatacagtatgtggaatgtgcaatggtaaaggaatgttaccttgtatagcatgtggatcacgtggattagtgacatgcaacacatgtactggatatggttccctccttgcacaaagcatggctcatgttcaatggaagacgctgtcagctagaaaagttagtgcagctagaggggctgcctcggtccctgaagaagttttccacagagccaaaggagtgcagctatgcaacatacaggcataccagtgcactcctgcattttttgctgattcatacccactcaaccagttctcctcagaagtcatcgctagccggctgccagttccaccatctgcaagggttatttccgagagacacatcatttcagttgtgcctgtaacccgtgtcacaatggcgcgtcgcaagcagtcatttagcttctatgtcgttggctacagcagggatgtgttcataagagactatccttcgaagttttgctggggcctctgctgctgcttcgagtggctggggaaatagttatttcctgggcacgaatgaatgccttctttcagtgtgcagtgtttcattgtacagaaggctgcgtgaaagcttaaaataagcattgcgaattcttgtattttctattaaagaatatatctgtgcgtattgcagtattagattctgcatatttggatttcctgtgtataagtacatcactgtatatattgttcagtgaaaataaaaaatggcgacgtctggccatttcaaacgtgatgtatagtattttgaaatggcttttgatcagtttacacatgcacagtgcagtatcgttttattcactattagtcccggatacgtttgtttaactgtttttttctagtaaagcatatattgttgtt

SEQ ID NO: 121880 - DNA, 1806 bp, Zea Mays
ccttttgcgcagcggagtctttggactcggtaatcccggccctgtcctcccccgaccaaacacagtccctggatccatgggtgtcgaggaggagcgcgacggcgaggagcaacgccgccccctcctctcctccaccccgccagccgcggcggacccgcagcagcaacagtaccagttcctgggccggagcacctcttcagtgctgcgcggcggtggcgggggctgggaagggcctgaggtgagcgccgacgaggtcaggtccgccgctggcttccacacgttccagggcccacctcccaacggcgacaacgcctatgcttacccgccgtccattcatagcgccatgctctccccgtccccatctcatgccccaccgtctccccatccaaatgggttggcgattgttcctcaagggccatatccgtatggtggcagttaccaaccttctgagagcgtcgggagggatgtactggatgaggtggagatccgacagctactcattgaccatattggacatcgatgctgttggggaagtcaccctgcccgcacatggaaaattacctccattgaggactgcaatgtctatgttggcaccttggaaaccttcatcgaggaaagatacattattacaaaaaaggagccctttgaaagtgggaatatagatggaagagaaaaaggtcctttgcctggattgtgggaacttgatttgaggtctaagtttcctgtactttttgtaccagagaaagaagtgactgtcaagattccacattcagatattattgaaaagtgctcagattgtgagggtcgtggagagaaaccatgccctacatgcaatgctggtcaggctcacgggttttataaagcaaatcagatgacccagtgtggtgcatgtcatggcagaggtttacttgctcaccaagatggatctgatacagtatgtggaatgtgcaatggtaaaggaatgttaccttgtatagcatgtggatcacgtggattagtgacatgcaacacatgtactggatatggttccctccttgcacaaagcatggctcatgttcaatggaagacgctgtcagctagaaaagttagtgcagctagaggggctgcctcggtccctgaagaagttttccacagagccaaaggagtgcagctatgcaacatacaggcataccagtgcactcctgcattttttgctgattcatacccactcaaccagttctcctcagaagtcatcgctagccggctgccagttccaccatctgcaagggttatttccgagagacacatcatttcagttgtgcctgtaacccgtgtcacaatggcgcgtcgcaagcagtcatttagcttctatgtcgttggctacagcagggatgtgttcataagagactatccttcgaagttttgctggggcctctgctgctgcttcgagtggctggggaaatagttatttcctgggcacgaatgaatgccttctttcagtgtgcagtgtttcattgtacagaaggctgcgtgaaagcttaaaataagcattgcgaattcttgtattttctattaaagaatatatctgtgcgtattgcagtattagattctgcatatttggatttcctgtgtataagtacatcactgtatatattgttcagtgaaaataaaaaatggcgacgtctggccatttcaaacgtgatgtatagtattttgaaatggcttttgatcagtttacacatgcacagtgcagtatcgttttattcactattagtcccggatacgtttgtttaactgtttttttctagtaaagcatatattgttgtt

SEQ ID NO: 121881 - DNA, 1809 bp, Zea Mays
ccttttgcgcagcggagtctttggactcggtaatcccggccctgtcctcccccgaccaaacacagtccctggatccatgggtgtcgaggaggagcgcgacggcgaggagcaacgccgccccctcctctcctccaccccgccagccgcggcggacccgcagcagcaacagtaccagttcctgggccggagcacctcttcagtgctgcgcggcggtggcgggggctgggaagggcctgaggtgagcgccgacgaggtcaggtccgccgctggcttccacacgttccagggcccacctcccaacggcgacaacgcctatgcttacccgccgtccattcatagcgccatgctctccccgtccccatctcatgccccaccgtctccccatccaaatgaagggttggcgattgttcctcaagggccatatccgtatggtggcagttaccaaccttctgagagcgtcgggagggatgtactggatgaggtggagatccgacagctactcattgaccatattggacatcgatgctgttggggaagtcaccctgcccgcacatggaaaattacctccattgaggactgcaatgtctatgttggcaccttggaaaccttcatcgaggaaagatacattattacaaaaaaggagccctttgaaagtgggaatatagatggaagagaaaaaggtcctttgcctggattgtgggaacttgatttgaggtctaagtttcctgtactttttgtaccagagaaagaagtgactgtcaagattccacattcagatattattgaaaagtgctcagattgtgagggtcgtggagagaaaccatgccctacatgcaatgctggtcaggctcacgggttttataaagcaaatcagatgacccagtgtggtgcatgtcatggcagaggtttacttgctcaccaagatggatctgatacagtatgtggaatgtgcaatggtaaaggaatgttaccttgtatagcatgtggatcacgtggattagtgacatgcaacacatgtactggatatggttccctccttgcacaaagcatggctcatgttcaatggaagacgctgtcagctagaaaagttagtgcagctagaggggctgcctcggtccctgaagaagttttccacagagccaaaggagtgcagctatgcaacatacaggcataccagtgcactcctgcattttttgctgattcatacccactcaaccagttctcctcagaagtcatcgctagccggctgccagttccaccatctgcaagggttatttccgagagacacatcatttcagttgtgcctgtaacccgtgtcacaatggcgcgtcgcaagcagtcatttagcttctatgtcgttggctacagcagggatgtgttcataagagactatccttcgaagttttgctggggcctctgctgctgcttcgagtggctggggaaatagttatttcctgggcacgaatgaatgccttctttcagtgtgcagtgtttcattgtacagaaggctgcgtgaaagcttaaaataagcattgcgaattcttgtattttctattaaagaatatatctgtgcgtattgcagtattagattctgcatatttggatttcctgtgtataagtacatcactgtatatattgttcagtgaaaataaaaaatggcgacgtctggccatttcaaacgtgatgtatagtattttgaaatggcttttgatcagtttacacatgcacagtgcagtatcgttttattcactattagtcccggatacgtttgtttaactgtttttttctagtaaagcatatattgttgtt

SEQ ID NO: 121882 - DNA, 874 bp, Zea Mays
accagcaagggatttaatcctcacaaattcccttcaatctgctcataaccgaacaaaccctcaatcactttcgatctccatgcaaccgatctagggctgaagttgttaacaatgctcttacatttttgtttatatgattagtgccatcaggttatggttggtggtttaatttttttattagtattcaacgccaccagatgtgctattagaaaaggagatattttgtactcccttcgttcttttttatttgtcacggtttagttcaaatatgaactagcgggcgacaaatattctattaagaaaacctagaagcagaataaaaaagtcagttaaatttgttgatgcttatattattcattatatagccattatatcaccatagaaccaattcgaaaatgtgactgcattttgcttttgcaggatgaactgattgctcgcttacgggagtcgcagggttgacatgaatctggtacttgtttagtcaatcaaaccccttcaggcagggttacacgaccaaatgagtaccatgctgtacttgtcaatggctgctctgcctagatttaatacaatgtaatggcatatgtaggttgagactttgccggaccttattatactcagaatttgttaactagctgttacctgtcagtagtcatgaattcactgttttctcatacccggtaggttaaaaaatgcaggtatgtgaattcaattgctaaggtgcatttgcatctgctctttttgctaagttaatttacgtctgtattctgattgctgaattcttctgcctatcttttatttcgtttcgaccatagtgctgaaaattgaagatagcagcagcaacttcagcggtgtttcagtcatatatctgcttggc

SEQ ID NO: 121883 - DNA, 945 bp, Zea Mays
aaagcaaaataaaaatgagaaacagcaaagaaaaacacaagacctcctattcaccatgccgaccgaagagggttccgacggcggtggcggcgccggagccggagccggggagaagaagagctcgcaggcgcccgcaaagcctggagcgtgcggcgccgcaaagttcctcgcggggttgccgtcgcgcggcaacttctcttccggctccgccccctccaatctgggagggttcagggtttacgtctgcgagcacagcacagatcccccagaaggacaagttataaagacggattcaacgaatattttaatcaggcatctccagttgaacaagcagaagactgagggcaaagatgtggattccagaactgtcggcgaaaacaacagagggaaaagatctgctgccagaagtttggatgtcaacaattcagcaaagaaggctaacttgggtacttcatctggatcatcagcctatgaggaaatttctggcttttcacaacacacactgcagtcatttacagtggagagattgcgtgcacttctacgacaaagtggtcgatcgaccaaaggcaaaaaggatgaactgattgctcgcttacgggagtcgcagggttgacatgaatctggtacttgtttagtcaatcaaaccccttcaggcagggttacacgaccaaatgagtaccatgctgtacttgtcaatggctgctctgcctagatttaatacaatgtaatggcatatgtaggttgagactttgccggaccttattatactcagaatttgttaactagctgttacctgtcagtagtcatgaattcactgttttctcatacccggtaggttaaaaaatgcaggtatgtgaattcaattgctaaggtgcatttgcatctgctctttttgctaacgggacgtttggatcccttcattttagaggaattggaattcactcg

SEQ ID NO: 121884 - DNA, 726 bp, Zea Mays
aaagcaaaataaaaatgagaaacagcaaagaaaaacacaagacctcctattcaccatgccgaccgaagagggttccgacggcggtggcggcgccggagccggagccggggagaagaagagctcgcaggcgcccgcaaagcctggagcgtgcggcgccgcaaagttcctcgcggggttgccgtcgcgcggcaacttctcttccggctccgccccctccaatctgggagggttcagggtttacgtctgcgagcacagcacagatcccccagaaggacaagttataaagacggattcaacgaatattttaatcaggcatctccagttgaacaagcagaagactgagggcaaagatgtggattccagaactgtcggcgaaaacaacagagggaaaagatctgctgccagaagtttggatgtcaacaattcagcaaagaaggctaacttgggtacttcatctggatcatcagcctatgaggaaatttctggcttttcacaacacacactgcagtcatttacagtggagagattgcgtgcacttctacgacaaagtggtcgatcgaccaaaggcaaaaaggcaagtgaaaccatttctcaatcttattctaaaaggattttacattcacacgagtctctggcactggatctgcccttattttatgtcccaatgagcagtgcatcatttgattttgtgctccatctgtagactccgaagaattccactggata

SEQ ID NO: 121885 - DNA, 937 bp, Zea Mays
aaagcaaaataaaaatgagaaacagcaaagaaaaacacaagacctcctattcaccatgccgaccgaagagggttccgacggcggtggcggcgccggagccggagccggggagaagaagagctcgcaggcgcccgcaaagcctggagcgtgcggcgccgcaaagttcctcgcggggttgccgtcgcgcggcaacttctcttccggctccgccccctccaatctgggagggttcagggtttacgtctgcgagcacagcacagatcccccagaaggacaagttataaagacggattcaacgaatattttaatcaggcatctccagttgaacaagcagaagactgagggcaaagatgtggattccagaactgtcggcgaaaacaacagagggaaaaggtaaataacaaaatcatgaaactatttgatacaaacgttctttgcttgtggttgtattaacccctagttttgtgtatgttctgttagtagttaacaaatacatgatgttgtatggatgtaattttcttatgcatatgaattgctaaactcttgtcgcattttcagtattttggttggtcataaggatatttttttctattcgtcataggcatgaatattggtactcgaagttacttggtgacctatttttaatattgtttcatatccttcttcaacacccttttattgttccatgtttgatgctcctgaattcttggtgatgtttacttttctgtatgattccattggagtaagcaataaaataccctggcctccatcactaacgggtcgacgtcaatcgttcactctacaacggcccaaccggagggtggcgtacaacacattgtaacccgagagcggatgaagcacatcaaggggatttttttaaccaagtcggaaaattcgccccgatgggaatcaaagccgggtcttggaggtgctactc

SEQ ID NO: 121886 - DNA, 2941 bp, Zea Mays
gacaagccgcaacgcgacgtgctcctccccggaacagcgccacccaaccacgcgacgaccgccaccgcccgaccgacgccgccccggttccgtccatcaccttcccctcctctcctgcttctcctccgcattattctcgcgcgctgctcgcatctctctctgcgccgcgagaagaacgcgtccgcccagctgcgcgcggaggtgtgggcggcgctgagttacgtgcagcagcgcgagagaatggaggctgcggcagcggcagcggcggcagctccagcgcctgcgggggagagggaccccgagcaccaccacggatgtctggccgtcaggacgtcgctgccgcggtgcgccatcggcgccggcggcggctcctcgctgcctggatcttccgatgaaacatcatgtggatcaccgagatggatagggagaggcctctcgtgtgtgtgcatcaagcggaaaggcacatatgaaaggatatgcatgaacctcacaccagtgcaggaagaaaggcttcagagattgaagcatcgcatgaaggtttactttgatccatctagacgagatcaccaggaagccctgaaagctctttggcatgcaacataccctgatcaagaacttgaaggtttgatatctgagcagtggaaggacatgggctggcaaggaagagacccatcaactgactttagaggcgcaggattcatatccctggagaatcttttgttctttgccaagacgttctccgcatcgtttcagagacttctaaataaacagtgcggtaacagagccacatgggagtacccatttgcggttgctggtgtaaatattacattcatgatcatgcagatgctagatctccagtctactaagccaagaacatttgtgcgagccatttttatccaaatgctctcagaggatgagtgggcatttgatctgctctactgtgtcgcatttgttgtgatggacaagcagtggctggacaagaatgcatcttacatggacttcaatgaggtgctgaagtcgacacgagcccagctggagagggagcttatgctggacgatgtcatccgcatcgaagacatgccgtcatacagcctgctttgctagtaaccaaaacaccgaattcgccggagaacagaactgagttgatggttcaactgtatagtacctccctttgtctgatttctgggaggattttttttagcaacaaagtagagtgatgacgtactggtatcatgcttaatttgggctaatgatggtgatatgcacattctcagaagtgttacaatgttctgtacttgtctaagcatttgtcagatatctaatattgatcatttgatccacccatcattctcctatctgcatcatcttttctggggattgccataaactttcatgagcacaacggggaactagaccagcacatttccttgtggtggcgataactatggttgctccagtgacccatcaccattaactgcgcttgccccagggattttagagagcctcgctcccttcatcaccttcctcagcttgtccacgtcctgccacctaccagcctcggcatacaagttggacagtaccacatacactccatggttactgggatttagtttcagcatctccaccgctgcccgctccgcaatctcaatgacaccgtggttcttgcaggccgtcaggagtgctccccatatcacggtgtccgccttgcatgacatctcccgtatcatatcctccgcttccgataagaggccagcacggccaaggaggtccaccatgcatccgtagtgctggattcctggaacgatcccgaagtccttctccatggacctgaacagccggcgggcctcgtccagcagccctgggtgggagcacgccgagagtgccccgacgagtgtggtcgcattcggtggcacaccctcccgctgcatccgtctgaaaaagtcgagtgcacgctcaccgtgcccgaggttcgccagccccgagatgagagggttccatgcagccggcacgcgccgctctggcagcccgtcgaacactgccaaggcctcctcaatggcgccatttttgacgtacatgtcgaccagcgccgtgccgaggatgggaccaactgccacgccccgtgccaccattaggtcgtgcacgtgacggcccatctcgagcccgcccgacggcgaccgcgcgcacgcagacagcaccgaggccagcgcggcgccgcagggctcgaagcccacgcggaccatctggacgaacgccgccatcgcgtcctcgtgcctcccgttctgcgcgtacgcggagaccatggtagtgtacacggccgcgttccgctcgggcacctcgtcgaacaccctgcgcgcggggcggagaaggcccgccacggagtaggcccgaacgaggccattggcgacgtaggcatcgaggtggaccccgtgccggacggcgagcgcgtggagctgttcggtgacggggagagagagcggaaggcgcgcggcggccttcaggaggaaggggaatgtgtgccggccgggcacgagggctccagtgccgtggatgcgggagaagaaggggaatgcggtggccgggtccggggaggaagcgagcacgcggagcgtggtgttgaacatgaaggagttgggcgcgcagggcagggaggagaggagcgcgagtgcggcggcagcgggatccggagagagcgcgacgtaggcgtccaggagccgggacgcggcgaaagcgtcctcggcgaggcggccggagacgagcatggcggcgtgcacgcgggctagggcgcaaggtgtagcgcaacgatcggcgaggagtgagaggttcgggcggaggctgacgcgcgtgccgatggcagccgcgacgagcggcgccgaaggcatatttggatcgtgtgccttcgatgctcggtagatccgtagatggggaggtgccgagcggaaaa

SEQ ID NO: 121887 - DNA, 1016 bp, Zea Mays
gacaagccgcaacgcgacgtgctcctccccggaacagcgccacccaaccacgcgacgaccgccaccgcccgaccgacgccgccccggttccgtccatcaccttcccctcctctcctgcttctcctccgcattattctcgcgcgctgctcgcatctctctctgcgccgcgagaagaacgcgtccgcccagctgcgcgcggaggtgtgggcggcgctgagttacgtgcagcagcgcgagagaatggaggctgcggcagcggcagcggcggcagctccagcgcctgcgggggagagggaccccgagcaccaccacggatgtctggccgtcaggacgtcgctgccgcggtgcgccatcggcgccggcggcggctcctcgctgcctggatcttccgatgaaacatcatgtggatcaccgagatggatagggagaggcctctcgtgtgtgtgcatcaagcggaaaggcacatatgaaaggatatgcatgaacctcacaccagtgcaggtagcagactaacagctaattgttacaattattgtgcaggagtttctatgatggcaagtgacaactcaaaaggatttccaagggcttttcctttaagctattattagtttcttacagtccaatgagtgtttggtggtcctgtgtgacttcaacgtacaatttgaactctgaagggtagacatggcaaaataggtggtcctgctcaaaaaattgtctgaagaatgtctttccatatgcaccaagatttttattggcgggaaatccttaattgtgtatcacatattaggttaaaagtagtaaagctaatgacttcaataggcaagttgcttaatgagactgaaaccacttgttattctattccgaattgttggtaatttgcaggaagaaaggcttcagagattgaagcatcgcatgaaggtttactttgatccatctagacgagatcaccaggtgagatttctgccataagtatgttaaatgtttcattcaattggttagctctgcacttgcgcttc

SEQ ID NO: 121888 - DNA, 100 bp, Zea Mays
atcgtccatatttgttcgaagagcgacacatatattagccattgcttggagagcactctaaacttgttgctgaaagggaaatgtgcccttgggccatttc

SEQ ID NO: 121889 - DNA, 1916 bp, Zea Mays
ctcgcaccggtccctccccctctacccacatatatcccacgcgtatatgtatatatatatcgacgaatagtgtgcgctgtctctcccatgcttcctcttagtaggtgctctctccctacctcctccaatccgggcccgggcccctctctaggattcttgttgcacgtacacaccatgatctgctacgtgctgtggttagctgcgtgctgcctcctcctcctcttgtacagcgtccgattcaggtcccgcatcagccatggcaacggccccaggacctacccgttgattggctgcctggtcagcttctaccagaaccggtggcggctgctggactggtacaccgagatgctggcggcgtcgccgacgcagacgatcgtcgtggaccgtctgggcgcgcggcggaccgtggtgacggcgaacccggtgaacgtggagcacatcctcaagggcaacttcggcaactaccccaaggggaagcccttcaccgacatcctcggcgacctgctcggcaccggcatcttcaacgtcgacggcgagctgtggtacgcgcagaggaagctggtgagccacgagttctcggcgcgcgcgctcagggacctggagttcgccgtgctcgaggacgaggcgcgggagcgcctcgtgccggccctgggcctggccgcggcgcgcggcgacgccgtggacatgcaggacctgctccgccgcttctccttcgacgtcatctgccgcgtgtcgctgggcgttgaccccggctgcctggacccggcattgccggcgccgaggctggccgcggcgttcgacgcggccgcggggatcatcgccaggcgcggcgccgcgcccgtggccgccgtgtggaaggccaagcgcgcgctgggcgtgggctcggagcgcatgctgcgcgaggagatccgggtcatccacgaggccgtcatggacctcatccgcatccgcaagaaggagcgcggcctgcaggtcaacgacgccgacgggcggaggagcgacctgctgtcgcggatgatcgaatgcgggtacccggacgagatgatccgcgacatggtgatcagcttcatcatggccgggcgcgacaccacgtcgtccgcgctgacatggttcttctggctgctcacccgccaccgcgacgtggaacgggaggtcctgcgggaggtcacgggcggcggcggcgcgagccacgccgcaggcgggcagggcaagatgagcgtgctccacgcggcgctgtgcgagacgatgcggctgtacccgccggtggcgtgggactccaagcacgctgcggcgggcgacgtgctgcccgacggcacccgcgtggagcgcggcgaccgcgtcacctacttccagtacgggatggggcggatggagtccatctggggcgccaacgccgccgacttcagcgtgcagcgctggctgtccataggggaggacaacgcgccccccgccgcggtggccggcgtgtcgccgttcaagtacccggtgttccaggcggggccgcggacgtgcctcggcaaggagatggccttcgtgcagatgaagttcgtggccagcaccgtgctccggcggttcgagatcgtgcccgttgacgagggccgcgtgccggtgttcctgccgctgatgacggcgcacatggccggcgggctcaacgtgacggtgaggagaagaggggaacccattgccgctgctgctactccactcgatccttctgctgatccagtattataaatatatttaaccctcctcatgtaagtacgacaaattaaaatcatgattatttagttcctattatacataaattatatataattgaaattcatgaggacacgcaatgtttttgctgcttatcacagacgatagcagtacacttttgtaccttatcgatcatgatcatatgaaagagatacacagca

SEQ ID NO: 121890 - DNA, 366 bp, Zea Mays
atggctgtgtcctggctcgggatgaaccaagcacaaaaacatcagctcatgctcatgtggtattttaagccctgcctctacatggacgccggcctcgcttccgcggtcaccgcgcttcggacctccaccgatgtcgcgcacctcgcgcacttgctcgagcagtttcgcctcacctggtgcggcaagctcgtccgggacgcccgcaccgtcgctccattaaggacctctgcttcgacctcttcatcattagaggtggaaacagagctttcaatgcatgctggaggtgcgcgatgtgatcgatattatccatgcttgataaatgatgacaatggtgatggccatgatatatggtcaatattgtattga

SEQ ID NO: 121891 - DNA, 2743 bp, Zea Mays
cctccctcctcgagatgagcagtgagcagcactagcagcaattccatctgagcgggccttatcgcttcatcatcccctctgacaccgccaaatggcgtccgtgccttccgttgccgtccccgtcgccgcctcgggcttcccggctgccggcggggctgactcccggaggccgccaccgagctccgtctccgccgccgataagaacaattggaatggcaggagcatccaagcagcgcagaatggcagcaccatggaagcgccgctgcggcctctcgacgtcggcgaagcaatggccatgctcagggaggggaagacggtgcagtcggcgatgtacgtgccactgctgcacgtgtgcgtcgagaccggcagcctcggcggcgccagggccttgcacgggcacatggtcaagacggggaccagcgcggacatgttcgtcgccacatctctcgtcaatgcttacatgcggtgcggggcgagccaggacgcgcgtagcctcttcgaccaaatgcctgagaagaatgtcgtgacgtggaccgcgctcatcacaggctacactgtaaactctcaactgttggaggcactcgaggtgttcgtcgagatgctggaggccgggaggtacccctcacattacacgctgggtgccatgttgaatgcgtgctctgcttccaacaacgctgaccttggcagccaggttcatggatacacgattaagtatcgtgctctctccataacgagcatagggaactcgctctgtcgaatgtatgccaagtctgggagcttggaatctgccatgagggccttccggatggtccctgataagaatgtcatcacatggacgacaatgatatctgcctgtgctgaagacgagaactacacggagcttggactgactctgttccttgatatgcttatggatggagtacttcccaatgagtttaccttgacgagtgtcatgagcttgtgtggtacaaggctagatcttaacctaggcaagcaagtccaagccttctgcttcaaaattgggtgccaaacaaacattccagtaaagaactcgacgatgtacctctatttgagaaagggtgaaaccgatgaggccatgcggttttttgaagagatggatgatgtcagtatcatcacgtggaacgccatgatctcgggctacgctcagatcatggagaccgctaaggatgatcttcatgctcgttccagaggtttccaggcactaaaggttttccgcaacctcaagaggtctgcaatgaagcctgatttattcaccttctcaagcatcctgtctgtctgtagttccatgatggccttagagcagggtgagcaaatccatgcacagacgataaagactggtttcctgtcagatgtcgttgtgaacagcgcactggtaaacatgtataacaagtgtggttgtatcgaagatgcaactaaagcctttgtcgagatgtcgatacggactcttgtcacgtggacttctatgatctcagggtactcacagcatggccggccccaggaagctatacagctctttgaggacatgagatttgctggagtgagaccaaatgaaatcacatttgtatgcgtgctctcagcctgcagctatgctggtttagccgagaaggctgagcactacttcgatatgatgaaggaagagtacaaaatagagcctattgtggaccactatgggtgcatggttgacatgtttgtgcgcttgggccgactggacgatgcatttgccttcatcagaaggacgggtttcgaaccaaacgaagccatctggtccagcttggttgctggttgccggagccatggaaacatggagcttgccttctatgcagctgatagactgatcgagctcagaccaaaaggaattgaaacctatgtcttgctgttgaacatgtacatttccaatgagagatggcatgatgtggctagagtgcgcaagctgatgaaacaggagggtcttggggttctcatggaccgcagctggattacaatcaaggacaaggtatatttcttcaaagctaatgataagacgcacgaactgagtgatgagctgtatcaactgctggagaatttactggagaaggctaaaaccattgggtatgaaccgtaccagagcgctgagttatctgacagcgaggacgacaagaagcctcctgcaggttcagtaagacaccacagcgagaggttggctgttgcactggggctgctccaaacacctccaggcgcaacagttcgcgtcacgaagaacatcaccatgtgcagggactgccacagctctattaagtttttctcattgcttgcgaacagagagattgttgtccgggatagtaaacggcttcacaagttcaaggacggccgatgctcttgtggagattttggtgcgttactgtgagttgtacaggaatctgtaaatttcagaaatattctactcccaggtgccaggtccaacaattttgtactggggataaatcagaacttgcatggaattttgtttgatgcaagggtactctgagctgatccactctgcaagtgagttttgtagatttcttgtctgggagcgagttttcttcaggcaacatttgtaccatatgaccagaaactcaaatcatacttgttgaatatgctcacatgggttagcaatataggaaggtgaatatctttgcaagtgtcgtaaacgctggcctaactgtatctcactttgctaattttaattcacaattttggcattctt

SEQ ID NO: 121892 - DNA, 3864 bp, Zea Mays
cgaaacgatccatgttctaacaggaggagtgcacaagaggggcctccgcctcccctgcccccgcttgctatcgcgcgccagatcccgatctcgccgcgatccatggcgtcgtcgccgcagcagccgccgccgttcgccacgcaaaaccctactgcgcagggtccaggccaggggcctccagtctcggggacgggggcactccccggggcgttctccaatctccagatctcccgcggcgcggccccgccgcccggtgccccgcgggggctcacgcctcagcaggcaccgcccgccttcgccgcgctttcgggtcctccaccggctgcagcccggcccttcttccctggcagcccgcccgcaccgccgttcgtgcgggcgccgacggcggcagcttccgtctcgccgcccttcggcggacaaccgggggtagtgtcccagcagccgccaccgtttgggggacctccaggtgcggcgtctcagccgccgccgccgttcggtgttgcccccggggtggtgtcccaggcgccgcctccgttcggaggccctcctactgcggcgtcgcaggcccctcctccgtttggaggccctcctgccatggcatcgcaggtgccttcgccctttgttggtcactctgttgctgcgtctcaggcagcaccgttcggcgtcccccctgttgcggggtcacatcctccgccgttcggtgggcctcctggagcagggcctcatccagcaccgccactacggcagacattccctggccagtctgggccaatggcatccgcggcagcttggacgcagccaacaccacctagctttggagccccgcaacaatctccaccaccattcagttcgcggccagttgggcagccgccctttgctacgcaatcagcgcctgtggcacagcagctgcccttcatggggccacccagggcaaatgccccggcgtttgggcctccatcctggcaaactcagggagctgggtctggtgcaatgcagccacctatgagaatgccaggcattcctggtagcatgcagccaaacacactaggaccccctggcaccccgactatgacttattctccacatgctggaacacaggtatcaaccccatccaaaattgatcccaatcaaattccacggcctatgcctgaatcatcagtcatcatttatgagacccgtcaaggtggccaagcaaccatccccccggctgcatctagtgaatttattgtgaaggacactgggaactgtagcccccgtttaatgcgctgcactgtgaatcaaataccttgtaccggtgatctcttgatgacttcgggtatgcctttagctctgatggttcaacctttttctcttcctcacccatccgaggaacctattcagcttgtggactttggagagatgggacccattcggtgttctcgttgcaaagcatacataaatcctttcatgaaatttgttgatcaagggaggcatttcgtctgtaacttatgtggattcagaaatgatactcctagagaatacatgtgcaacttagggcccgatggtaggcggcgtgatgctgatgacaggcctgaattgtctagaggaactgttgaatttgttgctacgaaggaatttctggttcgtgatccaatgcctgctgtatacttcttccttattgatgtctccatgaatgctatacaaactggtgcaactgctgcagcttgcagtgctatttcccagtctatttcagatctaccagaaggtcctcggacaatggttggaattgcaacatttgattctgctattcacttctacagtcttaaacgtgctcagcagcagcctttgatgctcatcgttcctgatgttcaagatgtatatacacctcttcagactgaccttattcttccagtttctgagtgccgggagaatctggagcagttgctagaaagtatcccaaacatgtttgagaataatagggttgctgattctgcttttggagcagcaatgaaggctggcttcctggcgatgaaatctactggcggaaaacttcttgttttccaatcagtgctgccatcacttgggattggttctttatctgctagagaagccgaaggcagagcaaacattacaactggtgacaaggaagcccataaacttttgcagcctgttgacaataccctccagacaatggcactagaatttgctgaatatcaggtctgtgtggacgtattcctcacaacacaatcctacgttgatattgcttctatatccgttgtgcctcagactacaggtggccgggtctactactactatccattttctgctctttcagatccagccaagctcttcaatgatctcagatggaatatcagtagaccccagggttttgaggctgttatgcgtgtaaggtgcagtcagggtctccaagttcaggactattttggcaatttctgcaagcgtgttcccactgacattgatcttccagcgattgattccgacaaaactgtgatggtcacgtttaagcatgatgacaagttaccagaaaatgtggaatgtggcttccagtgtgcacttctctatactactgtatatggacaaaggaggatccgagtcataaacctctcactttcatgtacaaatttgcttgccaatcttttccggtatgctgatttggagacacagtttgcatgcttcctgaagcaagctgctaatggcatcccgacctcttcattacctcgtattcgggatgaagcaacaaacacatgcataaatattcttcaatcttaccgcaaacactgtgcatctgtaacctcatcggggcagttgattctcccagaggctctaaaactgctgcctttatatactctggcactggtaaaaagtgtaggcttgagaactgatgggcgattagatgaccgttcctattggatatctctggtctcgtcagtttctgtagtactagctgttcctctggtgttccctagattgattcctatccatgatctcacgtccagggatgatgatgattcccttgtaccaagtccacttatgctcaaaagtgaaaatgtacaagaggatggggtctatttattggaaaacggtgaggatggtctagtctacgtaggaaacatggtaaatccggctaccctggaacaaatattcggtgtctcttctttggctgcattaccagcccagttagcattggagcagtttgacaacgaactctcgaggaagattaacgaagttgtaaatgaaattaggcgccagaggtgctcatacttgaggttgagactatgcagaaggggcgaaccatctggagattttttccggtcatttctaatagaggacaaggcacctggcgtcttctcctacgaggagtttctcgtgcatgtccacaggcagatccaaagcaagatgacctgagggccaggcgaatgcaaaggcaacatgaactgagggtcaggctggcaaatgcaaaagcaagatgacctgagggcccagatcctgtctgtagcatttcggtcagtagatggattgtaggtaccaaaacgagttcgatttctgcataaggagacagcgaagtggcgattccacatcactatggagcataatgtttgctcggacagtagaactcaggaatagaggcaccgtttttggagtggggtggtatatgtgttgtatacagagatgagaggcgttagtttttgtgttgtcattgtcgctgtgcatccttattgttttaccccttgtccaaaaagggatgcattattatgttgagaggaaggttatagaggtttcgcaataaaatgcacctagccaattgatagtatgaatcagatatataatctaatttatgactgcctattcgccttgtaccctgtc

SEQ ID NO: 121893 - DNA, 1989 bp, Zea Mays
gcattgttccatatacttattttgcgttactagcaatgacgcaatgtaatactatctaactccatatatttgtttcatcaggagcacatgttccttttatctggaatgctcagttaaaacactaataatcttgtgtggtttacaggaagcccataaacttttgcagcctgttgacaataccctccagacaatggcactagaatttgctgaatatcaggtctgtgtggacgtattcctcacaacacaatcctacgttgatattgcttctatatccgttgtgcctcagactacaggtggccgggtctactactactatccattttctgctctttcagatccagccaagctcttcaatgatctcagatggaatatcagtagaccccagggttttgaggctgttatgcgtgtaaggtgcagtcagggtctccaagttcaggactattttggcaatttctgcaagcgtgttcccactgacattgatcttccagcgattgattccgacaaaactgtgatggtcacgtttaagcatgatgacaagttaccagaaaatgtggaatgtggcttccagtgtgcacttctctatactactgtatatggacaaaggaggatccgagtcataaacctctcactttcatgtacaaatttgcttgccaatcttttccggtatgctgatttggagacacagtttgcatgcttcctgaagcaagctgctaatggcatcccgacctcttcattacctcgtattcgggatgaagcaacaaacacatgcataaatattcttcaatcttaccgcaaacactgtgcatctgtaacctcatcggggcagttgattctcccagaggctctaaaactgctgcctttatatactctggcactggtaaaaagtgtaggcttgagaactgatgggcgattagatgaccgttcctattggatatctctggtctcgtcagtttctgtagtactagctgttcctctggtgttccctagattgattcctatccatgatctcacgtccagggatgatgatgattcccttgtaccaagtccacttatgctcaaaagtgaaaatgtacaagaggatggggtctatttattggaaaacggtgaggatggtctagtctacgtaggaaacatggtaaatccggctaccctggaacaaatattcggtgtctcttctttggctgcattaccagcccaggcaagtctgcttacaatctctcttatactattcttgaagctgtaggttttatcatttgttgtgtggctagaatataacaagatatgctgcattactgtgtttgtcaaatgagttccttgcagttagcattggagcagtttgacaacgaactctcgaggaagattaacgaagttgtaaatgaaattaggcgccagaggtgctcatacttgaggttgagactatgcagaaggggcgaaccatctggagattttttccggtcatttctaatagaggacaaggcacctggcgtcttctcctacgaggagtttctcgtgcatgtccacaggcagatccaaagcaagatgacctgagggccaggcgaatgcaaaggcaacatgaactgagggtcaggctggcaaatgcaaaagcaagatgacctgagggcccagatcctgtctgtagcatttcggtcagtagatggattgtaggtaccaaaacgagttcgatttctgcataaggagacagcgaagtggcgattccacatcactatggagcataatgtttgctcggacagtagaactcaggaatagaggcaccgtttttggagtggggtggtatatgtgttgtatacagagatgagaggcgttagtttttgtgttgtcattgtcgctgtgcatccttattgttttaccccttgtccaaaaagggatgcattattatgttgagaggaaggttatagaggtttcgcaataaaatgcacctagccaattgatagtatgaatcagatatataatctaatttatgactgccta

SEQ ID NO: 121894 - DNA, 1812 bp, Zea Mays
tgacgcaatgtaatactatctaactccatatatttgtttcatcaggagcacatgttccttttatctggaatgctcagttaaaacactaataatcttgtgtggtttacaggaagcccataaacttttgcagcctgttgacaataccctccagacaatggcactagaatttgctgaatatcaggtctgtgtggacgtattcctcacaacacaatcctacgttgatattgcttctatatccgttgtgcctcagactacaggtggccgggtctactactactatccattttctgctctttcagatccagccaagctcttcaatgatctcagatggaatatcagtagaccccagggttttgaggctgttatgcgtgtaaggtgcagtcagggtctccaagttcaggactattttggcaatttctgcaagcgtgttcccactgacattgatcttccagcgattgattccgacaaaactgtgatggtcacgtttaagcatgatgacaagttaccagaaaatgtggaatgtggcttccagtgtgcacttctctatactactgtatatggacaaaggaggatccgagtcataaacctctcactttcatgtacaaatttgcttgccaatcttttccggtatgctgatttggagacacagtttgcatgcttcctgaagcaagctgctaatggcatcccgacctcttcattacctcgtattcgggatgaagcaacaaacacatgcataaatattcttcaatcttaccgcaaacactgtgcatctgtaacctcatcggggcagttgattctcccagaggctctaaaactgctgcctttatatactctggcactggtaaaaagtgtaggcttgagaactgatgggcgattagatgaccgttcctattggatatctctggtctcgtcagtttctgtagtactagctgttcctctggtgttccctagattgattcctatccatgatctcacgtccagggatgatgatgattcccttgtaccaagtccacttatgctcaaaagtgaaaatgtacaagaggatggggtctatttattggaaaacggtgaggatggtctagtctacgtaggaaacatggtaaatccggctaccctggaacaaatattcggtgtctcttctttggctgcattaccagcccagttagcattggagcagtttgacaacgaactctcgaggaagattaacgaagttgtaaatgaaattaggcgccagaggtgctcatacttgaggttgagactatgcagaaggggcgaaccatctggagattttttccggtcatttctaatagaggacaaggcacctggcgtcttctcctacgaggagtttctcgtgcatgtccacaggcagatccaaagcaagatgacctgagggccaggcgaatgcaaaggcaacatgaactgagggtcaggctggcaaatgcaaaagcaagatgacctgagggcccagatcctgtctgtagcatttcggtcagtagatggattgtaggtaccaaaacgagttcgatttctgcataaggagacagcgaagtggcgattccacatcactatggagcataatgtttgctcggacagtagaactcaggaatagaggcaccgtttttggagtggggtggtatatgtgttgtatacagagatgagaggcgttagtttttgtgttgtcattgtcgctgtgcatccttattgttttaccccttgtccaaaaagggatgcattattatgttgagaggaaggttatagaggtttcgcaataaaatgcacctagccaattgatagtatgaatcagatatataa

SEQ ID NO: 121895 - DNA, 3482 bp, Zea Mays
cgaaacgatccatgttctaacaggaggagtgcacaagaggggcctccgcctcccctgcccccgcttgctatcgcgcgccagatcccgatctcgccgcgatccatggcgtcgtcgccgcagcagccgccgccgttcgccacgcaaaaccctactgcgcagggtccaggccaggggcctccagtctcggggacgggggcactccccggggcgttctccaatctccagatctcccgcggcgcggccccgccgcccggtgccccgcgggggctcacgcctcagcaggcaccgcccgccttcgccgcgctttcgggtcctccaccggctgcagcccggcccttcttccctggcagcccgcccgcaccgccgttcgtgcgggcgccgacggcggcagcttccgtctcgccgcccttcggcggacaaccgggggtagtgtcccagcagccgccaccgtttgggggacctccaggtgcggcgtctcagccgccgccgccgttcggtgttgcccccggggtggtgtcccaggcgccgcctccgttcggaggccctcctactgcggcgtcgcaggcccctcctccgtttggaggccctcctgccatggcatcgcaggtgccttcgccctttgttggtcactctgttgctgcgtctcaggcagcaccgttcggcgtcccccctgttgcggggtcacatcctccgccgttcggtgggcctcctggagcagggcctcatccagcaccgccactacggcagacattccctggccagtctgggccaatggcatccgcggcagcttggacgcagccaacaccacctagctttggagccccgcaacaatctccaccaccattcagttcgcggccagttgggcagccgccctttgctacgcaatcagcgcctgtggcacagcagctgcccttcatggggccacccagggcaaatgccccggcgtttgggcctccatcctggcaaactcagggagctgggtctggtgcaatgcagccacctatgagaatgccaggcattcctggtagcatgcagccaaacacactaggaccccctggcaccccgactatgacttattctccacatgctggaacacaggtatcaaccccatccaaaattgatcccaatcaaattccacggcctatgcctgaatcatcagtcatcatttatgagacccgtcaaggtggccaagcaaccatccccccggctgcatctagtgaatttattgtgaaggacactgggaactgtagcccccgtttaatgcgctgcactgtgaatcaaataccttgtaccggtgatctcttgatgacttcgggtatgcctttagctctgatggttcaacctttttctcttcctcacccatccgaggaacctattcagcttgtggactttggagagatgggacccattcggtgttctcgttgcaaagcatacataaatcctttcatgaaatttgttgatcaagggaggcatttcgtctgtaacttatgtggattcagaaatgatactcctagagaatacatgtgcaacttagggcccgatggtaggcggcgtgatgctgatgacaggcctgaattgtctagaggaactgttgaatttgttgctacgaaggaatttctggttcgtgatccaatgcctgctgtatacttcttccttattgatgtctccatgaatgctatacaaactggtgcaactgctgcagcttgcagtgctatttcccagtctatttcagatctaccagaaggtcctcggacaatggttggaattgcaacatttgattctgctattcacttctacagtcttaaacgtgctcagcagcagcctttgatgctcatcgttcctgatgttcaagatgtatatacacctcttcagactgaccttattcttccagtttctgagtgccgggagaatctggagcagttgctagaaagtatcccaaacatgtttgagaataatagggttgctgattctgcttttggagcagcaatgaaggctggcttcctggcgatgaaatctactggcggaaaacttcttgttttccaatcagtgctgccatcacttgggattggttctttatctgctagagaagccgaaggcagagcaaacattacaactggtgacaaggaagcccataaacttttgcagcctgttgacaataccctccagacaatggcactagaatttgctgaatatcaggtctgtgtggacgtattcctcacaacacaatcctacgttgatattgcttctatatccgttgtgcctcagactacaggtggccgggtctactactactatccattttctgctctttcagatccagccaagctcttcaatgatctcagatggaatatcagtagaccccagggttttgaggctgttatgcgtgtaaggtgcagtcagggtctccaagttcaggactattttggcaatttctgcaagcgtgttcccactgacattgatcttccagcgattgattccgacaaaactgtgatggtcacgtttaagcatgatgacaagttaccagaaaatgtggaatgtggcttccagtgtgcacttctctatactactgtatatggacaaaggaggatccgagtcataaacctctcactttcatgtacaaatttgcttgccaatcttttccggtatgctgatttggagacacagtttgcatgcttcctgaagcaagctgctaatggcatcccgacctcttcattacctcgtattcgggatgaagcaacaaacacatgcataaatattcttcaatcttaccgcaaacactgtgcatctgtaacctcatcggggcagttgattctcccagaggctctaaaactgctgcctttatatactctggcactggtaaaaagtgtaggcttgagaactgatgggcgattagatgaccgttcctattggatatctctggtctcgtcagtttctgtagtactagctgttcctctggtgttccctagattgattcctatccatgatctcacgtccagggatgatgatgattcccttgtaccaagtccacttatgctcaaaagtgaaaatgtacaagaggatggggtctatttattggaaaacggtgaggatggtctagtctacgtaggaaacatggtaaatccggctaccctggaacaaatattcggtgtctcttctttggctgcattaccagcccagttagcattggagcagtttgacaacgaactctcgaggaagattaacgaagttgtaaatgaaattaggcgccagaggtgctcatacttgaggttgagactatgcagaaggggcgaaccatctggagattttttccggtcatttctaatagaggacaaggcacctggcgtcttctcctacgaggagtttctcgtgcatgtccacaggcagatccaaagcaagatgacctgaggggcccagatcctgtctgtagcatttcggtcagtagatggattgtaggtaccaaaacgagttcgatttctgcataa

SEQ ID NO: 121896 - DNA, 2478 bp, Zea Mays
cgaaacgatccatgttctaacaggaggagtgcacaagaggggcctccgcctcccctgcccccgcttgctatcgcgcgccagatcccgatctcgccgcgatccatggcgtcgtcgccgcagcagccgccgccgttcgccacgcaaaaccctactgcgcagggtccaggccaggggcctccagtctcggggacgggggcactccccggggcgttctccaatctccagatctcccgcggcgcggccccgccgcccggtgccccgcgggggctcacgcctcagcaggcaccgcccgccttcgccgcgctttcgggtcctccaccggctgcagcccggcccttcttccctggcagcccgcccgcaccgccgttcgtgcgggcgccgacggcggcagcttccgtctcgccgcccttcggcggacaaccgggggtagtgtcccagcagccgccaccgtttgggggacctccaggtgcggcgtctcagccgccgccgccgttcggtgttgcccccggggtggtgtcccaggcgccgcctccgttcggaggccctcctactgcggcgtcgcaggcccctcctccgtttggaggccctcctgccatggcatcgcaggtgccttcgccctttgttggtcactctgttgctgcgtctcaggcagcaccgttcggcgtcccccctgttgcggggtcacatcctccgccgttcggtgggcctcctggagcagggcctcatccagcaccgccactacggcagacattccctggccagtctgggccaatggcatccgcggcagcttggacgcagccaacaccacctagctttggagccccgcaacaatctccaccaccattcagttcgcggccagttgggcagccgccctttgctacgcaatcagcgcctgtggcacagcagctgcccttcatggggccacccagggcaaatgccccggcgtttgggcctccatcctggcaaactcagggagctgggtctggtgcaatgcagccacctatgagaatgccaggcattcctggtagcatgcagccaaacacactaggaccccctggcaccccgactatgacttattctccacatgctggaacacaggtatcaaccccatccaaaattgatcccaatcaaattccacggcctatgcctgaatcatcagtcatcatttatgagacccgtcaaggtggccaagcaaccatccccccggctgcatctagtgaatttattgtgaaggacactgggaactgtagcccccgtttaatgcgctgcactgtgaatcaaataccttgtaccggtgatctcttgatgacttcgggtatgcctttagctctgatggttcaacctttttctcttcctcacccatccgaggaacctattcagcttgtggactttggagagatgggacccattcggtgttctcgttgcaaagcatacataaatcctttcatgaaatttgttgatcaagggaggcatttcgtctgtaacttatgtggattcagaaatgatactcctagagaatacatgtgcaacttagggcccgatggtaggcggcgtgatgctgatgacaggcctgaattgtctagaggaactgttgaatttgttgctacgaaggaatttctggttcgtgatccaatgcctgctgtatacttcttccttattgatgtctccatgaatgctatacaaactggtgcaactgctgcagcttgcagtgctatttcccagtctatttcagatctaccagaaggtcctcggacaatggttggaattgcaacatttgattctgctattcacttctacagtcttaaacgtgctcagcagcagcctttgatgctcatcgttcctgatgttcaagatgtatatacacctcttcagactgaccttattcttccagtttctgagtgccgggagaatctggagcagttgctagaaagtatcccaaacatgtttgagaataatagggttgctgattctgcttttggagcagcaatgaaggctggcttcctggcgatgaaatctactggcggaaaacttcttgttttccaatcagtgctgccatcacttgggattggttctttatctgctagagaagccgaaggcagagcaaacattacaactggtgacaaggaagcccataaacttttgcagcctgttgacaataccctccagacaatggcactagaatttgctgaatatcaggtctgtgtggacgtattcctcacaacacaatcctacgttgatattgcttctatatccgttgtgcctcagactacaggtggccgggtctactactactatccattttctgctctttcagatccagccaagctcttcaatgatctcagatggaatatcagtagaccccagggttttgaggctgttatgcgtgtaaggtgcagtcaggtgggtttaatctcaggtcatttctattagcactctacgttatgagtctgaatgtgacttgttttcttttcacctctt

SEQ ID NO: 121897 - DNA, 1785 bp, Zea Mays
cgaaacgatccatgttctaacaggaggagtgcacaagaggggcctccgcctcccctgcccccgcttgctatcgcgcgccagatcccgatctcgccgcgatccatggcgtcgtcgccgcagcagccgccgccgttcgccacgcaaaaccctactgcgcagggtccaggccaggggcctccagtctcggggacgggggcactccccggggcgttctccaatctccagatctcccgcggcgcggccccgccgcccggtgccccgcgggggctcacgcctcagcaggcaccgcccgccttcgccgcgctttcgggtcctccaccggctgcagcccggcccttcttccctggcagcccgcccgcaccgccgttcgtgcgggcgccgacggcggcagcttccgtctcgccgcccttcggcggacaaccgggggtagtgtcccagcagccgccaccgtttgggggacctccaggtgcggcgtctcagccgccgccgccgttcggtgttgcccccggggtggtgtcccaggcgccgcctccgttcggaggccctcctactgcggcgtcgcaggcccctcctccgtttggaggccctcctgccatggcatcgcaggtgccttcgccctttgttggtcactctgttgctgcgtctcaggcagcaccgttcggcgtcccccctgttgcggggtcacatcctccgccgttcggtgggcctcctggagcagggcctcatccagcaccgccactacggcagacattccctggccagtctgggccaatggcatccgcggcagcttggacgcagccaacaccacctagctttggagccccgcaacaatctccaccaccattcagttcgcggccagttgggcagccgccctttgctacgcaatcagcgcctgtggcacagcagctgcccttcatggggccacccagggcaaatgccccggcgtttgggcctccatcctggcaaactcagggagctgggtctggtgcaatgcagccacctatgagaatgccaggcattcctggtagcatgcagccaaacacactaggaccccctggcaccccgactatgacttattctccacatgctggaacacaggtatcaaccccatccaaaattgatcccaatcaaattccacggcctatgcctgaatcatcagtcatcatttatgagacccgtcaaggtggccaagcaaccatccccccggctgcatctagtgaatttattgtgaaggacactgggaactgtagcccccgtttaatgcgctgcactgtgaatcaaataccttgtaccggtgatctcttgatgacttcgggtatgcctttagctctgatggttcaacctttttctcttcctcacccatccgaggaacctattcagcttgtggactttggagagatgggacccattcggtgttctcgttgcaaagcatacataaatcctttcatgaaatttgttgatcaagggaggcatttcgtctgtaacttatgtggattcagaaatgatactcctagagaatacatgtgcaacttagggcccgatggtaggcggcgtgatgctgatgacaggcctgaattgtctagaggaactgttgaatttgttgctacgaaggaatttctggttcgtgatccaatgcctgctgtatacttcttccttattgatgtctccatgaatgctatacaaactggtgcaactgctgcagcttgcagtgctatttcccagtctatttcagatctaccagtaagttctgtatgctgaactctttagtctagttcagaaaaaaaa

SEQ ID NO: 121898 - DNA, 2121 bp, Zea Mays
acttgcagtttcgacttttcgagatctgcgccgctgttgctgtccccactcggcctcccctctctctccccttcttccagacccttcccttcttccgctcacccacgcggacgccggctgcccccttccctgactgaccccctcgaggcccctcgatacgatacttcgggtgtaggggagcatgcggaagaaagggcgggcggtgccggagtggctcaacagcccaatttggtccgctaccccgcccgcgcccgcccagccggacccctacggcgccgacctcgctccgccgccacccccaaagccgccgccgccgccagctactgcctctcccgtaccgccgccgccgtcgtacgagcaggccgtaggggtgggtggtggccggagggaggaggaggacgacgagggcgccggggcggtgatacgggcacacctgctctccgacttcaaggccgcgctatcgaagaaggtggtgaacatgggagagctgcggcgcttagcctgcctcggcgtccccgacggcggtactggtgtccgacccgtcgtctggaagtgtgcagcttcttttggggtatttgccaactgatcgttccttatggacttatgagttagaaaagaagcggagtcaatatagtgcatacagagaagagtttcttctaaatccttcagaaaaactacgaatgattgaggaaacaaagctgtcaagaaagaaagacacaagtattgagaggattggctttctttcgagattcgaagttactaatgaagagcatcctttaagctctggtaaatctagcctgtggaaccaatattttcaggattcagagttactagaacagatagaccgagatgtaaagcgaacacatcctgatatttcatttttctcatcaaagtctaaccaggaatccttgaggagaattttaattatattttcaaaattgaaccccagtataagatatgtgcaagggatgaatgaagttttggcacctttattttatgtattcaagaatgaccctgacccaagcaactcagcgtcagctgaagcagacgcatacttttgctttgtcgaattgttgagtggctttagagacaactattgcaagcatcttgacaatagcagcgtgggtattcgatctacactttcaaaattatcacaactcttgaagcgacatgatgaggaactatggcgtcacatggaggtcaccacaaaggtttacccacaatattatgcctttagatggatcacactgttgttgacgatggagttcagctttaacgtgtgtatacatatctgggatgctatcttgggtgatccagaaggcccatcggtacattaccaccactggaataaatttgtggacatcttacagtgctaaaccgttgcatattctaatgcaggacacattgatgaggatatgctgtgccatgctcatcctagtccgaaagcgtctcttagctggagacttcaccgccaatgtccagctgctgcaacattacccagccaccaacatcgatcacctcctccacatcgccaaccggttgagaggaactgtacccggctagtgttttgttgcctttcctgcatacctgtacttcagttttgcccatgtgaccttcgtctggttaagtcgctaaatgcaatgttggtagcttgaaatatcactctgctccttgtgttctgttttgcctgtttcggtgtggccggagccggacgatgaatatcggagacacttcatgtgtcacagctctgagtagcgcttctgttttcattcacatggaaacacactattggagctccttccagcttgtagtacctgggaaagggaagaatggatgcattcctgaattgtgaaaactgaatatgggttctgctggatacgctcctctgtaccaaaagtcatatcctttgtagtgtactcttttaatgctttatgaattagagtatgtagaatgacttttgcaagaactgaaaataggaattgctgtgcaaagttattttgtcttgatgacatttgttgtgaaactggtgccaaatttcttgtcataaaaatatctagtgagagttggggtggttgttttaaagagtaaaatgcaatagtgatccccaaatttgcacttgta

SEQ ID NO: 121899 - DNA, 2009 bp, Zea Mays
acttgcagtttcgacttttcgagatctgcgccgctgttgctgtccccactcggcctcccctctctctccccttcttccagacccttcccttcttccgctcacccacgcggacgccggctgcccccttccctgactgaccccctcgaggcccctcgatacgatacttcgggtgtaggggagcatgcggaagaaagggcgggcggtgccggagtggctcaacagcccaatttggtccgctaccccgcccgcgcccgcccagccggacccctacggcgccgacctcgctccgccgccacccccaaagccgccgccgccgccagctactgcctctcccgtaccgccgccgccgtcgtacgagcaggccgtaggggtgggtggtggccggagggaggaggaggacgacgagggcgccggggcggtgatacgggcacacctgctctccgacttcaaggccgcgctatcgaagaaggtggtgaacatgggagagctgcggcgcttagcctgcctcggcgtccccgacggcggtactggtgtccgacccgtcgtctggaagtgtgcagcttcttttggggtatttgccaactgatcgttccttatggacttatgagttagaaaagaagcggagtcaatatagtgcatacagagaagagtttcttctaaatccttcagaaaaactacgaatgattgaggaaacaaagctgtcaagaaagaaagacacaagtattgagaggattggctttctttcgagattcgaagttactaatgaagagcatcctttaagctctggtaaatctagcctgtggaaccaatattttcaggattcagagttactagaacagatagaccgagatgtaaagcgaacacatcctgatatttcatttttctcatcaaagtctaaccaggaatccttgaggagaattttaattatattttcaaaattgaaccccagtataagatatgtgcaagggatgaatgaagttttggcacctttattttatgtattcaagaatgaccctgacccaagcaactcagcgtcagctgaagcagacgcatacttttgctttgtcgaattgttgagtggctttagagacaactattgcaagcatcttgacaatagcagcgtgggtattcgatctacactttcaaaattatcacaactcttgaagcgacatgatgaggaactatggcgtcacatggaggtcaccacaaaggtttacccacaatattatgcctttagatggatcacactgttgttgacgatggagttcagctttaacgtgtgtatacatatctgggatgctatcttgggtgatccagaaggcccatcggacacattgatgaggatatgctgtgccatgctcatcctagtccgaaagcgtctcttagctggagacttcaccgccaatgtccagctgctgcaacattacccagccaccaacatcgatcacctcctccacatcgccaaccggttgagaggaactgtacccggctagtgttttgttgcctttcctgcatacctgtacttcagttttgcccatgtgaccttcgtctggttaagtcgctaaatgcaatgttggtagcttgaaatatcactctgctccttgtgttctgttttgcctgtttcggtgtggccggagccggacgatgaatatcggagacacttcatgtgtcacagctctgagtagcgcttctgttttcattcacatggaaacacactattggagctccttccagcttgtagtacctgggaaagggaagaatggatgcattcctgaattgtgaaaactgaatatgggttctgctggatacgctcctctgtaccaaaagtcatatcctttgtagtgtactcttttaatgctttatgaattagagtatgtagaatgacttttgcaagaactgaaaataggaattgctgtgcaaagttattttgtcttgatgacatttgttgtgaaactggtgccaaatttcttgtcataaaaatatctagtgagagttggggtggttgtttt

SEQ ID NO: 121900 - DNA, 2002 bp, Zea Mays
acttgcagtttcgacttttcgagatctgcgccgctgttgctgtccccactcggcctcccctctctctccccttcttccagacccttcccttcttccgctcacccacgcggacgccggctgcccccttccctgactgaccccctcgaggcccctcgatacgatacttcgggtgtaggggagcatgcggaagaaagggcgggcggtgccggagtggctcaacagcccaatttggtccgctaccccgcccgcgcccgcccagccggacccctacggcgccgacctcgctccgccgccacccccaaagccgccgccgccgccagctactgcctctcccgtaccgccgccgccgtcgtacgagcaggccgtaggggtgggtggtggccggagggaggaggaggacgacgagggcgccggggcggtgatacgggcacacctgctctccgacttcaaggccgcgctatcgaagaaggtggtgaacatgggagagctgcggcgcttagcctgcctcggcgtccccgacggcggtactggtgtccgacccgtcgtctggaagcttcttttggggtatttgccaactgatcgttccttatggacttatgagttagaaaagaagcggagtcaatatagtgcatacagagaagagtttcttctaaatccttcagaaaaactacgaatgattgaggaaacaaagctgtcaagaaagaaagacacaagtattgagaggattggctttctttcgagattcgaagttactaatgaagagcatcctttaagctctggtaaatctagcctgtggaaccaatattttcaggattcagagttactagaacagatagaccgagatgtaaagcgaacacatcctgatatttcatttttctcatcaaagtctaaccaggaatccttgaggagaattttaattatattttcaaaattgaaccccagtataagatatgtgcaagggatgaatgaagttttggcacctttattttatgtattcaagaatgaccctgacccaagcaactcagcgtcagctgaagcagacgcatacttttgctttgtcgaattgttgagtggctttagagacaactattgcaagcatcttgacaatagcagcgtgggtattcgatctacactttcaaaattatcacaactcttgaagcgacatgatgaggaactatggcgtcacatggaggtcaccacaaaggtttacccacaatattatgcctttagatggatcacactgttgttgacgatggagttcagctttaacgtgtgtatacatatctgggatgctatcttgggtgatccagaaggcccatcggacacattgatgaggatatgctgtgccatgctcatcctagtccgaaagcgtctcttagctggagacttcaccgccaatgtccagctgctgcaacattacccagccaccaacatcgatcacctcctccacatcgccaaccggttgagaggaactgtacccggctagtgttttgttgcctttcctgcatacctgtacttcagttttgcccatgtgaccttcgtctggttaagtcgctaaatgcaatgttggtagcttgaaatatcactctgctccttgtgttctgttttgcctgtttcggtgtggccggagccggacgatgaatatcggagacacttcatgtgtcacagctctgagtagcgcttctgttttcattcacatggaaacacactattggagctccttccagcttgtagtacctgggaaagggaagaatggatgcattcctgaattgtgaaaactgaatatgggttctgctggatacgctcctctgtaccaaaagtcatatcctttgtagtgtactcttttaatgctttatgaattagagtatgtagaatgacttttgcaagaactgaaaataggaattgctgtgcaaagttattttgtcttgatgacatttgttgtgaaactggtgccaaatttcttgtcataaaaatatctagtgagagttggggtggttgtttt

SEQ ID NO: 121901 - DNA, 118 bp, Zea Mays
ttacatgatagatctaatctggtacttatctgttacaaccatatcctatatattaggaactctaaaaactcgaacccaaatctgttacatgatagatctaatctggtacttatctatt

SEQ ID NO: 121902 - DNA, 866 bp, Zea Mays
cagatccattaacacacacaactgatgcgttgtagccagctgaagggaggattgcatccatggagttcctctccgacgaagcattggccatttttgtgcccatcctcgtgtactgggtgtactcgggcatgtacatggcgcttgggcagtccatggacaggtacaggctgcacccgaggaaggaggaggacagcaagaacctggtgtccaagcgggaagtcgtcaagggcgtcctcttgcagcagctagtgcaggcgggagtggctgccgtcgtgttcacgctcacgggagatagcagcagctcagcggcttcatacgataaagaagcagcacaaggatacttctactacctgacggtggcacggcagttcggggtggccatggtcgttctagacgggtggcaatacgcgtggcacaggtacatgcacctgaacaggttcctttaccggcacatccactcgtggcaccaccgtctcgtcgtgccctacgcgttcggctcgcagtacaaccaccccgtggagggcctgctgctcgacacgctcggcggggcgctggccttcgtcgtctccggcatgtcgccgcgcgcgtccatcttcttcttctcgctctgcaccgccaagggcgtggacgaccactgcggcctctggctgccggccggcaacttgttccatctcttcttctggaacaacacggcgtaccacgacgtgcaccaccagctgcgcggcagcaggttcaatttctcgcagccgttcttcgtgacctgggacaagctcttcggcacgcatatgccgtacgtgctggaggagaggcccggtggtgggctccaagcgcgccccttgtgctgagagcccgccatgacgagctcc

SEQ ID NO: 121903 - DNA, 273 bp, Zea Mays
atggcggagggcatggtagtgggggtcacggctcccgtggccatagcctgggccacttcatgctttggattgtcattttacatattgtctaagagtcttcttgtctccaatcaaatggcagacatcaccagcatgggcgatggatgttgtgtcatgcgtaatcgaaaggatgttccaattcattatcatgaacaggtgcaacactgcccattgctgagaccactgttgaaattgaagggaagaggtgctggaagcaaggatcagagtgcttga

SEQ ID NO: 121904 - DNA, 1468 bp, Zea Mays
tgcacacaaagcagtgcatgcactagctagctctagcttcgccattgcattcgcttactgggagtacgtctggtacttgcacaactagctatatatatcatggcgccctacattgtcgtcaacaaaaccgtgatcgcattcacagcggtggccctgacgattcttgctgtgaaaaccatgatggccgaggcccgagacctgtcgtccacctccaccggtggctatggcgaggaagccatgaaagtgaggcatcagcagtggatggcggagcacggccgcacctacagggacgaggctgagaaggcgcaccggttccaggtattcaaggcgaacgccgattttgttgacgcgtccaatgccgcaggtgacgacaagaagagctatcggatggagctcaacgagttcgccgacatgaccaacgacgagttcatggccatgtacactggcttgagaccagtcccggcaggggcaaagaagatggccggtttcaagtacgggaacgtgactctttcagacgccgacgacaaccagcagacggttgactggaggcagaaaggcgcggtcaccggtatcaagaaccagggccagtgtggttgttgctgggccttcgctgcggtggcggccgtggagggcatccaccagattacgacgggcaacttggtgtcgttatcggagcagcaggtgctggactgcgacaccgaggggaacaacggctgcaacggcggctacatcgacaatgccttccaatacatcgccggcaacggcggcctcgccaccgaggacgcctacccgtacaccgccgcgcaggccatgtgccagtccgtgcagccggtggccgccatcagcggctaccaggacgtgccgagcggcgacgaggcagcgctcgccgcggccgtcgccaaccagccggtgtcggttgccatcgacgcacataacttccagctctacggtggcggggtgatgaccgcggccagctgcagcacgccgccgaacctgaaccacgccgtcacggcggtaggctacggcacggcggaggatgggaccccgtactggctgctcaagaaccagtggggccagaactggggagagggaggatacctcaggctcgagagaggcgcaaacgcctgtggtgtcgcccagcaagcctcctacccggtcgcatgatgaatacgtaagggtcgaaaagaaaacatatattctacacacacgaaggcatgcataagaatgactactaaggaataaagcatgcaaacacattgacagaatgacagtacatacatgcatagcgtaaaattgaatcacaattgtcatgtacaacactcaagatatcatttatttctatttggccttcttttcaaagatcgctattatatatatacatgtaaggtaacaagattttatagcataagtccttcgcacctcgccaattgtctatccctctgtatcatatataagatgatgtttgcct

SEQ ID NO: 121905 - DNA, 138 bp, Zea Mays
atggcggcccggcacgggccagacgcccgcgggccacaactctggcccaggcacgttatgttgattgtgtcgggaggtgggattcaaacccatgccctgatggaagaaggacgagaaacacttggtgaagctgtctaa

SEQ ID NO: 121906 - DNA, 519 bp, Zea Mays
gcaagcatgacaccgatcagtgaacagcaacaagccaacaaggagcctcctcatcacacacagtctgcaacatgccatattgctccagctccaagcgaggtagcgggagtggtcggggacgcggagaacgccgaccaggagcaggagcaggaccagcagcagcaggcagcgaggcgggagcgggacttccttgcggggatcaggaagctgttcaagagcttcaagagcctctcccacatcttcgagatatacaaggacgacgacgatagcgacgacgaggacgacgacatggacacaagcatcgagatcgggcttccaacagacgtgcagcacgtggcgcacatcggcctggacggctccaccaacctgtcgagcctaataaggggccgggagggggccagggagctgttctcgctctccagtctcaccaccctcgagcagttcgagctcgccatggcctcgctggctgctaccggcaagcagcgaaacggggtgttagatagagttctccgtgagtaa

SEQ ID NO: 121907 - DNA, 1462 bp, Zea Mays
ctgatacagagcgtgaaaagttcggcaacatgtatcataacgacaaaaaacgaccatcgtgtgcgaccttttcgtgtttccccagctaccaaatctcttcacatcgtcaatccctcttccacagtttctgaaatcagaagggaaacacaggaacgacaggcaattcgaggctggcaatctaatcgtctgccatcccgtctcatcgttctcccaaatctgagagcgttcccaggacctagggttcttgagatccagccccaggatggatccgaaccctagagctcccctcctcctcgccatcgtcgttctcgcgcttggcgtatccgtggtggccagcgccgaggacgacgcgtcgggggtctctctgggccgccgcgccggggggttcttgcacggcctgaagaaggatgcactggcggagggcgatcatggggtggcactagacgaggttggaccggggctgttcgacgcactctttgccagcctctccatgatactagtcagtgagattggagatgagacattcatcattgctgcgctgatggcgatgcggcaccccaagtcaattgtgttgtctggtgcactatctgcgctttatgtgatgacagtattgtcaactggacttggcagaatagtgcccaacttgatatcaaggaagcacactaatagtgctgctacagttttgtacttattctttggactacggctgctgtatattgcatggaaatctgacccaaagggatcccagaagaaggaaatggaagaagtagaagagaagcttgagtcgggtcaagggaaatcaaccatccgtaggttctttgcaagattctgtacaccaatctttttggaggctttcatcttaaccttcttagctgaatggggcgaccggagccaaatagcgacaatcgcgctggcaacacacaagaacgcaatcggagtcgcagtgggagcgtcactggggcacacggtgtgcacatctctcgccgtggtaggagggagcatgctggcgtccaagatctcgcagcgaactgtagcgacgatcggaggcgttctcttcctagggttttctgtttcgtcctacttctaccctccgttgtgatgaaaaggctgctgatcgaaacatagatggcgtaacaacccagatcgtaacagcacgcctcgagtcgcgggcttcgtgtaatgtacagacacattcgaacattcctgacaacaatgttctctgccatgctgccttcaagtccgtatgtagaagatgtctcattgagagcatggccgactttttattgcttgtatccgaagtattaacttatactatacgctgctccaatctcgttcaccaggaaatcatgttagtccctcgttctttcaaaagcgtgataaaatgtagaaaaggcatcaagaagcccatctctagttgtaaatccttctgctttttctaagtacagatttttattgcacatct

SEQ ID NO: 121908 - DNA, 1419 bp, Zea Mays
gtgaaaagttcggcaacatgtatcataacgacaaaaaacgaccatcgtgtgcgaccttttcgtgtttccccagctaccaaatctcttcacatcgtcaatccctcttccacagtttctgaaatcagaagggaaacacaggaacgacaggcaattcgaggctggcaatctaatcgtctgccatcccgtctcatcgttctcccaaatctgagagcgttcccaggacctagggttcttgagatccagccccaggatggatccgaaccctagagctcccctcctcctcgccatcgtcgttctcgcgcttggcgtatccgtggtggccagcgccgaggacgacgcgtcgggggtctctctgggccgccgcgccggggggttcttgcacggcctgaagaaggatgcactggcggagggcgatcatggggtggcactagacgaggttggaccggggctgttcgacgcactctttgccagcctctccatgatactagtcagtgagattggagatgagacattcatcattgctgcgctgatggcgatgcggcaccccaagtcaattgtgttgtctggtgcactatctgcgctttatgtgatgacagtattgtcaactggacttggcagaatagtgcccaacttgatatcaaggaagcacactaatagtgctgctacagttttgtacttattctttggactacggctgctgtatattgcatggaaatctgacccaaagggatcccagaagaaggaaatggaagaagtagaagagaagcttgagtcgggtcaagggaaatcaaccatccgtaggttctttgcaagattctgtacaccaatctttttggaggctttcatcttaaccttcttagctgaatggggcgaccggagccaaatagcgacaatcgcgctggcaacacacaagaacgcaatcggagtcgcagtgggagcgtcactggggcacacggtgtgcacatctctcgccgtggtaggagggagcatgctggcgtccaagatctcgcagcgaactgtagcgacgatcggaggcgttctcttcctagggttttctgtttcgtcctacttctaccctccgttgtgatgaaaaggtactcgcaaccgctcccacttggatggtatggtagtcttgagttgtctcatgtcctgccgtaagaaacgttgtgacttccccgcaggctgctgatcgaaacatagatggcgtaacaacccagatcgtaacagcacgcctcgagtcgcgggcttcgtgtaatgtacagacacattcgaacattcctgacaacaatgttctctgccatgctgccttcaagtccgtatgtagaagatgtctcattgagagcatggccgactttttattgcttgtatccgaagtattaacttatactatacgctgctccaatctcgttcaccaggaaa

SEQ ID NO: 121909 - DNA, 1547 bp, Zea Mays
gtgaaaagttcggcaacatgtatcataacgacaaaaaacgaccatcgtgtgcgaccttttcgtgtttccccagctaccaaatctcttcacatcgtcaatccctcttccacagtttctgaaatcagaagggaaacacaggaacgacaggcaattcgaggctggcaatctaatcgtctgccatcccgtctcatcgttctcccaaatctgagagcgttcccaggacctagggttcttgagatccagccccaggatggatccgaaccctagagctcccctcctcctcgccatcgtcgttctcgcgcttggcgtatccgtggtggccagcgccgaggacgacgcgtcgggggtctctctgggccgccgcgccggggggttcttgcacggcctgaagaaggatgcactggcggagggcgatcatggggtggcactagacgaggttggaccggggctgttcgacgcactctttgccagcctctccatgatactagtcagtgaggtactgattagtgatgtgagctaggaggatttgagtttcggaaatggcctctgtgtacctgctgtcctactgcattgccttggctgtgagatttggatgtgtggctgtttcttcgagctgttcaattttttttctttgctgatgtagattggagatgagacattcatcattgctgcgctgatggcgatgcggcaccccaagtcaattgtgttgtctggtgcactatctgcgctttatgtgatgacagtattgtcaactggacttggcagaatagtgcccaacttgatatcaaggaagcacactaatagtgctgctacagttttgtacttattctttggactacggctgctgtatattgcatggaaatctgacccaaagggatcccagaagaaggaaatggaagaagtagaagagaagcttgagtcgggtcaagggaaatcaaccatccgtaggttctttgcaagattctgtacaccaatctttttggaggctttcatcttaaccttcttagctgaatggggcgaccggagccaaatagcgacaatcgcgctggcaacacacaagaacgcaatcggagtcgcagtgggagcgtcactggggcacacggtgtgcacatctctcgccgtggtaggagggagcatgctggcgtccaagatctcgcagcgaactgtagcgacgatcggaggcgttctcttcctagggttttctgtttcgtcctacttctaccctccgttgtgatgaaaaggtactcgcaaccgctcccacttggatggtatggtagtcttgagttgtctcatgtcctgccgtaagaaacgttgtgacttccccgcaggctgctgatcgaaacatagatggcgtaacaacccagatcgtaacagcacgcctcgagtcgcgggcttcgtgtaatgtacagacacattcgaacattcctgacaacaatgttctctgccatgctgccttcaagtccgtatgtagaagatgtctcattgagagcatggccgactttttattgcttgtatccgaagtattaacttatactatacgctgctcc

SEQ ID NO: 121910 - DNA, 1409 bp, Zea Mays
ctgatacagagcgtgaaaagttcggcaacatgtatcataacgacaaaaaacgaccatcgtgtgcgaccttttcgtgtttccccagctaccaaatctcttcacatcgtcaatccctcttccacagtttctgaaatcagaagggaaacacaggaacgacaggcaattcgaggctggcaatctaatcgtctgccatcccgtctcatcgttctcccaaatctgagagcgttcccaggacctagggttcttgagatccagccccaggatggatccgaaccctagagctcccctcctcctcgccatcgtcgttctcgcgcttggcgtatccgtggccagcgccgaggacgacgcgtcgggggtctctctgggccgccgcgccggggggttcttgcacggcctgaagaaggatgcactggcggagggcgatcatggggtggcactagacgaggttggaccggggctgttcgacgcactctttgccagcctctccatgatactagtcagtgagattggagatgagacattcatcattgctgcgctgatggcgatgcggcaccccaagtcaattgtgttgtctggtgcactatctgcgctttatgtgatgacagtattgtcaactggacttggcagaatagtgcccaacttgatatcaaggaagcacactaatagtgctgctacagttttgtacttattctttggactacggctgctgtatattgcatggaaatctgacccaaagggatcccagaagaaggaaatggaagaagtagaagagaagcttgagtcgggtcaagggaaatcaaccatccgtaggttctttgcaagattctgtacaccaatctttttggaggctttcatcttaaccttcttagctgaatggggcgaccggagccaaatagcgacaatcgcgctggcaacacacaagaacgcaatcggagtcgcagtgggagcgtcactggggcacacggtgtgcacatctctcgccgtggtaggagggagcatgctggcgtccaagatctcgcagcgaactgtagcgacgatcggaggcgttctcttcctagggttttctgtttcgtcctacttctaccctccgttgtgatgaaaaggtactcgcaaccgctcccacttggatggtatggtagtcttgagttgtctcatgtcctgccgtaagaaacgttgtgacttccccgcaggctgctgatcgaaacatagatggcgtaacaacccagatcgtaacagcacgcctcgagtcgcgggcttcgtgtaatgtacagacacattcgaacattcctgacaacaatgttctctgccatgctgccttcaagtccgtatgtagaagatgtctcattgagagcatggccgactttttattgcttgtatccgaagtattaacttatactatacgctgctcc

SEQ ID NO: 121911 - DNA, 903 bp, Zea Mays
atggggaacgcgcggcgccccgccgctgactcggcggcggcgtcggaccgggaggtcggatttgcgaagctacatggcgagtgcttcgagtactacatgcagacctactccatcgttctaggtcgccatagccgccgtcgcagcaagggccccgtcgccgccccgccggaggccgacgacggcgtcgacgtggacctcggcgccctcggagcaggcatgaacgtctcccgccgccacgcgcgcattttctacgacttcctgcgccgccgtttcgcgcttgaggtgcttggtaagaacggctgcctcgtcgagggcgtgcaccacgtccccgggtccgcccccgtcaagctcgactcccaggacctcctccagatgggggacaccaagttctacttcctcctcccctcccgctccgtcttcgacgccggcatcacgcgccggtcatccgccgttcagcgcgcgatcccgccgcctccgtctgatgatgacgaggatgaggatgaacatgaagaggccgtggcagcggcgaagcgtcggagggacggttataacggatcaaaatcttacagggaagcagatgatcaactattgcttcagttggaagagaaagatgtcatctcatctgctgctactatcttgtctgatctctgtggacctcaggaatggatttctataaacaagcttcatgaagtgatgtttgataagtacggcggtatgtggcaccacagcagggtgcgaaaatacctgacatccgaagactttgcggaggctgaaactgacggcaggctatggcatggacttgcgttgctgctgagaaagtaccctgagcatttcgtgatcaacattaggaaaggtgggggcttgatcactgagttcgtctctttggtctcgctacagtcttga

SEQ ID NO: 121912 - DNA, 1356 bp, Zea Mays
caaacaggcgatccaaaatgtggcaaagcatactctctctcactcgcactgcgacatttctttcgatcgccaatggaggagatcatgactcacccccatctccacgcattagcgtcgacgacgcttgcaatcgtcgccgtcatggtgatggtgctgccatcgacgacagccggcggcgggctctgccgtgagagctgcggcgacatcccggtgcgctacccgctgggcatcgacgacgggtgcggcagcccgtactaccgcaacatgctggcctgcgcggacaacgcgacgctccgcctgcgcacgccgtcgggcacgtacccggtgggcggcgcggactactcggacccgcacctggtggtgacggacccgtccatgtggacgtgcgcgcggcccttcacctcggtgcacgcggcgcccttcagcctggacacgagcacgcgcttctcgctgtccccgaggaacgagtacctcttcttcgactgcgacgaggcgcgcgtgatcgtggcgccccggccggccagctgcgaccggtacccggggcgctgcgactcggcgtgcgacagcgcggggtacctgtgccggaacctgccgggctgcgcgctggaggagggcagtaaccagagctgctgcgcgtaccggccgcgcgccgccgagtcgctgcgcgccatgctgcggcactgcggggcgtacaccagcgtgtactggcgcgccgccggggacaggtcgttcccgccctacgaccaggtgccggcgtacggggtgcgcgtggacttcgaggtccccgtcaccacgcggtgcctgcagtgccaggacaagcgccgcggcgacggcgggacgtgcggcttcgacccggccaccagggacttcgtctgcatctgcggcgacgggcgcaactccaccacggactgcgcagatggccacagctcaggacatcatggatcagcaggagtcgtcgctgcaagcgctgtcgcctcggtctctgcagccataggcatttgggggctcgtgtggtacatacgcaagatcaaaccgagcaaagtggtgacatgtggggttcagagtaacgagaacaggttcttctgacctcagttttcagtaaaaaaaaaaacaaaaacaaaaactcccacgaaggagaggcggtgaaagaaggcatccttgtcataaaccaaacaggggagggaaattttccttctgctagattttgctggagctgctagccaaactatgttatatgcacccaatgctgcgctgtgatgatactctgttatgtatttcttttgaaagaacgtgttttgccttctgttagaatgaggagtaaattacacgagtgttcttcgaactgttttgacgttc

SEQ ID NO: 121913 - DNA, 1182 bp, Zea Mays
atccccaatatatccccactcttcgcctcctttctggagcagctagggttccgtcctcgatccgatccgccgagtgcacaccacctttccccactccgatcgaatcgatggccgccgagggcgagaagaagatgataaccctcaaaagctccgatggcgaggagttcgaggtggaagaggcggtggcgatggagtcgcagaccatccgccacatgatcgaggatgactgcgccgacaacggtatccctcttcctaacgtcaactccaagatcctatccaaggtaatcgagtactgcaacaagcacgtacatgccgccgccgccgccgccgccgcctcgaaggccggttccgacgacgtgggtgccgcctccgccaacagcaccgccgcctccggtgaggacctcaagaactgggatgcggacttcgtcaaggtcgaccaggccacgcttttcgacctcatcttggctgcaaactatctgaacatcaagggtctgctcgacctgacctgtcagactgttgctgacatgatcaagggcaagacaccagaagagattcgcaagaccttcaacatcaagaatgacttcacccctgaggaggaagaggagatccgcagggagaaccagtgggccttcgagtaaggagtcgaggccaatgccctaaggcccggccagtgctctaaggccaggtcattgtccaagtggaaggatcaacatgacccttgttaagaagaataagcagttccataactgcacctgtcgtcggctcaacaaagggacgtggtccaatgtcacctgttcaagaacggacgtggcccacgatctcaactttcaacacgatctcaactttgaacagacatgtcttttctgtaggccggtgccttcatgtaacaaagcaataaaggaatcagaccgttgattcatttgagaatactcgtcacattacagtttacttgaacatgttatcaagcactgctctacgaaagttatcaagcactgctctacgaaagcaaaacaaggtcagagaactccgacaaccaggaagaacaaggtaaaaacacccgtgtgcatcggattatgccaaagtcaatctgatggaggaagaattatgacttgtagatagtggtaccactaactctattcttctggaaataaggtatttctaaactctcacaaagaggccaag

SEQ ID NO: 121914 - DNA, 984 bp, Zea Mays
atccccaatatatccccactcttcgcctcctttctggagcagctagggttccgtcctcgatccgatccgccgagtgcacaccacctttccccactccgatcgaatcgatggccgccgagggcgagaagaagatgataaccctcaaaagctccgatggcgaggagttcgaggtggaagaggcggtggcgatggagtcgcagaccatccgccacatgatcgaggatgactgcgccgacaacggtatccctcttcctaacgtcaactccaagatcctatccaaggtaatcgagtactgcaacaagcacgtacatgccgccgccgccgccgccgccgcctcgaaggccggttccgacgacgtgggtgccgcctccgccaacagcaccgccgcctccggtgaggacctcaagaactgggatgcggacttcgtcaaggtcgaccaggccacgcttttcgacctcatcttggctgcaaactatctgaacatcaagggtctgctcgacctgacctgtcagactgttgctgacatgatcaagggcaagacaccagaagagattcgcaagaccttcaacatcaagaatgacttcacccctgaggaggaagaggagatccgcagggagaaccagtgggccttcgagtaaggaggtgctggatctattgatgcctaagtttggtggtgtctactactatgtctactttatgttgtcctaatggttgtaagtattttgggagtcactttgcttgcgaatgtctcgcgtaagacttatgttggtcaatggtcggttattaacttattaccatgaaagcacttcgtctgctgccctaagaggtttagtcccatttgcattataaccaattcaatccttgtggatgatttgtgtgattccatcgtgaatctcatggtaaaatattttcattgttgtgatactgcctattcgcagtccagttgtattttttgttttttactatttgctgatgttgagtttt

SEQ ID NO: 121915 - DNA, 1182 bp, Zea Mays
atggagaaggcgagccaaatccgtcagggtctgaagccttctatcaggcatgcactgggggcctttccgttggtggacttccgtaccacggtggagcaggcgctgggtgtggagatgcaacaccagtataccatggagtcgcagaagtcttcgggtgttgatcagcctcgtagccaggacacgaggaggggcaacactggaggtccagctcacaagaggggcaagtctcagcatcagcgccaccatccttaccgtggcaaatcttctgactcgggtacttcgggaggaagtactcagaggtttcgggctgttcctaagcccgggctggggctggtgtgtttccgctgtggagatgcgcatcgccgtgcagagtgccagtggagtggcaggtgttcgatctgcagtcaggaccacaaggatgtggtgtgtaggaggaatcccaatgggaagctcagatgggagccggtgacttcctcctcttctcagggcactgtcaacatgatgtcaagtgctgagcagcagttttcagttcctcttcctccacagcagctttatgtgcctgggacttctcagttcgtgccgatgcagggtttccctcagtatcaggtcgcgcctactcctacactgtctacccctgtgctgactcagtttggagctccgcgccagcctccttcggtggctcagtggggttcttctgttaatttcactccgggagcttcctcttctgcggacagcagcaagcaaggacgcgtggcaaaggaaggagagaagcagcagggagcaaccgaacggagctgtagccgggcgaactggagactcgacgagctgctcgacaaaggaggaaatggagacagagcagggaggacgagggagacaggaccatgggcgagcagagcgcgcagggctgggcgatctaggacgcgcagggacttcgcgagctgggcgcggcatgggaagtactgcagacgggcgacggcggccatgggagacaagggcctcggctgggagcatccatgggaggggtctcggcgagcagcaggaagatccggtcaggcgcgaccgagcaagggtgtcgcggcaagggagcagagacagtctagcgagctgcagccgaccatggatggagtagcgagctgcagtcgaccatggatggagcaggcgctgggcagtcggctccggtga

SEQ ID NO: 121916 - DNA, 1282 bp, Zea Mays
ccgcccctgcccatcacctcctctctcaatttttgcagccaccaaaccctagccgcccccccctcaatcccctcctcccaaggtgccaatccttgccgctcggatcgtcgtctcgtggtgcgattctccaaccgttttggtggagggaagaagggaggaaggaaagggggagaacccaaggtggtggacttccggatcgttcttagggattttgcccaaacttcggtgaaggcaagtaaaactgtgatggttattccgtctggcagatgaggagtcttatacttgtttatgttgtgctatcatgttcaaattcatattttcttttaagtaccatcatttgaaaatgttcatgtttcatggatttcgtatgttgagtttgaggtttgattatgttactcaagtggttattatgtggaatggttggaagtaaatgcctagcacatttttatttgggaagaacttatgatgttgtcatgcataatgcactcatcatccattgcattgaagtttcgtcgcgatcttatggtccgaccgtaccggtacattgagcatcatatgttgcccgagaaggggtatggtgcagcttcatatccttagagatatggaggcagaagtcattattgcatttgtagccatgtgcattcatgggagaggtgttgaatctattatgtggatgtggataatttggacttgtgcatggtgattctacttggtgttgagcttttagttacttgtttacttgctgcaatttactattcaaaagaaaagaaagaagtcctgaacacgtggttgtgtaagcacagttgatttacaatgtcctatttgttgttgttatgtttacttgctgagatgtgttatctcacatcttgcattgtttgatgcaggcacctaatttctgctttgggaatagagggaggtagcagcacggccactacacctttaataaaggaaccaccatttaataatgttgttaatcagagttggacaagtctagtgaattgctttgttcttggttgagcgtttattttggggtgggctgagtttcttatcccatttgttttgcttcagttgggtcataattaagttttaccacttttgcatttcagtttctactatgtgaattatatgtctttatatcttgtatgagcttcatgtttcccctccttgttatgctagttttcaaaggaggtgctgccggattttgctatatattctttctttattacttctcttgtgttgagtaagtatggtgggtggggtttgtggtattatccattgtatg

SEQ ID NO: 121917 - DNA, 428 bp, Zea Mays
aaacacaaaagcaccaaaattatatattcacaaaagcatcacaattataatattattcacaactagatcatttacagatagctagctagatcattcacaaaagctccagagatgattaatcacaaaagcaccacagcgacatcactccagcttgaagcaattcaaaagcccacaactacatcactaatgtttcatatcactccagctattgttcaaaagcccacaactacatcactctaggtgctccagagttgattagtcacaaaagcaccaaagctacactaatgcttcaagcagttcaaaagcctccagacaaccactccagcttcttgtatcctcctgttttaaggtacaagctttctttgtcgagaacaccctagaaaaaagtacatcaaattagtatattgttgctacatttgcaaatcaag

SEQ ID NO: 121918 - DNA, 1719 bp, Zea Mays
atgtcgagcatgcgaagctccacgaagatagaagccagggagcggccgatgcagagcgagagaatcgtcgacggcgctgtgcccttcgactcctacgtcccggcctacgccgcccagttcgacggcttcgacctcgaccacgcggccttcctcagcaacgggaccaactccgacctcataggctccaccttcttcaaggaaagagaggaggccgacaagtgcatgccctcgcagagcaagctcgtcatcgacctggatccgccagacaacatggagacgttgttttcggagtcagccttccacgacgttcccggcgccaactacatggaggcgctcaccacatgtttgactccgggcctcaccgagtgtgccatggacgagctcatcaggatggcgcaggccggcgagcgcctgtgggtcaatacaggtggtcgcgaggtgctccacgtcgacacgtacgacagcatcttcgccaagcccggcggctcgttcctcggcccagacgtgcacgtcgacgcctggttcggtgcgcccccgtcgcgctcgagcgagctggagatcaaggacagggtttccatccacctactctggttcggcaaggaccgcgatgtgtccggcaccttcgacgccgacgtcacggtagacttcctccgcgcgcaggagctggacatcatgtgcagggcgcaccaggtggtggaggacggatacgagtacttccccgaccgccagttagtcaccttcttctctgtccccatcttccaccagctcggctgctccttcaccatcttcaagtcgaagacggatagcagcagcagctcgccccatgggtgttcgaccaaatgtcccagccaggcgctgcaccccattgtcaagctcaatccggtagctgtggtgaatattgcaggcgctgggggcaagttttgtggaggatttgatatcaacgttttcacagtggttcatcggattgagggtcaaggagatgtctggggttcattacgagttactctagctgcttgtggtcactatgtgatggttatgatggtaatggagccctgcgcaccagagaagctcttcgatcgcattattggcaagggttactacacagagcgtgttactgctatatcctgcagagcagctgtgaatgtccagcaacgattcttgtgggatccaggtgtcatgctggcgttcagcagcaaactacgacacacatgtgtcgacggccggacgacgcactgctacgactgtgagctgctgactggtgaaacactatcggccatgctagcagagggaggagggccgacgaggttggggaaaagacagggcgccagcgaggagaaccaaggagctgggggcgagctcggatggagaccagagagagaggcacggtgcaggggagcttcagggaagaacaatgccctgggagcttcgacggcggccatggatagcgaaagctctgcgcggccaaccgaggagcaaggacgaccgcggtctggcgagctgaagcgccatgatggggctgggcgcgagctcaccagagacggagctggggcgcgacggggaagggagacagcggaggggaggggccggacgctgggggctgaggaaacgacgccggagcaccacggcacacggccatgggagataggtgcgtgcaccacggagctcaaggaggcacagttgggaggaagaaaaccaagcgtggcgtccgcggtcttgtag

SEQ ID NO: 121919 - DNA, 1948 bp, Zea Mays
ctcgtcttcgctcgcaccgaccccaccgcaccgcacctccaccaacaacaccaccagtccaccaccacccacctcccacatgtgcacacgcgcccacctcccgtccaccaccgctatatatcccggcgccccttcctccctcccccgtccttccctccgcctccgcctccgcccccgcccccgcccacgcccactcctcgctgccaccactcctgtcacctcttcccgcgccgacgcagccgccatggaccccgtcgccacatgggggctaaccccgctcgcgggcgccgacccggagatctacgacctcctggagcgcgagaagcggcgccagcgtcgcggcatcgagctcatcgcctccgagaacttcacctccttcgccgtcatggaggcgctcggctccgcgctcactaacaagtactccgagggcatgcccggcgcccgctactacggcggcaacgacgtcatcgacgagatcgagaacctctgccggtcacgcgcgctcgctgccttccaccttgacgccgcgtcctggggcgtcaacgtgcagccctactcgggctcccccgccaacttcgccgcctacaccgcgctgctcaacccgcacgaccggatcatggggctcgaccttccctccggcggacacctcactcacgggtactacacggccggcggtaagaagatctccgccacctcgatctactttgagagcctgccgtacaaggtgagcgccgcaacggggtacatcgactacgagaagctcgaggagaaggcacttgacttccgccccaagctcatcatctgcggtggcagtgcgtacccgagggactgggattacgccaagctcagggccgtcgccgacaaggtcggggccctgctgctctgcgacatggcgcacatcagcgggctcgtcgccgcgcaggaagctgcaaatccttttgaatattgtgatgtggttaccacaaccacgcacaagtccctcagagggccaagggctggcatgatcttctacaggaaaggccctaagccccccaagaagggccagcctgagggtgctgtttatgattacgaagacaagatcaactttgcagtgttcccatctctccaaggtggccctcacaaccaccagattgctgcacttgctgttgctctacagcaaactatgtcgcctggcttcaaggcctatgcaaagcaagtgaaggccaatgctgttgcaattggaaactatctcatgagcaagggctacaagatggtgactgatggaactgagaaccaccttgttctctgggatctccgcccccttggcttgactggaaacaaggtcgaaaagctatgtgatctttgccacatcacattgaacaagaatgctgtcttcggtgacagcagtgcattgtctccgggtggtgtccgcattggcgcgccagcaatgacctcgaggggtctactggagaaggatttcgagcagattggggagttcctccaccaggcagtgaccatctgcctgaacatccagaaggagtacggcaagctcctcaaggacttcaacaagggcctggtgaacaacaaggacatcgagaacctcaaggtccaggtggagaagtttgccgactccttcgacatgcctgggttcacgcttgagagcatgaaatacaaggagtagatatgcctctttcatgcgcggcaaggtcctcctgtaccgatgtctttccttgtggtggcgcagggtgccatggcactgcattgccgccacacttacgatgatgatgatgggttatggattttgtctacaatgtcagcaggataggctcacaattgccccctgccctccggtttggtcgcctctcaggttttcatttggtagttgttcgcagggaaccatatgagaattgcaatgtcaatcaggtgtttgccaataataattgggtggtttctgctcttgctctgatca

SEQ ID NO: 121920 - DNA, 101 bp, Zea Mays
gattcagcactcagcggccacaactcggccttgcctgcagtccggagacaaggacctcaccggtggtgatggatacctattttatcctctattttaaagtt

SEQ ID NO: 121921 - DNA, 815 bp, Zea Mays
tttttattttctaaaaaaatgtcttggaaaaatagaaatcacttgtaaaaatagagttcccaaacaagtaaaaaaatagcatctccgcgaacttggtgaacgcaactcgaacagtcaaactcggtactcaagcaaccaaaatcaacgcaaatcaggatccgtctttaagtatgctcttgaggaaagcaagttattcataaacgacaaataacttgagcaaatcgcttacaaatgataatcagataagtagagtcaacaagacaaaactgtatctggcaacgcacatcgcctcaccccagccgactacaccattattcttcagcaaaagcaaacagctccttccctcccccctcagctcaagcgataaccataagaaaacctgctacgcgactgcgtatatgataatgcatatgcatgcaaaagataactgacaggccagtgtagcgaacttcatagcacacaacggcccgagtgagctgcaagccgtgtgcctagtaccggtagtgggcaggcttgtagggaccctcgatcggcacgctgatgtagtcggcctgagacttggtgagcttggtcagcttggcaccaagcttgcccaagtggagagcagcaaccttctcatcaaggtgcttggggagcacatacaccttcttctcatacttgccagagctcttctccttccacagttcaagttgggcaatgacctgcatcatcaatagcacacccaaggttcatcaggcgaccctcagcaaggacaatgatgccagtgttggtctcggggaacacccagcggtcagtctggggcttgatggtgatgc

SEQ ID NO: 121922 - DNA, 1070 bp, Zea Mays
agtagttaatacatctcccataatattttcagcattcaaaaacacaccaagcgaagcgcactagcaacgacctaacaccaatggctaccaagatattagccctccttgcgcttcttgcccttttagtgagcgcaacaaatgcgttcattattccacagtgctcacttgctcctagtgccagtattccacagttcctcccaccagttacttcaatgggcttcgaacatccagccgtgcaagcctacaggctacaactagcgcttgcggcgagcgccttacaacaaccaattgcccaattgcaacaacaatccttggcacatctaaccctacaaaccattgcaacgcaacaacaacaacaacagtttctgccatcactgagccacctagccgtggtgaaccctgtcacctacttgcaacagcagctgcttgcatccaacccacttgctctggcgaacgtagctgcataccagcaacaacaacagctgcaacagtttatgccagtgctcagtcaactagccatggtgaaccctgccgtctacctacaactactttcatctagcccgctcgcggtgggcaatgcacctacgtacctacaacaacagttgctgcaacaaattgtaccagctctgactcagctagctgtggcaaaccctgctgcctacttacaacagttgcttccattcaaccaactggctgtgtcaaactctgctgcgtacctacaacagcgacaacagttacttaatccattggcagtggctaacccattggtcgctaccttcctgcagcagcaacaacaattgctgccatacaaccagttctctttgatgaaccctgccttgcagcaacccatcgttggaggtgccatcttttagattacatatgagatgtactcgacaatggtgccctcataccgacatgtgtttcctagaaataatcaatatattgattgagatttatctcgatatatttctgaactatgttcatcatataaataattgaaaacatcaaatcataattttaaactcatgcttggtcaatacatagataatacaatattacttcatcatccc

SEQ ID NO: 121923 - DNA, 1560 bp, Zea Mays
caaaactcgtcccagtgctcaagcaattcgaagctccggaacattccgaagacgaccaaagccttctcgaactttcgcactcgtcgtatataggcaccgcgacaacatcccctaccatcacaccatcaatcacagagcaactggaatagcagctccaacaaaagcccaacgcaccagcagcaatggcgtctcgccgtttcttctacgacgacccctacgactactactacacctccccgtaccactacgcctacccctattaccggtaccagcaccccgctccgtcccgcggcgtcggcgggttcttcccggccgccgcagaagccgcgccggaggcggtgaaggtggacccgcggcccagggtcgagtcttcgaggtcggtctccgttcccgtccgcttcgtcggttccgatccggagccggtgcgcggggcggccaggatgccacaggcggcggtgctgaggaagcgggcgccgtcgtcggaggcggcggcgattaggctgcaggccgctgcgcgcgggttcatggcgaggaagtcggtgcgtgctgttcgtgaggtggagcgtgaggcggcggaggtcggagagaaggttgcgcgcgaggcggaggcgctgcgcggggacgcgagggcgcggatcgccgtcggggagacgctgatgaagatgctgctgcggctcgatgcggtgcgaggcgcgcgggaataccggaagagggtcaccaagcgggtcctcgcgctgcaggatgctgttgacgccctcgaaccaaagccggcgccggattcggaggtcgtggcggaggagaacgagtctgaggtgacgtccgagatggtggacgacagcgcggaggcgacggagatgccggtcgccgctgagcacagcggcggggttggggtgaatgcggcggctgagacggttgccgatatggaggtggacgggggcaaagctgacagcgaggcggtgccagaagcggtgaaggaatccgaaaataagcaggacgacgggcacattaacggcgaccagacggaagtctccaatgagggcgaatgggagatggtggcggatgaagcggagcctacaactgcggcgacgggttccaccgaggcgcccccgcagacaccgatgacgagcgaggtgatgaggccgacaggggaggccggagctgccgacagcgccctggacactcggaaggttatggagatggtcgcggccctgtgcgagcagaacgcgcagcagtgcgcggtgatcggggctctggcggagcgcgtggacgcgcttgagcgcgccgtgcggcgggtggaggacgccgagcgccgccgccggcggggcaagaagctgaagaaggatgggaaggggagcaataggtgctacaccgattgaggacagctctgctttccttgtctgtagcgacgaaatattagttgattattgttttgtaaacttcgtttcatttgtttttgtgcccccaaaactaccgggatggatgtttgttcccgttttgcatcgagaaataaaatgatgtcttcatttttttactgtacaagtttctgaatgtttgattgct

SEQ ID NO: 121924 - DNA, 2346 bp, Zea Mays
atggggatgctcaactgcgtagacacgacctccggcgccggcgccaaactccagcaccaacaacaagctccgacatcgcccaccgcctcggtgtcggagtcgaacatcgtcgcgccatcggtgtcggccgatatcgacgccaacgatgccctagccagcctacaggcgctcaggttcgacggggacatcgacgtggagatccagtcgccggacatcgccatgtgggagtcgctcttcgccgagcagatgggcgccgcggggggcgacttcctgatgctgtctccgaggagggacttcatggcggccggaagccctagcaggagggacttcatggtctcctcccccaagagggactacatggtgtcctcctccccaaagagggactacatgatgtcttcaccgatgagggacttgatggcgtcgtcccccaagagggagtacatggtgtcctcgcctcgcagagactcttcttcctccaggagatcgcccttctcgcccaacctcttcagcaccagcggcggcggccaccagcacggctacgcggcgcatggaccaacagatggaggtgtcggcggcgccggccagccgctgtacggcggccttgctaaccaccacggcaagggaaagtcgcagagcccgctgcacaaggggtacattaacaacagcggcaacaagcagagcaccggcccgtcgtctctctcgtgctcgtcgtcctacggccatgccgacaacgacttgccgtccatggacacctgcttcctggacgactacaaggacggaggctacatcgggtaccagcagcagatgccggggaagcagcaggcggcgcccggaataatggtgaacaacaacggtgggtgctccaccgcggtcaccacggtgggggtggctccttcgccttcttctcaccagctgccgacgctgtcggagtgcctggccatgccggagcctgcttttgtaggcggagaggaggcggcagccggcgggctgcagatgggcgtcggcctgccgtctgacttgtactacgcaggacagttcgcaggcggcggcggcggcggcttgacgacgacgtcgtcgtcgttgcagcaccagatggccaagtccgaccaccagtgggcggcagctgagtcgtcgctgcacagcatgctgggttcagtcatccagacagaggctgacgaacaggagcaggacagcggccttcagctggtgcacctgctgctggcgtgcgccgacttcgtctccaagggggaccagccgtcggcgctgcgccacctgcacctcctccgccgcgtcgcctccccgctgggcgactccatgcagcgcgtcgcctcctacttcgccgacgccctagccgcccgcctctcctccaacaacccgtcctcctccgccggcgccggcgccggcgccggcgtcgcgccctacacgttccccccgtcgccggacacgctcaaggtgtaccagatcctgtaccaggcctgcccctacatcaagttcgcgcacttcaccgccaaccaggccatcttcgaggccttccacggcgaggaccgcgtccacgtcgtcgacctcgacatcctgcagggctaccagtggccggcgttcctgcaggcgctggccgcgcgcccggggggcccgccgacgctgcggctcaccggcgtcgggcaccccgcggccgccgtcagggagaccgggcgccacctcgcctccctcgccgcgtcgctgcgcgtgccgttcgagttccacgccgccgtcgccgacaggctcgagcgcctgcgccccgccgcgctgcaccgccgcgtcggcgaggcgctcgccgtcaacgccgtcaacaggctgcaccgcgtccccgccgtgcacctcggcccgctgctctccatgatccgcgaccaggcgcccaagatcatgacgctcgtcgagcaggaggccggccacaacggcccctacttcctgggcaggtttttggaggccctgcactactactcggcgatcttcgactcgctggacgcgacgttcccggcggactcggcgcagcggatgaaggtggagcagtgcctcctggcgccggagatccgcaacgtggtggcgtgcgagggcgccgagcgggtggcgcggcacgagcggctggatcggtggaggcgcatcatggaaggccgtggatttgagcctgtgccgctcagcccggccgccgttgcccagagccaggtcttgctgggcctctacggcgccggcgacggctaccggctcaccgaggacaggggctgcctcctcctcggctggcaggaccgcgccaccatcgcggcctccgcgtggcggtgctgatcgtcgtcggtgctcgtcgatcgtcattta

SEQ ID NO: 121925 - DNA, 2363 bp, Zea Mays
cgctcacatggacgaggttcatcgttctgctctggccgccgcgcgccggcgcagatacgtttcatggtaccctcttgcatcgcactcccacatggcggctgcggctcaagctaggtcgtccttcctcgtcctgctcgtcgccacgtggtcgctgtcgccgcggcttgccggggcctccacgtccacggaagcagcagctgccggccgtggcgttacgctacgcctcgacgcgagccaggtggtcgtggacaatggcgcggtgcaggtggcgctgtcggcgccggagggccggatcaccggcgtcagctacagcggcgacggcgagaccaccaacctgctggggtacgacgccggcgagggagactccggagggtattgggattcggtatggaactatcccggctctggtctcccaggacagtacaatacgttggatagcacagagttcaacgtagtgtcctcaagtgaagatcaagtggagctttctttcaggagcacatacaacccgtcgcatcgaaacagccttcggctaaacatcgacaagaggctggtgatgctcagaggtagctctgggttctactgctacgccatctttgagcatgacagggcctaccccgctctcaacatcacggaggctcggctcgtcttcaagcttaacacggcaaagttcaattacatggctattacagacgatatacagaggtacatgcccagcgcggcggacagagaagagcctcgtgctgtcccgctggcttacaaggaggctgttctgctggttgaccccaaggaaccccagttccgaggagaggtggatgacaagtaccagtactcgctggacaacaaggacaacgttgttcacggatggattagccgcggcgatcccaacgccgtgggtttctgggtcatcactcccagcaacgagttcaagagcggcggccctctcaagcgggagctcacctcccacgtcggccccacatccctcactatgtttatggggacacattacgttggcaagtacatggtggccaacatcaacgacggcgaggcgtggaagaaagtgctaggcccggtgttcatctacctcaactcaggtcccagcagaggtgagctctgggaggacgccaaggctcgggcgcgggcggaggcggcgagctggccctacagcttcctcgcgtcaccggagttccccaaggcggccgagagaggatccgtcgtaggaaggctcctggtcagggacagccacgagaagcatggcatgcctgctgggtcgtcggccttcgtcggcctcgcctcgcctgggccgcccgggtcctgggcgacggagagcaagggctaccagttctggacgagggccgcgcccgacggcaccttccgcatcgccaacgtcagggaaggagtgtacggtctgtacgcgttcgttcccgggtttctcggagactactgctacggttcgccgctgaccgtagcgccaggccgtgccatcggcgtcggcgacctcgtgttcgagcccccgaggtcgggcccgacggtgtgggagattggcgtccccgaccggacggcggcggagttctacgtcccggatccggaccccaggtacgtcaacaggctcttcgtcgtccgagacaggtaccggcagtacggtctgtgggagaggtacgccgacctgtacccggacaaggatctcgtcttcaccgtcggcgaaagcgacgaatccaaggactggttctttgcacacgtcacaagaaaggtagggcaggttgccgtgccaacaacatggcagatacggttcagtctggaccgcgtcgtggcagacgacgacacctacacgctgcggatctcccttgcagcttctcaaatgtgcaggttgcaggtgcaagtgaatggggatgcaaggagaggcagggattttacaacgcccgacatgggcgatgacaatgcgatcacacgccatgggatacatggctcacagtggagccttgagtgtgtggtcgggggccacctgctacgccaaggcgataacaccattgacataaaactcatcgcacaacaaggaccgaaaggtcctgccatggtcgccggggtcatgtatgactatatccgcctagaagggccaccatctagaggcgttgcctcgagccgcattccagcgttctcccttcaccggattttgttcctgttagccttcctagtcatgtcctagtatgtctagctatgtggccatctaacatgtagcattttttttgctagttgttgtatgaaagcaagaaatatgatgatgtagtacaagcaatgttattgtggagagaatggaggcccatgctacactgattaagtatgtattcaacagatcatcaattggccgg

SEQ ID NO: 121926 - DNA, 873 bp, Zea Mays
cgctcacatggacgaggttcatcgttctgctctggccgccgcgcgccggcgcagatacgtttcatggtaccctcttgcatcgcactcccacatggcggctgcggctcaagctaggtcgtccttcctcgtcctgctcgtcgccacgtggtcgctgtcgccgcggcttgccggggcctccacgtccacggaagcagcagctgccggccgtggcgttacgctacgcctcgacgcgagccaggtggtcgtggacaatggcgcggtgcaggtggcgctgtcggcgccggagggccggatcaccggcgtcagctacagcggcgacggcgagaccaccaacctgctggggtacgacgccggcgagggagactccggagggtaactgacgagtgcatgcgtattacacttgtgctgcctcttcttttatctgcctgcactctgccctctgccactcggaatgtcccttctctcttgcaggtattgggattcggtatggaactatcccggctctggtctcccaggacagtacaatacgttggatagcacagagttcaacgtagtgtcctcaagtgaagatcaagtggagctttctttcaggagcacatacaacccgtcgcatcgaaacagccttcggctaaacatcgacaagaggtgccaaaatccttcacgttattcgctccacgcaacaacctgttttggatactgttttcctcatctgaaacagtaccaaactgtctctcgggagttcgctaagacggctggttcaggctggtgatgctcagaggtagctctgggttctactgctacgccatctttgagcatgacagggcctaccccgctctcaacatcacggaggctcggctcgtcttcaagcttaac

SEQ ID NO: 121927 - DNA, 3219 bp, Zea Mays
gtcattttctagagagctttttgtgatactcttattactcagggtagcaatcccaaaaatgcagggctagtttagaaacttaaatcatttctaggattcccggatcaaagaaaaaaatatatttatatatttacattttaaatgatatattaaataaaactaaaatatgtatgtaactatttaaatttaatggttatgacagatacatacgcatagcaatttattcctctcctctatatattttcaaaaacataaaaaagaaaaaaaatcaacaccggaccaatgcgcgctcgctccagcacagtattgcggcagtattgcagtccagaacagggcaccgccgcaccggtgctcgttccagcccaggaggccagtaccgcagtcccgcgcagccggccattcccatgccgccggcacccatgagatggcggcgcgggggccgctcgtcatcgcgtctccttcagcgagccctcctcttggccgccttctccgctgcggccctcatcctcctcgtactccagcaccaccacggtcctaaacgcccaaacccttccgccgcgtcccacgcccgcgactcctcagacgagctcctcgacgactcgcctcccgcggagcgggatccggatgccagtgaccctgcggtagttgttgacagggccacgtgcgcaacggtggagatgatgggggaggaggccgctggtgctgggcggggctctccggagcaggccagcctgcgggtccgcgagatgatccggcgccacttcgagctccacggggactgtatccttttggggagtacatttcttataccaaccagtcattcactattcatgaaatcaaacatttgtggaggaagcatcgctgtgctaggacatatggtagagatctgaatatcagagtggatatttttgaaaatccaactgagacgaatgttctgtgtagtgactggaatagctggaaggattcaattatctggtttgatggcgcaacagatgcagttgggattcagttctttctgaagaatgttcatcctagaatgaaggctgccgcgtcggctctttttggattgccagactcattgtacgccaggcctaatacatttggtgaacttatgcgagctattatatctccatccagcaaagtccaagaagcagttgactgggctttgaagggtgtgaatccagatattgttttgcacatgcgcatgatggcgaataggccagtccgagcaagaaaagctgcagttctttgtatcaagaaagccctacagtttagccatattaagggtacagctctggtggccttggtctcagacacaccagcatttgtgaaggagataaagtcagacatcagtgagtttgcagaggtacttaattttgattacaaattgtttgccaagacttctagtctggagattgttggaaatgataagcccttggattttcgatcaagagactggggatcagctccaaggtgggtggcgtttgttgatttctttatagctgcacaggccaggtacgcagtcgtcactggagcacatcgtcgtgtggggaccacctacgcacaactcattacagcattggctgcggcaaacaggcatggtcgagagccttcaggcaccaacttcacgttcctaagtagtgtccacagcaacttgctggtggaggggctgtcgacgcaggttggttggggccatatctggaacagatatgctggtcctctaagctgtcggcgccagccacaccaatgcgccttgaccccgctcctccctcctgcttggtgggacggtcgatggcaaagccctattcccagggatgtgaggaggctactggagtacggtgtccggttatcagatactggggaggtggacgagaggcacctgttgtcgtactgcaggtcaaggaaagatcatgtgaagaggttccatgtccttccaccatacaagaacccggcacgactgtaggctgaggaggtcggcgaggagcagtagagagctcaattttgcattaaccacttatgacgagtgtaggtttgagtggccaagcttttaaactggccatgctggtaaatttcgtgtcgtgactggtgtaggttttggtaatctggtgactggtgcactggtgttcaggcggtagtatatcatgcatcgtacatcactattgttcatctgtgataagattggaaagcaggtagcagacctggagatgatagcatgatgtatatagggtaaaggcatagcattgcattgtcgatgagttataagctggtggtctatctgtcaattaactatatagcagagcaccgacccagaattgtaagcctttcgtctactgatgcaattttgatgtttatcgttctcctgtatcttcgatttgacaattatgcgattgcttggaaggactgagttctatgaaattgcttcttttcctgttgtcgttgccaaaatattgttcaaactttttgttgcttgtatattgttaatttttacaggatgcttgattgtgaattgttgcgtattatcatggctgtggacccatgacaaatagattctctagtttaatagcagtggtgaactggtgattgatattcattatccccttaccgaatttttgttcctgtctgacaaacaggggattgtatccttttgaggagcacatttcttataccaaccagtcattcactattcatgaaatcaaacatttctggaggaaacatcaatgtgctagggcatatgatagagatctgaatatcagagtggacaaactgttgttcatccgtgataagattggaaagcagatagcagatatagagatgggttgatgtataaattcatagcataacattgcattgcatcgtcaattagttataagctggtggtctaatctactggtgcgattttgaggtttttcgttctcctgtctagtatacgtgcacgcttaggcggccttgtctgtttcagctcaggactgtgttcagacgtgcaagcttgcctgcttgggatggctttccaagctgaaacaaaaaaggttcttgaaagatgcgtgggtgcacgatgccagttcggtgtcgagccatgccgcgcaaagtggacatctagtgggcctgtggcgactcagtgatttgaacctaacgcatgatgtcactagatatactacctccatttttgatatactacctccatttttatttatttgacgccagttagttcaattttatact

SEQ ID NO: 121928 - DNA, 2578 bp, Zea Mays
gtcattttctagagagctttttgtgatactcttattactcagggtagcaatcccaaaaatgcagggctagtttagaaacttaaatcatttctaggattcccggatcaaagaaaaaaatatatttatatatttacattttaaatgatatattaaataaaactaaaatatgtatgtaactatttaaatttaatggttatgacagatacatacgcatagcaatttattcctctcctctatatattttcaaaaacataaaaaagaaaaaaaatcaacaccggaccaatgcgcgctcgctccagcacagtattgcggcagtattgcagtccagaacagggcaccgccgcaccggtgctcgttccagcccaggaggccagtaccgcagtcccgcgcagccggccattcccatgccgccggcacccatgagatggcggcgcgggggccgctcgtcatcgcgtctccttcagcgagccctcctcttggccgccttctccgctgcggccctcatcctcctcgtactccagcaccaccacggtcctaaacgcccaaacccttccgccgcgtcccacgcccgcgactcctcagacgagctcctcgacgactcgcctcccgcggagcgggatccggatgccagtgaccctgcggtagttgttgacagggccacgtgcgcaacggtggagatgatgggggaggaggccgctggtgctgggcggggctctccggagcaggccagcctgcgggtccgcgagatgatccggcgccacttcgagctccacggagcagaaagagtgagaatgcttcctgcccatgaattctgcaaacaaggatttgtgttggggaaagcatctgaagctggatttggcaatgaaatgtacaagatcttaacagcgggagccttgagtgtcatgttaaaccgatctttgatcatcgggcaaacaaggggactgtatccttttggggagtacatttcttataccaaccagtcattcactattcatgaaatcaaacatttgtggaggaagcatcgctgtgctaggacatatggtagagatctgaatatcagagtggatatttttgaaaatccaactgagacgaatgttctgtgtagtgactggaatagctggaaggattcaattatctggtttgatggcgcaacagatgcagttgggattcagttctttctgaagaatgttcatcctagaatgaaggctgccgcgtcggctctttttggattgccagactcattgtacgccaggcctaatacatttggtgaacttatgcgagctattatatctccatccagcaaagtccaagaagcagttgactgggctttgaagggtgtgaatccagatattgttttgcacatgcgcatgatggcgaataggccagtccgagcaagaaaagctgcagttctttgtatcaagaaagccctacagtttagccatattaagggtacagctctggtggccttggtctcagacacaccagcatttgtgaaggagataaagtcagacatcagtgagtttgcagaggtacttaattttgattacaaattgtttgccaagacttctagtctggagattgttggaaatgataagcccttggattttcgatcaagagactggggatcagctccaaggtgggtggcgtttgttgatttctttatagctgcacaggccaggtacgcagtcgtcactggagcacatcgtcgtgtggggaccacctacgcacaactcattacagcattggctgcggcaaacaggcatggtcgagagccttcaggcaccaacttcacgttcctaagtagtgtccacagcaacttgctggtggaggggctgtcgacgcaggttggttggggccatatctggaacagatatgctggtcctctaagctgtcggcgccagccacaccaatgcgccttgaccccgctcctccctcctgcttggtgggacggtcgatggcaaagccctattcccagggatgtgaggaggctactggagtacggtgtccggttatcagatactggggaggtggacgagaggcacctgttgtcgtactgcaggtcaaggaaagatcatgtgaagaggttccatgtccttccaccatacaagaacccggcacgactgtaggctgaggaggtcggcgaggagcagtagagagctcaattttgcattaaccacttatgacgagtgtaggtttgagtggccaagcttttaaactggccatgctggtaaatttcgtgtcgtgactggtgtaggttttggtaatctggtgactggtgcactggtgttcaggcggtagtatatcatgcatcgtacatcactattgttcatctgtgataagattggaaagcaggtagcagacctggagatgatagcatgatgtatatagggtaaaggcatagcattgcattgtcgatgagttataagctggtggtctatctgtcaattaactatatagcagagcaccgacccagaattgtaagcctttcgtctactgatgcaattttgatgtttatcgttctcctgtatcttcgatttgacaattatgcgattgcttggaaggactgagttctatgaaa

SEQ ID NO: 121929 - DNA, 2005 bp, Zea Mays
gtcattttctagagagctttttgtgatactcttattactcagggtagcaatcccaaaaatgcagggctagtttagaaacttaaatcatttctaggattcccggatcaaagaaaaaaatatatttatatatttacattttaaatgatatattaaataaaactaaaatatgtatgtaactatttaaatttaatggttatgacagatacatacgcatagcaatttattcctctcctctatatattttcaaaaacataaaaaagaaaaaaaatcaacaccggaccaatgcgcgctcgctccagcacagtattgcggcagtattgcagtccagaacagggcaccgccgcaccggtgctcgttccagcccaggaggccagtaccgcagtcccgcgcagccggccattcccatgccgccggcacccatgagatggcggcgcgggggccgctcgtcatcgcgtctccttcagcgagccctcctcttggccgccttctccgctgcggccctcatcctcctcgtactccagcaccaccacggtcctaaacgcccaaacccttccgccgcgtcccacgcccgcgactcctcagacgagctcctcgacgactcgcctcccgcggagcgggatccggatgccagtgaccctgcggtagttgttgacagggccacgtgcgcaacggtggagatgatgggggaggaggccgctggtgctgggcggggctctccggagcaggccagcctgcgggtccgcgagatgatccggcgccacttcgagctccacggggactgtatccttttggggagtacatttcttataccaaccagtcattcactattcatgaaatcaaacatttgtggaggaagcatcgctgtgctaggacatatggtagagatctgaatatcagagtggatatttttgaaaatccaactgagacgaatgttctgtgtagtgactggaatagctggaaggattcaattatctggtttgatggcgcaacagatgcagttgggattcagttctttctgaagaatgttcatcctagaatgaaggctgccgcgtcggctctttttggattgccagactcattgtacgccaggcctaatacatttggtgaacttatgcgagctattatatctccatccagcaaagtccaagaagcagttgactgggctttgaagggtgtgaatccagatattgttttgcacatgcgcatgatggcgaataggccagtccgagcaagaaaagctgcagttctttgtatcaagaaagccctacagtttagccatattaagggtacagctctggtggccttggtctcagacacaccagcatttgtgaaggagataaagtcagacatcagtgagtttgcagaggtacttaattttgattacaaattgtttgccaagacttctagtctggagattgttggaaatgataagcccttggattttcgatcaagagactggggatcagctccaaggtgggtggcgtttgttgatttctttatagctgcacaggccaggtacgcagtcgtcactggagcacatcgtcgtgtggggaccacctacgcacaactcattacagcattggctgcggcaaacaggcatggtcgagagccttcaggcaccaacttcacgttcctaagtagtgtccacagcaacttgctggtggaggggctgtcgacgcaggttggttggggccatatctggaacagatatgctggtcctctaagctgtcggcgccagccacaccaatgcgccttgaccccgctcctccctcctgcttggtgggacggtcgatggcaaagccctattcccagggatgtgaggaggctactggagtacggtgtccggttatcagatactggggaggtggacgagaggcacctgttgtcgtactgcaggtcaaggaaagatcatgtgaagaggttccatgtccttccaccatacaagaacccggcacgactgtaggctgaggaggtcggcgaggagcagtagagagctcaattttgc

SEQ ID NO: 121930 - DNA, 1360 bp, Zea Mays
accatcaagctttcaggcagggcaagcaactcgagtagtagttgccagccacacctcctgtcttcctttttccttctcgcattgtggaggagaaggatcaagtgctcataagcaagctagcttgacgaagtataggaaattaggaatacaaataaactcatcctcctcatatataaacgctcgatctccagatatggccggcctgtccctgctgcatcccatggccttcgccttcggcctcctcggcaacatcatctccttcatgacctacctggccccactgccgacgttctaccggatctacaagaacaagtcgacggaggggttccagtcggtgccgtacgtggtggccctcttcagcgccatgctgtggatctactacgcgctgctcaagtccaacgagctcctgctcatcaccatcaactccgccggctgcgtcatcgagaccctctacatcgccatgtacctcctctacgcgcccaagaaggcaaagctgttcacggccaagatcctcctcctcctcaacgtgggcgtgttcgggctcatcctcctcctcacgctgctgctctccgccggacagcgccgcgtcgtcgtcctcggctgggtctgcgtcgccttctccgttagcgtcttcgtcgcgccgctcagcatcatccgccaggtggtgaggacaaggagcgtcgagttcatgcccttctcgctctccctctccctcaccgtcagcgccgtcgtctggttcctctacggcctcctcatcaaggacaaatacgtcgctctgccaaacgtcatcggcttcagcttcggcgtggtccagatgggtctctacgcgctctaccgcaacgcgacgcccagggtgcctgccaaggacgtggccgacgacgccagcaaggacaaggcgcccggcgaacatgtggtggtcaccattgccaagctgaccgcggcgacgacggcacctgcagctgccgtggcggaggatcttgtcaaggtccacgacggccacccggaggaagcagccaagggcgccgccaagccggcggagaacggcgcgggacgcagcgacgccgagcaagtctagattcctcgctcgatcagatcagaattcatgaagaagaacatgcgtatgtatgtgtatccggtaggtcgtaacataacataaattaagtgcgcatgcagtttggcaactcatgttgtttcatttcgttctcgcgcaatatgcgcatgtattaattttagattgtcattgttgtagttcttgcctccgattattattagtgtgtccgtcaccttccatgtaataacaaaaaaaatatatataaatggtcctattaaagcaaaagctaaagttcgtttttatgccaaa

SEQ ID NO: 121931 - DNA, 1478 bp, Zea Mays
gctctataaatacgtacaccagttcatcgccctagctagctccaccagttcaccttccccttcccctgcccctgcgtgcgtgaccggcgacctagctcgcagtcgcactacactactcctcgaccaccactccgatccttcctgcctcgacgacggtcgcgcgcgcggcagcccatgaagaagaagcaggcgcgggcgaggcggcagcgcgtcccggcgttcggggagtggaaccatgcctacggctacggcggcggcggcggcgaccaacggcccgtcgtcacccactacgacctggactccgccatgcagatgcaggccaggcgactcgtcgtggcgataccggcggtgccgcccaagcctgccagcaaggtggtgaagtggaggcaaagtgccacagccacgcttgagctggaggacgaagatggcgagcacgagcacgaggacgagaagaagaagcagctgcagcagcagcatttgggtttggacgtggtggtgggactgggactgggcggcgctggcgctggcgctgccaggaagcaggggaagcagcagagcccggtggtgggctaccaggcgcgacggaggagggcggcggtcaagaccgtggaccaggacctctaccacatcccgcccgacatgctctgccacgagcccaggaaacgtctgacaaggaggaagagcctgtggacgggctgcctgggtctcagctgcgtcgtcgcatagggatccgccattgcccacctgctgacagctcatcatgagtcgcccctcggccctcgcctggcctgccttgttttgcgtgttgtgccacccacccgtactgtaaagacactcggctgctccatagcagaaaaccatggccatcatgttgtcacaccaccatcatcatcatctccacagtgttgtgctggctcgtcaactcgtcgtcgtactacgcgcgtgggagcagtgggcggacgggaaacgacttgttgttggatgtcgccgccgtgcccccgacgtgcgcggccgcccgccccggcagcgtcatttccccgtgcccgagacccactcgagcgctgcttttccaatttccacggcgtgcggtggcgttgcgttgcgacttgcgacctgctgctgtacggcgcccccggtgaatccggcgggaaaaggttgtgcgtcgtcgaaaggtcgatgacatgacagtgacatcgatgccttgtaggagtattaacttcgcaccactctaaaaaaacacttctctgaaatacgtaaaaaaaaggaactccaaaaggccttgttctgcgcgggggtgtcgccgtgttcagcttaagatcccatcttggggatttggagttgacgatgatgggcgaatgacgccggacaccccctgctgcatggcccctcaatcatgctacctagctagctatctagctaacggtgtgttgatcgagcgcgggtttcatgtccgccctgtttatagcttgttccccata

SEQ ID NO: 121932 - DNA, 1012 bp, Zea Mays
atatgcaatgcaaagcgtcccctcaacatttcagtgtgtgccaagaagttctcaggctcaaactgagcaatggcagctcagtttgcagcggcaacagcagtcttcctgagctgccttcttgctcttgcagcacttgcaagctgcaacactgaaggtgacatcctgtacaagcaaagggcgacatggaaggacccaaacgatgtgctcgtgagctgggatccgactcttgccaatccctgcacctgggtccatatcacttgcaacaacgacaacagtgttattcgtgtagatttggggaacgcaggcctatcaggcactctgattccagatttgggaggactgcagaacctccagtacctgatgttgtatgggaacaatctgacagggcccatacctgaatctctgggcaatttgacgagccttgagaggctggagcttcagaggaatgcgctgagcggtgcaatcccatcctctctcgggaacatcaaaacattgcagttcatgaagttgaacgcgaatatgctgaccggcacggttccattggaagtcctctctcttgtcattgctgggaatctgaccgagctaaatattgcaaacaacgacttggccggcacagtcagatcatctggtttgagagtgactgcaatcatccaggacaagctgaagactacatgatgagtccctgggtgtggacattggctttcttcatgacaatgtttgacaaaaaaaatagtaaataaataaatccagtgacatggattgatctagacatcttgtagtatgatgatatggctgctggataaattctattcttctccgatttttccctcgagcagcattagctaatgagaatatatggggcgtcactgtgctagagaaaaaaattgtacccagttttcttttttatgtaagttcttactttacataaatttctatagattattgaaacatcatgacgtatgacatatttatattaatgataccactataaacacttcttttcaaaaaaaaa

SEQ ID NO: 121933 - DNA, 1746 bp, Zea Mays
tgcatcgagagtttagttcgttgttttctttctccgtgtgactctgctctcttcattcgattcacactgttgttaattatcagccagtcagtcaatctcaaactctccatgcggtttcaaaacatttgatggcaactccgctcctctgaattcgactgctacccagaaactgtaaagagatggggtgtggcccatcaatccccgacaagtacacgataggtgggaaggggcgcaagcgccggagcgtcatacaggaggttgccgtgttcgtgcccaccatccgcatcccagtggcctctgacatagctcatccgctcaggggaatagtttccaaggatcttgtcgaccgactctccacactccgtgcccatgtcgcctcgctggctgaagaaatctatcacgcggacgtatcagctgttcaagaactgcagcatgcgctagaggagtacttgccagttgttcttggtttaacaacgaaagagagccgtcttgaatcgtcagtacagttcagatggaagaccttagacgacgaccaggagtgttgtctggcgagcgcgtggtatgaggtgctctcggtggtccacatgatggccatgcttgcgttgtttgaggctaacctattgctcatcccaaagagcagccaaggtggtggtgaaaggaaggtagcagaagacgcaaagaaggatgtcgtcgattcattgctcagggcgtcgggatgcttagactactccgtgcatcgcatacttgttcagatacctgcgcaagtcaagaagggttttcccagttacttgcaggagggcatgcttgaggccatctcaattcaggcattggctcagtgtgtggaaatacagcttggcttggcttctgaatgtgagaaggcaacgctgtcagtaaagaggaggctagcttgtgagcaagtcagctatttttctcaggctcactattgtctgtcgggatgcgatacgagtgactcgtacgggaagaagcttctgctgttcctcaagtggaagtggatggaggccaaggctgtagcgtattactaccatggtctggtgctcgacaagggcggcgaaccggcaaaccatatcagtgcagtctgctgcctctctgcagctgatgacctgctctcagacagcaaaagggcttgcttgagtttttgcttggcaaatcctgtcacgagggtgcctcctccttggggtgtcatgaaaaacatgcacaaaaagatcccagatgtcgcttacaagaagttccaagcgcacgggcatctgtttgagcaaaacaagaacagcgcactccaatccgttcctgacctaccagagtttgcgctgtcgctgagaccggatggatacgagttgccaagcactgattcgatctgggataatgttgatggccaacctcagattcaaagcctcaaggagcatatgatagatgacgaagatgaagtaggcacaaaatgatagttctcacttccaaatgcttcttttcattgtaccaccaaaagtagcagagctcaaaaacgcttaatccaaaatgttttggattcagcatatggctcaactgaaaaaggaatcgcgatctctgtattattgcaagtattaccatatgatatagtaaagtcttatgtgtaatagaatcataaataatagttggtttcttgctgtaatcgcctttaattttattttcccaactggcagaatagagcatcacagaaaaaaaaaatacggcacgcatttcagtagaacaata

SEQ ID NO: 121934 - DNA, 1143 bp, Zea Mays
cgcgggacgcgcagcgcagtgcgcgcgcgcgggtgcagcgctactgcgctgcgcgcgcacccgcggcgcagcacggcgcgggtgctgcgaacctcgccgcgttccggacctcctccccggcgtcgcgacgagggcgcgctgccgctgctcctgcagctggtgtccctcggcacgccgcgcgcgcaggagctggcgctggcctgcctccagagcctcaccacgggagacggcggcgacgaggcgcagcggctcagagtggaggcgttccaggagggcgcgctcgggtgcgtcagcgacttcctcgacggccgccgcggcgacgagccgggcctggcgcccgcgctgggcctcctccgcaacatggcgtccttccgctacatcgccgagatcgcggcgtccggcggcctggcagcgcacgcggccgccgcgctgggcagcgaccggtccgccacccgcgcggaggccgccctggcgctcgcggagctctgcggcaacgcgggcaaggccggcctacggcaggaggccgtggtcgcggacgccgtcccgcggctggtgtggatgctggaggccaagcccgcgggcgagcgcgacgccgcggcgcgcgcgctggctgcggtcctggacgcgtcgagtgggtgccgcaaggcgttccggaaggacgagcgcggcgtggtgaacgcggtgcagctgctggacccgtccgcgcccggcgtggagacgcggttccccgtgtcggtgctgctggccgtggcgcagtcccggcggtgccggaagcagatggtggccgccggcgcgtgcgggttcctgcagggactggtggcctccgaggttgtgggcgccaagcggctcgccgagcggctcggcaaggggaagatgcttggcgtgttcccgcggacatgacgctcggtggcgcatcaacctcagctgtatgtatgtgctcctgcttctatgtgatataaacataaccaaatccaatttccctttctcggttcaccatctgcttcggctctcttgtgtgatgaactgggatgatgatggattgatcttgtacatgtcggcgtgcgtgcgtgcgtcaatgctgctgttggtagatcactacgggtgctactggaaacaataataagaagatggaaacattcttgt

SEQ ID NO: 121935 - DNA, 2138 bp, Zea Mays
aagtaatccattgctcctcctttccttctcttccttcattccattctcctcctcaactccatcgcattgctattccagtcctcacagagaagaatcccgcgagcgagcgagcgagcgcgcgaggcggcaaggacgaacccaagacgtacgatggcgaggaggctggcgtacacgacggcgctgaccacgctcttcagctacgggctgctcttcgccttcggccagctcagggatctcttccgccacctgctcggctgcttcagacccaacaaggacgacgacgtcaagcaggggtacgcgccgatctgcgtcggcctggaggatttcttcgtgcgacgcctctacctgcgggttcaggattgcttcggcaggccaatcgctagcgcaccggactcatggttcgatgtggtggagcgtacctcagacgacaacaacaagacattgcagcgcacctcaaagaccactagatgcctgaacctgacgtcctacaactacctcgggttcgccgcggccgatgagtactgcgtcccacgcgttgtcgactccctcaagaaatactcggcgagcacctgcagtgctcgagttgatggcggcacgaccaagcttcacaccgagctggaggagctggttgcgcgttttgtcgggaagcctgctgctgtcgtcttcggcatgggttacgttacaaactctgccaccattccctgcctaatcggaaagggtgggctgattatcagtgactcactgaaccacaactcgatcgtcaatggcgcaagaggatccgatgcgactgtcagggttttccggcacaactgccctgcccatctggagaaggtcctgagagagcaggtagctggtggccagccgcggacgcacagagcgtggaagaagatcgtcgtcgtcgtcgaggggatctacagcatggaaggggagctgtgcaaactccccgagatcatagccgtctgcaagaagtacaaggtccgagagagagagagagagaactgatttgagtgcgcacagctcaaggcagtacgtcaccagtatatatctactccttgttgtgtcctgccaaacaggcctacacgtacctggacgaggctcacagcatcggcgccgtcggacggtcgggccgcggcgtctgcgagctcctcggcgtcgacccggccgacgtcgacgtaatgatgggcactttcaccaagtctttcggatcatgcggtggatatatcgctgcatccgaggagatagtccagcacttgaagcacacctgtccgggccatctgtacgctacctccatgtcgccgcctgcagtgcagcaggtcatctcggctattagagttgtccttggggaggatggctccagcagaggtgcccagaaactggcgcgcatccgtgagaacagcaacttcttcaggtcagagctcaagaagatgggctttgaggttcttggtgacaacgactctcctgtcatgcccataatgctctacaatccggccaagattcctgcgttttctcgggagtgctttagacaaaaggttgccgttatcactgtggcgtttcctgtgactcctctccttctcgcaagagcacgtttctgcatttcagcttcgcacactagggaggacctgacgaaagccctcgatgttatcagcagagttggtgacctcgtgggcatcaagtacttccctgcacaacgaccaaagattgctgaagctggtcacggcaattgaggcggtagagaggaatgagccctgaaattaccccatgagtggctgaagttgttaagagtccttttaaaagttatcaaataaatagattatcatggaaacaagcacgcgcgcattgatcagtttcgtcgggattctgtcgtattagctgtgttgagcctgcttttgagccggcggacggttcggcactgaggccggacggtccgcggtccggacagttcgcgcctgtgggccggacggtccgcgcatgcgcagagcagtttagggttccgagttttgtgctacgattgttagctatattcgcgggattagctcggaatcagttgtgtaaagagttcaggctccctcctctataaatagagaggtctacggccgatttgtaaggaacaatcgaatcaatacaacttctatttcgca

SEQ ID NO: 121936 - DNA, 1697 bp, Zea Mays
gacgacaacgactacgagagaaggaaaccggttaattcgaacttttcttttgactactctcgtattccgcaaagtacaaatgctcatttgctctccattccactaggcaaacatcatcactttgatggagaggactatggattttggagccacaaaatgcgtagtcacctattctccctccatccgagcatatgggagattgtggaaagtggaatgaaatttgatagctcgaatagtgctatgtttatcaatgaacagattcatagaaatgcacaagctactactgtgttgttagcctctttgtgcagggacgagtatcataaggtgagcggcttggacaatgccaagcagatctgggacaccctcaggatctcacatgagggaaacgaggtcaccttactcaccaaaatggagttggtggagggcgagcttggaagattcgcaatgatcaggggagaggagccaacccaaacatacaaccggctcaagaccctcatcaacaagataaggagctacggaagcacacgatggacgaaccacgacgtcgttcgtctaatgctaaggtccttcactgtacttgatccacatttggtgaacaatatccgtgaaaatcctaggtacactaagatgtcgcccgaagaagttcttgggaaattcgtaagcgggcgaatgatgatcaaggaggcgagatatgtcgacgatgcgttgaacggtccaatccatgagcctcaacccattgctctcaaggcaatgaggagcaaggaggcgctacctagcaaggtggcgcaagttgaggcggccgggctcaatgatgaagatatgaccctcatcatcaagcgcttcaagacggcgctaaagggtcgcaaggggcagccaagcaagaccaagacaaaggggaagcgctcatgtttcaaatgtggtaaggttggtcattttattgctaactgtcccgacaatgatagtgaccaggaacaagggaacaagagggagaagaagaagaactataagaaggcaaaaggcgaggcacatcttggcaaggagtgggactcagattgttcgtcgtccgactctgacaacgaaggactcgccgccactgccttcaacaagtcatccctgttccccaacgagcatcacacttgcctcatggcaagggaaaagaaggtaagcgctcgtaacactagtacttatgcttcttcaagtgaggatgagtctagtgatgatgatgaaatagattattcatgtttattcaagggtctagatagaacaaaggtggataaaataaatgaattgattgatgctttgaatgataagaatagattgctagaaaagcaagaggatctcttatatgatgaacatgataagtttgtagaagctcaaaaatcccttgctttagaaataaagaggaatgaaatgctttcttgtgaattgtctacatgccacgactctatttctagtttaaaaagcataaatgatgacttgaatgctaagttagaaatagctaataaattaacatcttgtgtagaacatgttgtggtttgcactaggtgtaaagattttaatattgatgcgtgtagtgaacacctagtgtcaatttctaaattgaatgatgaagtggctagtcttaatgcccaacttaagactagcaaaagcgaatttgataagttaaaatttgcaagggatgcctacacgattggtag

SEQ ID NO: 121937 - DNA, 2468 bp, Zea Mays
attggttggctgtctgtgtccttcctcccgttcttcccttgcttccccgtcgcgctgttcaacgttcaaacccttacacctcctcctcccttggccgcgcagtcgccattgacgaccccctctcactctcccctcccttaaatccctcctctccccgcgtccttctccccatcaacgcttcattcgctccagtctcatcgaatccaattcacagccagccagacagggcgggagatctccaagaagctatcttggaatccgagaacaccttgcattcgcggtcagtcaaggattcgaattctgacggacgagctctccggccaaaaaaagtcaaataattttcgggatagctcgggtggcgtctcggcaaccggaggagaccccgggggattaaggaaggggcaagatggtgaggctgccttacacaacggcgctgaccacgctgttcagctacgggctgctcttcgccttcggccagctcagggatttcttccgcaagttcgtcgactggttcaaggccaagaacgtcaagggctacgcgccgatctgcctgggactggaggatttctatgtgcgacgactgtacctgcggatccaggattgctttggtaggccgatagcaagtgcacctgattcatggtttgatgttgttgagcgcacctcaaacgacaataacaagacattacagcgtacctcaaataccactaaatgcctcaacctgggctcgtacaactaccttggctttgccgcagcagatgagtactgcactccacgtgttattgattctctcaagaaatactcagcaagcacctgcagtgttcgtgtcgatggaggtacgaccaagcttcacactgagctggaggagttgactgcacgttttgttggaaagcctgctgctatcctctttggcatgggttatgttacaaactctgccatcattccctgcctaattggaaagggtgggctgataattagtgactctctgaatcataactcaattgtcaatggtgcgagaggatctggtgcaactgttagggttttccagcataactcccctgctcatttggaagaggtcttgagagagcagatagctggtggtcaaccacggacacacagaccatggaagaagatcattgtcattgttgagggtatctatagcatggaaggggagctgtgtaaactccctgagattatagctgtctgcaagaaatacaaggcttacacatatctggatgaggcccatagcattggtgctgttggacagtctggccgcggtgtttgtgaactccttggggttgacccagctgatgtagatataatgatgggtactttcaccaagtcttttggatcatgtggtggatatattgccgcatcaaaggagataattaagcacctgaagcatagttgcccagcccatctgtacgctacttccatgtcaccaccagcagtccaacaagttatctctgctattaaagttatccttggggaggatggctccagcagaggtgcccaaaaacttgcacgcatccgtgagaacggtaatttcttcaggtccgaactcaagaagatgggttttgaggttcttggcgacaatgattctcctgttatgcccataatgctttacaatccggctaagatccctgcattctctagggagtgccttagacaaaaggtcgccgttgttaccgtggcgtttccagcaacacctcttcttcttgctagggcacgcatctgcatttcggcttcacacactagggaggatttgatgaaagcccttgatgttatcagcagagttggtgatcttgtgggcatcaaatacttccctgcagaaccaccaaagattgctgaagctggtcatgataagctggagtaggagcgaaccctgaatcgccccatgagtgattgaagttgttagaatcccttccggagttatcaacagatcattatggaagcaagcatatatggagccgtttcgctgggattttgtggatacgcaaagagtccatgatctgtcctattaggcagctgacagttatttgttgattgtacaactgttcttccaattgtgtatagctggttgaaatttagttgttctgttgctaatctgtttcaaatacgtagtagaatcggaggcaatataaactttcagcagagcattactgagtttcccctcgcagaccactgacgacaatgaaggcctcttgctttcatgtatttttctttctttctttttgtaatcagtctgttatatgggatcagtaggtgtccctttccatgaagttataggctactttgctaagttatgaattgttttttttttgtgtgtgtgtattcagtggatgttaaatgcggccaatgacaatggttatttcttagcattcttgtgggatttgcatacttgtagatgtagacagttgtaagactcataatcctgtcaaagatatatcatatgctcaacattcatccac

SEQ ID NO: 121938 - DNA, 769 bp, Zea Mays
tttttttttggcataaatacttcatttcattctgggtgacataacgaactgatgtgtttcctgtctgcgcaacccacttccaggttatcagcagagttggtgatcttgtgggcatcaaatacttccctgcagaaccaccaaagattgctgaagctggtcatgataagctggagtaggagcgaaccctgaatcgccccatgagtgattgaagttgttagaatcccttccggagttatcaacagatcattatggaagcaagcatatatggagccgtttcgctgggattttgtggatacgcaaagagtccatgatctgtcctattaggcagctgacagttatttgttgattgtacaactgttcttccaattgtgtatagctggttgaaatttagttgttctgttgctaatctgtttcaaatacgtagtagaatcggaggcaatataaactttcagcagagcattactgagtttcccctcgcagaccactgacgacaatgaaggcctcttgctttcatgtatttttctttctttctttttgtaatcagtctgttatatgggatcagtaggtgtccctttccatgaagttataggctactttgctaagttatgaattgttttttttttgtgtgtgtgtattcagtggatgttaaatgcggccaatgacaatggttatttcttagcattcttgtgggatttgcatacttgtagatgtagacagttgtaagactcataatcctgtcaaagatatatcatatgctcaacattcatcc

SEQ ID NO: 121939 - DNA, 838 bp, Zea Mays
acctaagacaagtccgtttgtgttgcgtggcgtgattcgtgtgaaacaccttcgagtcttcgatcttcttgggcgccgccaacgcgccggcgccctccgcccctgcgcctcagcctggtaccgtgcctgtgccgttctggtcctccgccctccgcatctgcctggtaccgtgctagtgccgccttcgcatccgtcctccgcctgggtctccgccctccgcggctccgccttgcgactttaccctgcacggcccgccgccggccggtcgcccgtccggagccactgacccgagtttccgtccagcactccagcgaccagcgcctgttcgtccagagtaccaacagatctcgtcaagaggtctgaaggatgaggaaaggactgcatcctcagatgcaatggatttcatatgtgacgcagagtggtaggctgatcaatatcatgatgaccaaggtgaatcatactggcaaagtgtaccacatgagggccaagcggcaaatggctcaaagcctcggccagattgcgaagttcaaacgtcgatatgagcaggaagcagagaaaagcaaagacaagtaggatggtgttgggaaggaggtgtagcctctgtggtcttagtcagttctgttgactgcgaagttttcagctaaggatcttcgattgaatgattttattttagatcacatcatcttttgctccacttcataattgtgttgtaccccatcttgagcaaacactttggcacttgttgcaccttaaagccccaagaagatagtctatggatcgcctttgctctgacgttcgagttttatggtttatatttctccatgttattatgtttgat

SEQ ID NO: 121940 - DNA, 396 bp, Zea Mays
atggccgcggcgtcaacctgcctccctgcgtgcggagacggcggcggcgggggcaggagaacgtggcaggggtcccagaccttgatgccgggacccgcgaggaggcgcggggtgcccgccgccgagggctgcggcgagagcggcgagtccgcggcgaggcacggcagcacctcgggctcctgctccagcactttggacgcggaggccgggggcacgcggaccggcgacggcgacagagcgggcggtggcgcctgtgcgcccgcggaggagacggctgacgcggacggatcctcgtcgtcttcttcgtcttcgccgccagtggtggagacggacgagtgggcggagcccatcgcggcggcgagatctgacaccgggcggtgggagcgcgaggtgtag

SEQ ID NO: 121941 - DNA, 152 bp, Zea Mays
gaacaattgttacaatgagattttaaagttattaggagatgtgctcccaaagcccaataagttgtctaaagacatgtaccattcaaagacaattgtcaaaggtctcggtatggattatgaaaagattgatgtgtgcaaaaataattgtatgc

SEQ ID NO: 121942 - DNA, 198 bp, Zea Mays
tatatggtatactatgtgggcaacgttttgattgttggctattttatggttaatagccttgaagtctcatggcgtgaaaaggagccagggtctctgtttgttaacttaagcttgctgccagcactcctaaactcatcgtgcctgcataatttatcacccttgtcagatcttccccgttcgacaaacaaaacacatgta

SEQ ID NO: 121943 - DNA, 513 bp, Zea Mays
atagaacaaatggagaccttgaagatggtgaagaacatcgcgctgttgctgctgctgttcagcaattctaacccaggaaatgcagcaggtgcctgcagcctctcagacctcgccgtgacgcaggccgcggtgccctcgaaggcgaacgtctatgcggtgacggtggagaaccggtgcatctgcacgcaggcgaacgtcaagctggcgtgtgacgggttcagctcctccgtggccgtcgacccaggcgtgctcagcgtggacggcaagctctgcaccctcaacggcgggcgccccatcggcatgggcccggagtacgccgtcaagttctcctacgcctcgccgtcccagttcgccttcaagcccgtgtcgtcttccatcgcctgctcctgattaactcgtcgaggccggccttagctgttcgctctgccatactcacattcttttccacggcgattcgatgtttcgaacaatatattgagggtgaataattcatcgggagtgacatttttgatc

SEQ ID NO: 121944 - DNA, 3486 bp, Zea Mays
caccatccaagcatgctctctgtttgcactaatcagcagttgcagtttcccgcggcaacaccctttataagcctggacgccttgccatccattagcacacacgaaaagggagaaaccacgcagtctcacacaaggccgtgacgagcatggcggcggcgcaagcgcaaccggctgcgccgcacgcactgcatctgctgctgtcgcttaccatgttcctgctaacggcaggcgcgcagcggtccgactccgactccgacatcgagcgggacgcgctgcgggcgttcagggccagcgtgtcggacgcgtcgttgtccggtgcgctgcagtcgtggaacggcacgttgcacttctgccagtggcccggcgtggcgtgcacggacgacgggcacgtcacgtcgctgaacgtctccggcctggggctcaccggcacggtctccgcggccgtcggcaacctcacgtacctcgagtacctcgtcctcgagaagaaccagctctccgggcgcatcccagcgagcatcggcgggctgcggcgcctgcggtacctcagcctctgcgacaacggcggcatcagcggagagatcccggacagcctccgcggctgcaccggcctccaattcctgtacctcaacaacaacagcctcaccggcgccatccccgcgtggctcggcgcgctccccaacctcacctacctgtacctgcaccagaacgcgctgtccggcgagatcccgccgtcgctcggcagcctcacggggctgcaggccctcaggctcgacgagaactgcctgcgaggcagcctgcccgctggcctcgcggaacttccatccctccagacgttcagcgcgtaccagaacctgctggaaggggagatcccgccaggcttcttcaacatgtcgtcgctccagtttcttgtcctcaccaacaacgcgttccgtggcgtcctcccgccctacgccggcgcgcgcatggccaatctcagatccctgtacctcggcggcaacagcctgacgggccccatccccgcggcgcttggcaaggcctccagtctgacgtctatcgtcctagcaaacaacagcttcactgggcaggtgcctcccgagatcggcatgctctgcccacagtggctgtacatgtcgggcaaccagctgacggcgagcgacgagcaaggctgggagttcctggaccatcttaccaactgcggcagcctgcaggtcctcgcccttgacgacaacaagctcggtggccagttgccaggctccattgcccgcctcccgagggagattcaagcactgaacctagggaaaaaccgcatctccgggtcaatcccaccggccatcggcgacctcatcgggctcacaacgttgggcctcgaatccaacctcctcaacggcaccatcccagcagggattgggaacatgaagaacctcacgaagttggcgttgcaggggaaccggttgacggggccaatcccatcctccatcggcgacctcacccagctactggagcttgatctgagcagtaacgcgctgagtgggttcatccccgacactctagccaacctgaaccacctaacctcgctcaacctctcgggcaacgccctcaccggccaagtcccaagggaaatcttctccctgccgtccttgtcgtccgccatggacttgtctcacaaccagctagacggccctcttccctccgacgtctccagcctcaccaaccttgctcagctagcgctatccgggaacaaattctccggtcagctaccagaagagctggagcagtgccagagcctagagtttcttgatctggatttcaattccttccatggaagcatccctccgtcgctgagcaagctcaagggtctcaggagactcggcctggcgagcaacgggttgtccgggagcatcccaccggagctcggcaacatgtctggcctgcaggagctgtacctgtctagaaacgacctgacaggagccgtcccggaggaactggaggacctgagctccctggtcgagctggacttgtcctacaaccatctcgacggcagcgtgcccctgcgcggcatattcgccaacacttccgggctcaagatcgcagggaacgcgggactctgcggtggcgtcccggagctcgacctgccccggtgtccagcttccagggacacacgatggcttctccacatagtggtgcctgtcctaagcatcgctctcttctcggccatactcctcagcatgttccagtggtacagcaaagtggccggacaaacagataaaaaacctgatgacgcaacgccgccggcggatgacgtcctcggcggcatgatgaactatcagagaatatcgtacgccgggctggacagagctacaaacggcttcgcggacaccaacctgatcggcgtaggcaagttcgggtccgtgtacctgggtgccctgcccctggtgcccaagggcgctccggactcggcgcccgagaaggtcgccgtggccgtcaaggtgttcgatctctgccaggtcggtgcctccaagacgttcgtgtcggagtgcgaggcgctacggaacgtccggcaccggaacctcgtcaggatactcacctgctgcgtcggcgcggacgcgaggggcgacgacttcagagcgctggtgttcgagttcatgcccaactacagcctggacaggtggctgggcgtcaaccccaggtctgaagagccgaggatcgtgaagagcctgagcgtgatccagaggctcaacatcgccgtcgacatcgccgacgcgctctgctacctccacaccagctccgtaccgccgatcgtccactgcgacgtcaagcccagcaacgttctcctcggcgaggacatgagggcggtggtgggcgacttgggccttgcgaagctgctacatgagtccgggagccatgacacttgcaacgacacaagcacagttggcttgagaggcacggttgggtatatcccgccagagtacggcacgacagggaaggtgtccacgcacggcgacgtctacagctttgggatcacgctgctggagattttcaccgggaggtcaccgacggacgacgcgttcaaggacgggctgacgctaatggagttcgtggccgcgtcgttcccagacaagatcgagcaagtcctcgaccgggccctgctgccggtcgtccaaggcatcgatggccaggtgccctgcggctccgacggcggcggcgcgcatgtctcggaacgcggctgccttgtctccgctgtgagagtcgcgctcagctgcgcgcgtgcagtgccgctcgagaggatcagcatggcggatgcggccaccgagttgcgctccatcagggacgcttgttgtgcccattcgactggacaataaggtatacaggctcatgtagaagtgagttcgatttcttgctgaactgtgcgttacatattgaaattaaaattgaggggggaaatcaaactgctctcttacataagcaggattaaccatcctgtttttt

SEQ ID NO: 121945 - DNA, 124 bp, Zea Mays
cagacataaatagccaacacaaacataaaaccgtgaccacaaacaaaaatatccatcacaaacataagtgttcaacacaagtattaaacacaaacataagtctcaaacgtcgcaagctctcaca

SEQ ID NO: 121946 - DNA, 1916 bp, Zea Mays
atgagtggtggacaacatccagctgaaatgactggttccgaccacgctgagtgtcaccgtcgcagtgatttcatttgcatgtcctccaacactcgccgtacgttacgcttacacatttatcatccttgattcatgtccacgtcatacatggctcactagaatataccaacgcctgtacagactgtaccgtatgtgctctatagaatagaactgtgagaaagccacgtcagttctagtgccatggctgcagcagcgccgcacttcgtgctcgtgccgatgctggcgcagggccacttgctccccatgctggacctggcgcgcctcatcgccagccacggcgctcgtgccacggtggtgctgacgcccatcaacgccgcgcgcaacagggccttcctggagcaggccgcgcgggcggggctcaccatcaacttcgccgagctcgcgttcccggggccagcgctcggcctcgccgcgggctgcgagagggtcgacatgctggacgacatctccctcatcatcccgttctacgatgccgtgtggctgctcgccgagccgctcgaggcgtacctccgctcgctgccccggctgccggactgcctcgtctccgactcgtgcatgccgtggactgccagcgtcacgcggcggcacggcatccttcggttcgtggtccatttcccgtccgcgttctacatcctcgccgcgcacatcctcgaaaagcgcggcctctacgaccgcgccgacgacgacgacgacttcgaaccgttcgaggtgccggagttccccgtacgcgccgtggtgagcagggcgacggcgcaagggctcttccagtggcctgcaggcatggagaggttccggcgtgacacgctcgatgccgaggccaccgccgacgggatactgttcaacacgtgcgccgccctggagggcgcgttcgtggagcgcctcgcttcggagctcggcaagaagatttgggtggtcgggccgctgtgcctcctcagttccgactccgacgccggcgcgatggccgggagaggcaaccgcgcggcggtggacgccgaccgaatcgtgtcctggcttgacgcgcggccggcggcgtccgtgctctacatcagcttcggtagcatcgcccgtctgttcccggctcaggtcgccgagctcgccgccggactggaggcgtcgcgccggccgttcatctggtcggccaaggagacggcgcccgccctcgacgcggagttcgaggagcgcgtgaaggaccggggcctcgtcgtccgtgggtgggcgccgcagatgaccatcctgtcgcaccctgccgcgggcggcttcctgacgcactgcggctggaactccatcctggagagcctctgctacggcgtgccgctcatgacctggccgcagttcgtcgaccagttcctgaacgaggcgttgatcgtggacgtgctcggcaccggcgtccgctccggcgccaaggtgccggcgacgcacgtgacggtcgttaagccaggggaggtgctggaggtgcaggtctggagggacggcgtcgacagggcggtcaccgacctcatggacgagggccccgcgggcgcggcgaggcgggcgagggccaaggagctcgggcaacagatgagggccgcaatggcgaagggtgggtcgtcggacaccgatgtgagggacttggttcgccacgtcgttgaggtcgcgcggaaaaagggggagcacgaggacacagctcttgcagtcttgctggagtcgagcacgtgagcaagagcaaggaaaagacaatgaaaggcactggtggcaaacactactgttgaaattcgtgtggtactatcgttctcgccagcttcaaagagaatctctcgagtgttagctggtagccacgcgaaaaaaattctctggggaagtaaaaccaccccacacat

SEQ ID NO: 121947 - DNA, 3325 bp, Zea Mays
atgtcgccgtcaattctgttgctgctgttgccctatgtcctccaactgatgccaacttcatttgctcaagtatcgacgttaccattaccattcggcaatgagactgccactgacagggacgccctgctccagttcaaggcaagcctgagccagcagtcgcccacacttgtctcatggaacaaaactagtgatttctgccactggacaggggttacctgcagccttaggcacaagggaagggtgtcagctctgaacctatcgtcggcagggcttgtcggctccctctcccctgccatcggaaacttaacattcttgaagatcctcgacctcagctcaaataatctgcagggcgggattccatcgaccattggccgccttcggcggttgcagtatctggtttttactggaaactcacttcatggtggaatcactgatggattaagtaactgcactggtcttgtaatcatctttcttggcaacaaccatcttactggggaaatcccctcttggcttggtggttttccaaagcttgcggctttggacttgtcaaaaaacaatttgaccggcagcatcccgccatccctgggcaatctcacaagcctgcaggagctgtatcttcagattaaccagcttgagggttccatcccaaaagagcttggaaggctcaagaacgtccagtggtttgcgttgtttgtgaaccacctctcgggtgaggtcccggaagctgtgttcaacctatcatcagtggttgcgttcggtgtggatcaaaatgatctgcacggtacactgccatccaactggggaaacaaccaaccagaccttgagttcatctacctcgcaattaatcacttcacagggaatgtcccggcctcccttgccaatgcaaccatgatggacaccatagacctgagtgtcaacaatttcactggaaggatgccaccggagataggaacactttgcccaagaatattttcctttgactcaaaccagattgaggcaagcgccacggagggctgggagttcgtcacgctcttgaccaactgcaccaggctacgcgtgcttagcttccgcaacaatatgcttgcaggtgagttgccaccctctgtcggaaacttatcatcaacacatctgcaggtgctttacactggatggaacgagatctatgggaacataccacctggcattagtaatcttgtaaacttgcagaagcttttcctcagccagaaccatttcaccggtgctctgccaaacacaattggtcggctgaaaatgatgcgggctttgggaatcgatggcaacctgctgtcggggacaattccaccctcaatcggtaacctaacactgcttcagataatcactatggacaacaacaatcttgaggggtctcttccttctagcattagcaacctacagatgttgagcatcgcaaccctctcgcgcaatgcatttgcaggtccaattcccaagcaaatttttaacctttcatctctgtcctacatccttgatttgtctgacaaccttttcaacggctcgcttccacctgaagttggtcgccttactaagcttgtgtatttaaatatctccagaaataacctatctggttcactacccgacctcagcaactgccaaagcttgcttcagctccatttggatggtaactccttcagcggaagcctccctgcgtctattactgaaatgtatggtttggtagttctgaatttgacagagaactccttgtcgggtgcaattcctcaagagtttggacgcatgaagggcttggaagaactgtatcttgcgcacaacaacttgtctgggcagattccgacgaccttgcagaatatgacctccttgtcccaacttgacatttctttcaaccatctcagtggccaagttcctatgcaaggcgtgtttgccaaatcgacggggttcttgtttgttggtaacgataggctgtgtggcggtgtgcaggaactacatctgcctgcctgtccagtccattccaggaagcatagggacatgaaaagtcgtgtagttctcgtaatcataatctctactgggagccttttttgtgtgatgctggtgcttctctccttctattggagaaggaaaaagggacctcgtgctacagcaatggcaggggcagccgtctctttgttggatgataaatatcctaaagtttcttatgccgagctgttccgaggaactaatggcttttctgatggcaatttgattgggagaggaagatacgggtccgtatataagggcacactgtcgctgacaaacgtagaaactcaagtagctgttaaggtttttgatctgcagcagtcaggttcctccaaaagctttgtggtcgagtgtgaagctcttaggaagatccgccaccgcaacttgatcagcgtcataacctgctgctctagcactgactcggagcagaataatttcaaagccatcgtgttcgagttcatgccgaaccagagccttgacaagtggctacatgaccttgatcctgattcagatgcgtccggacgtgtaccaggcctgacgctactgcagagattgaacattgctgtcaatgtcgccgacgctatggactatttgcataacaactgcgagcccccaatagtccactgcgacctgaagccgggcaacgttcttcttaacgcggactttgttgcctgtgttggagacttcggcattgcaaagattctttcagattcagatggtgatcctgtgaccaattcgagtaccttcaccggaataagaggaacagttggatatgtgcctccagaatacggggagtgccgccaggtctcctcgtgcggagatgtcttcagctttggagtcacgctccttgagatgttcacagggaaggcccccaccgacgccatgtttgaggacggattgaccttacagggcttcgtggagatagcgtttccagagaagctgatggacatcgttgatccagtactgctgtccactgatgagaggttcgcaagaaagccgcgacacagaagcgttggaggggaagagattgagaacgccatagcttctgtcactaagctcgcgctgtcctgcaccaagctaacaccatcagagagaaagcccatgggtgatgccgcagccgagatgcgcaagataagggactgctatctcgcagacctaacaagggcaaacaattaagtgatcatatatgtaactgataggggacaagttttgcactctatttatgtattttagacatacagtatgctgctgaactggcttggtgccctgcccccagcattgccgagactattttgttttcattagaactttggtttcattg

SEQ ID NO: 121948 - DNA, 1313 bp, Zea Mays
cttcttcatcccagcgctcagctgctcagccctgctcctcccgcacgcgctccttcatcctccctgccgcgacaagcttctgctccagccatggccgcgccctgggatttgccggagctttgtcgcgcccggcctgctcctctgccccagctcgtgttgctcccttccattgcggctgagctctctagctcggattccgctcggctgaccgcgcagctcctgcgcgtgcttcctctctgcttctctctccctctcggcgctctgctcccatgccgcgcgcccctgtcctatttccctgcgcgccgccgtgccctcagctcgccggctgcgacccctgctcggggtttcctggtgccgtgctactgcgcgcgctcgctccagctcgaatttcctctgccaagccagattcctctacgctgaggccctgctcgaccgcgcgtccttgggttccagctcgccgtcgaagctctcctgccgcgcacggctcccatggcgcgcctttgccgaactcgtggtcgcggtctcgtcttgctgccgcagccgcgcctactgccgcgcatggcctgctcccttgtgcgcgctctgcttcctcgccgagctcgtccctgcgtgccgaggtcgcgcgcagctttcccagctcgtcggtgttcccagctcgccctgtctgcgcgccgcgctcccttgtcgtggttttctgcttccttgtcgcgcgcgcagcgtttcgttgtccctcgtcgtgccgagttctcctctgcacgcagtcgcgtcttgtttcctgcttgccagtgcgctctctcggctcgctcggctttaattcccaatcgcgttgtcaacctcgtcgttcgccgtcgttcgtcgtcctccagtcccggttcgacccatccgtgcgttcgctcctcatccatcgggcttcgtgtgtgcttgtcgtttgccgttgagtcgtcgaacccgtcgtcccttgctcaacccccacctcgccagctcgctttaaacacgatctcgtcgtctgcaagtcaccaagaaactccatgaatcgggtgaagacgaagcaagcagcgtggtgttcaccaagtgcgcgacaaaaagctcgaacatcctgcgcgattcaagtttgattcatcaaaattatttagtcgaggagaagatcttcagcaattgattaccgaagaaagaagacccctggatgacgtcaaccggaactgtagtcgtgcttgcgactatcgcgtcgaattagttagggtaagcaaatttgttattcatattagcggattgatggatggtttgactaggtaaaatatttattagattgtctg

SEQ ID NO: 121949 - DNA, 228 bp, Zea Mays
gtgacggtgcgcaacacctgccgctgcgcccagtccgacgtgaaggtggactgcaagggcttcaacaccaccttgtccgtcgacccggcgaagctcaaggagatcggcggcggggtgtgcctcatcaacggcggcgccccgcttgcgccggggcagggcgtcaccttcagctacgcctggagcaaccagttcgggttccggccggtctcgtccaccgtgacgtgctag

SEQ ID NO: 121950 - DNA, 713 bp, Zea Mays
cataccaacagttcatgacgaacaattcatcacaacatggacaacggcttcacaaagtcaatagcataaacataccaagatgacatgaacacacattagaatgacagagcctcgatgctaaccacagagttcttcttataccaaaaaaaaaaaatcacattgcatctacaattctatgggagaaactgcatcttatatgcgcgccatctccacaaacagtttactgcaccatgaagcacactagcttcacataattaattccatgaaacatataccgataaccaatataagcatatacatagtaatgctagttgctaattgctaccgaaaacgcggagaattcatctaaattacgagctacaattcgtagtaactgattaacacatagatgcaaaggtacaattcttaccttgctgatcttgggcacgacggaccggagcatgtagagccggtcattaagcttcttccggcgacggcgctctgccatgaggttcttggccggcaaccccttcctcttacccttcccgtcgcccgtggcgccgccagtcaccgtgctgttggcgttggagtccttgccgtccttcttcccactgtcctcaacgcccctggcgtcctccgagtcgtagttgagcccggacgcgtcgatgctcccgccgtcgtcgtcgtcggcgtcgtccagcaccgtgtcaccgccgccgcccgaggaagccccc

SEQ ID NO: 121951 - DNA, 2477 bp, Zea Mays
gtaaacttccccttagctacattgttctttcttttctctctctctctgtctctttttcagcggtcttgttgtcctagctcacggcatcacgccgccatggaacccagcggactgcaggagcacggacttgatctcctccggcagaagcccagggccttccttgcacagctgcgacgaggaagacgtacggcttccgagtggcctttaccgccgtccttatggatacctacgcaggtgtcgggttctggcagcgaggagaaagatgtgtgcaattgtatttgtacattacctcggccttgaagatgtccaaggaaaacccattgaagcaactgatgacagcttgctggacatcgaggccgaggccttcgatcgctctcatggcagagagcaggagaccgggcctgcgagcgcacagcatgtggatgttcactgcccggccttccctcatcctcacctcaacctgttgcagcaagcaatagaaatgccaccagtcagccagatgcttcaaccactatgccgaccatatgaaggcaagcattatgccaatgaagtgagcatatactgaccctcggttgctgagaagtagggctaggcaatgcgcttgggcacagctcttccttcacgcgagacggtaaagtgggcagcgtcggggtcagagggtggaagcttgtgggcgtcggaggcagcgaggccgtggaaggggacgactccagatcattctgaagatcgttgatcttctgcagcagctccttcaggtactcgattgcgtcgccgagaatggaggccctgtccatctaccagttgccaacagaaacaatcagttcgttgcccggtcaaaaggaggaagtaacactagtgatacctatcaatataatgaagtatgtaccaataagactaaggtgccgtttggttcacgtaattgaaacgtgataggtaacatataacgttaaatcatgtatgtttaagtccaacgtaatcaaatatcacactaaaaatgtataccgacctattcaaacctattaccgttgtcactcgagcataaatcattaccattgtcatttacattacagttcgtgacccaacagcacctaaaggtgaagtactgagcacaaaacaggtaactggaactagttatgcagaaaacactattacaccataactgatgcctttctgttctatggcacacaccccaagaaaaaaaaactcttcctttgatctcaaccaaactgtaacaacagagatgcagggcagatcttttatttgtatttgttgtgcaagctgttacttggttgactcgaaacagagaaagaggccctggaatcaggcaaagaacactgtgatggatagtgatctgtatggaggacaactcatgaacagagatcatggacagacgattgaaatctaaaattttgctaagttagtcatgatgaccctggacaaagaggcacccttaacagcagcaataactgcaagaaatagaacagtaggtacttttctaagagaaagcaagagatgcatataataaaagtcacaactgttaggttgggatcctaaccgaagcactctacccatagtatcatcaaaacctaaacagaagctgaagtggcagatgctaatctatatagctttttgaactgaaggatgtgtagcttttagaacctagaaagcaaggttatgcctagatgaacatagaaaagtgttaaatggctaaatcatccgtatacatctgccatctaggtgaaatttgcacctgagatcgatgtgcataccaacagttcatgacgaacaattcatcacaacatggacaacggcttcacaaagtcaatagcataaacataccaagatgacatgaacacacattagaatgacagagcctcgatgctaaccacagagttcttcttataccaaaaaaaaaaaatcacattgcatctacaattctatgggagaaactgcatcttatatgcgcgccatctccacaaacagtttactgcaccatgaagcacactagcttcacataattaattccatgaaacatataccgataaccaatataagcatatacatagtaatgctagttgctaattgctaccgaaaacgcggagaattcatctaaattacgagctacaattcgtagtaactgattaacacatagatgcaaaggtacaattcttaccttgctgatcttgggcacgacggaccggagcatgtagagccggtcattaagcttcttccggcgacggcgctctgccatgaggttcttggccggcaaccccttcctcttacccttcccgtcgcccgtggcgccgccagtcaccgtgctgttggcgttggagtccttgccgtccttcttcccactgtcctcaacgcccctggcgtcctccgagtcgtagttgagcccggacgcgtcgatgctcccgccgtcgtcgtcgtcggcgtcgtccagcaccgtgtcaccgccgccgcccgaggaagccccc

SEQ ID NO: 121952 - DNA, 751 bp, Zea Mays
gtaaacttccccttagctacattgttctttcttttctctctctctctgtctctttttcagcggtcttgttgtcctagctcacggcatcacgccgccatggaacccagcggactgcaggagcacggacttgatctcctccggcagaagcccagggccttccttgcacagctgcgacgaggaagacgtacggcttccgagtggcctttaccgccgtccttatggatacctacgcaggtgtcgggttctggcagcgaggagaaagatgtgtgcaattgtatttgtacattacctcggccttgaagatgtccaaggaaaacccattgaagcaactgatgacagcttgctggacatcgaggccgaggccttcgatcgctctcatggcagagagcaggagaccgggcctgcgagcgcacagcatgtggatgttcactgcccggccttccctcatcctcacctcaacctgttgcagcaagcaatagaaatgccaccagtcagccagatgcttcaaccactatgccgaccatatgaaggcaagcattatgccaatgaagtgagcatatactgaccctcggttgctgagaagtagggctaggcaatgcgcttgggcacagctcttccttcacgcgagacggtaaagtgggcagcgtcggggtcagagggtggaagcttgtgggcgtcggaggcagcgaggccgtggaaggggacgactccagatcattctgaagatcgttgatcttctgcagcagctcct

SEQ ID NO: 121953 - DNA, 3259 bp, Zea Mays
gcaccaccaccaccgtgccgcgagcgaagtgacgtcgcgttcacttccctcataaaatctcgccccccactctctctctacccgagcccagcagtaatttttttttggggaaggtgaagcgagaggagcaggaggagagaaaggggaacgaggccggccgcgaatcggaggggaattcggggggcggggctcggtccggccggaaattcgcgcgattcgggcgcgggttagcggaaggggagggtgagcgcgcgcgcggaggcgccgcggatgtgaagatctggtgctcggcgggatgacttcttcggcggcggccgcggctgctgccgcccaggtggcgggaggaggtggaggcggcgagggagatgccgccgctgcggcgcgaggcggaggcggaacggaggacggcatgtacacggagctgtggaacctctgcgccggcccgctggtcacggtgcccagggtcggggacaaggtgtactacttcccgcagggccatatcgagcaggtggaggcgtcgaccaaccaggtggctgagcagcacatgcaattttacgatctcccgtggaagatcctgtgtgaggtcatgaacgttgaattgaaggctgagccagacaatgatgaggtttatgcccagctcactctgctacctgaatcaaagcagccagaggagaatggctctagtgaggagatgcctgcttcacctcctgctgcacttgcaaggccacgcgtgcactccttctgcaagacattgacagcctctgataccagcactcatggtggattctcggtgctgcggcgccatgcagatgagtgtcttccgccactggatatgacccgtcaacctccaacacaagagcttgtagccaaggacctgcatggtgtggaatggcgctttcgccacatattcagaggtcaaccacgaaggcatcttttgcagagtggctggagtgtttttgttagtgccaaacgtcttgttgctggcgatgccttcatctttctaagaggtgatagtggggagcttcgtgtaggagtcaggcgtgccatgaggcagcaagcaaatgttccgtcttcagtaatatcaagccacagcatgcatcttggtgttcttgctacagcatggcatgctgttaacactgggaccatgtttactgtctactacaagcctaggacaagtccagctgagtttgttgttccctgtgatcgctatatggaatcactgaaacgaaattaccctatagggatgagatttaaaatgaggtttgaaggtgaagaggctccagaacaaaggttcactgggaccattgttggaaatgtggatcctgatcaagctggatgggctgaatctaaatggcgttacctcaaggtgaggtgggatgaagcttcctccattccacgtcctgaaagggtttctccctggcaaatagaacctgcagtcagccctccccctatcaacccacttccagtgcacagacccaagagacctcgctctaatgctgtagcttctctgcccgagtcttcagctccaacaaaagaagctgctccaaaggtcacattagagactcaacaacatgccctgcaaaggcccttgcagacccaggataatgtggccccgaaaagtgtttttggtgataacagtgaattggactctgctcataagtcctccctgcgaccgtcaggttttgatctggacaagagcaccattggcatgcagaggaagctgggttcagatatttggatgcgaatgaacagacctgatggttacagtgaaatgttatcgggatatcaaccacctaatgaaggtgcacggaattcgcagggtttctgttctttacctgatcagattgccgctggacgtcctaatttctggcacactgtaaacgctcattaccaagaccagcaaggcaatcacaatctgttccctggttcatggtccatgatgccttcaagtactggctttgggatgaacagacagagctatccaatgatccaggaagtcggtgggatgtctcagagttgtacaaacaccaagtttgggaatggagtttatgctgcactacctggccgaggcattgatcgatacccatctggatggtttgggcacacgacacccggtggtcgcgtggacgatgcccagccacgcgtgattaagcctcaacctttggtccttgctcacggcgaagctctgaaaatgaagggcaactcgtgcaagctttttggaatccatctcgacagcccagccaaatctgaacctttgaagtctccgccaagcgttgccacaccggcagctgagaagtggatggcagacggaatcgacgcagacaaaagccctgagccgcacaagacgccaaagcaactcggtgctacacaggtggatcctgtcccagagagatgcccacaagcttcaaggggcacacagtgcaaatcacaaggcgggtcgactaggagctgcaagaaggtccacaagcaaggaatggcgctgggcaggtccgtggaccttaccaagttcaacggctacacggagctggtggcggagctggacgagatgttcgacttcaacggcgagctgaaaggctgtagcaaggagtggatggtcgtgtacaccgactacgaaggcgacatgatgctggtcggggacgacccctggaatgagttctgcagcatggtgcacaagatcttcgtgtacacgagggaggaggtccagcgcatgaacccgggcgccctgaactcgaggccggaggacagcggcctcgccaattcgacggagaggggctccgcatctactgctgctgctagagaggcacccggctaccagtccgcctcgtcgcttaactccgacaactgctgatgccttggcagctagctggtcgtcccaagtagtagagaacaaggcaaatgtatccatagatctccttgtagcggagcttaatgcctttttttcccctttctaatatgcattggatgagcccgtagcgcaccgtagtagtatctaaagctggtgttctgagttggttggaccttcctgcagttttggtttctccttctgatgtggcaagttttagctggtcgcacctacctaatgtatgcttagcaaacgaagtcccactaagcgctgtacataactgcccctccctgcatcaactctaatatatcatctgcttaatcgtcacccctgggcccccgtgctggttgctcaagatcccagctgcttgttgtggcgcttggtttggttcgttgtcggccgtggctcatgtttgtt

SEQ ID NO: 121954 - DNA, 3256 bp, Zea Mays
gcaccaccaccaccgtgccgcgagcgaagtgacgtcgcgttcacttccctcataaaatctcgccccccactctctctctacccgagcccagcagtaatttttttttggggaaggtgaagcgagaggagcaggaggagagaaaggggaacgaggccggccgcgaatcggaggggaattcggggggcggggctcggtccggccggaaattcgcgcgattcgggcgcgggttagcggaaggggagggtgagcgcgcgcgcggaggcgccgcggatgtgaagatctggtgctcggcgggatgacttcttcggcggcggccgcggctgctgccgcccaggtggcgggaggaggtggaggcggcgagggagatgccgccgctgcggcgcgaggcggaggcggaacggaggacggcatgtacacggagctgtggaacctctgcgccggcccgctggtcacggtgcccagggtcggggacaaggtgtactacttcccgcagggccatatcgagcaggtggaggcgtcgaccaaccaggtggctgagcagcacatgcaattttacgatctcccgtggaagatcctgtgtgaggtcatgaacgttgaattgaaggctgagccagacaatgatgaggtttatgcccagctcactctgctacctgaatcaaagccagaggagaatggctctagtgaggagatgcctgcttcacctcctgctgcacttgcaaggccacgcgtgcactccttctgcaagacattgacagcctctgataccagcactcatggtggattctcggtgctgcggcgccatgcagatgagtgtcttccgccactggatatgacccgtcaacctccaacacaagagcttgtagccaaggacctgcatggtgtggaatggcgctttcgccacatattcagaggtcaaccacgaaggcatcttttgcagagtggctggagtgtttttgttagtgccaaacgtcttgttgctggcgatgccttcatctttctaagaggtgatagtggggagcttcgtgtaggagtcaggcgtgccatgaggcagcaagcaaatgttccgtcttcagtaatatcaagccacagcatgcatcttggtgttcttgctacagcatggcatgctgttaacactgggaccatgtttactgtctactacaagcctaggacaagtccagctgagtttgttgttccctgtgatcgctatatggaatcactgaaacgaaattaccctatagggatgagatttaaaatgaggtttgaaggtgaagaggctccagaacaaaggttcactgggaccattgttggaaatgtggatcctgatcaagctggatgggctgaatctaaatggcgttacctcaaggtgaggtgggatgaagcttcctccattccacgtcctgaaagggtttctccctggcaaatagaacctgcagtcagccctccccctatcaacccacttccagtgcacagacccaagagacctcgctctaatgctgtagcttctctgcccgagtcttcagctccaacaaaagaagctgctccaaaggtcacattagagactcaacaacatgccctgcaaaggcccttgcagacccaggataatgtggccccgaaaagtgtttttggtgataacagtgaattggactctgctcataagtcctccctgcgaccgtcaggttttgatctggacaagagcaccattggcatgcagaggaagctgggttcagatatttggatgcgaatgaacagacctgatggttacagtgaaatgttatcgggatatcaaccacctaatgaaggtgcacggaattcgcagggtttctgttctttacctgatcagattgccgctggacgtcctaatttctggcacactgtaaacgctcattaccaagaccagcaaggcaatcacaatctgttccctggttcatggtccatgatgccttcaagtactggctttgggatgaacagacagagctatccaatgatccaggaagtcggtgggatgtctcagagttgtacaaacaccaagtttgggaatggagtttatgctgcactacctggccgaggcattgatcgatacccatctggatggtttgggcacacgacacccggtggtcgcgtggacgatgcccagccacgcgtgattaagcctcaacctttggtccttgctcacggcgaagctctgaaaatgaagggcaactcgtgcaagctttttggaatccatctcgacagcccagccaaatctgaacctttgaagtctccgccaagcgttgccacaccggcagctgagaagtggatggcagacggaatcgacgcagacaaaagccctgagccgcacaagacgccaaagcaactcggtgctacacaggtggatcctgtcccagagagatgcccacaagcttcaaggggcacacagtgcaaatcacaaggcgggtcgactaggagctgcaagaaggtccacaagcaaggaatggcgctgggcaggtccgtggaccttaccaagttcaacggctacacggagctggtggcggagctggacgagatgttcgacttcaacggcgagctgaaaggctgtagcaaggagtggatggtcgtgtacaccgactacgaaggcgacatgatgctggtcggggacgacccctggaatgagttctgcagcatggtgcacaagatcttcgtgtacacgagggaggaggtccagcgcatgaacccgggcgccctgaactcgaggccggaggacagcggcctcgccaattcgacggagaggggctccgcatctactgctgctgctagagaggcacccggctaccagtccgcctcgtcgcttaactccgacaactgctgatgccttggcagctagctggtcgtcccaagtagtagagaacaaggcaaatgtatccatagatctccttgtagcggagcttaatgcctttttttcccctttctaatatgcattggatgagcccgtagcgcaccgtagtagtatctaaagctggtgttctgagttggttggaccttcctgcagttttggtttctccttctgatgtggcaagttttagctggtcgcacctacctaatgtatgcttagcaaacgaagtcccactaagcgctgtacataactgcccctccctgcatcaactctaatatatcatctgcttaatcgtcacccctgggcccccgtgctggttgctcaagatcccagctgcttgttgtggcgcttggtttggttcgttgtcggccgtggctcatgtttgtt

SEQ ID NO: 121955 - DNA, 3336 bp, Zea Mays
gcaccaccaccaccgtgccgcgagcgaagtgacgtcgcgttcacttccctcataaaatctcgccccccactctctctctacccgagcccagcagtaatttttttttggggaaggtgaagcgagaggagcaggaggagagaaaggggaacgaggccggccgcgaatcggaggggaattcggggggcggggctcggtccggccggaaattcgcgcgattcgggcgcgggcgccgcggatgtgaagatctggtgctcggcgggatgacttcttcggcggcggccgcggctgctgccgcccaggtggcgggaggaggtggaggcggcgagggagatgccgccgctgcggcgcgaggcggaacggaggacggcatgtacacggagctgtggaacctctgcgccggcccgctggtcacggtgcccagggtcggggacaaggtgtactacttcccgcagggccatatcgagcaggtggaggcgtcgaccaaccaggtggctgagcagcacatgcaattttacgatctcccgtggaagatcctgtgtgaggtcatgaacgttgaattgaaggctgagccagacaatgatgaggtttatgcccagctcactctgctacctgaatcaaagccagaggagaatggctctagtgaggagatgcctgcttcacctcctgctgcacttgcaaggccacgcgtgcactccttctgcaagacattgacagcctctgataccagcactcatggtggattctcggtgctgcggcgccatgcagatgagtgtcttccgccactggatatgacccgtcaacctccaacacaagagcttgtagccaaggacctgcatggtgtggaatggcgctttcgccacatattcagaggtcaaccacgaaggcatcttttgcagagtggctggagtgtttttgttagtgccaaacgtcttgttgctggcgatgccttcatctttctaagaggtgatagtggggagcttcgtgtaggagtcaggcgtgccatgaggcagcaagcaaatgttccgtcttcagtaatatcaagccacagcatgcatcttggtgttcttgctacagcatggcatgctgttaacactgggaccatgtttactgtctactacaagcctaggacaagtccagctgagtttgttgttccctgtgatcgctatatggaatcactgaaacgaaattaccctatagggatgagatttaaaatgaggtttgaaggtgaagaggctccagaacaaaggtaagaaattttctggtgcaatagtagatattttctgcttcacctctattaaatttctgcttcaaatagttgatacctctattaaaattgacctgaaacattatatttctgtacattttaggttcactgggaccattgttggaaatgtggatcctgatcaagctggatgggctgaatctaaatggcgttacctcaaggtgaggtgggatgaagcttcctccattccacgtcctgaaagggtttctccctggcaaatagaacctgcagtcagccctccccctatcaacccacttccagtgcacagacccaagagacctcgctctaatgctgtagcttctctgcccgagtcttcagctccaacaaaagaagctgctccaaaggtcacattagagactcaacaacatgccctgcaaaggcccttgcagacccaggataatgtggccccgaaaagtgtttttggtgataacagtgaattggactctgctcataagtcctccctgcgaccgtcaggttttgatctggacaagagcaccattggcatgcagaggaagctgggttcagatatttggatgcgaatgaacagacctgatggttacagtgaaatgttatcgggatatcaaccacctaatgaaggtgcacggaattcgcagggtttctgttctttacctgatcagattgccgctggacgtcctaatttctggcacactgtaaacgctcattaccaagaccagcaaggcaatcacaatctgttccctggttcatggtccatgatgccttcaagtactggctttgggatgaacagacagagctatccaatgatccaggaagtcggtgggatgtctcagagttgtacaaacaccaagtttgggaatggagtttatgctgcactacctggccgaggcattgatcgatacccatctggatggtttgggcacacgacacccggtggtcgcgtggacgatgcccagccacgcgtgattaagcctcaacctttggtccttgctcacggcgaagctctgaaaatgaagggcaactcgtgcaagctttttggaatccatctcgacagcccagccaaatctgaacctttgaagtctccgccaagcgttgccacaccggcagctgagaagtggatggcagacggaatcgacgcagacaaaagccctgagccgcacaagacgccaaagcaactcggtgctacacaggtggatcctgtcccagagagatgcccacaagcttcaaggggcacacagtgcaaatcacaaggcgggtcgactaggagctgcaagaaggtccacaagcaaggaatggcgctgggcaggtccgtggaccttaccaagttcaacggctacacggagctggtggcggagctggacgagatgttcgacttcaacggcgagctgaaaggctgtagcaaggagtggatggtcgtgtacaccgactacgaaggcgacatgatgctggtcggggacgacccctggaatgagttctgcagcatggtgcacaagatcttcgtgtacacgagggaggaggtccagcgcatgaacccgggcgccctgaactcgaggccggaggacagcggcctcgccaattcgacggagaggggctccgcatctactgctgctgctagagaggcacccggctaccagtccgcctcgtcgcttaactccgacaactgctgatgccttggcagctagctggtcgtcccaagtagtagagaacaaggcaaatgtatccatagatctccttgtagcggagcttaatgcctttttttcccctttctaatatgcattggatgagcccgtagcgcaccgtagtagtatctaaagctggtgttctgagttggttggaccttcctgcagttttggtttctccttctgatgtggcaagttttagctggtcgcacctacctaatgtatgcttagcaaacgaagtcccactaagcgctgtacataactgcccctccctgcatcaactctaatatatcatctgcttaatcgtcacccctgggcccccgtgctggttgctcaagatcccagctgcttgttgtggcgcttggtttggttcgttgtcggccgtggctcatgtttgtt

SEQ ID NO: 121956 - DNA, 3569 bp, Zea Mays
gcaccaccaccaccgtgccgcgagcgaagtgacgtcgcgttcacttccctcataaaatctcgccccccactctctctctacccgagcccagcagtaatttttttttggggaaggtgaagcgagaggagcaggaggagagaaaggggaacgaggccggccgcgaatcggaggggaattcggggggcggggctcggtccggccggaaattcgcgcgattcgggcgcgggttagcggaaggggagggtgagcgcgcgcgcggaggcgccgcggatgtgaagatctggtgctcggcgggatgacttcttcggcggcggccgcggctgctgccgcccaggtggcgggaggaggtggaggcggcgagggagatgccgccgctgcggcgcgaggcggaggcggaacggaggacggcatgtacacggagctgtggaacctctgcgccggcccgctggtcacggtgcccagggtcggggacaaggtgtactacttcccgcagggccatatcgagcaggtggaggcgtcgaccaaccaggtggctgagcagcacatgcaattttacgatctcccgtggaagatcctgtgtgaggtcatgaacgttgaattgaaggctgagccagacaatgatgaggtttatgcccagctcactctgctacctgaatcaaagcagccagaggagaatggctctagtgaggagatgcctgcttcacctcctgctgcacttgcaaggccacgcgtgcactccttctgcaagacattgacagcctctgataccagcactcatggtggattctcggtgctgcggcgccatgcagatgagtgtcttccgccactggatatgacccgtcaacctccaacacaagagcttgtagccaaggacctgcatggtgtggaatggcgctttcgccacatattcagaggtcaaccacgaaggcatcttttgcagagtggctggagtgtttttgttagtgccaaacgtcttgttgctggcgatgccttcatctttctaagaggtgatagtggggagcttcgtgtaggagtcaggcgtgccatgaggcagcaagcaaatgttccgtcttcagtaatatcaagccacagcatgcatcttggtgttcttgctacagcatggcatgctgttaacactgggaccatgtttactgtctactacaagcctaggacaagtccagctgagtttgttgttccctgtgatcgctatatggaatcactgaaacgaaattaccctatagggatgagatttaaaatgaggtttgaaggtgaagaggctccagaacaaaggtaagaaattttctggtgcaatagtagatattttctgcttcacctctattaaatttctgcttcaaatagttgatacctctattaaaattgacctgaaacattatatttctgtacattttaggttcactgggaccattgttggaaatgtggatcctgatcaagctggatgggctgaatctaaatggcgttacctcaaggtgaggtgggatgaagcttcctccattccacgtcctgaaagggtttctccctggcaaatagaacctgcagtcagccctccccctatcaacccacttccagtgcacagacccaagagacctcgctctaatgctgtagcttctctgcccgagtcttcagctccaacaaaagaagctgctccaaaggtcacattagagactcaacaacatgccctgcaaaggcccttgcagacccaggataatgtggccccgaaaagtgtttttggtgataacagtgaattggactctgctcataagtcctccctgcgaccgtcaggttttgatctggacaagagcaccattggcatgcagaggaagctgggttcagatatttggatgcgaatgaacagacctgatggttacagtgaaatgttatcgggatatcaaccacctaatgaaggtgcacggaattcgcagggtttctgttctttacctgatcagattgccgctggacgtcctaatttctggcacactgtaaacgctcattaccaagaccagcaaggcaatcacaatctgttccctggttcatggtccatgatgccttcaagtactggctttgggatgaacagacagagctatccaatgatccaggaagtcggtgggatgtctcagagttgtacaaacaccaagtttgggaatggagtttatgctgcactacctggccgaggcattgatcgatacccatctggatggtttgggcacacgacacccggtggtcgcgtggacgatgcccagccacgcgtgattaagcctcaacctttggtccttgctcacggcgaagctctgaaaatgaagggcaactcgtgcaagctttttggaatccatctcgacagcccagccaaatctgaacctttgaagtctccgccaagcgttgccacaccggcagctgagaagtggatggcagacggaatcgacgcagacaaaagccctgagccgcacaagacgccaaagcaactcggtgctacacaggtggatcctgtcccagagagatgcccacaagcttcaaggggcacacagtgcaaatcacaaggcgggtcgactaggagctgcaagaaggtccacaagcaaggaatggcgctgggcaggtccgtggaccttaccaagttcaacggctacacggagctggtggcggagctggacgagatgttcgacttcaacggcgagctgaaaggctgtagcaaggagtggatggtcgtgtacaccgactacgaaggcgacatgatgctggtcggggacgacccctggaagtaagtaacgagtagtagcagccggacgtccgttgttctctcgtaaaagcccctgatgtgttgtgcgcgtcgacctggctgtgtgggcagtgagttctgcagcatggtgcacaagatcttcgtgtacacgagggaggaggtccagcgcatgaacccgggcgccctgaactcgaggccggaggacagcggcctcgccaattcgacggagaggggctccgcatctactgctgctgctagagaggcacccggctaccagtccgcctcgtcgcttaactccgacaactgctgatgccttggcagctagctggtaattgcgatcaacttggatagcagctggacctagtcctgatggttataataataataataataattctgaacgagttctccgctgttcttttggcaggtcgtcccaagtagtagagaacaaggcaaatgtatccatagatctccttgtagcggagcttaatgcctttttttcccctttctaatatgcattggatgagcccgtagcgcaccgtagtagtatctaaagctggtgttctgagttggttggaccttcctgcagttttggtttctccttctgatgtggcaagttttagctggtcgcacctacctaatgtatgcttagcaaacgaagtcccactaagcgctgtacataactgcccctccctgcatcaactctaatatatcatctgcttaatcgtcacccctgggcccccgtgctggttgctcaagatcccagctgcttgttgtggcgcttggtttggttcgttgtcggccgtggctcatgtttgtt

SEQ ID NO: 121957 - DNA, 3095 bp, Zea Mays
gcaccaccaccaccgtgccgcgagcgaagtgacgtcgcgttcacttccctcataaaatctcgccccccactctctctctacccgagcccagcagtaatttttttttggggaaggtgaagcgagaggagcaggaggagagaaaggggaacgaggccggccgcgaatcggaggggaattcggggggcggggctcggtccggccggaaattcgcgcgattcgggcgcgggttagcggaaggggagggtgagcgcgcgcgcggaggcgccgcggatgtgaagatctggtgctcggcgggatgacttcttcggcggcggccgcggctgctgccgcccaggtggcgggaggaggtggaggcggcgagggagatgccgccgctgcggcgcgaggtgagtcgtgctctcttggtgggcgtctccgtttgtctttgtttggcgggtttttgacgtgggtttggctgggcctttgctgctcgctcttgctcgcaggcggaggcggaacggaggacggcatgtacacggagctgtggaacctctgcgccggcccgctggtcacggtgcccagggtcggggacaaggtgtactacttcccgcagggccatatcgagcaggtggaggcgtcgaccaaccaggtggctgagcagcacatgcaattttacgatctcccgtggaagatcctgtgtgaggtcatgaacgttgaattgaaggctgagccagacaatgatgaggtttatgcccagctcactctgctacctgaatcaaagccagaggagaatggctctagtgaggagatgcctgcttcacctcctgctgcacttgcaaggccacgcgtgcactccttctgcaagacattgacagcctctgataccagcactcatggtggattctcggtgctgcggcgccatgcagatgagtgtcttccgccactggatatgacccgtcaacctccaacacaagagcttgtagccaaggacctgcatggtgtggaatggcgctttcgccacatattcagaggtcaaccacgaaggcatcttttgcagagtggctggagtgtttttgttagtgccaaacgtcttgttgctggcgatgccttcatctttctaagaggtgatagtggggagcttcgtgtaggagtcaggcgtgccatgaggcagcaagcaaatgttccgtcttcagtaatatcaagccacagcatgcatcttggtgttcttgctacagcatggcatgctgttaacactgggaccatgtttactgtctactacaagcctaggacaagtccagctgagtttgttgttccctgtgatcgctatatggaatcactgaaacgaaattaccctatagggatgagatttaaaatgaggtttgaaggtgaagaggctccagaacaaaggttcactgggaccattgttggaaatgtggatcctgatcaagctggatgggctgaatctaaatggcgttacctcaaggtgaggtgggatgaagcttcctccattccacgtcctgaaagggtttctccctggcaaatagaacctgcagtcagccctccccctatcaacccacttccagtgcacagacccaagagacctcgctctaatgctgtagcttctctgcccgagtcttcagctccaacaaaagaagctgctccaaaggtcacattagagactcaacaacatgccctgcaaaggcccttgcagacccaggataatgtggccccgaaaagtgtttttggtgataacagtgaattggactctgctcataagtcctccctgcgaccgtcaggttttgatctggacaagagcaccattggcatgcagaggaagctgggttcagatatttggatgcgaatgaacagacctgatggttacagtgaaatgttatcgggatatcaaccacctaatgaaggtgcacggaattcgcagggtttctgttctttacctgatcagattgccgctggacgtcctaatttctggcacactgtaaacgctcattaccaagaccagcaaggcaatcacaatctgttccctggttcatggtccatgatgccttcaagtactggctttgggatgaacagacagagctatccaatgatccaggaagtcggtgggatgtctcagagttgtacaaacaccaagtttgggaatggagtttatgctgcactacctggccgaggcattgatcgatacccatctggatggtttgggcacacgacacccggtggtcgcgtggacgatgcccagccacgcgtgattaagcctcaacctttggtccttgctcacggcgaagctctgaaaatgaagggcaactcgtgcaagctttttggaatccatctcgacagcccagccaaatctgaacctttgaagtctccgccaagcgttgccacaccggcagctgagaagtggatggcagacggaatcgacgcagacaaaagccctgagccgcacaagacgccaaagcaactcggtgctacacaggtggatcctgtcccagagagatgcccacaagcttcaaggggcacacagtgcaaatcacaaggcgggtcgactaggagctgcaagaaggtccacaagcaaggaatggcgctgggcaggtccgtggaccttaccaagttcaacggctacacggagctggtggcggagctggacgagatgttcgacttcaacggcgagctgaaaggctgtagcaaggagtggatggtcgtgtacaccgactacgaaggcgacatgatgctggtcggggacgacccctggaagtaagtaacgagtagtagcagccggacgtccgttgttctctcgtaaaagcccctgatgtgttgtgcgcgtcgacctggctgtgtgggcagtgagttctgcagcatggtgcacaagatcttcgtgtacacgagggaggaggtccagcgcatgaacccgggcgccctgaactcgaggccggaggacagcggcctcgccaattcgacggagaggggctccgcatctactgctgctgctagagaggcacccggctaccagtccgcctcgtcgcttaactccgacaactgctgatgccttggcagctagctggtaattgcgatcaacttggatagcagctggacctagtcctgat

SEQ ID NO: 121958 - DNA, 2681 bp, Zea Mays
gcaccaccaccaccgtgccgcgagcgaagtgacgtcgcgttcacttccctcataaaatctcgccccccactctctctctacccgagcccagcagtaatttttttttggggaaggtgaagcgagaggagcaggaggagagaaaggggaacgaggccggccgcgaatcggaggggaattcggggggcggggctcggtccggccggaaattcgcgcgattcgggcgcgggttagcggaaggggagggtgagcgcgcgcgcggaggcgccgcggatgtgaagatctggtgctcggcgggatgacttcttcggcggcggccgcggctgctgccgcccaggtggcgggaggaggtggaggcggcgagggagatgccgccgctgcggcgcgaggcggaggcggaacggaggacggcatgtacacggagctgtggaacctctgcgccggcccgctggtcacggtgcccagggtcggggacaaggtgtactacttcccgcagggccatatcgagcaggtggaggcgtcgaccaaccaggtggctgagcagcacatgcaattttacgatctcccgtggaagatcctgtgtgaggtcatgaacgttgaattgaaggctgagccagacaatgatgaggtttatgcccagctcactctgctacctgaatcaaagccagaggagaatggctctagtgaggagatgcctgcttcacctcctgctgcacttgcaaggccacgcgtgcactccttctgcaagacattgacagcctctgataccagcactcatggtggattctcggtgctgcggcgccatgcagatgagtgtcttccgccactggatatgacccgtcaacctccaacacaagagcttgtagccaaggacctgcatggtgtggaatggcgctttcgccacatattcagaggtcaaccacgaaggcatcttttgcagagtggctggagtgtttttgttagtgccaaacgtcttgttgctggcgatgccttcatctttctaagaggtgatagtggggagcttcgtgtaggagtcaggcgtgccatgaggcagcaagcaaatgttccgtcttcagtaatatcaagccacagcatgcatcttggtgttcttgctacagcatggcatgctgttaacactgggaccatgtttactgtctactacaagcctaggacaagtccagctgagtttgttgttccctgtgatcgctatatggaatcactgaaacgaaattaccctatagggatgagatttaaaatgaggtttgaaggtgaagaggctccagaacaaaggttcactgggaccattgttggaaatgtggatcctgatcaagctggatgggctgaatctaaatggcgttacctcaaggtgaggtgggatgaagcttcctccattccacgtcctgaaagggtttctccctggcaaatagaacctgcagtcagccctccccctatcaacccacttccagtgcacagacccaagagacctcgctctaatgctgtagcttctctgcccgagtcttcagctccaacaaaagaagctgctccaaaggtcacattagagactcaacaacatgccctgcaaaggcccttgcagacccaggataatgtggccccgaaaagtgtttttggtgataacagtgaattggactctgctcataagtcctccctgcgaccgtcaggttttgatctggacaagagcaccattggcatgcagaggaagctgggttcagatatttggatgcgaatgaacagacctgatggttacagtgaaatgttatcgggatatcaaccacctaatgaaggtgcacggaattcgcagggtttctgttctttacctgatcagattgccgctggacgtcctaatttctggcacactgtaaacgctcattaccaagaccagcaaggcaatcacaatctgttccctggttcatggtccatgatgccttcaagtactggctttgggatgaacagacagagctatccaatgatccaggaagtcggtgggatgtctcagagttgtacaaacaccaagtttgggaatggagtttatgctgcactacctggccgaggcattgatcgatacccatctggatggtttgggcacacgacacccggtggtcgcgtggacgatgcccagccacgcgtgattaagcctcaacctttggtccttgctcacggcgaagctctgaaaatgaagggcaactcgtgcaagctttttggaatccatctcgacagcccagccaaatctgaacctttgaagtctccgccaagcgttgccacaccggcagctgagaagtggatggcagacggaatcgacgcagacaaaagccctgagccgcacaagacgccaaagcaactcggtgctacacaggtggatcctgtcccagagagatgcccacaagcttcaaggggcacacagtgcaaatcacaaggcgggtcgactaggagctgcaagaaggtgtgtttttttctctcgttactactatgccaagcatctcctatgttcgtttgcaatgttccaaggctacaagagaaacttgcaaagcctctttagcttcctagcgcaccacgcagacataactaaatggaacctccatcacgtgcgtatttactccctgtttgaactgcatggtagatttttgccatctgaacgctgtggctgtctgtacgcactatctaaacgt

SEQ ID NO: 121959 - DNA, 899 bp, Zea Mays
gcaccaccaccaccgtgccgcgagcgaagtgacgtcgcgttcacttccctcataaaatctcgccccccactctctctctacccgagcccagcagtaatttttttttggggaaggtgaagcgagaggagcaggaggagagaaaggggaacgaggccggccgcgaatcggaggggaattcggggggcggggctcggtccggccggaaattcgcgcgattcgggcgcgggttagcggaaggggagggtgagcgcgcgcgcggaggcgccgcggatgtgaagatctggtgctcggcgggatgacttcttcggcggcggccgcggctgctgccgcccaggtggcgggaggaggtggaggcggcgagggagatgccgccgctgcggcgcgaggcggaggcggaacggaggacggcatgtacacggagctgtggaacctctgcgccggcccgctggtcacggtgcccagggtcggggacaaggtgtactacttcccgcagggccatatcgagcaggtggaggcgtcgaccaaccaggtggctgagcagcacatgcaattttacgatctcccgtggaagatcctgtgtgaggtcatgaacgttgaattgaaggctgagccagacaatgatgaggtttatgcccagctcactctgctacctgaatcaaagccagaggagaatggctctagtgaggagatgcctgcttcacctcctgctgcacttgcaaggccacgcgtgcactccttctgcaagacattgacagcctctgataccagcactcatggtggattctcggtgctgcggcgccatgcagatgagtgtcttccgccactggtagcttgctggattcttgacttgatattgccagtgcatcagttgtaggtttgctatttgttgctttactggt

SEQ ID NO: 121960 - DNA, 620 bp, Zea Mays
gggtcagttcatgacatgagagttttcaaagatgcaattggaaaatatggagataggtttccacatcctctagaagggaaattctatcttgtggactcggggtatccaaaccgtattggctatcttgctccttacaaaggtacaaaataccatcttcctgaatttagtcaaggtccaatgccaagaggtagaaaagaaagttttaattatgcacattcttcacttcgaaatgtaattgagaggtcatttggtgtcttgaaaatgaaatggaggactctattagatctccctagttatcctatggcaaaacaaagtagaataattatgtggtgaatggcacttcacaatatcatttagggatagttttttgggacataaggattttgagttatgtgaccataatgagaattttgtgcctaaagttggtgagtcaagtacacaagaacaagaacaagtagcaggttttgtacaaggtgaagaagatcgaaatatgaatcaatttcatgattggatagctgatggcttgttcaatagactataacgtttattgtgtgtaataaatattgtagaaatgtacttcttgtgctttgtgttttgtctgtgctttcatgatcgaaatg

SEQ ID NO: 121961 - DNA, 298 bp, Zea Mays
ttgcggaaacatggttttcttcagaaaagaccaatcactggaagacagtcacattcacatcctgagtttcgcaggcagcaacaacaaaagtgataggtggattatccttagctgttccgcaaaaataaaatagcttgtcagcctcgataacacatcataaaaaagaataagtaattcacaataatgaactcaaagaagagacaatcaaaacttgcttgtggtgcagaagcactcctgacactccatcttccgcattgcaaatatcagaagatcaaactatgagtacaaacaacccccg

SEQ ID NO: 121962 - DNA, 1697 bp, Zea Mays
agccgtgaagctacacaatccatgcggcggcatatggcgcccatcaaggagcaaaaacacacgacaagcgcagaacagcaggtgatgctggatgccgagctccagctgtggaaccacaccttcggctacgtcaagtccatggcgctcaaggccgcgatcgacctcggcatacccgaggccatccaccagcacggcggcacggccaccctcccacaaatagtcaccagggtcaagctccacccgtccaagacaccatgcctgcggcgcctcatgcgcgtgctcaccctcaccggcgtcttcggcgcgcaggagccgcacgatgacgacggcggctgtgacgacgagctcgtctacacgctcacgccggcgtcccgtctcctcgtcggctcaccggggcagaacgtgggccctttcctgaccctgatgctcggccccatcttcgtgtcgtccttcctcgacctccgcgggtggttccagcacgagacgccggacccgtcccccttcaagatgacgcacgggcgggacatatgggagctggccgcccacgacgccgccttcggcaggctcttcgacgccggcatggtcgctgacagcagcttcatcatggacgtcgtggtcagggagtgcggcggcgtctttgaggggatcagctccctcgtcgacgtcgccggcgggctcggtggcgccacacagaccatcgcgaaggcgttcccgaacctggagtgcagcgtgctggatctcccaaacgtcgtcgccagcgctcccgctgataccgccgtgaagtatgtccccggtgacatgttcgagagcgttccggcggcagacgctgtcttcctcaagtggattatgcatgactggggtgatgccgactgtgtcaagatactgaagaactgcaagaaggccataccggctcaaggaggcaaggtgataatactggatatcgtggttggagcagggtcgtcatgcgaccggaagaatgtggagacgcaatgcttgtttgatctcttcatcatgtttatcaacggtgccgaacgagatgagcgacagtggaagaagatcatctttgaagccggctttacatcttacaagatcatacctgtcctgggcattagatccataattgaaatctgcctatagaagctaatataattaaggatgaaaacgggtcaggttcgggttgagttgagcaaaattctacccgggatggcatccttaaagtctatataaacccacccacgatcgtacccacgagtgcaattctaaacccgcacctgaacccgtcgggtttgaggtattgtatacttttaaataataattcaactatctctactactgtacgtcacaccttttccttcgttcacctctccttgctcccatacttaaatagtaactagttatgtgcccgtgcgttgcaacgacacacgaaatattttacaaaatgtttttgcacaacgattacatgacaatgaccaacatatatattcatcagcttcaatatatcacaaattatgtcaacaaccaatctctactataaagcattagtttgcacatgctttgttggaactctaaagttcgttgcacaatcagaatagcataacctaaagtccaatccttatggtggctgatggtacaaagctacaaaagagaatcaaataagtacaatctcaagaagaaagcaacccttgaagatgacatct

SEQ ID NO: 121963 - DNA, 1085 bp, Zea Mays
ctactcccgaacttccatatctctcctctgctctcactctcctcccacccactccagaaaacctcacaaaaaccctcgctccccacaacccgccgccgcccacgccgccgcctgtaccagcggcgtcaagatgagtcggcaccctgaagtgaagtgggctcagaggatcgacaaggtttacatcactgtacagttacctgatgccaaggacgctaaggtcaatttggaaccagatggtgtcttcacattctctggcagtgctggtacaaacttatatgaattgaaactagatctgaatgacaaagtaaacgttgaggctagcaaaataagtgtgggtgtcaggtccatattctgtattgtagaaaaagctgaggccaaatggtggaagaaacttgttcgagatgatcaaagggcacctcactttgtgaaagttgattgggacaaatgggttgacgaagatgatgatggtgctgatgtcaacttggatgggatggacttctcgaattttggcggtatgggtggtatgggtggcatgggtgatatggctggcttgggtggtcttggtggaatgggtggtatgggaatggatgattttgaggatgatagtgatgaagaagaagtatcgaaacctcaagctgccggacatgctgctgaggccgagaagactgagtcggcggaagccaagactgagtcggctcagagcagttgaagatgcttccgacatgatctaaactagttgtatcgtcaagttaattctgctgaatcggtggacaaacttctacgttgtggcactggccgatcccagtgacttgccctaaaatttacgttctgtctttacatgggcatcctagtgttgtgctcatcacattattgatattgtttctgtgatgcttcctttggtcgacaatcatgtgctggagtttgtttactggattgcttttcttctgtggtttttggctttatacctgtatggaaagctggagccgcaaatggagaaatagggaacgacgtgtatttttgttctttgggggtacttgtgcacatttgtttggttccttaccgtataatactctaaattttaagct

SEQ ID NO: 121964 - DNA, 1190 bp, Zea Mays
ctactcccgaacttccatatctctcctctgctctcactctcctcccacccactccagaaaacctcacaaaaaccctcgctccccacaacccgccgccgcccacgccgccgcctgtaccagcggcgtcaagatgagtcggcaccctgaagtgaagtgggctcagaggatcgacaaggtttacatcactgtacagttacctgatgccaaggacgctaaggtcaatttggaaccagatggtgtcttcacattctctggcagtgctggtacaaacttatatgaattgaaactagatctgaatgacaaagtaaacgttgaggtaatgcatttaagcatttttatgtaatattaatgtgtacaggtttagtttaaatccttgatgtttaaagttgttcgtctttaacattactttttaatataacaggctagcaaaataagtgtgggtgtcaggtccatattctgtattgtagaaaaagctgaggccaaatggtggaagaaacttgttcgagatgatcaaagggcacctcactttgtgaaagttgattgggacaaatgggttgacgaagatgatgatggtgctgatgtcaacttggatgggatggacttctcgaattttggcggtatgggtggtatgggtggcatgggtgatatggctggcttgggtggtcttggtggaatgggtggtatgggaatggatgattttgaggatgatagtgatgaagaagaagtatcgaaacctcaagctgccggacatgctgctgaggccgagaagactgagtcggcggaagccaagactgagtcggctcagagcagttgaagatgcttccgacatgatctaaactagttgtatcgtcaagttaattctgctgaatcggtggacaaacttctacgttgtggcactggccgatcccagtgacttgccctaaaatttacgttctgtctttacatgggcatcctagtgttgtgctcatcacattattgatattgtttctgtgatgcttcctttggtcgacaatcatgtgctggagtttgtttactggattgcttttcttctgtggtttttggctttatacctgtatggaaagctggagccgcaaatggagaaatagggaacgacgtgtatttttgttctttgggggtacttgtgcacatttgtttggttccttaccgtataatactctaaattttaagct

SEQ ID NO: 121965 - DNA, 1768 bp, Zea Mays
ctactcccgaacttccatatctctcctctgctctcactctcctcccacccactccagaaaacctcacaaaaaccctcgctccccacaacccgccgccgcccacgccgccgcctgtaccagcggcgtcaagatgagtcggcaccctgaagtgaagtgggctcagaggatcgacaaggtttacatcactgtacagttacctgatgccaaggacgctaaggtcaatttggaaccagatggtgtcttcacattctctggcagtgctggtacaaacttatatgaattgaaactagatctgaatgacaaagtaaacgttgaggtaatgcatttaagcatttttatgtaatattaatgtgtacaggtttagtttaaatccttgatgtttaaagttgttcgtctttaacattactttttaatataacaggctagcaaaataagtgtgggtgtcaggtccatattctgtattgtagaaaaagctgaggccaaatggtggaagaaacttgttcgagatgatcaaagggcacctcactttgtgaaagttgattgggacaaatgggttgacgaagatgatgatggtatgctatgtacttgtattttttgatactactaaaggaatataatttgtgtatcagatacagaaactggtacatgcgcttgacctcatgtcagtacacaaagatttggtttaagtgctcaacattcccaagtttaatgagcaacaacgaaccatgatcttagcaaaccacagatgcagcaagaactatgttacttgataaatgtacactgtggagtagtggattatttcttgtaactgtttctacttgaaaaatatgtcatgagcaacacctctgccttagattatacccaaacacaacctaatagacataagatcagtgtgcccagcttcctggagattgcacctaagatgatagccatcctagcttcaggaaaacattttgtatattcgatgtacagacttaatactgcaacattatcatagatgtacgacaagacaacaacaataacaacaaagcttttgtcccaagcaagttggagtaggctagagttgaaacccaacagaaaccacaagtcaaggtttaggcactagaaaatattttgtttgacactatacatgaagattgctgattacattgggcatggacatgtaaaaattattatgttcatctatctcttcttttaggtgctgatgtcaacttggatgggatggacttctcggtaaataattccttcaccagtttttcttctaagggatgccttgacattggggcaaactggtttgatatttttctttgttttttttgtagaattttggcggtatgggtggtatgggtggcatgggtgatatggctggcttgggtggtcttggtggaatgggtggtatgggaatggatgattttgaggatgatagtgatgaagaagaagtatcgaaacctcaagctgccggacatgctgctgaggccgagaagactgagtcggcggaagccaagactgagtcggctcagagcagttgaagatgcttccgacatgatctaaactagttgtatcgtcaagttaattctgctgaatcggtggacaaacttctacgttgtggcactggccgatcccagtgacttgccctaaaatttacgttctgtctttacatgggcatcctagtgttgtgctcatcacattattgatattgtttctgtgatgcttcctttggtcgacaatcatgtgctggagtttgtttactggattgcttttcttctgt

SEQ ID NO: 121966 - DNA, 768 bp, Zea Mays
ctactcccgaacttccatatctctcctctgctctcactctcctcccacccactccagaaaacctcacaaaaaccctcgctccccacaacccgccgccgcccacgccgccgcctgtaccagcggcgtcaagatgagtcggcaccctgaagtgaagtgggctcagaggatcgacaaggtttacatcactgtacagttacctgatgccaaggacgctaaggtcaatttggaaccagatggtgtcttcacattctctggcagtgctggtacaaacttatatgaattgaaactagatctgaatgacaaagtaaacgttgaggctagcaaaataagtgtgggtgtcaggtccatattctgtattgtagaaaaagctgaggccaaatggtggaagaaacttgttcgagatgatcaaagggcacctcactttgtgaaagttgattgggacaaatgggttgacgaagatgatgatggtatgctatgtacttgtattttttgatactactaaaggaatataatttgtgtatcagatacagaaactggtacatgcgcttgacctcatgtcagtacacaaagatttggtttaagtgctcaacattcccaagtttaatgagcaacaacgaaccatgatcttagcaaaccacagatgcagcaagaactatgttacttgataaatgtacactgtggagtagtggattatttcttgtaactgtttctacttgaaaaatatgtcatgagcaacacctctgccttagattatacccaaacacaacc

SEQ ID NO: 121967 - DNA, 96 bp, Zea Mays
gtttggtttgtgaaatgtaatgagttgatccatcaccatttcattcttcgtaagctaataattagtaataatacgaggaatgagtggaatgaactc

SEQ ID NO: 121968 - DNA, 2249 bp, Zea Mays
actcggctcttgccgccgcctctgttctcgattctcccgcctcgtgctcgccgttccgcgcttcttccctacccagtcctacatcacctccccgtccgcctttggcccgcaaccggcggccctcgccgctgatggactcccactcccccacctcggcggcaccgccggcagctgctgaaacggcgcggtacacatacagcccgaggctgcggtggcagccggaagtggaggagtacttcaacacggcgtacggccgcgaccactttgcccgcatctctgaggccctggcgcatccttcttgttattcttgtatccgtgtcaatactctgaagtcttccactgatgctgtcatgcataaactgctggatttagtatgcaaaaatgagctctctgctgtaatcaatggattggaggttgttgaactgaatggtggagaccaatcacaagaagggtgctctctggtccacaagtgcccctatgcgggccttgaaaatgttttgtttgttcagggatcaggaccacatgtgctgcattatggtagccaaccagatcaagctgttaaggaagtagttgtaagtcgaaaatgtgcagagtcagttcttcggggtgcccaggtgtatgttcctggtgttttagcatgtagttcacatgttgaaaagggtgataaggttgcagtgtcagtcgctattgagcagcctgtcaaggaagatggctgggctgtgggcataacacgaggaaccgttttacaaggattgcaatcagatgcacattatgaagaaaggaagggtctgtacattggtcaaggaactgctgcaatgtcaagatctgcaatatttcgtgttcctcatgggattgcagtagagatgactgagagggtatacaagctcccatctttcaatgatgtgcttgaaggggaaatatttcttcagaatttaccaagtgttgtgacggctcgtgtccttgatccccagtcaggagagcgaatactagatatgtgcgctgctcctggaggaaaaacaacagcaattgctatccttatgagggacgaaggagaagttgttgcccttgatagatctcacaataaggtgatggatattctgaagttggcttctgagatggacttgagttgtattaaagcttataaacttgatgctctcaaatctgtacggaaaactgatgaagcaagaagccttggcatggctgataatcacagtgaagcaattgaaacaccaacagaggacccttgccatgccacagtaggtgggagatctaccagtgtagacgaagacagctcaacaacaacagtggtgttttctgataacaaaaacctaaattccaaaagatacattagcaaggcagaactcaggaagaatttaaggcagatgaagaatggacctggaagaaataattgctctggtggtagagttgaaaagtcaaaaggattttgtcctaacagctttgatcgtgtcctccttgatgctccatgttctgcgcttggcttgagacctcggctctttgctggtgaggaaactctagaatcgctgaaaaaacattcgaagtatcagaggaaaatgtttgatcaagctgtcaagctagttcgtcctggtggggtgattgtttattcaacgtgtactataaatccaggggagaatgaggctttggtgagatatgcattggatacctacaaatttctttcactagtatcacagtacccgaaagttggagggcctggtattgttggttcgtgcgagctgttcaacaagacatatactgaggaatggttgagagaggatgaagctgaccttgttcagaggtttgatccgtcatcatcagtggataccattggtttcttcatcgcgaaatttgatgttggagagaaagatgaataaacaaacgtgactgaaattccaatgtttggcattcacaacttacgctagggatatcagcattgaattttctgcaatcagatggctcacgtatacccatggagtggaatgcagcgtgccccctgaaattttgtttgccagtgtttgatattttcttttgttcgaagaacattgttcattatggtgaaatgatggggcaaattagattcaagctcctgtagtcccgtttccaagaaaaaagttaccgggtacccgtatccgtccgggtgtaccgggtattttctgggtattggtcctcccattccgtcctgtatctagggagcatttaaccgggtagcaccagcaaaattgtcctgatttaat

SEQ ID NO: 121969 - DNA, 2224 bp, Zea Mays
actcggctcttgccgccgcctctgttctcgattctcccgcctcgtgctcgccgttccgcgcttcttccctacccagtcctacatcacctccccgtccgcctttggcccgcaaccggcggccctcgccgctgatggactcccactcccccacctcggcggcaccgccggcagctgctgaaacggcgcggtacacatacagcccgaggctgcggtggcagccggaagtggaggagtacttcaacacggcgtacggccgcgaccactttgcccgcatctctgaggccctggcgcatccttcttgttattcttgtatccgtgtcaatactctgaagtcttccactgatgctgtcatgcataaactgctggatttagtatgcaaaaatgagctctctgctgtaatcaatggattggaggttgttgaactgaatggtggagaccaatcacaagaagggtgctctctggtccacaagtgcccctatgcgggccttgaaaatgttttgtttgttcagggatcaggaccacatgtgctgcattatggtagccaaccagatcaagctgttaaggaagtagttgtaagtcgaaaatgtgcagagtcagttcttcggggtgcccaggtgtatgttcctggtgttttagcatgtagttcacatgttgaaaagggtgataaggttgcagtgtcagtcgctattgagcagcctgtcaaggaagatggctgggctgtgggcataacacgaggaaccgttttacaaggattgcaatcagatgcacattatgaagaaaggaagggtctgtacattggtcaaggaactgctgcaatgtcaagatctgcaatatttcgtgttcctcatgggattgcagtagagatgactgagaggatgtgcttgaaggggaaatatttcttcagaatttaccaagtgttgtgacggctcgtgtccttgatccccagtcaggagagcgaatactagatatgtgcgctgctcctggaggaaaaacaacagcaattgctatccttatgagggacgaaggagaagttgttgcccttgatagatctcacaataaggtgatggatattctgaagttggcttctgagatggacttgagttgtattaaagcttataaacttgatgctctcaaatctgtacggaaaactgatgaagcaagaagccttggcatggctgataatcacagtgaagcaattgaaacaccaacagaggacccttgccatgccacagtaggtgggagatctaccagtgtagacgaagacagctcaacaacaacagtggtgttttctgataacaaaaacctaaattccaaaagatacattagcaaggcagaactcaggaagaatttaaggcagatgaagaatggacctggaagaaataattgctctggtggtagagttgaaaagtcaaaaggattttgtcctaacagctttgatcgtgtcctccttgatgctccatgttctgcgcttggcttgagacctcggctctttgctggtgaggaaactctagaatcgctgaaaaaacattcgaagtatcagaggaaaatgtttgatcaagctgtcaagctagttcgtcctggtggggtgattgtttattcaacgtgtactataaatccaggggagaatgaggctttggtgagatatgcattggatacctacaaatttctttcactagtatcacagtacccgaaagttggagggcctggtattgttggttcgtgcgagctgttcaacaagacatatactgaggaatggttgagagaggatgaagctgaccttgttcagaggtttgatccgtcatcatcagtggataccattggtttcttcatcgcgaaatttgatgttggagagaaagatgaataaacaaacgtgactgaaattccaatgtttggcattcacaacttacgctagggatatcagcattgaattttctgcaatcagatggctcacgtatacccatggagtggaatgcagcgtgccccctgaaattttgtttgccagtgtttgatattttcttttgttcgaagaacattgttcattatggtgaaatgatggggcaaattagattcaagctcctgtagtcccgtttccaagaaaaaagttaccgggtacccgtatccgtccgggtgtaccgggtattttctgggtattggtcctcccattccgtcctgtatctagggagcatttaaccgggtagcaccagcaaaattgtcctgatttaat

SEQ ID NO: 121970 - DNA, 1124 bp, Zea Mays
attcactcccacccctatcttttttcagccgccaccagcaggcagcagcttctccctcgcgcgtgtcttcttcccttggagctgagctccttctcccatggcgcctccacactcccagccgccctcctctgcccagcagccgagcgcccagctccctccctggatccatggcgtccaagcccctgtgccctctctcccatggcgtgaggcccctactcccatctctctaccagcgcccagccatggtggtcgccgacctccctgctccctgctgttgctcgccttgcttggatgagaagcagccgagcgccctccctgtccatggcgtggagcagcagctcccattccccggcgacatcctcctcgccgtcgtccatggcgcccctgcgaacctccctgtccatggccacaaatccttgcgcccttcctgcgcagcgccgctgctccacccctcccccagcgccccctctctcccatggccgagcagcagctctgctcgcctccccctccttctttttcccttgcgcagcagcaagaagcccctgctcgcagtcttggcgtccaacttcgctgcgcagcggtgccgatccaaaacagcagccccgaatcccccgcatcgcgtgctcgctcgatctgcgcagccccaacattgacgccgttcaccccggtgagacgacgatgatctttgtttgattccacatcggcattgttctccggtgattaaattgtgtatatgtgctgttttgttttattttgtggaggcgaggaaccccgtgtgttgcgtggagaaggcaagtcgttcaacgctcgtcggatgctcggagcgatgcacaaatcggaatcgccatcgtccttacaaacaccgattgggtttgtttatggtgagccgatgtatgtcgctctcggtcgactcgactaattattttgaatggatgtgtgtaaaatgtttcggttatgcgcattggtaggatcgcgtttgcgattggagaacaagaggttatttgatgtgtgcgaattgtagtgagtctaattaggttttgatcgatgatgtgcaagtgtgattatgtgtgtgaaaatacttttgtatgaatggaagcgtgtagagaggaaaatgaagtagaaaa

SEQ ID NO: 121971 - DNA, 1003 bp, Zea Mays
acgtcctgtctcacctgtcatacgcggttacgtccccttcgccccccgtttgggctccagaagcttccccttccgtctccatatcttcttcttggtccgccgtctccactccgcgttccctggctccctgcgttgcgtcttgggggagagagagaagtgggagacccgcgagaggctgccgtgtagggactagggaccgtagagtaagcgacagcgaaggagggagagggggatggccgggatcgggccgatcaggcaggactgggagccggtggttgtgcggaagaaggcacccaccgccgctgccaagaaggatgagaaggccgtcaacgccgcgcgccgctccggcgcggagatcgagaccatgaagaagttcaacgctggtatgaacaaggcggcgtccagcggcacatccctcaacaccaagcgcctcgacgacgacacagagaacctcgcccatgagcgagttccaagtgacctgaagaaaaatctcatgcaagcaaggctcgataagaagttgacccaggcacagcttgctcagatgatcaatgagaagccacaggtgatccaggagtatgagtcaggcaaggcaattcccaaccagcagatcattggcaagctcgagagggccctgggaacgaagctgcgtggcaagaaataaccaggagcatcatagcgaagacaaggcaaactgtctgcttattatttgctatgtttggtatctcaagtcatgcggactgtttgtgttggtacaagagtgaattaactgtgttctcctgaatgcttgctgcttgtcatatgagtatatgatctagctctaaaaaaattgtgatgaagatgtcaactgatatgacaacctcataaccagcgtgatcaagatgatgctcattactgcagtttggcactgacctctgtcaccggtaatatttttctactagtacatttagcctcatatgttgacgagcgtcgcatagcatagcagttatgaagctcaaattactga

SEQ ID NO: 121972 - DNA, 930 bp, Zea Mays
gtaaaaatgggtgctgctgaaccatggtcctttgtccattagtgtgcaaaaaaagcacccttggttcacaatggttattgcctctaatttcatttactctagtgtgggtgcttgcttcacaatggttattccctatgcttttatctatgatgctggtgttggagctataaagacgttactggccaggacaaggtgcaatattttgatgatcaccttgttatgcctgtaccatgtagtccaatgctaatgaccatggtctcattttagtcgcaaggatataaaaatttactacagattagatttggtttttctacaaggatttcaaaattgtcgaactattgaacctgaacatgagttgagtcatgcagaagattgccctaagctttctgcatgatatccttttcatgatagtaataacttgggctctcctcacttatgctagatgagcgagttccaagtgacctgaagaaaaatctcatgcaagcaaggctcgataagaagttgacccaggcacagcttgctcagatgatcaatgagaagccacaggtgatccaggagtatgagtcaggcaaggcaattcccaaccagcagatcattggcaagctcgagagggccctgggaacgaagctgcgtggcaagaaataaccaggagcatcatagcgaagacaaggcaaactgtctgcttattatttgctatgtttggtatctcaagtcatgcggactgtttgtgttggtacaagagtgaattaactgtgttctcctgaatgcttgctgcttgtcatatgagtatatgatctagctctaaaaaaattgtgatgaagatgtcaactgatatgacaacctcataaccagcgtgatcaagatgatgctcattactgcagtttggcactgacctctgtcaccggtaatatttttctactagtacattta

SEQ ID NO: 121973 - DNA, 1148 bp, Zea Mays
acgtcctgtctcacctgtcatacgcggttacgtccccttcgccccccgtttgggctccagaagcttccccttccgtctccatatcttcttcttggtccgccgtctccactccgcgttccctggctccctgcgttgcgtcttgggggagagagagaagtgggagacccgcgagaggctgccgtgtagggactagggaccgtagagtaagcgacagcgaaggagggagagggggatggccgggatcgggccgatcaggcaggactgggagccggtggttgtgcggaagaaggcacccaccgccgctgccaagaaggatgagaaggccgtcaacgccgcgcgccgctccggcgcggagatcgagaccatgaagaagttcaacgctggtatgaacaaggcggcgtccagcggcacatccctcaacaccaagcgcctcgacgacgacacagagaacctcgcccatgagcgagttccaagtgacctgaagaaaaatctcatgcaagcaaggctcgataagaagttgacccaggcacagcttgctcaggtatttctgtggattcattagatttcagaacttcagcagttccattcatagtgtctgaaccttgatttgtcgtttgagtctaccccgacttgcttgggactaaaagtctatgctgttgttgtagtagttccattgatagctgggaagtagcttgatccttggttggcctctttatgagatgaggatatggtgttcattgcagatgatcaatgagaagccacaggtgatccaggagtatgagtcaggcaaggcaattcccaaccagcagatcattggcaagctcgagagggccctgggaacgaagctgcgtggcaagaaataaccaggagcatcatagcgaagacaaggcaaactgtctgcttattatttgctatgtttggtatctcaagtcatgcggactgtttgtgttggtacaagagtgaattaactgtgttctcctgaatgcttgctgcttgtcatatgagtatatgatctagctctaaaaaaattgtgatgaagatgtcaactgatatgacaacctcataaccagcgtgatcaagatgatgctcattactgcagtttggcactgacctctgtcaccggtaatatttttctactagtacattta

SEQ ID NO: 121974 - DNA, 1036 bp, Zea Mays
acgtcctgtctcacctgtcatacgcggttacgtccccttcgccccccgtttgggctccagaagcttccccttccgtctccatatcttcttcttggtccgccgtctccactccgcgttccctggctccctgcgttgcgtcttgggggagagagagaagtgggagacccgcgagaggctgccgtgtagggactagggaccgtagagtaagcgacagcgaaggagggagagggggatggccgggatcgggccgatcaggcaggactgggagccggtggttgtgcggaagaaggcacccaccgccgctgccaagaaggatgagaaggccgtcaacgccgcgcgccgctccggcgcggagatcgagaccatgaagaagttcaacgctggtatgaacaaggcggcgtccagcggcacatccctcaacaccaagcgcctcgacgacgacacagagaacctcgccctgtgggtgcttgcttcacaatggttattccctatgcttttatctatgatgctggtgttggagctataaagacgttactggccaggacaagatgagcgagttccaagtgacctgaagaaaaatctcatgcaagcaaggctcgataagaagttgacccaggcacagcttgctcagatgatcaatgagaagccacaggtgatccaggagtatgagtcaggcaaggcaattcccaaccagcagatcattggcaagctcgagagggccctgggaacgaagctgcgtggcaagaaataaccaggagcatcatagcgaagacaaggcaaactgtctgcttattatttgctatgtttggtatctcaagtcatgcggactgtttgtgttggtacaagagtgaattaactgtgttctcctgaatgcttgctgcttgtcatatgagtatatgatctagctctaaaaaaattgtgatgaagatgtcaactgatatgacaacctcataaccagcgtgatcaagatgatgctcattactgcagtttggcactgacctctgtcaccggtaatatttttctactagtacattta

SEQ ID NO: 121975 - DNA, 1024 bp, Zea Mays
acgtcctgtctcacctgtcatacgcggttacgtccccttcgccccccgtttgggctccagaagcttccccttccgtctccatatcttcttcttggtccgccgtctccactccgcgttccctggctccctgcgttgcgtcttgggggagagagagaagtgggagacccgcgagaggctgccgtgtagggactagggaccgtagagtaagcgacagcgaaggagggagagggggatggccgggatcgggccgatcaggcaggactgggagccggtggttgtgcggaagaaggcacccaccgccgctgccaagaaggatgagaaggccgtcaacgccgcgcgccgctccggcgcggagatcgagaccatgaagaagttcaacgctggtatgaacaaggcggcgtccagcggcacatccctcaacaccaagcgcctcgacgacgacacagagaacctcgcccatgagcgagttccaagtgacctgaagaaaaatctcatgcaagcaaggctcgataagaagttgacccaggcacagcttgctcagtagttccattgatagctgggaagtagcttgatccttggttggcctctttatgagatgaggatatggtgttcattgcagatgatcaatgagaagccacaggtgatccaggagtatgagtcaggcaaggcaattcccaaccagcagatcattggcaagctcgagagggccctgggaacgaagctgcgtggcaagaaataaccaggagcatcatagcgaagacaaggcaaactgtctgcttattatttgctatgtttggtatctcaagtcatgcggactgtttgtgttggtacaagagtgaattaactgtgttctcctgaatgcttgctgcttgtcatatgagtatatgatctagctctaaaaaaattgtgatgaagatgtcaactgatatgacaacctcataaccagcgtgatcaagatgatgctcattactgcagtttggcactgacctctgtcaccggtaatatttttctactagtacattta

SEQ ID NO: 121976 - DNA, 1195 bp, Zea Mays
acgtcctgtctcacctgtcatacgcggttacgtccccttcgccccccgtttgggctccagaagcttccccttccgtctccatatcttcttcttggtccgccgtctccactccgcgttccctggctccctgcgttgcgtcttgggggagagagagaagtgggagacccgcgagaggctgccgtgtagggactagggaccgtagagtaagcgacagcgaaggagggagagggggatggccgggatcgggccgatcaggcaggactgggagccggtggttgtgcggaagaaggcacccaccgccgctgccaagaaggatgagaaggccgtcaacgccgcgcgccgctccggcgcggagatcgagaccatgaagaagttcaacgctggtatgaacaaggcggcgtccagcggcacatccctcaacaccaagcgcctcgacgacgacacagagaacctcgcccgtgagcaatcatctgtctcgggccatttttcccatgaacaatctgatcgacgtttttttgtgcctaggatcccaatagataaattcgggcacttgtccaccgttgatgtgataaatgatttatatatgttcatgttcacatctctcgctgttgatgatgttttcttttaagatggattctatacctagtgctttaaggctctcactttattagtaacactagccaaaatttctcttcttaggatttagatgggaaagtaatatctcttgtttgcacaattgttaaattatcatcgtgcatccattgtttctttgtttctggccatttcgttatggcaaatcatggatgttttataaaatgatgctttcttggttggccacttgtttgaaagtctgtggataagttttgtatcctatgacattgatttacttgggggagtaagtttgaaatattgcagtgtttgtgtctataacaatttgcttgttgcatcaatcaaccttgataacatttggtactttcaaccaactagccatttgcacaccatcatataatatatttgtttatgttagctgatgagtttccacagacttaattactaagtgggcactgggcatgccttgaacaactatcttggtgaattcattgaggctttagtggcattatatttgttgtataagcatcttgtatgagattctctttggcttgtttagtgcacatgataattacagtatatgaat

SEQ ID NO: 121977 - DNA, 335 bp, Zea Mays
tatctcataaataagtattgtcaaataactcatacataagtgtactctaaatttaaacttgctcatcaactgtttgtgctaacattgagcctaactaagtatatataaattcatgtctccacacttgtgcgaccaccaaaatttgagttccattccatctttcatcgatggcacgtcgatggtatcattcaccagtatttatgtgcatcttctgctctgaatcctgagccttgaccacccgtaataacatgtcagcatgttcagctagctactgcttcagctacaagcatgttcagctagctactgcatcggctgcagctgcaacagcacaatag

SEQ ID NO: 121978 - DNA, 804 bp, Zea Mays
gaacaagcttggcaccccgagagccatcgaacacatcgagaggaatagagagaagggagacagcgccaccgtcgctctctgcccgccgccgtggtttccctctgcgccaccgtgctgattccagtggaagtgcaattggggttcgtgggagcgcgctgatcatctgcggcaagcctctgggcgtgtcggtcaccatggtcaagtaaattcatcgccgccgcggagccatcagctcgtcgccggcccatctgggtccgtattggaggattgggagtttcgcatgtggctgctgaaggtgtgggtgccacaggcgtgtggggtgatcgatcggtgcgagcggaattcgtcgtcggccatcttcctcgaccgcagtgccgcacgcaaccgtggctagctacgtcgcagctccttctcggtgagtagtcgccccctagatgttccctgtcctctgctctgcgtgttgctcgcttccggtgggaggattaggtacctgggcgtcgaatcggctgctcgtcggcgtgaacttgggcacccctgttcgtccgcggtcgtgaggttacgagccacctgaagagcaagttggtacttggaatctcaagtcccaggcaagttgtgcccttgatcacttctttttacccactcatgttctaattaatcataatgatctgcataggttaattttgatgggacccaataggttaccctagtttgattatctttataccttgtttaccactgaactttttgggtagtacttgctagtgctttatgtggttttaggtatgaagatacattattcatgat

SEQ ID NO: 121979 - DNA, 476 bp, Zea Mays
gaacaagcttggcaccccgagagccatcgaacacatcgagaggaatagagagaagggagacagcgccaccgtcgctctctgcccgccgccgtggtttccctctgcgccaccgtgctgattccagtggaagtgcaattggggttcgtgggagcgcgctgatcatctgcggcaagcctctgggcgtgtcggtcaccatggtcaagtaaattcatcgccgccgcggagccatcagctcgtcgccggcccatctgggtccgtattggaggattgggagtttcgcatgtggctgctgaaggtgtgggtgccacaggcgtgtggggtgatcgatcggtgcgagcggaattcgtcgtcggccatcttcctcgaccgcagtgccgcacgcaaccgtggctagctacgtcgcagctccttctcgcgtgaggttacgagccacctgaagagcaagttggtacttggaatctcaagtcccaggcaag

SEQ ID NO: 121980 - DNA, 725 bp, Zea Mays
ctgcgcaccacagaagtcggcggatatcgatatcgacagagaagaacgcgcgagtagacaggagacgacggtgcagcgaaacagaggcgacagcggctcggcgatttggtgactgcacggcgacgagagcgagcgaggcaacggcaactggcgctggtgagaccggcgggttgatgctggaacggccggatgtgggtgaggcgacgaggaacagggagagacgcagctttcaccggagacgaagtcgatggcgtggtcgggatcgaagaagacgcgcgcctggcgcaggacgcggctggagccgttgggggcggaccttcaccggcgacgttggggaaggaggcgagcagggacggcgaggtccgagcgctggtggagggactcttcaggttgaaggccggtggctggaaaacgacgccggcggccgggaccggtaccaggggcggcgacgcgctggtgaagactgaggaggccgagcgcagggagttcggcgcctgggacgacaccacctggacgagcacgagggcgcgatgggcggcttcgtgctgggcgcgacgactggtgggagcagggcggcctcgcgggcgcagcgcgagaaaacggaagcgcttggtgctggtgacggctggaggtgaggtgaggcaggcgaggagggagctggacgaggtgagggcagcatggagtgacggaaatgggtcgggttaagtcggggtaaagcaaaaatc

SEQ ID NO: 121981 - DNA, 1420 bp, Zea Mays
aatcttattaggtacttctctaagcaccgaggaggttttgtattgagtgcacaagaaactgttaaggaacacttcactagccatgtctgatgtttgtgatgagaaaccacatccagaggtttctgctgatcctatatgttcaaggaactgcatttatggggatgatgactgggttatagtcaagaaacagcgtatcaccatattaattcctccacaaccacctgttgctgcaaatcctcaatcaaatatgcccacaataagttctaagcagtcttgcataactaggagcaagagagactgggatgctgccagaaaaaagcaccccgagaagtttgcagccaagaaatatttggactcccctccagtgcatggcagtataatccatgaggatgttccatttatgacaggtgataaatcacaacacggttctgctatccctgttgcaaaatcagaatggactaaagacccggatcatgctgttcgagaattgtttcatcaagaaactgggaaggcgacaagtttctttcgaaacatcgttcagccaaggacgccacttgtgtcttcacctgttgcggataagataattcgagcccagcttcttgagaaacaggttgctgggtttggcgggctgaggaattggcttttcggttgtggtcttggatggtttgtcaacatactggacagtgaaaagctggggacgtatcagcttgcctctcttactatggaacagctgaaagatatgggtcttgttgctgtaggtccacggaggaaactgatccacgctatcgacagtttatgcggcccgcaccatgctgagatgctttcttgatcccttgcattttagttagctagaaggaaaattattacaggaaggatgtctgaagtggtctctggttgtagccaactcggtgactgaagtccatacatttcttttatggatagcatttcaatcatggccgcaactgaagtgccagagcgttttggaagtagaaaatgcgcaaagttttggaagtgaagctagcagtgaaagttttggaagtagaaaacgtacaactgctagagttcttccttctatgaaacacgttttcagattattacctccaagcacatctgactacaaaaaagactgtaccttgtaatcctgcagatatgcttctctctaagttgcacatacgttattatgaatgtgttggctgtagaaaacgtacaactgctagagtgttctttgaaacacgtttttagttattacctacaagcacatctgactacaaaaaagaatacattgtaatcttgcagatatgcttctctctaagttgcagatacgcaacacgaagaatatgggagcaatataaaggcaaacaaacaagctctcttaacatctataacaagttaaacaaaaaggttaccacaaaaaaaaaga

SEQ ID NO: 121982 - DNA, 1526 bp, Zea Mays
aacagagcatagtgccagagtgtgcgctaggaagtatacccgagaaatggatgctcatgccgtggatatcccttccctagccgaggagctgaggaaggagctagctaccgcggacgctctggcggcgcggtccgccagtctctaccccgtcgtcatcgccgaggtcggcccgcgcactcgcaacgtctgcccggaggactacgacccgtcccacgtctccattggcccgtaccaccacatcaagaacccaaagctcgtcaggaagcaggacaagatccggagcctcagcaccgttatgtcggcggcggcgagagtcgacgttaagtcctacatcgatgtggtcgcgggcatcgaggccaaagccaggagctgctacgccaacacgttcgataaccacatagatagcaacgactttgtgcgcatgctgctgctcgacgcatgctacgtgcttgtcaatttcggcggcatcggcggcggcgggcaccgcggcagcgacatgatggaggacgtcggggtggtgcgcgacgtgatctacctcgcggagaaccagataccgttcttcgtcgtcgacgagatccgcaagctcaccattccggacggcggcggcggttctgcgcctgacgcgattacgggctacgtccggaagctcctgcgggagctgcagtactcagtggcgacgccggcggtggctgaacctccggggccagacaaccttctgcatctgctgcacatgcacctgatgcccaccgtcgcactcccgtcgtcacgatcgaccgtaggcaccggcaagccgcgtcggttcggccggtggcgctcggcgacggagtactactgtgccggcgttggattcaggagccggcctctcggcggcaaaggggctcgctcaatcctcgaggtgaagctcgactactacggccgcacactggagatcccccacctgaagatcgacgccgagacgtcgcggctcctgcgcaatctgatggcgctggagcagagcaacccggaggaggtgggcagccacgtgacggcgtactgcgtcttcctgtcgcagctggcgggaacggtgcaggacgtggagctgctgtccaggcgagggatcatcgcgcacggcctcggcagccacaacgaggtcgccacctccctggcgaacctctgcaagggcatcgcgttcgggggcgacgaccccgagagcaactaccttcgtgcgacatgggaggggctggaggagagcttccggagccggccgcgccggtgggcggcatggctgatgctcaagtacttcaggaacccgtggctcgccgtggggctggcggcggccggcgtggggctggtttgtaccgtggtgcaagcagtatacgctgttttggcttacacatcaaatccttagcagtaattcgtagtcaaacactgtgcggctgtgctgtgcttgtgaaaagtagtcaatattggtgtgcctagtacgtccagcaatgatttcgttactattatctaatcgatgcatcaacaaaaattttagtcgaaaatac

SEQ ID NO: 121983 - DNA, 1337 bp, Zea Mays
ccgcagagccagtcagaacagtaacaccggagcggcagctgcagtggccgaggccggagcacgcaaggcatggatagataccaaagggtagagaagcctcggaatgacacaccaatcagccagaatgagattaggattactactcaggggaggatgaggaactatatcagctatgggatgtcgctgcttgaggaaaatggacacgatgagattagtatcaaggccatgggacaggccataaataagacagttatggttgttgaattgattaagagaagggttggaggtcttcatcagaacagtgccactgaatctgttgatatcacagacacatgggaacctttggaagaaggccttctcccactagagacaactcgccatgtgtcgatgatcactgtgacgttatcaaagaagcctctggatacatcatctccaggataccaaccacctatcccagctgaagaagtgaaacctgcttttgactatgaccatgaagattcgtatcctactggccgtggaagaggacgtggtggtgggagaagaggcaggggaagaggtatgagcaatggtccctctccacccgcttatggttacaatgaagagtggggtgaggaaggagattactataatagagggcgtgggagaggaaggtcacgtggacgaggcagagtgcgtggtggctactatggaggcgggaggcgtggtggctacagttatggctatggtgcgagaggcgggtactatgaagagcaagacgaatactatgatgatcctgaagaatatgcccctccaggccgtcgtgggcgtggcagaggaagaagggggatgccttggcgtggccgtggagtctactactagacgatgcgatgcgatgcgatgcgatgcgacatgccaaacgggtgtgctgaagctagcaatggcgtgcttggttggttatctgttctatggagttccgacccagactagaattacccagcagggtccttccaggtgctgtgcctgtgcaactcgtctgggcaagttttgtggctcgctcgtggttttgtagctaggttaagcgagtgaagtttaatcactcggtagcagtgttttcccccttcggacggcatgcatgttgtttattttgctgctaatctacctaccttccaattttgtatggatggtgatggatactggatgcatcagtttcatatttttttttctcctggtaaatctgtagtttttataaagacggttacactgatacctgatgacaagatgaggcaggaagtttgttatgctgcagaataagagcagcatgaaaaaaaatgaatacagctatcgttgttagtgtacta

SEQ ID NO: 121984 - DNA, 258 bp, Zea Mays
atggcagggtcaatggcgcaggagacgggggccgtcgcggaggcggagcgcgccatggtgcaggaatgccaggaggcgaagccaaggcggagcaggtggcaatcatcggcgtcgcgcgagccattgttaagtatgccaggaggcgcagccaaggcggagcaggtggctggtgttctggcggcggccggtgttgtggcggcggccggtgttgtggcggcggcgtggtgggcgggaaagggtgagtgtgagagctggtga

SEQ ID NO: 121985 - DNA, 646 bp, Zea Mays
gcgagatcaaataggcaaatcaagtctttcagtgtcggcttgcactccaaaggaaacacttgcaatactgaagttataaaatggtttttcagatcttgcctacatactaccagatgctggaggtcaagcttctatctgaactaaaaaatgaacttagaatctcacacattgagcataacgaagttcttatgaagatcattttaaatgagcatgtcaagtcattgagaatttaatttggtccatctctttccaccctgtagaatggttggttcccaaaaatcttcattgttcttctcagatacctttttcttcgtatgagaccccacaaactgcgtcaaccccggcccggccaccacgtcgtcataccctcacagtacttgcatttgtttcatagaaacaatctactgttcctcgcaagacggaagtttattttgtattgtaaggttaaccttcatttatttattttttcaaatggtgaaattctggaatcgatagtatgtgtttgtttgatttggaggcgtactgtgtgtctgggatttgcgtttttttgtttagtagcatagatgtaattatgttatttggtgtgtctcatcctccctttacaagaaggcttgtacttcggacattcttttcattcttacaaaga

SEQ ID NO: 121986 - DNA, 195 bp, Zea Mays
atgtcggaggccgacgaggtgcggcccgccttcttggtgacgatccactcgtaggagctgcccagctggaacagcccggacaccatggcgttgaacttggtgacggacatggtgttctcgaagagcaggtaggggatgatgaacgggaaggacttgggcgccggcaggatgttgaggatggacatgagcacgggg

SEQ ID NO: 121987 - DNA, 1249 bp, Zea Mays
ttactgtcaatgatggctatgattattcattctagaaaaagaaaacgaaatgcaaggaggacagggattacctatgcaccaatgcatgaaagggatagaattagaattgaatatctcaacacaaagatttggagggatgacacaacatgtataaacatgattagaatgaaaaggggttgtttctttcacctaactaaacattttagagagcgtggtttacttcaggacactatccatatgtgtgttgaacaacaagtggccatgtttctaaatacaattgggcataaccttagaataggttgattgacacgaattttggtagatctagggaaacagttagtcgttgtttcaataaagttcttcgtgcaattggtgagctacgaggggaactaattaggccaccttcattggacactccaaccaaaatatcagggaactacagatgggatccgtactttaaggactgtattggagctattgatggtacacatgtaagagccactgttcctagagatatggagcatgcctttcgtggtaggaagtcctatgcgactcaaaatgtaatggcggctgtagattttgatctacgcttcacttatgtgttggctggttgggagggaacaactcatgatgctaatgtattacgagatgctttagaacgtgtgaatggccttcgcgttccacaaggtaaattctaccttgttaatgcgggatatggagcaaaaccaggattcttgcctcctttccgtggtgtgagataccatttaaacgaatggggcaataatcccgtacaaaatgagaaagagttgtttaatctaagacactcatctcttcgtgtcacagttgagcgtgcattcgggtcattgaagagaagattcaagattttagatgatgcatctcctttcttcccttttccaacacaagtcgatattgttgttgcttgttgtatcattcataattgggtcatacaagatgagagtggtgattttattatacaagattctaattggcctagccatagccatgctatatctttagttggccaagcaagtgagcatgctgctatggttgctttgaggcaaggaattgcagaccagatgtggacagaccatcagaactacaatgaaaactagtatcttgtaatatttgtaagaactatttgtaaggatgctatgttattgcaaggatgtattggctactgtcttttatctgtaagaactatttgtaaggatgctatgttattgtaagg

SEQ ID NO: 121988 - DNA, 2242 bp, Zea Mays
acaatccagatcccgagatccatcgtctcatcatctccatccccaaatccgcaattcgtcgttctctctatctcctccttccgaaccctcgccctcccagcccccaaaccccaatctgtctcttccgctaggtttagcgtaattccatggccggcgccggtatccacccgttccagcagtggccacccacggcggccgcgccgcccccgccgggggccgcggcctcggtcgccgtccctcctccaccccccgtccccggcgcgcctggcaccgttggcccggacgaggtccgcactatcttcatcacggggctccctgcagacgtcaaggaaagggagctgcacaacctgctgcgctggctcccgggattcgaggcgtcccagatcaacttcaagggcgaccagcccatgggcttcgcgctcttctccaccgcgcaccaggccatcgccgcaaagactgcgctccaggatatggtgttcgatgctgagaccaaggtggcgctgcacaccgagatggccaagaagaacctcttcgttaagagatgtgtgggaattgatgcaaatgctgtggatcaaagtaaacggttgcgaacaggtggagattatactcattctccttatgctcctccatttcatccacctccaccagctgtttccatgtggggaaccccaggttatatcacagcgccacctccttacaatccatatgctgcgtatccagtcccccctgtagcgatgacttcacctgctcctgttacaggaccaactgcctatgctcctgtgcagaacacaaaggataatcctccctgcaatacccttttcattggtaatctcggtgatactgtagtcgaagaggaattgcgaagtctcttcagtgtgcaacctggattcaagcaaatgaaagtgttacgtcaagataggaacactgtttgctttattgaatttgaggatgtgaatgctgctacatctgtgcaccaaactctgcagggtgctgttattcctagttctggtcgtggtggaatgcgaattcaattttcaaagaatccctttgggcgaaggaaggattcagctgctggccttgcgagcgttctaaatggggctcctgcaaattgattgcagcctgaggggatgtatcttgaactttagcatgccatcatggatttcatactaccacatcttatttatgatctgcatacttctgctgaatgcacgctctctcacgtggcatcatcatcttcatttggtggagtatctgggacatgatcatcatctatcatctttattaggtggagtttcaggggcatgatcatcatctggctgacattgcattgtcaccaaaacatgctggtgttacttttttttacattatctttgtagcttgtgaaggccatcctagtcttctagatgtgcatttggcgtttgtcatgaacattacactttgtagtattcgtattatgtatttccctttgtgcagttgcaacgttgtgttttcattataatagttgatgtggtttcgctggtttactaacaattctgaaatcttggatgattcattccatcatgtcatggcattttgacgaggaaattttgtagacatggcatggcaatatggcatacttcattccatgcatgctggagcattgccatcatccccacgaagcatgtaatcacaacgttgattggtttgttcttaaatgttttcatccaggctgagaggctaacagggatagtaaaattgcaaaaaagtcgcaagctgtttcattcttttactacagtggtggaacaccgaagcgttgctacggtcccttttggaaagccttcttgttcttttcttacagtggaacgccttggttcttttgctgcagtggaacaccttcattcttttgctgcaggtgaatgccaaggcgtggctatgtactttttggttagagaaccttagtgatgctaaaatataagctaactgaagcttagtgatgttgatgagatgtaaggaacttatggatctgctgaggtggtttctagcttgactaggcaaccctttcggtttttatcctgccttgtaataccaaggcatggttgtggcccttttgtttagagaaccttagtgatgctggtatgtaagccaacttaatcttagtgatgttgatgagataaacaatggatccgatgaggtggtttatagcttgacgagttctttgattagatgatgagagctgagaagtttcattgacttatgcatcaga

SEQ ID NO: 121989 - DNA, 2233 bp, Zea Mays
acaatccagatcccgagatccatcgtctcatcatctccatccccaaatccgcaattcgtcgttctctctatctcctccttccgaaccctcgccctcccagcccccaaaccccaatctgtctcttccgctaggtttagcgtaattccatggccggcgccggtatccacccgttccagcagtggccacccacggcggccgcgccgcccccgccgggggccgcggcctcggtcgccgtccctcctccaccccccgtccccggcgcgcctggcaccgttggcccggacgaggtccgcactatcttcatcacggggctccctgcagacgtcaaggaaagggagctgcacaacctgctgcgctggctcccgggattcgaggcgtcccagatcaacttcaagggcgaccagcccatgggcttcgcgctcttctccaccgcgcaccaggccatcgccgcaaagactgcgctccaggatatggtgttcgatgctgagaccaaggtggcgctgcacaccgagatggccaagaagaacctcttcgttaagagatgtgtgggaattgatgcaaatgctgtggatcaaagtaaacggttgcgaacaggtggagattatactcattctccttatgctcctccatttcatccacctccaccagctgtttccatgtggggaaccccaggttatatcacagcgccacctccttacaatccatatgctgcgtatccagtcccccctgtagcgatgacttcacctgctcctgttacaggaccaactgcctatgctcctgtgcaggataatcctccctgcaatacccttttcattggtaatctcggtgatactgtagtcgaagaggaattgcgaagtctcttcagtgtgcaacctggattcaagcaaatgaaagtgttacgtcaagataggaacactgtttgctttattgaatttgaggatgtgaatgctgctacatctgtgcaccaaactctgcagggtgctgttattcctagttctggtcgtggtggaatgcgaattcaattttcaaagaatccctttgggcgaaggaaggattcagctgctggccttgcgagcgttctaaatggggctcctgcaaattgattgcagcctgaggggatgtatcttgaactttagcatgccatcatggatttcatactaccacatcttatttatgatctgcatacttctgctgaatgcacgctctctcacgtggcatcatcatcttcatttggtggagtatctgggacatgatcatcatctatcatctttattaggtggagtttcaggggcatgatcatcatctggctgacattgcattgtcaccaaaacatgctggtgttacttttttttacattatctttgtagcttgtgaaggccatcctagtcttctagatgtgcatttggcgtttgtcatgaacattacactttgtagtattcgtattatgtatttccctttgtgcagttgcaacgttgtgttttcattataatagttgatgtggtttcgctggtttactaacaattctgaaatcttggatgattcattccatcatgtcatggcattttgacgaggaaattttgtagacatggcatggcaatatggcatacttcattccatgcatgctggagcattgccatcatccccacgaagcatgtaatcacaacgttgattggtttgttcttaaatgttttcatccaggctgagaggctaacagggatagtaaaattgcaaaaaagtcgcaagctgtttcattcttttactacagtggtggaacaccgaagcgttgctacggtcccttttggaaagccttcttgttcttttcttacagtggaacgccttggttcttttgctgcagtggaacaccttcattcttttgctgcaggtgaatgccaaggcgtggctatgtactttttggttagagaaccttagtgatgctaaaatataagctaactgaagcttagtgatgttgatgagatgtaaggaacttatggatctgctgaggtggtttctagcttgactaggcaaccctttcggtttttatcctgccttgtaataccaaggcatggttgtggcccttttgtttagagaaccttagtgatgctggtatgtaagccaacttaatcttagtgatgttgatgagataaacaatggatccgatgaggtggtttatagcttgacgagttctttgattagatgatgagagctgagaagtttcattgacttatgcatcaga

SEQ ID NO: 121990 - DNA, 1155 bp, Zea Mays
agaaacacaaacacaaagcacaattgcacaaacgcaagaagctcaacaagacaagaaactgaggcaagaccaagaagaagaggaggaagaagaaaaaggcctagaacaagatgggaggcgaaggcagcacaagcccagcgcctgggggagccgcctgcgcggtctgcggcggcgccgcggtggtgtactgcgtggcggacgctgcggcgctctgcagcccctgcgatgccgctgtccacgccgcaaacctgctggcgtcgcgccatgagcgcgtgcctctttccatggccgccgtgccgtccgcatcaggcgcgtacgacgacctgttcgcgcccgacgacgtcgacgcggcggcgcccgcgcaggcgcaggggctgggcagcccccggaacggcagctcgtcggcgagcttcaccaccagcggcgacagcggcgcggagggcagcagcctgtttgacttcgacctgctgtctggcgtggacctcgcggcctgtgtcacggacggcgtggcgcccctccaccacgacgacgctgcaccgctgtgggcgcagcctggcctggccgtcgcgtgggcgaccgcgtggtctccggcggactccgccgccgccgtagtcgccgcggcggcggagcgggaggcgagggtgcagaggtaccgcgagaagcgcaagaaccgcaggttccacaagaccatccgctacgcgtcccgcaaggcctacgccgaggcgcggccgaggatcaagggccgcttcgtcaagcgcgccgccggcacctcctcctcctcctcctcgggcgccggcacacccgacgacggcaacgacgccacgggcgccgctgccaagttctggctctccttctccgacgacgccagggacggcttctacgtggacgccggggcctacggggtcgtgccaagcttctacagagttcgttccgaacaactcacaagctgaagaaagccttggaaatggtcaccgcaggctcacatcgcttctggccggcggtggcgttcgcccagcttgaaacaagctaagaaatgggcgcgcgccaatggcgccttcgttcttgttttgtgtcgtgccgtcattcatgcgggtagcattcgtggtgaaattcggccatcgctatttttttttaatgatggctcggaatttcgac

SEQ ID NO: 121991 - DNA, 1998 bp, Zea Mays
atgggcatcgtgtttacgcggctcttctcgtcggtcttcggtaaccgcgaggctcgcatcctcgtcctcggcctggacaatgctggcaagaccaccatactctatagactgcaaatgggagaggtcgtctccacgatcccgacaattggattcaacgttgagacggtgcagtacaacaacatcaagttccaagtatgggatcttggggaaatgcttctccagattgaagcagaggttcatattctctctgcggttcggaagtgcatggttgatgatgttggacaggtcaccactcctgtgccccatggcgtgctggtggatagccccaagcccccaataggctttgcttcatcggcatggcttcttgtattaacaccaactttcttctcgacaggtggtcaaacaagcatcaggccatactggcggtgctactttccaaacacccaggctatcatatatgttgttgattcaagcgatacagataggcttgtaacagcaaaagaagaattccatgccatccttgaggaggatgaacttaaaggtgcagttgtccttgtgtatgcaaataagcaggagctctgcctctcaattaagaagaaaggaattgacccagttttaaggaaaatcgggcccaaaacgtacacagggtgcacaagcaacccagacaacggcagtcccacacacaaagaccatccagtgtcattgttgccgagctcaatacaaagggcgagtagctccgactcctcaagacgggcaacacaaggccaaaggagaaccgacgatgattacacccaaacactggcacggaaggaggaagaccgcgaccgcacctccacccgcataccggacgctgagaagcgaaagcaacagccgaaaagtgacgtcgtggccgagacgaacttcaaaagcgacgcctttaggaaggggaagcgacgcccatggacatcaccgtcgccgaggctttcgtccaagaagtcccctagcacaaacatcaagccaagaccccgggacaacgcaggctacctccgccaacgtcgctgccctgacatcccgcccaaaccctcccagagggacatcgacatgcttgctaccgcaaaagttgtgttggatgccacccccaccggccgggcacacggaatcgggcaccaccttgcggcgagtgccccactgccacaggccagtgtcgctgcaccccctgacgacaactcggcggccgcgagcacacagcccctgcaacctctcccctcccgagccgccaggagcaccgtgcaagagggccgcaaaatcctcccaaagagccagccaaccggcaggccgatggcactgccgaccggcgctagcaccgaagctcacgccctgccccgtgacagcacgtgccacggcgcacagcggagcagccacgggtcgtgtaggacgcggacacctggcgggcgagcacgccaccgccgagagacacgcacacgccgccagcgggctagtccgccccgcccctgtccgccacctgcggcgtccacgtgggcgcacagcaccgccacggccaccaagaccatgtcccgagcgcggatccgggcgctcgcgacgccaacaagcggatgcctcgctgccaccgtcttaggggtccgcgcgagcatcccggatcttccaggtgcactcgatgatgctgccattacagagtcattagaactacacaaaattaagagccgccaatgggcgattttcaaaacatctgcaataaagggagaggggctcttcgaaggtttggactgcctgcgcttcacacgtgcagccaaccaaacacaaactcagataaagtcaacacacgtggtcacgcgggacgagacgatgcagctaaccaatcacatgaattattttcacagatcacgctataatggtttgtcattttttttatacactataaccggtggaatgctaggtggccaagagccaccagatcgactctactggctgctggtcgtgccgtgacagccggaatgaaag

SEQ ID NO: 121992 - DNA, 1258 bp, Zea Mays
ataaattatcataataataattatctatattaactgactatacaagagtgtcgtataaaattatcataaaaactaaacaccttgtatacaggaaaaacgataaacaaaagagtaaaaaaccaaaaaacaaaaacaaagtaccatcgcccttccggttttctccccagcccccgccccggtcgcggagccgtcgttctcgtctttcggtactcgcgcgcgccagctcacttctctacttcccttccccagatctacctccattcttccctcaaaatcacagatctctctcggccccgtgcccagcgctccgaaaccctagcgccgccgcgggtgccaggccgcgagcgtcgccatgggcatcgtgtttacgcggctcttctcgtcggtcttcggtaaccgcgaggctcgcatcctcgtcctcggcctggacaatgctggcaagaccaccatactctatagactgcaaatgggagaggtcgtctccacgatcccgacaattggattcaacgttgagacggtgcagtacaacaacatcaagttccaagtatgggatcttggtggtcaaacaagcatcaggccatactggcggtgctactttccaaacacccaggctatcatatatgttgttgattcaagcgatacagataggcttgtaacagcaaaagaagaattccatgccatccttgaggaggatgaacttaaaggtgcagttgtccttgtgtatgcaaataagcaggatcttccaggtgcactcgatgatgctgccattacagagtcattagaactacacaaaattaagagccgccaatgggcgattttcaaaacatctgcaataaagggagaggggctcttcgaaggtttggactggctcagtaacacgctcaaatctggaagcagctaaggagcctccgcctcgtcatgaatcatttgctggatggtaaagaatagccgatgcttgcaagtcagcgcgcaaatcccattctctttgttttaactccagaagttctacaccgccatcaattatctgtaaagtgcgtgttaaattttttggatactacattagatgtacccccaggttgagatcaagaataggtctgtggaaaatgacgagcaaactgtgctactgtctttacccgtaaatctcatggatcatgacaagtttttttttgtaccccaatatgattaaacttactccacatttctatgttttcgtatcagtgatcattacagaaactgctcttaagcaccttctgctacc

SEQ ID NO: 121993 - DNA, 1156 bp, Zea Mays
ataaattatcataataataattatctatattaactgactatacaagagtgtcgtataaaattatcataaaaactaaacaccttgtatacaggaaaaacgataaacaaaagagtaaaaaaccaaaaaacaaaaacaaagtaccatcgcccttccggttttctccccagcccccgccccggtcgcggagccgtcgttctcgtctttcggtactcgcgcgcgccagctcacttctctacttcccttccccagatctacctccattcttccctcaaaatcacagatctctctcggccccgtgcccagcgctccgaaaccctagcgccgccgcgggtgccaggccgcgagcgtcgccatgggcatcgtgtttacgcggctcttctcgtcggtcttcggtaaccgcgaggctcgcatcctcgtcctcggcctggacaatgctggcaagaccaccatactctgtggtcaaacaagcatcaggccatactggcggtgctactttccaaacacccaggctatcatatatgttgttgattcaagcgatacagataggcttgtaacagcaaaagaagaattccatgccatccttgaggaggatgaacttaaaggtgcagttgtccttgtgtatgcaaataagcaggatcttccaggtgcactcgatgatgctgccattacagagtcattagaactacacaaaattaagagccgccaatgggcgattttcaaaacatctgcaataaagggagaggggctcttcgaaggtttggactggctcagtaacacgctcaaatctggaagcagctaaggagcctccgcctcgtcatgaatcatttgctggatggtaaagaatagccgatgcttgcaagtcagcgcgcaaatcccattctctttgttttaactccagaagttctacaccgccatcaattatctgtaaagtgcgtgttaaattttttggatactacattagatgtacccccaggttgagatcaagaataggtctgtggaaaatgacgagcaaactgtgctactgtctttacccgtaaatctcatggatcatgacaagtttttttttgtaccccaatatgattaaacttactccacatttctatgttttcgtatcagtgatcattacagaaactgctcttaagcaccttctgctacc

SEQ ID NO: 121994 - DNA, 936 bp, Zea Mays
ataaattatcataataataattatctatattaactgactatacaagagtgtcgtataaaattatcataaaaactaaacaccttgtatacaggaaaaacgataaacaaaagagtaaaaaaccaaaaaacaaaaacaaagtaccatcgcccttccggttttctccccagcccccgccccggtcgcggagccgtcgttctcgtctttcggtactcgcgcgcgccagctcacttctctacttcccttccccagatctacctccattcttccctcaaaatcacagatctctctcggccccgtgcccagcgctccgaaaccctagcgccgccgcgggtgccaggccgcgagcgtcgccatgggcatcgtgtttacgcggctcttctcgtcggtcttcggtaaccgcgaggctcgcatcctcgtcctcggcctggacaatgctggcaagaccaccatactctatagactgcaaatgggagaggtcgtctccacgatcccgagtgagttctgatttaccgagtcgtcattcctgttgctggttgaagttgttggatttgatgtggtgccccgcgtgtgttgcagcaattggattcaacgttgagacggtgcagtacaacaacatcaagttccaagtatgggatcttggtggtcaaacaagcatcaggtaccggctctttatcatgatagtaaattcctgactgtcatttctgaagtaaataatactattgcatttatttaatcaccgatgaaaagcagtgcaatagaggtactctactactacctttttgtttattataagtaattggtggagagtggagacaataccttgttattaccctgccacttcagtttccacaagctaaattatgaggctgtaagaatggacatgtttaatgaagataagaaaattttatttttttcccataacaggatgagcctgaa

SEQ ID NO: 121995 - DNA, 336 bp, Zea Mays
actaaaagttcacaattcatgatataacaagttcacaatataaaaagttcacaatgatcacaaatttataatataaaaagtgtacaaagatcacaagttcacaatataacaagttcacagtataacaagttcataaagatcacaagttcatagtctcaaagttcacaattcacaatatccactcgatctagctgacatggcatgcttacttatgaaatattttttcctcacataaagagtttttcacaacctcacagaaaaaccctaaaacctagtgtgtggaaaagaccaaatcgttaatctcaactgccttccaacaccatctatccaaaaaaa

SEQ ID NO: 121996 - DNA, 651 bp, Zea Mays
ccatgttcgcatgtttcagttcatctcccttgccgcggacacgaaaagctagctgggtcagaaacaaaggagcggggggaaaagaaaagcagctggctctggctgtgggctcgctggtccatccatgtcgtcgactcgtcgtccagtccatgagagtgatgctacataggatagggagtagtactgctactgctgctgctgctgctagagagtagagagagagggtgtcctgcctgcgtacacatagcatacgtaccgcgagctcgacggcggcgaaggccagcagcgtgcgcaggcagccggcgtaggagtcggagaggaagccgccgaggggcgagaggatgaagacggtgccgacgaagttggtcaccacgttggccgcctgcggcagcgggaagtgcagctccccgaacacgaaggtgatgaggttgctccccaccgccgccagcgccatcgtctgcgacgcctggaacactgcaatgcgcacaacaaccagacgccttcttaatctgttgctgtatatacacggcattgcccgggcgccggcgcggcgtcggcctgggtcttgcccttcgacttgttgggggtctggtgactggtgctacgagcagagtagcagtaataatccgtccccagggagggagggaggga

SEQ ID NO: 121997 - DNA, 454 bp, Zea Mays
gtcgaaaccagttctaccgtgtttcataatgccaataatctcagctgcgagagccttagagacgcgtgcattgagttcatggcctcttcagatcagatgagagctgttgtggccactcaaggttacgcttacgcaaatgccaagagaacatgcccttctgtcatcgttgatgcattggagaagacaagcaggtgccgcaagatgtagatcgccatttcattacctgcaaggagtaggcagtttagttcctctaatcatctttcttgttctcctagagaagctgtgtgatgactagtagaacctgtgggtggtaagatacgtttagttagtttcctaaattatggcgcgcatcttgtcgagctacttgatcaaggatcaatgtttggtggtgtcagtgccaaaactttaattttgtaatgcaaaagtgcattatcagtaacagttgcaaatcgat

SEQ ID NO: 121998 - DNA, 2510 bp, Zea Mays
cttgctgaaaatgaaaatcaggctaaactcctgaatgtgcgggatcaccttgatgcattgagttcacatacttctgcccatgtgtaccctgccagtggaccggctgtaccaagtaatcaaactaatgctgctacagaaccatccgaagatgtccagatgagggagaacataaccacgccaaatggcagtgctgtcactgtggatccaaatgcatcaacacatgccgataggctgacaaaaatcaagggtatactgtcaggagagacatctattcagttgacgctgcagttcctatacagccataataggtctgatcttcaaattttgaagactataaagcaagctgtggaaatgaggaacagtgtctgccacagtgcaacaatatgctccaatgcaatcatgcatgcagggacaacagttgataccttcctcagagaaaacttggaatggctaggtagggcaaccaactgggccaagttcagtgccactgctggactaggcgtcattcataggggccatcttcaacaaggccgcgcattgatggccccctacctaccacagaatggtgctggtggcagtggtagcccatactcggaaggaggtgccctctatgctcttggtttgattcatgccaaccatggtgaaggaatcaaagagtttcttcgtgagagtcttcgcaacaccacttctgaggtggtccagcatggtgcttgtctgggactcgggcttgcagcattaggtacatcagacgaggaaatatgcgaggacataaagaacattctttacacggatagtgctgtggctggtgaagcagctggtattggcttgggtttgctcatggttggcacggccagtgagaaggccacagagatgcttgcctatgctcatgatacacagcatgagaaaattatcaggggcttgtcacttggaattgcattgacggtgtatggcagggaagaagaagctgacaccttgatcgagcaaatgacgagagaccaagatcccatacttcgttacggcggtatgtatgcattggctctagcatacagagggactgcaaataacaaagccatccaccagcttctgcattttgctgtgtcggatgtgagcgatgatgtgcgaaggactgcagtgttggctcttggctttgtcctgtacaatgagcctgaacagacacccagaattgtgtccctactatcagaatcatacaatccacatgtccgttacggggcagccctggccgtcggaatctcctgtgccggatcaggattaagcgaagccatctccctactggagcctctgacatcagacgtcgtcgacttcgtgcgccagggtgctctcattgccatggcaatggtgatgatccagaccaatgaatcttacgatccacgcgtcggagcattcaggcgccagttggaaaagataatccttgacaagcacgaggacaccatgagcaaaatgggcgccatactggcttccggcattctcgacgccggcggcaggaacgtcggcatcaggctcaagtcgaggtcaaagcatgacaggctcactgccgttgtcggactagctgttttcacccagttctggtactggtacccgctgacctacttcataagcctcgccttctctccgacggccctcatcggcctcaactccgacctgaaagtgccgacgtttgagttcctgtcgaacgccaagccgtccctgttcgattaccccaagccagcgactcagcagactgcagccgcatctgtcaaggtgccggcggccatcttgtcgacatatgctaagtccaaggctagggcaaagaaggacgcagagagcaaggccaaggagaaagcagatgactcttccaatgcttctacttcgatgcaggtggacggcgccgctgcggagaagaaggctgccgaacccgagcctgcgttccaggttctgacgaacccggcccgggtcgttccagcccaggagaagttcgtgaaattcctggaaggcagcaggtacaagccggtgaaggctgccccctcgggattcgtcctcctgcaggacctcaagcccacggaggccgaggagctcgccctaactgacgcgccgtcaaccgccgccgccacgaccaacgccctggcatccagcgccagcgagccggctgccatggctgtcgacgatgagccccagccgcccccggccttcgagtacacatcgtaagggtgatggtcctcggatcaggatgcatgggttggccggttgggttgtctgtagcaacttcgtgttgttggatggcggactcgggcgtatcgctaattcatttttttaactccatataatacctttcctcaagcatttgtcgcgtgaagaaaatatcttgctacctgagttttctgctgaatttgcagcaaatcaggaagccatgtcaagaataataaattcgaacctttgtccccatattgtccatatattatgaaaaaaaaagagggaacaagttcgaatccaatggacgtcaatagagtttgggg

SEQ ID NO: 121999 - DNA, 6117 bp, Zea Mays
tttccccttccagtctcccacattcccctcccccggccctcgccatcctctcccgctaaccccaccccgtcgccccggcctcctcggtccagcggcgagcgggtccgtccggtcccgacgccgcaccacatcaccgcctgctcccacggccgtcctcactcgacctcgatcggaacccccggatcggaggtaccttcgcgcgcggctccgctccgacctcgtcctccatcggttggcatcggaagcggcggcggcggcgggttcccagccagctttcgaaaggttttattccgtgattgcaggcaatcaatcgtcaggctttttgggagctgtgttggggggaccggggggaagagtgaagttactgcagaggctaacatttaggttgtcgagtgatggcgcaaggcgccaatttccctggtttcattggcgccgtgggtggccatgatggcggtgtgaactttggcgggaacttctgtgacatggccttctaccagaagctaggggagggctccaacatgtcggttgacagcctcaacagcatgcagaccagcatgcatggcggatccatcaccatgtctgtggacaacaacagcagtgttggctctaacagtgactcccgcactggcatgcttggacatcctggtctcaaagggcctgtcattgtgggcagctactcggttgggcacagcatcttccggcccgggcgggtgtcccatgctttgagtgaggatgcactggcacatgctctgatggacaataagtttccaactgagacactcaaggattatgaggagtggactattgatctggggaagctgcaccttgggatgccctttgcacaaggtgcctttgggaagctctacaggggaacatataatgggatggatgttgctattaagcttttggagcgacctgaggctgaccctgagaaagctcaactgttagagcagcagtttgtccaagaagttatgatgcttgcaacactgaggcacccgaatattgtcaagttcattggtgcatgcaggaagccattggtttggtgtattgtgacagagtatgcaaagggtggatctcttaagaatttcttgagcaggaggcagaacaggtctgttccactgaagttggcagtcaagcaggcattggatgttgcacgcggcatggcctatgtccatggccttgggttcattcacagagatcttaagtcggacaacctcctgatttctggtgataagtccattaagattgccgactttggtgtggctaggattgaagtcaagactgaggggatgacacctgaaactggaacataccgttggatggctccgtaagttgatcaaaccttaattttgtcatgtttatttcaatcagttgttatgttatttaaataaggcaagaataagcagtttatgtggttacttacactttctgttaaattctttgcctgtaatatgctaatgactggtactgtgaaagcaaataacttttactagctatattcattgttcctttgttagacttaatagtttaatgtacttttttgggtctgtttctccaaaatcgagttatttcttttttgcatggcatgctttgagtaggggattgtacaagaatgtgtttttgcatgtgaaatatgcatgcttctgctctctagaactaccaactttattccacatattgctttggagtacttaggaacattaaagtaggggtgctattttaggaatctttatgctcccttaccttttggatgtgctattttagacagatgctaatgattaataactattgctatttatggttgtgatttgatctttcactgcgtttttctgatattatgaactagcatttttctgccaagaggtccataaagtatgtcttttaggaacatttgtaaatactatagatccaacatgctattttgtattttagttataacttaaagttatgttagcttctacttgttggtcaaggaaatttgatctccctcagctccagaatatgtgaggtggtttaattcaatgttttatacaagtatttttcacttataacataaatatgactttgttagtgtatgaaggataaataagtaattatatgatgcatgatagcatctcttctagttaaagccaatttaattgcatgtcaggaatatgttttctgtctttttttctcacttacaaatttaatttattttgttgtcttattaagtgcaatttaaacaatcatgtgatgcatgataacatctcgcttaattaaaggcggttgatgagaagggaaggttcgtagatacaggcgtttaacatgcccctagttgcattaggcattaggcaaaatgcaaagtaattggtgttggggttggcaaccacacaatatttgttagagtgaacgaactaaccagttcaactcaaaagcttaagctgatagtagaaggtggccaatccatttatacacttcaacacccacactcacgtgcagccagagagaaaggcgcaaacatggaaataaatgtgtggaggcacaaataaagtctttgccagaattcaaactcgaggcctctggctttgatagcatgttagagtggacgaactaaccagttcaacccaaaagcttaagctgataggagaaggtggccaatccatttatacacttcaacagtattgacctagatcagtggtcagttgacgcctccatgctgcaattgaagcctcatattggcctaattatgctacctttgctgaatttgtcattctgtgatcagttgctccaggttcaattggtggtagaggcaaaggtgaggggtagtggagtcaagggttggtaatgcaacagtaagaagaggtggggcagtgtgggatgaaggaagctttggtcccacgaattggacccaactttgaattgatgggcctagttcgtttcgagtctttggttgttaagttggactggacttgaaatgtgtttgaattatggacaactaaaatatgtaggccataattttggggtcatcgtctgaattgttcaacacagatgtggccctcgtcttcagtgatgatgacattctgccccgtaagctccactttttggtgattctggtgctgccacggccaacatttgcacctccttgttgacacccacctgtctctgaaatcatgtaatagttggtgtctctagctatgagatggtgatgtcaagcattgtggtggccaaattggtagtgccgagatcctttgttggcatcaacttcccacctagatccaccatgtccttgtattcattctcatagttgagagaagtggcagtagaggcaaagggatattggagtcaagggttggcaatgcaatactaagaagaggtggagcaatatgggattggagaagctttggtcccatgaattgagccccactttgtggaatgggaatggtcccaattcatgttgagtgtttggttgttaagttggattggaattgaaataggtaggccataattttgagggttaccatttaaattagccacccaagatgtggttcgggacttcgggtcctcattggcactagcaataaaacatttgtgccacaccctctcgcccgcttgggcgtcagtgtttctgttatagttgtcctctccatccatgagatggtggtgatgtcaagcattgtgcaggcaagttgatattgttgagatcctttaccggcatcacctttctcgtcaaggtccaccatgtcctctttgttctcatagttgagaagtggtggtacaagcaaaggcgaaggggttgcagagtaagaagaggtggatcattatgggacgaaggaagctttggtcccattaggttccatgaatgggcccaacaatgatcatggtccctgccatggtggcgacgacgacaatggccggagagaagccgaacggaatatgaacaagatgtgtgaatcaatggcaacttcaatttcttttgcaatcaaacatgatctagaattttcatgtgattattattctgtaatttctttggcaaccaaacacaataattggtaatggggagccttatggtgcatttggcaactgatgggtagggcatgcatctaatcacaaataacaatgtggatgtatccatcttctatttggtaagagaagtgactagtgggacctagttccatagaccctattctatgtaacactaagggtagatatatcaccttgcgccgtatatctgcttatgtttgtgtcaccatcaccctatcagctcatggccacaaccttgtgcccttctgtattaacaatggttgccattggcaaaacatgcatctacatggaagctttcgcgagtgagaggaacaatttgctgccattgcgcctgcactcgatcttgcactaatgacgctcgctcacacaacgtcggtgaaagtctctgggagcacgagctaggctcattgcctcgtgagacaatgataggctttccgtatcctcatttagcaaggtaattgtggttaatttaacctaaatagatggtaaaaccacatgtcgtttgtgccctaacagtccctcccactgccacaaaataaacgagagatttcaaactatgtatttctaaactcctattcccccaaccataccattagggcttatgcattttttgtctatactcggttactttgttgggctagtaggtttgacgagtcatgagtgcacctcaaatgttctatcctcccttgttgtattccttgtagttgtagcttgattagtttttagatggccatgcaaaatgagcaagatgataccagatcctcttctaatcattgatatgttagtgattagacgtcaaaaaatagcacttgcgaatcaacataataacatggcctagagagggctagaggcaagctagatgcttaattttcatcgggagttgattaggcattgggctgcaatgactttgagcgtcaaagtttttctctttcccaatcttgaagtcaattgtgttttagacattgggctgtaattgttagtggtgatgcttcactgccatttccaagtaatctttctcccaaaatgaagagatgtgctctccagatttgtactcatcgataaatcatggctagtcattgtctaatcatgataggacaagtatacaactagtcgacgccaaagcgatgtggcttaactttccaacttgaaaacaaaccaaggtgctttgccacactcttgatggagcaagaagtcattatgtaatattgactatttcattctttctttgcaagatttcaaaagaggaatccctcatctaatccttgatgagtagcaataatatttctgtagaaagggagccaacttggctccttgttcctggaaagcttgctaggaaccaacaaggataccaaatatgttgatatccaaatatcttcagtatatcaaaactcggccggtgggggaaagaccgccccacactatttcactaagaaaagatcaacgggagcctgatcgagaaaagctagcaccctcatacatggtgatgttgccccctatggttcgggccttgacccgtgctttggggcctaacccacacgaccagccccttacatgagggcccgtctaccataggtcggtccacccatgccaaccaaggaaaccagcgagtgacttgttttaacctcgacctgaaattcacttccatgaagagtcaaacctaggacctaaggagtgctactcagaccacttaaccaactcagctagaggccctttcgcatctttagtatatcaaaatagttgaaggttaaccttggagttatttgtttcatatcttctatctattttgtcaataggaacattattcactccaattttgaatcaatatccaaacgagatccctgttacaaacctgagaattgatagataattacccagtccctaaggactattatatacatatagatagtgggccaggcctaatgggccttaacacccctcctcaaactcaaggtggaaatggaggatctgaagctttgagtttgatcaagtgaaattgatgttgtgctcttgtttgtgctttggtgaagaaatctgccaactgagattttgagggcacatatttaagatcaatagtcttctgctaacaatgagatcgag

SEQ ID NO: 122000 - DNA, 6098 bp, Zea Mays
tttccccttccagtctcccacattcccctcccccggccctcgccatcctctcccgctaaccccaccccgtcgccccggcctcctcggtccagcggcgagcgggtccgtccggtcccgacgccgcaccacatcaccgcctgctcccacggccgtcctcactcgacctcgatcggaacccccggatcggaggtaccttcgcgcgcggctccgctccgacctcgtcctccatcggttggcatcggaagcggcggcggcggcgggttcccagccagctttcgaaagggcaatcaatcgtcaggctttttgggagctgtgttggggggaccggggggaagagtgaagttactgcagaggctaacatttaggttgtcgagtgatggcgcaaggcgccaatttccctggtttcattggcgccgtgggtggccatgatggcggtgtgaactttggcgggaacttctgtgacatggccttctaccagaagctaggggagggctccaacatgtcggttgacagcctcaacagcatgcagaccagcatgcatggcggatccatcaccatgtctgtggacaacaacagcagtgttggctctaacagtgactcccgcactggcatgcttggacatcctggtctcaaagggcctgtcattgtgggcagctactcggttgggcacagcatcttccggcccgggcgggtgtcccatgctttgagtgaggatgcactggcacatgctctgatggacaataagtttccaactgagacactcaaggattatgaggagtggactattgatctggggaagctgcaccttgggatgccctttgcacaaggtgcctttgggaagctctacaggggaacatataatgggatggatgttgctattaagcttttggagcgacctgaggctgaccctgagaaagctcaactgttagagcagcagtttgtccaagaagttatgatgcttgcaacactgaggcacccgaatattgtcaagttcattggtgcatgcaggaagccattggtttggtgtattgtgacagagtatgcaaagggtggatctcttaagaatttcttgagcaggaggcagaacaggtctgttccactgaagttggcagtcaagcaggcattggatgttgcacgcggcatggcctatgtccatggccttgggttcattcacagagatcttaagtcggacaacctcctgatttctggtgataagtccattaagattgccgactttggtgtggctaggattgaagtcaagactgaggggatgacacctgaaactggaacataccgttggatggctccgtaagttgatcaaaccttaattttgtcatgtttatttcaatcagttgttatgttatttaaataaggcaagaataagcagtttatgtggttacttacactttctgttaaattctttgcctgtaatatgctaatgactggtactgtgaaagcaaataacttttactagctatattcattgttcctttgttagacttaatagtttaatgtacttttttgggtctgtttctccaaaatcgagttatttcttttttgcatggcatgctttgagtaggggattgtacaagaatgtgtttttgcatgtgaaatatgcatgcttctgctctctagaactaccaactttattccacatattgctttggagtacttaggaacattaaagtaggggtgctattttaggaatctttatgctcccttaccttttggatgtgctattttagacagatgctaatgattaataactattgctatttatggttgtgatttgatctttcactgcgtttttctgatattatgaactagcatttttctgccaagaggtccataaagtatgtcttttaggaacatttgtaaatactatagatccaacatgctattttgtattttagttataacttaaagttatgttagcttctacttgttggtcaaggaaatttgatctccctcagctccagaatatgtgaggtggtttaattcaatgttttatacaagtatttttcacttataacataaatatgactttgttagtgtatgaaggataaataagtaattatatgatgcatgatagcatctcttctagttaaagccaatttaattgcatgtcaggaatatgttttctgtctttttttctcacttacaaatttaatttattttgttgtcttattaagtgcaatttaaacaatcatgtgatgcatgataacatctcgcttaattaaaggcggttgatgagaagggaaggttcgtagatacaggcgtttaacatgcccctagttgcattaggcattaggcaaaatgcaaagtaattggtgttggggttggcaaccacacaatatttgttagagtgaacgaactaaccagttcaactcaaaagcttaagctgatagtagaaggtggccaatccatttatacacttcaacacccacactcacgtgcagccagagagaaaggcgcaaacatggaaataaatgtgtggaggcacaaataaagtctttgccagaattcaaactcgaggcctctggctttgatagcatgttagagtggacgaactaaccagttcaacccaaaagcttaagctgataggagaaggtggccaatccatttatacacttcaacagtattgacctagatcagtggtcagttgacgcctccatgctgcaattgaagcctcatattggcctaattatgctacctttgctgaatttgtcattctgtgatcagttgctccaggttcaattggtggtagaggcaaaggtgaggggtagtggagtcaagggttggtaatgcaacagtaagaagaggtggggcagtgtgggatgaaggaagctttggtcccacgaattggacccaactttgaattgatgggcctagttcgtttcgagtctttggttgttaagttggactggacttgaaatgtgtttgaattatggacaactaaaatatgtaggccataattttggggtcatcgtctgaattgttcaacacagatgtggccctcgtcttcagtgatgatgacattctgccccgtaagctccactttttggtgattctggtgctgccacggccaacatttgcacctccttgttgacacccacctgtctctgaaatcatgtaatagttggtgtctctagctatgagatggtgatgtcaagcattgtggtggccaaattggtagtgccgagatcctttgttggcatcaacttcccacctagatccaccatgtccttgtattcattctcatagttgagagaagtggcagtagaggcaaagggatattggagtcaagggttggcaatgcaatactaagaagaggtggagcaatatgggattggagaagctttggtcccatgaattgagccccactttgtggaatgggaatggtcccaattcatgttgagtgtttggttgttaagttggattggaattgaaataggtaggccataattttgagggttaccatttaaattagccacccaagatgtggttcgggacttcgggtcctcattggcactagcaataaaacatttgtgccacaccctctcgcccgcttgggcgtcagtgtttctgttatagttgtcctctccatccatgagatggtggtgatgtcaagcattgtgcaggcaagttgatattgttgagatcctttaccggcatcacctttctcgtcaaggtccaccatgtcctctttgttctcatagttgagaagtggtggtacaagcaaaggcgaaggggttgcagagtaagaagaggtggatcattatgggacgaaggaagctttggtcccattaggttccatgaatgggcccaacaatgatcatggtccctgccatggtggcgacgacgacaatggccggagagaagccgaacggaatatgaacaagatgtgtgaatcaatggcaacttcaatttcttttgcaatcaaacatgatctagaattttcatgtgattattattctgtaatttctttggcaaccaaacacaataattggtaatggggagccttatggtgcatttggcaactgatgggtagggcatgcatctaatcacaaataacaatgtggatgtatccatcttctatttggtaagagaagtgactagtgggacctagttccatagaccctattctatgtaacactaagggtagatatatcaccttgcgccgtatatctgcttatgtttgtgtcaccatcaccctatcagctcatggccacaaccttgtgcccttctgtattaacaatggttgccattggcaaaacatgcatctacatggaagctttcgcgagtgagaggaacaatttgctgccattgcgcctgcactcgatcttgcactaatgacgctcgctcacacaacgtcggtgaaagtctctgggagcacgagctaggctcattgcctcgtgagacaatgataggctttccgtatcctcatttagcaaggtaattgtggttaatttaacctaaatagatggtaaaaccacatgtcgtttgtgccctaacagtccctcccactgccacaaaataaacgagagatttcaaactatgtatttctaaactcctattcccccaaccataccattagggcttatgcattttttgtctatactcggttactttgttgggctagtaggtttgacgagtcatgagtgcacctcaaatgttctatcctcccttgttgtattccttgtagttgtagcttgattagtttttagatggccatgcaaaatgagcaagatgataccagatcctcttctaatcattgatatgttagtgattagacgtcaaaaaatagcacttgcgaatcaacataataacatggcctagagagggctagaggcaagctagatgcttaattttcatcgggagttgattaggcattgggctgcaatgactttgagcgtcaaagtttttctctttcccaatcttgaagtcaattgtgttttagacattgggctgtaattgttagtggtgatgcttcactgccatttccaagtaatctttctcccaaaatgaagagatgtgctctccagatttgtactcatcgataaatcatggctagtcattgtctaatcatgataggacaagtatacaactagtcgacgccaaagcgatgtggcttaactttccaacttgaaaacaaaccaaggtgctttgccacactcttgatggagcaagaagtcattatgtaatattgactatttcattctttctttgcaagatttcaaaagaggaatccctcatctaatccttgatgagtagcaataatatttctgtagaaagggagccaacttggctccttgttcctggaaagcttgctaggaaccaacaaggataccaaatatgttgatatccaaatatcttcagtatatcaaaactcggccggtgggggaaagaccgccccacactatttcactaagaaaagatcaacgggagcctgatcgagaaaagctagcaccctcatacatggtgatgttgccccctatggttcgggccttgacccgtgctttggggcctaacccacacgaccagccccttacatgagggcccgtctaccataggtcggtccacccatgccaaccaaggaaaccagcgagtgacttgttttaacctcgacctgaaattcacttccatgaagagtcaaacctaggacctaaggagtgctactcagaccacttaaccaactcagctagaggccctttcgcatctttagtatatcaaaatagttgaaggttaaccttggagttatttgtttcatatcttctatctattttgtcaataggaacattattcactccaattttgaatcaatatccaaacgagatccctgttacaaacctgagaattgatagataattacccagtccctaaggactattatatacatatagatagtgggccaggcctaatgggccttaacacccctcctcaaactcaaggtggaaatggaggatctgaagctttgagtttgatcaagtgaaattgatgttgtgctcttgtttgtgctttggtgaagaaatctgccaactgagattttgagggcacatatttaagatcaatagtcttctgctaacaatgagatcgag

SEQ ID NO: 122001 - DNA, 1312 bp, Zea Mays
tttccccttccagtctcccacattcccctcccccggccctcgccatcctctcccgctaaccccaccccgtcgccccggcctcctcggtccagcggcgagcgggtccgtccggtcccgacgccgcaccacatcaccgcctgctcccacggccgtcctcactcgacctcgatcggaacccccggatcggaggtaccttcgcgcgcggctccgctccgacctcgtcctccatcggttggcatcggaagcggcggcggcggcgggttcccagccagctttcgaaagggcaatcaatcgtcaggctttttgggagctgtgttggggggaccggggggaagagtgaagttactgcagaggctaacatttaggttgtcgagtgatggcgcaaggcgccaatttccctggtttcattggcgccgtgggtggccatgatggcggtgtgaactttggcgggaacttctgtgacatggccttctaccagaagctaggggagggctccaacatgtcggttgacagcctcaacagcatgcagaccagcatgcatggcggatccatcaccatgtctgtggacaacaacagcagtgttggctctaacagtgactcccgcactggcatgcttggacatcctggtctcaaagggcctgtcattgtgggcagctactcggttgggcacagcatcttccggcccgggcgggtgtcccatgctttgagtgaggatgcactggcacatgctctgatggacaataagtttccaactgagacactcaaggattatgaggagtggactattgatctggggaagctgcaccttgggatgccctttgcacaaggtgcctttgggaagctctacaggggaacatataatgggatggatgttgctattaagcttttggagcgacctgaggctgaccctgagaaagctcaactgttagagcagcagtttgtccaagaagttatgatgcttgcaacactgaggcacccgaatattgtcaagttcattggtgcatgcaggaagccattggtttggtgtattgtgacagagtatgcaaagggtggatctcttaagaatttcttgagcaggaggcagaacaggtctgttccactgaagttggcagtcaagcaggcattggatgttgcacgcggcatggcctatgtccatggccttgggttcattcacagagatcttaagtcggacaacctcctgatttctggtgataagtccattaagattgccgactttggtgtggctaggattgaagtcaagactgaggggatgacacctgaaactggaacataccgttggatggctccgtaa

SEQ ID NO: 122002 - DNA, 1331 bp, Zea Mays
tttccccttccagtctcccacattcccctcccccggccctcgccatcctctcccgctaaccccaccccgtcgccccggcctcctcggtccagcggcgagcgggtccgtccggtcccgacgccgcaccacatcaccgcctgctcccacggccgtcctcactcgacctcgatcggaacccccggatcggaggtaccttcgcgcgcggctccgctccgacctcgtcctccatcggttggcatcggaagcggcggcggcggcgggttcccagccagctttcgaaaggttttattccgtgattgcaggcaatcaatcgtcaggctttttgggagctgtgttggggggaccggggggaagagtgaagttactgcagaggctaacatttaggttgtcgagtgatggcgcaaggcgccaatttccctggtttcattggcgccgtgggtggccatgatggcggtgtgaactttggcgggaacttctgtgacatggccttctaccagaagctaggggagggctccaacatgtcggttgacagcctcaacagcatgcagaccagcatgcatggcggatccatcaccatgtctgtggacaacaacagcagtgttggctctaacagtgactcccgcactggcatgcttggacatcctggtctcaaagggcctgtcattgtgggcagctactcggttgggcacagcatcttccggcccgggcgggtgtcccatgctttgagtgaggatgcactggcacatgctctgatggacaataagtttccaactgagacactcaaggattatgaggagtggactattgatctggggaagctgcaccttgggatgccctttgcacaaggtgcctttgggaagctctacaggggaacatataatgggatggatgttgctattaagcttttggagcgacctgaggctgaccctgagaaagctcaactgttagagcagcagtttgtccaagaagttatgatgcttgcaacactgaggcacccgaatattgtcaagttcattggtgcatgcaggaagccattggtttggtgtattgtgacagagtatgcaaagggtggatctcttaagaatttcttgagcaggaggcagaacaggtctgttccactgaagttggcagtcaagcaggcattggatgttgcacgcggcatggcctatgtccatggccttgggttcattcacagagatcttaagtcggacaacctcctgatttctggtgataagtccattaagattgccgactttggtgtggctaggattgaagtcaagactgaggggatgacacctgaaactggaacataccgttggatggctccgtaa

SEQ ID NO: 122003 - DNA, 1043 bp, Zea Mays
aaactgttccgtcacatacccgccgccgccgggatccatctctcgtccgtccttcaccccatccaacggctgatgcgtaaggaggagtcaccaacacgcaacacggaaggaaaaaaggaaaagattcagacggacggggcaccactgcctgtcgccctcaagaacccccaccatccccaccgccagcagatcgattcgcgaaagagacgaccgccgccgcatcggaccgtgcccgagccccccttctcctcgctgactcggctcccctcctccgccgtcgccggaggcgaagcaagtggggaccacagaagcattagctgggtgaacccactcaaagggggcagggaattgtgtgctagtttgaatggctgctacaaagcttcaggccctttggaaccacccggctggccccaaaaccattcatttctgggcgccaacattcaaatggggcatcagcattgccaacatagccgactttgctaaaccacctgaaaagatatcttaccctcagcaagttgctgttgcatgcactggactcatttggtcaaggtacagcttggttatcacaccgagaaactggaaccttttcagtgttaacgttgcaatggcgggtacaggcctgtatcagctttcacggaagatcaggcaagattacttatccgatgagaaagatgctgcttcacaactggaagcatagataatgacaacaggcaaagaataacggattggaaagcctgcatcctaggagtctactcttgattttttttttctgggcaagcaaagaataacggatgggtcatgtttgttttcctgttattctgaaatcgtgagcaggctaatgtgaaaatcttccgccaaaaaagaaaaccaatgaagtgatgttttgagcattttttttgtgggaacaagtcatgaaagtacatggtttatctgttgttcttttgttccttcaaccgctttatttgggaaaacgctaaattgttgccaagctgattgaccataatccagcctttgctcgattcattggtaaaaatctaaaaaaa

SEQ ID NO: 122004 - DNA, 1162 bp, Zea Mays
aaactgttccgtcacatacccgccgccgccgggatccatctctcgtccgtccttcaccccatccaacggctgatgcgtaaggaggagtcaccaacacgcaacacggaaggaaaaaaggaaaagattcagacggacggggcaccactgcctgtcgccctcaagaacccccaccatccccaccgccagcagatcgattcgcgaaagagacgaccgccgccgcatcggaccgtgcccgagccccccttctcctcgctgactcggctcccctcctccgccgtcgccggaggcgaagcaagtggggaccacagaagcattagctgggtgaacccactcaaagggggcagggaattgtgtgctagtttgaatggctgctacaaagcttcaggccctttggaaccacccggctggccccaaaaccattcatttctgggcgccaacattcaaatggggcatcagcattgccaacatagccgactttgctaaaccacctgaaaagatatcttaccctcagcaagttggtacggataagctgctcaatcagtttaagttgtaatcctgcattccatataacatgtacatttgttaaagtgcattattgtataattctggtctgcttactcttttacatgatgattagctgttgcatgcactggactcatttggtcaaggtacagcttggttatcacaccgagaaactggaaccttttcagtgttaacgttgcaatggcgggtacaggcctgtatcagctttcacggaagatcaggcaagattacttatccgatgagaaagatgctgcttcacaactggaagcatagataatgacaacaggcaaagaataacggattggaaagcctgcatcctaggagtctactcttgattttttttttctgggcaagcaaagaataacggatgggtcatgtttgttttcctgttattctgaaatcgtgagcaggctaatgtgaaaatcttccgccaaaaaagaaaaccaatgaagtgatgttttgagcattttttttgtgggaacaagtcatgaaagtacatggtttatctgttgttcttttgttccttcaaccgctttatttgggaaaacgctaaattgttgccaagctgattgaccataatccagcctttgctcgattcattggtaaaaatctaaaaaaa

SEQ ID NO: 122005 - DNA, 944 bp, Zea Mays
aaactgttccgtcacatacccgccgccgccgggatccatctctcgtccgtccttcaccccatccaacggctgatgcgtaaggaggagtcaccaacacgcaacacggaaggaaaaaaggaaaagattcagacggacggggcaccactgcctgtcgccctcaagaacccccaccatccccaccgccagcagatcgattcgcgaaagagacgaccgccgccgcatcggaccgtgcccgagccccccttctcctcgctgactcggctcccctcctccgccgtcgccggaggcgaagcaagtggggaccacagaagcattagctgggtgaacccactcaaagggggcagggaattgtgtgctagtttgaatggctgctacaaagcttcaggccctttggaaccacccggctggccccaaaaccattcatttctgggcgccaacattcaaatggggcatcagcattgccaacatagccgactttgctaaaccacctgaaaagatatcttaccctcagcaagttggtacggataagctgctcaatcagtttaagttgtaatcctgcattccatataacatgtacatttgttaaagtgcattattgtataattctggtctgcttactcttttacatgatgattagctgttgcatgcactggactcatttggtcaaggtacagcttggttatcacaccggtaagccattagtcagtttgtggtacttgtccattggttctattgttgtccactgaaacatacaaggtggtatggttgtatttgatctcactggaaatttactggaacttctattaatcttctgattctgaccttgttttttttctaagagtaaatttcactgccggtcctttaacttgccccatgtccttatccaggttctgatacttttaaatagcatatttagctctttaaacgagtcctaagtcctcatc

SEQ ID NO: 122006 - DNA, 1666 bp, Zea Mays
cgtcatccgcggcgcacgcctccgtccccgccccccagcccgtcgtcgtctctctccaactccatcgtcacccgcgccgcctacgcctgctgcgtcccggatagccccgcggcgccgtccgaccacgaatccggaatcccctcctcgctcgccctcctgcttgatcccgccgcggccgcctcagccgccactcctccctgtccctctagggctgccctgccgctccctcgtatcgcgcaatcggaggcctctccttccgccctccaattttatcgcagcaggcagatggcgccgcagtcccggttgctgccgccgctgttgcaggttcttcgccgctgccgcgcatcgcgctcccacttctctaccgccccctctcttgtctcgccaccatccaaggccgtggtctacgacgagcatggcctgcccgagcaggtgctgaggctggtggacgtaccaccggcggagatcggtgaccgcgacgtctgcgtcaggatgatggctgcccccatcaacccctcggacatcaaccgcatcgagggcgtctaccccgtcaggcccccgctccccgccgccgtcggaggctacgagggcgtgggccaggtccacgccctcggccctgctgtcaccgcccggctgtcaccgggcgactgggtcataccgtccccgccatcgttcgggacctggcagacgtacattaccaagcatgagaacgtctggcacaaggtccgcagcgatgtacccatggagtacgctgccactatcaccgtcaacccattgaccgcacttaggatgctccaagactttgtaaaactcaatcctggtgatgccatagtccagaatggcgctaccagcattgttggccagtgtgttattcagcttgccaaagtacatggaatccacaccatcaacattataagggacaggcctgggtcagaggaagcaaaaaacaaactcaaacaacttggtgcagatgaggtgttcacagaaactcagctagacatgaagaatgtcaagagcttgctgggtgctttgccagagcctgcattaggatttaactgtgttggaggaaatgctgcttctctaatactcaagcttttgaagcaaggaggcaccatggtgacatatggtggaatgtccaagagacctgtcactgtccctacttcatatttcatttttaaggatctatccctacgagggttctggctccagaagtggctgaactcagacaaaacagaagactgcagaagaatgattgactacctcttgggccttgtgcatgaaggcaaactcaaatacgagatggagtccatttctttcggcgagttcagcttggctctggagaaggccctgggcaaacatggaagccagccgaagcaagttatcaagttctgagaccagggcgggttagaggatctgagagcatgcgattgccatcgatctgtatgaatgatgaatccaacagttagctatgtcaagtgccagagttttaaatacaaataaagtaaaggcagcaatgtttaatggaattgtgaaatcagcagcttagctatatttgagcgctgtgttgattttgcaatgaaatcagcagcttagctatatgtcaagtaaagggtgcgtcaatttctattgcatctacagtgttattcttttgcagccacagctggtc

SEQ ID NO: 122007 - DNA, 1829 bp, Zea Mays
gaaaaaaactgtccctgcctctgtactcgagtgggcgcagtgaataccctctctcggtccctccaaccgcgctcgtcttatcctcaactcgtcacccacttcccgccatctgccgtccctgcactgcgcttataccctgcaggcaacagcagcgatggcggcgagggtaccggcggccgatctcaaccagcacctctcctcgccgttcatcgcacggcgctgccacggcccaggtgaagccgccctcgaggcgcctctcagcgtacgcatcaaatccagaacgccgcggcgacgcgcggaatccacgaccacgaggatcctctgcaggggcgcagaggcgcagccgggctctggaggagggaggaggagggagccgctgcggcgcggggccgtcagcgcgcgcctcccggtgccggaccacatacgccggccgccctacgtcggcacggccgccgtcccggaggtgtgccccgaccggcaggtgcacgacggcgagagcatcatgcggatgctggacgcctgcgagctcgccgctcgggtgctgcaccatgccggggcgatggtcaagccctcggtgacgacggacgagatcgacagggctgtgcaccagatgatcgttgacgccggcgcctacccctcccctctcggatacggcgggttccccaagagcgtgtgcacgtcggtgaacgagtgcacctgccacggcatccccgactcacgcgagctacaggtatatatgtaattgctgaacctgcttgatttttgagctgaacggttctgcttcctcccaatggccttgcaggatggcgacattatcaacatcgacgttactgtctacttaaacggataccatggggacacctcgaggacgtacctgtgcggagaagtcgacgacgcaactaagcagctcgtgaaggtcactgaagagtgcatgatgcgcggcatatcagcctgcaggcacggcgccagtttcaaggaaatcggccagagaataagtgagcacgcggagaagtacggatacggcatcgaccccttcgtggggcacggcgttgggaggatgttccactgcgagcccatcatatggcatacctcctcctggacggcagcaatcacatcaccatctcggccggcggcagcgccaggttgaggtccagccgcaggcccacgggcggcgccgcgtcgaacactacagacgacgacgacgaggacagcgacgatgacccagagtagctctgctgctcctcgctcttgggcggcaagaagtgcagcagcgccggcgtcacggcggccgccgccgccgggtccgcgaacagctggtacggctctgcggccgccgccgcagccggcagcgccaggctgaggtccagcgacggggccgccagcggcagggagcacgacgacgccgacgccgacgccgacgacgactcgtacaccacggcgctcccgctcccgctcgccgctggagcctccgccaacgcctccgccgtcggctccggggcggggtagttggtggcggcgccgggcccgcggagcttgcgcgcggcggcgtcgtacgcccgcgccgcctgctccggcgtgtcgaaggtgcccagccacacgcgcgccttccgcaccgggtcgcggatctccgccgcgtaccggccccacggccgcttccgcacgccgcgcagcctcggctgctccgccgccgccgccgccgacactggtctcttgggcgccatggacggaccgaccagcaacacaactgcctctgccttgcttgctttctctcgctgctgcttgtctgccgaggagcttcggaggatggatggacgggtgggaatgggaat

SEQ ID NO: 122008 - DNA, 1236 bp, Zea Mays
atctgccgtccctgcactgcgcttataccctgcaggcaacagcagcgatggcggcgagggtaccggcggccgatctcaaccagcacctctcctcgccgttcatcgcacggcgctgccacggcccaggtgaagccgccctcgaggcgcctctcagcgtacgcatcaaatccagaacgccgcggcgacgcgcggaatccacgaccacgaggatcctctgcagaggcgcagccgggctctggaggagggaggaggagggagccgctgcggcgcggggccgtcagcgcgcgcctcccggtgccggaccacatacgccggccgccctacgtcggcacggccgccgtcccggaggtgtgccccgaccggcaggtgcacgacggcgagagcatcatgcggatgctggacgcctgcgagctcgccgctcgggtgctgcaccatgccggggcgatggtcaagccctcggtgacgacggacgagatcgacagggctgtgcaccagatgatcgttgacgccggcgcctacccctcccctctcggatacggcgggttccccaagagcgtgtgcacgtcggtgaacgagtgcacctgccacggcatccccgactcacgcgagctacaggatggcgacattatcaacatcgacgttactgtctacttaaacggataccatggggacacctcgaggacgtacctgtgcggagaagtcgacgacgcaactaagcagctcgtgaaggtcactgaagagtgcatgatgcgcggcatatcagcctgcaggcacggcgccagtttcaaggaaatcggccagagaataagtgagcacgcggagaagtacggatacggcatcgaccccttcgtggggcacggcgttgggaggatgttccactgcgagcccatcatatggcatacctacgattacgagcccgggttcatggtcgcaggccagacattcaccgtagagccgacgctgtcgatggggagcacgcagtgcgtggtgtgggacgacgggtggacggccgtggcggcggacggcagcctcagcgcgcagttcgagcacaccgtgctggtcaccggcgacggcgcggaggtcctgaccgggttcccgtagctgcctgcacgcatcacgtgagcggtgagcctgggtgggccactgcgtcggcgagggacggaactgcaggagcaggcatgcagctatgcgcacgctgacaattttattaaaaatctatgttggacggttgccgta

SEQ ID NO: 122009 - DNA, 1386 bp, Zea Mays
gaaaaaaactgtccctgcctctgtactcgagtgggcgcagtgaataccctctctcggtccctccaaccgcgctcgtcttatcctcaactcgtcacccacttcccgccatctgccgtccctgcactgcgcttataccctgcaggcaacagcagcgatggcggcgagggtaccggcggccgatctcaaccagcacctctcctcgccgttcatcgcacggcgctgccacggcccaggtgaagccgccctcgaggcgcctctcagcgtacgcatcaaatccagaacgccgcggcgacgcgcggaatccacgaccacgaggatcctctgcaggggcgcagaggcgcagccgggctctggaggagggaggaggagggagccgctgcggcgcggggccgtcagcgcgcgcctcccggtgccggaccacatacgccggccgccctacgtcggcacggccgccgtcccggaggtgtgccccgaccggcaggtgcacgacggcgagagcatcatgcggatgctggacgcctgcgagctcgccgctcgggtgctgcaccatgccggggcgatggtcaagccctcggtgacgacggacgagatcgacagggctgtgcaccagatgatcgttgacgccggcgcctacccctcccctctcggatacggcgggttccccaagagcgtgtgcacgtcggtgaacgagtgcacctgccacggcatccccgactcacgcgagctacaggatggcgacattatcaacatcgacgttactgtctacttaaacggataccatggggacacctcgaggacgtacctgtgcggagaagtcgacgacgcaactaagcagctcgtgaaggtcactgaagagtgcatgatgcgcggcatatcagcctgcaggcacggcgccagtttcaaggaaatcggccagagaataagtgagcacgcggagaagtacggatacggcatcgaccccttcgtggggcacggcgttgggaggatgttccactgcgagcccatcatatggcatacctacgattacgagcccgggttcatggtcgcaggccagacattcaccgtagggaatggtcacgtgctgagaacccgtgcgatgcagagccgacgctgtcgatggggagcacgcagtgcgtggtgtgggacgacgggtggacggccgtggcggcggacggcagcctcagcgcgcagttcgagcacaccgtgctggtcaccggcgacggcgcggaggtcctgaccgggttcccgtagctgcctgcacgcatcacgtgagcggtgagcctgggtgggccactgcgtcggcgagggacggaactgcaggagcaggcatgcagctatgcgcacgctgacaattttattaaaaatctatgttggacggttgccgta

SEQ ID NO: 122010 - DNA, 1344 bp, Zea Mays
gaaaaaaactgtccctgcctctgtactcgagtgggcgcagtgaataccctctctcggtccctccaaccgcgctcgtcttatcctcaactcgtcacccacttcccgccatctgccgtccctgcactgcgcttataccctgcaggcaacagcagcgatggcggcgagggtaccggcggccgatctcaaccagcacctctcctcgccgttcatcgcacggcgctgccacggcccaggtgaagccgccctcgaggcgcctctcagcgtacgcatcaaatccagaacgccgcggcgacgcgcggaatccacgaccacgaggatcctctgcaggggcgcagaggcgcagccgggctctggaggagggaggaggagggagccgctgcggcgcggggccgtcagcgcgcgcctcccggtgccggaccacatacgccggccgccctacgtcggcacggccgccgtcccggaggtgtgccccgaccggcaggtgcacgacggcgagagcatcatgcggatgctggacgcctgcgagctcgccgctcgggtgctgcaccatgccggggcgatggtcaagccctcggtgacgacggacgagatcgacagggctgtgcaccagatgatcgttgacgccggcgcctacccctcccctctcggatacggcgggttccccaagagcgtgtgcacgtcggtgaacgagtgcacctgccacggcatccccgactcacgcgagctacaggatggcgacattatcaacatcgacgttactgtctacttaaacggataccatggggacacctcgaggacgtacctgtgcggagaagtcgacgacgcaactaagcagctcgtgaaggtcactgaagagtgcatgatgcgcggcatatcagcctgcaggcacggcgccagtttcaaggaaatcggccagagaataagtgagcacgcggagaagtacggatacggcatcgaccccttcgtggggcacggcgttgggaggatgttccactgcgagcccatcatatggcatacctacgattacgagcccgggttcatggtcgcaggccagacattcaccgtagagccgacgctgtcgatggggagcacgcagtgcgtggtgtgggacgacgggtggacggccgtggcggcggacggcagcctcagcgcgcagttcgagcacaccgtgctggtcaccggcgacggcgcggaggtcctgaccgggttcccgtagctgcctgcacgcatcacgtgagcggtgagcctgggtgggccactgcgtcggcgagggacggaactgcaggagcaggcatgcagctatgcgcacgctgacaattttattaaaaatctatgttggacggt

SEQ ID NO: 122011 - DNA, 1257 bp, Zea Mays
cagaactgcagtgacaaatggtagtgccattaagcatgatggctcatatgaatcaaatcctgcagttgagattgttcgagttgaactccaaggtgctgctgcatttcttttattctcgtctggtacctcttgtacttcttctggttgaaggttccacgcctatagatattggagaacatggatgggaaatgcttctgggtagtaaaaaaggcacacaagaggctggttcaaaatttgaactgctaggttttgcagctgtgcataacttctatcattatcctgagagtattcgcttacgaatcagccagatacttgtgttgccaccttatcagggtgaaggccatggtcttggtcttcttgaagcaatcaattatattgcacagtctaagaacatttacgatgttacaatagaaagcccttctgattacctgcagtatgtgagatcatccgttgactgcctccgtttgctcatgtttgatccgatcaaacctgcacttggtgctattgtctcgtctctgaaggagaccaacctgtcaaaaagggcccaaagtttgagaatggttccaccggctgacctgatggagactgttcgttagaagctgaagataaagaagaaacagttcctccggtgctgggaaattctgatcttcctaagcctcgactctcaggatcataagagcatggacaacttcagggcctgcatatatgacctcatgaagggggagatccttggcagtgcctctggaactaacaggaagcgtctgttgcagatgccaaccagtttcaataaggaggcatcttttgctgtgtattggacacatgagattggggatgaggatgaacaaactgttgagcagcagccagaggatctcaggacgcaggagcaacagctcaataagctcgtggacatccaaatcgaggagattgatggggtcgccaagaacgtcacttcacgtggcaaggataagatggcagagctggcggttcaatgaatctgggtgaggttcctacttcaaacgatgttaaaatgctgtcgtagcttatctggtgaggtctcttttacgagttggcttcttggtagaaagggaatgtcacggcataggcactgagtagattgtcacgacagattattatgtacttcaattctagaatatttgatggaaatgctattttagattgcttggtaagtgggaaccgcctcaaatcacagaagtagaagcagcttccgattcagccggaaccatttcttcaaaaatg

SEQ ID NO: 122012 - DNA, 2688 bp, Zea Mays
ttctcttgcaccataatgctttctttgtatttatatacttgattcacacaatttgaattctgtttagctgctatgtcttataattctttctttcatccaggaaccgtgatggatccagaaaaacaaaatgagatgagcctgatcgacaagagagaactagtatacgaagttgcaagatggcctcaaggtgccatggagattcttcggtgctggacccgcagggaacttcttgagcttatttgtgttgagttgggcaaagagaggaagtataccaatgtcccaaaagctaagatgattgcttacctattgaaattagtttcacggaatagtggaaagaatggacaactcaagaatgataatccgaatgttatgttattagggcaggataacaaagatgaaatacaaatgaaggaatctgatgaacaatcacgaccactcaaaactgcaaactctgactcatcaataagcagagaggcttgtgccggtagttcagtggtgtgcagcaatgttgcatgccaagccacaccaaatgcaggagataaatattgcaaacgttgctcttgctgcatttgcaataaatacgatgataacaaagaccctagtttgtggttggtttgcagctctgataatccatacagtggttgttcatgtggtgtctcttgtcacctaaactgtgctctaaagaataaaagggctggcattgtcaagaatgggtgcaacaagttagactgtagtttctactgtgttagttgtgggaaaatcaactggctaatgaggtgtttgcagaaacaacttgcaattgctagggaggcaagaagagttgatgtgctttgtgagcggttgtcattgagccataaaataatacaagggtctgaacgttacaaggaaatagcgagcataatcagctcagctgtgaaaacacttgaaatagaagttggtagtgcattggatcaggtctctgtgatcacggggcgtggcatcgtgaaccggcttacttgtggtgctgaagttcagaagctttgttcaagtacattagaaattgtagactctaaagtggataacatcttggagttcgagtccaataatagtccaaaactcctaggtcctcagccccaaatcctttttcatgagatcactccattttctgtggttattgtgttgaactatcagcatgacatcggtaaggagcagattgatggttccaaaatttggcaccgaagtgccagggtttgcaactattcatcagagcccacatgccacatactgaggccaaacactaggagcctggtttctggtctgagcccttcaactgaatacttcttcaaggttttgccttttagcagcacacatgggtttactgagtgggagacaaaatgcagcacacgcagcctggaccatggcagcagccagtgctcaactcagaactctgagagcatgtgcctcaaagacgattcaatgcagcatcacaaaaaggatttgaatgtgcagaatcaccagagaaccattcaatatgattcacctaagggttctacaaattcaagtgagaacaatttatcatgtgatcggtattccaagcgggctaaggttgcaaggctagatggtgcaagcgacaacgatgaaagccagttgccgccaacttctgaagttttaccatttgcaagctccaactcttctccttccgaagctccaagtaaacctgacttgcttattggcaccccagattcggcctccaagaactatgtggagcagcagtacgagtactgcgtgagggtggtcaggtggctggagcatgaagggcacatggacaatgacttccgtgtaaagttcctcacttggttcagcctgaaggcaacaacacaggacaggcgaatcgtgggcgcctttgtagatgttctcatcggtgatcctgcaagcttggttggccaactggttgatgcattcaaggatgccatctgtatcaaggagaagccctctcaagcacaacagaaagatgcatgctgcaaggtttggcactagaaaccttcataactgttctccatcgctgtgtgacgtaagtttttctggtgactgaaggatgaaatattgaagttatcacctagcaggttgcatctgaattgtgtcgagacagacattgggcacttgagataaacttttaaggttataaaagacgataaaatgctgtagatgcttcattcggcattcaggtccatctgatctctcatttatttattccaattcagtcgatacgcggactattgatccatgaaggcaatcgtggtggaaccatgtgctgatgagacatggttcatggaccggttgagtttaggtttcaactagtgaagtagttggagtttgttagcagacaagcaattgtatgcatgtggaatgctatcttggatctgcaagctaactaatcatatcatgactttggtagatgtttattgttattagttgatagttgactcattcttttcgtgtgacgtgtttgaagtgccggaagtagcagttcatgtacagtcttggagccttagaccgtgtccagcagtctattcgtagcttacctaaaatattgtttttgcattgcctaaaatattgtttttgcaatgttctgtactgtagacttgtagactgtattgttcacatagtagagtaggtatgaggatgtgtaagctgttagaaatagcctta

SEQ ID NO: 122013 - DNA, 1960 bp, Zea Mays
ctttcttctcggcgtcctcgcagtttcgcgtttacccaaaatacccctaccttaaaccctccgcctccgccgccatgcgccgcctcctccaaaccctccgcccgctccaagccctacccctcaaccccgctcccggtatccccacccctctccgcctcctctctaccgcctcgtcggccgcgtcctcggactctgactccgccgcttcccccgccgtggccccgccccccgctgccgatgccgactttgacagcgccgactacgacctcccgacccctggtcccgccccctccagaaaaatcaacaaccccgccgccgcgctgaggaaggtccggttcgacccctccctccgcgcgcgcgccgacgaggcgctctttggtaaggggctgggcgcggcagccgttgatgaggaggatgaggaccgctcacgggacgtggcgctcgcgctgctcgatgcggcgctggaggcgcctgacgaggatgaagaggatctcggggaggtcagggaagaagaccagatgtcgctttccgttggcattgtcggcgcgcccaatgccggcaagtcctcgctcacaaataccatggttgggacaaaagtggctgcagtctcccgcaagacaaatactacgactcatgaaattttgggggtgctaacaaaagggaacacacagataggatgtcacagttcgtgtggagagtgcctggagctcaattaacctctatgatttactaatagtcatgttcgatgtcaataggcatcttaatctgccagattcacgagttataaagttaattaaacgtttgggtacggaggtgaacccaaaccagaggcgtatattgtgcatgaataaggttgacttggtggaagacaagaaggacctacttaaagttgcaaaagaatttgaagatcttcctggatatgaaaggtacttcatggtatctgggctaaaaggcaagggagtgaaagaccttgtacagtatttgatggagcaggcagtaagaagaccttgggatgaggagccaactgtaatgactgaagaggtaatgaaaaccataacgttggaggttgtgcgcgagaagatgctgcatcacatccaccaagaaatcccctatgtaattgagcatcgtctgatgggctggaaggagctaaaagatggttctcttagggtggagcagcacttcattgcacctaagcaaagccagcgtcagattcttgttggtaaaaatggttctaagatagggagaatcggtattgaagctaatgaagagctaaggtccatattcaagagagatgtccatctaattctccaagttagagttgcgaaaaagagaagtgcctgaacagacagattttagtgcctgtatagaccgcaactgatctgagaactgcagtgcagtgttgtcacaatgtattcaggagacatggttggtaagtggtgcttgggcgcatcagttcgggtgactgctttgacagaactttggatctatgatcaaatggaggtgccgagctataacctagcgtgtggagccttgatttctgaataaaagatataccgggagcaatccacacgccagtggtgacaaggaaacggcttgctgaatagcgagctgctcgtgtgctggcgaatctggggtctgtgatactgatatgcagatacgaatgcgctggacaccgttttgcctactctctgattcgaaaagtagtccctctccttctcaggtctcagcctgtattttctataggttctttagacagtgttgtaacgacaggatgatcgagcatgtcggcgttgaagtttgctgctgatcttccgcggtgttttgaacagcggaaatttaaggatgaaatccggtggaaaatttacacgatggaaaatttccccgggacgtgcgcgtgctgtactgctgatacagaaatgctccctatatctatatttatcatcgtctatatttatcatca

SEQ ID NO: 122014 - DNA, 2013 bp, Zea Mays
ctttcttctcggcgtcctcgcagtttcgcgtttacccaaaatacccctaccttaaaccctccgcctccgccgccatgcgccgcctcctccaaaccctccgcccgctccaagccctacccctcaaccccgctcccggtatccccacccctctccgcctcctctctaccgcctcgtcggccgcgtcctcggactctgactccgccgcttcccccgccgtggccccgccccccgctgccgatgccgactttgacagcgccgactacgacctcccgacccctggtcccgccccctccagaaaaatcaacaaccccgccgccgcgctgaggaaggtccggttcgacccctccctccgcgcgcgcgccgacgaggcgctctttggtaaggggctgggcgcggcagccgttgatgaggaggatgaggaccgctcacgggacgtggcgctcgcgctgctcgatgcggcgctggaggcgcctgacgaggatgaagaggatctcggggaggtcagggaagaagaccagatgtcgctttccgttggcattgtcggcgcgcccaatgccggcaagtcctcgctcacaaataccatggttgggacaaaagtggctgcagtctcccgcaagacaaatactacgactcatgaaattttgggggtgctaacaaaagggaacacacagatatgcttttttgacaccccagggctcatgttagggcaccatggatttccttatagggatgtcacagttcgtgtggagagtgcctggagctcaattaacctctatgatttactaatagtcatgttcgatgtcaataggcatcttaatctgccagattcacgagttataaagttaattaaacgtttgggtacggaggtgaacccaaaccagaggcgtatattgtgcatgaataaggttgacttggtggaagacaagaaggacctacttaaagttgcaaaagaatttgaagatcttcctggatatgaaaggtacttcatggtatctgggctaaaaggcaagggagtgaaagaccttgtacagtatttgatggagcaggcagtaagaagaccttgggatgaggagccaactgtaatgactgaagaggtaatgaaaaccataacgttggaggttgtgcgcgagaagatgctgcatcacatccaccaagaaatcccctatgtaattgagcatcgtctgatgggctggaaggagctaaaagatggttctcttagggtggagcagcacttcattgcacctaagcaaagccagcgtcagattcttgttggtaaaaatggttctaagatagggagaatcggtattgaagctaatgaagagctaaggtccatattcaagagagatgtccatctaattctccaagttagagttgcgaaaaagagaagtgcctgaacagacagattttagtgcctgtatagaccgcaactgatctgagaactgcagtgcagtgttgtcacaatgtattcaggagacatggttggtaagtggtgcttgggcgcatcagttcgggtgactgctttgacagaactttggatctatgatcaaatggaggtgccgagctataacctagcgtgtggagccttgatttctgaataaaagatataccgggagcaatccacacgccagtggtgacaaggaaacggcttgctgaatagcgagctgctcgtgtgctggcgaatctggggtctgtgatactgatatgcagatacgaatgcgctggacaccgttttgcctactctctgattcgaaaagtagtccctctccttctcaggtctcagcctgtattttctataggttctttagacagtgttgtaacgacaggatgatcgagcatgtcggcgttgaagtttgctgctgatcttccgcggtgttttgaacagcggaaatttaaggatgaaatccggtggaaaatttacacgatggaaaatttccccgggacgtgcgcgtgctgtactgctgatacagaaatgctccctatatctatatttatcatcgtctatatttatcatca

SEQ ID NO: 122015 - DNA, 2052 bp, Zea Mays
ctttcttctcggcgtcctcgcagtttcgcgtttacccaaaatacccctaccttaaaccctccgcctccgccgccatgcgccgcctcctccaaaccctccgcccgctccaagccctacccctcaaccccgctcccggtatccccacccctctccgcctcctctctaccgcctcgtcggccgcgtcctcggactctgactccgccgcttcccccgccgtggccccgccccccgctgccgatgccgactttgacagcgccgactacgacctcccgacccctggtcccgccccctccagaaaaatcaacaaccccgccgccgcgctgaggaaggtccggttcgacccctccctccgcgcgcgcgccgacgaggcgctctttggtaaggggctgggcgcggcagccgttgatgaggaggatgaggaccgctcacgggacgtggcgctcgcgctgctcgatgcggcgctggaggcgcctgacgaggatgaagaggatctcggggaggtcagggaagaagaccagatgtcgctttccgttggcattgtcggcgcgcccaatgccggcaagtcctcgctcacaaataccatggttgggacaaaagtggctgcagtctcccgcaagacaaatactacgactcatgaaattttgggggtgctaacaaaagggaacacacagatatgcttttttgacaccccagggctcatgttagggcaccatggatttccttatagggatgtcacagttcgtgtggagagtgcctggagctcaattaacctctatgatttactaatagtcatgttcgatgtcaataggcatcttaatctgccagattcacgagttataaagttaattaaacgtttgggtacggaggtgaacccaaaccagaggcgtatattgtgcatgaataaggttgacttggtggaagacaagaaggacctacttaaagttgcaaaagaatttgaagatcttcctggatatgaaaggtacttcatggtatctgggctaaaaggcaagggagtgaaagaccttgtacagtatttgatggagcaggcagtaagaagaccttgggatgaggagccaactgtaatgactgaagaggtaatgaaaaccataacgttggaggttgtgcgcgagaagatgctgcatcacatccaccaagaaatcccctatgtaattgagcatcgtctgatgggctggaaggagctaaaagatggttctcttagggtggagcagcacttcattgcacctaagcaaagccagcgtcagattcttgttggtaaaaatggttctaagatagggagaatcggtattgaagctaatgaagagctaaggtccatattcaagagagatgtccatctaattctccaagttagagttgcgaaaaagagaagtgcctgaacagacagattgattcgtctgaaggaataaatatattgttttctgcagttttagtgcctgtatagaccgcaactgatctgagaactgcagtgcagtgttgtcacaatgtattcaggagacatggttggtaagtggtgcttgggcgcatcagttcgggtgactgctttgacagaactttggatctatgatcaaatggaggtgccgagctataacctagcgtgtggagccttgatttctgaataaaagatataccgggagcaatccacacgccagtggtgacaaggaaacggcttgctgaatagcgagctgctcgtgtgctggcgaatctggggtctgtgatactgatatgcagatacgaatgcgctggacaccgttttgcctactctctgattcgaaaagtagtccctctccttctcaggtctcagcctgtattttctataggttctttagacagtgttgtaacgacaggatgatcgagcatgtcggcgttgaagtttgctgctgatcttccgcggtgttttgaacagcggaaatttaaggatgaaatccggtggaaaatttacacgatggaaaatttccccgggacgtgcgcgtgctgtactgctgatacagaaatgctccctatatctatatttatcatcgtctatatttatcatca

SEQ ID NO: 122016 - DNA, 3517 bp, Zea Mays
gaagtagcttggaagagcagtgttatgcacagcgatgggagacaatgtcctaaaactcagggtgggcttctcagggtaaactgcattatggattctggcaacagttcatgctctagaacacgaagtgggcttctaagattaaagggcttactggattccagtggtgtttcgagttctagaactcgaagtggccttttaaggataaagagctttgtggattccagtgatggttcatgttcgaggtcacaaagtgaccatgtaagatgtagccctcctattgtcgaggctataataaatgacgaagcagtcttgaaggagtctcctgatggattgatgaaaaaagagatacctgttaggactcaaaatgagtttgttagacagaactctgctgacaaggctgtaaccaaggacgattcaggcatgcggacgcttcccaatgggagtttgagtgaagatatgccttctagaacacggagtgggctggtcaggagaagccctactgttaagactttaagcaaggatcaatcagtcattaatgggctggctgatgggtcactgaaagaagacatgcctcttggaacacggagtggccttgtcagaggaacccttgctgccaaggcatggatatttgtagatccaatcaagactcctgatggatggatgaagaatgacaaggctgctggaacacggagtggtcttggtggtggaagattggtagccaagactgtaagcaaggacaaaagggctgttgagggtttgcctgatggatggcgaaaagaatacaggccaaggaagaatggttcatttctggatgtgtactacattgatccagtcagtggatatgaatttcgctcttttaaggatgtgcaccgttatcttgaaactggagatattagacagtgcgccgtgagaccaaagaagagtaccatctgcgaagttcatataatagaaagtcaaactcatgcaagtgcatcaccacaacacacgaggcctggtactgcggataagggtattcagtgtgaaatattaacttcggatggtatcatggtaccattgggggaactgattgctccatataatggaaatgatactgaacatactgtgttaccagagcctgagaacttgaaagcaattcaagggtctgacaacaagcttgagacttcggaacacgtgagtgttcaaccggtttctgcacgtaatggttcaaggcaaaccaaatctgttaaaaggaaagaacgaaatgcagaggtcaaatccaagaagcgcaaaaccagttctgctgtgactgctgttcgagcgtcgccccgcttagctgcattgaaggttcagcttgaagtgagcatcaaacatgaagatgccatggttagcataaatcatgtggaccaggtacagactatagaagagagcgccattgatcaggcacacaaaagccaatcgggctctgttgatgagatacatggtaatctggaaagcactttcagtcagttacagttgagccaagcagacactgctaatggaatgcaggctatgcaggaaaacactaccattcattcacaaccaagccaattggatactctgaatcctacacacagaagccaggagaatagtggcaatcagttacaatcggtgctcacagattcttcgattccaaaacgaaccacacaggaatgcactatagacgagccaagccagccaggcataaatcatatacacacagatcaggagttcactgggaatcaatttcggtcgaacctaccagatgacactgttatttcattaagggatattgaagaatgcacagcccactcaaagccaagcaataccgacagtactggacaaattcaggccaatgaggaaaacactgccaatcaagtacagtcgagcctaacagacacagttattccagtaccggttattcaggaatatgctactggttattcacagctgagcaaagctaacacctcaaataaaaaacaggccaatcaggaatacatagctgatcaagtacaatcgagcctaacagacactgtcattccagtacaagttattaaggaatacacaactggttatccacatattaataaagctgacatttcaaatcaaatgcaggccaatcaagaaaacactgatgatcacttatatttaagtcaagtaggctgtgtcactcaaatgcagataattgaggaaaatttgcccaagcaacctcagctgagccaatcaggcactgggggtagaatacaaattgatctggaaagcactaccaatcacttgctaccaaactatgatgaaaattctatgttgcaatgtggtttatcttgggctcctgaacagaacagcggagcccttagtacagatttctggaaaaatgttgaaactcaggcttcatcggtttccatgccaataaatggagcacctgttgcaagctttccagcaaatgttagattccacaatgcagcagcagcagcagaacctgctttaccgccacaggttgctccagctgaagcaggttctgatcagtcggggttggcctttcaatctgttttcggaaacatctggtcggatccttgcatcgagtttgcttttaagacccttacaggtgacattcctgttctggacgacacaacggctgtcacagactactttccggagcaacaagacttgaataaaggcccagcaccaaaccgtgcaggttctgttgataattccagaaaccacacacaagtcgatgtgaaccttccaccacctgctctggatgatttctacaatggcaattggttccctccccaatgaattcagtatgggaggaaacaaatgcaataacattttgtacctgtgaaaaacaaatcagagaaggctaatggccagattacaaagcaatggtcgtgcgctaatgatttctacaatgacagttggttccctcccccaatgaattccgtgtagggaggggaaaaatgcaatgacatttttttagctgcggaaaggcaaatcagagaaggctagcggccaaatcccaaagaatcaatcgtgcactctgaactgaatgtgtcatcccggaggacacattttgtaaaaaaaaaaaaacagtagctttatagccttattagactgttaaaacacactcgactgatctggttccatcaacaaggcttcacggagactgtcgagtacctgatctgggtcatgttttccatagtttgcttctgtgcagttgcctaataagcccattcgttgtaaactagctagttctaacttaagaaagctccctcagggcctatgcatgggtctctgattattgtgcagatgaactgttgttctggacattttgaacatgcaaatgtggaagcgtcactgtcagttgaattatgtttcagccgaattgagaagcgctaatccgctgtttgtgtagagtttgctgaatgttgatgcttgtgcttggttacttggatcagtgttttttagggggctcggcttgcagtaacgatgcaccttgttatatatccagaaaaccttggttgtc

SEQ ID NO: 122017 - DNA, 1505 bp, Zea Mays
agaaaaatggaatacactttattacctgatttagcaccgcataagatacacgcaaagattcaagtacatgtatctagaaagtggcttttccgaggtgctactgatagtggaccactacaacatgttgatatggttttgtctgatcgagagggtaatgctatttatgctgaaatccctggaaatttagctgaacaaaaagcaacaaatattgaagaaggaggagtttatgatatcagcagattcagagtgtgcgcagcaaaaactgttttcaaaatagtggatggggacaaaatgatccaattcacatttcataccatagttaaacgtgccacaagccctccaacaacatttccattatatgtttatcggctaacatcatttgatctaattgagcctcatgttcaaactacaaataactttgttgatgttcttggtgtcataactgaaattcatgaactgacacctgtgcatgtccgaagtcaactaacaccaacagtgacaaggaccattatcatagaagatctcaggaaacatgatttgaatgtactgtcacaatagcagaaataccagctgaacacaaatggtggtttccatcttgcacaaaatgcaataaagcaacaatccctcacactgcaggttatcactgtgaatcatgcaattgggatggatacaaatttaaatacaagctcaaattcctggcatctgatgaaacaaatattgcagaaatgttttgttttgacactgtagcaagacacatcgttggtaaatcctgtgagattgttttacgaagtgtcactgaacagtctcctatcccacctgatctagcacaaatcatatctctgaaatttacattcagagtcacaattgacaatcaatctcttttccaacaaaccaatcgcccaaacgtgttccgcattaattctattgttgctgcacatgggagacaacgttctttaccaatgcaaataggaaattccgatcaacaaggaccatcaacacctcaaaacaaatcaaaaccgatgttattggaagactctccatctacagctttggaaaaattatctactacaactcctacaactgtagtaaggaagcttctatattccgaaactgacaacatgccgaaagctgcaaacaagagtaatatcaatagcccagaaaaagatgatggcgataaggaaaccgcacagcttgatacaatacccaataacaaaggaaaaggaccagcagatacaattgaatcgccacctaaaaggttcaaataagggacgatacgcatcggaaaagaaatggacatcaaatcctccgagaactaaagtttcactcagatcttcgtcgaccttttgagttgcacaatgtctattttgcaacatatgtataattatatatgatgacctactcagctctttgaaaacaatttatgtaaatataacagcctaattctacgtagtggacaaaaatgttgactctgattatagctcaggtaactctatttcatataaaca

SEQ ID NO: 122018 - DNA, 725 bp, Zea Mays
tgggggatttccagatcatcgtccgtccaatccatccattcatctacacacgcagttgcagcacatacagctagctagctcgttactgtttttgcagctgatctgatcgaccgacgcgacccaccgatcacgatcatgagctaccaagcgggctacccaccgccgggccaacaggcctacggcgcgcctccgccggcgtacgtcgcgccaccgccggcgtacccgccaacggcccaggacggcggcgcggcgtactacggccagcagcagacaaccaccaccagcagcagccgcggcggcgacggtttctggaaaggatgctgcgccgccatctgctgctgctgcgtcctcgacatgtgcttctgaggacatatcgtcgatcgatcgacgacggccagggcatgctagctagctgatgaccggccggtacgtgcgtggttgatgatcaccatcatgtgctgctctagtagctgctgtgtcattatatattacacatcgtgtatacatatatacgtatacgtacgtactcgtacgtcttcgaattcattcctgtggttattgtattatacatatgcagcacactttgtactcgtacccgtgtctgtgtcgtgtattcaattgtcgagacattcttttacgattctaatgtatgtagtattaattacatgctatatatatattccgttccgtgatactatcaacaatacttctccggcagcggcaga

SEQ ID NO: 122019 - DNA, 792 bp, Zea Mays
tgggggatttccagatcatcgtccgtccaatccatccattcatctacacacgcagttgcagcacatacagctagctagctcgttactgtttttgcagctgatctgatcgaccgacgcgacccaccgatcacgatcatgagctaccaagcgggctacccaccgccgggccaacaggcctacggcgcgcctccgccggcgtacgtcgcgccaccgccggcgtacccgccaacggcccaggacggcggcgcggcgtactacggccagcagcagacaaccaccaccagcagcagccgcggcggcgacggtttctggaaaggatggtgagggcttatataacttattaattgactccaaccacagaagctagatagatagagatgatgcgttctgatcacctgctgcatgcttggctttgctcatgcagctgcgccgccatctgctgctgctgcgtcctcgacatgtgcttctgaggacatatcgtcgatcgatcgacgacggccagggcatgctagctagctgatgaccggccggtacgtgcgtggttgatgatcaccatcatgtgctgctctagtagctgctgtgtcattatatattacacatcgtgtatacatatatacgtatacgtacgtactcgtacgtcttcgaattcattcctgtggttattgtattatacatatgcagcacactttgtactcgtacccgtgtctgtgtcgtgtattcaattgtcgagacattcttttacgattctaatgtatgtagtattaattacatgctatatatatattccgttcc

SEQ ID NO: 122020 - DNA, 1825 bp, Zea Mays
gatcctccatcacaaaaaatcccctcccattccccaccccaccctagcgcgaggccgtagtacgaatccagcggcggagtacgtccacacgaaatccagagagaggggataaggttccggggccagccaaagccatatcgtggtgcagccactggcgcgccgccacgtggggcggcggtggtcacacctgcgctccgtcccggcattatcgccagggcttggcgccacagctagtatattggctagcttttggctcggcagctaacgacctgcagccaaccatctaccagcgactcagcgagcgagagcagcacacactgcacgcagctagctaggagcagcagcagcggcggcgatggcggcctccatgatctcctcgtcagctctggcggtggcgcctcagggcctgccgcccctcggccgccgcgcctcctccttcgccgtcgtctgctccaagaagaagatcaagaccgacaagccctacgggattgggggtggcctgaccgtcgacgtcgacgccaacgggagaaagggcaagggcaagggcgtgtaccagttcgtcgacaagtacggcgcgaacgtcgacggatacagcccaatctacaacgaggatgactggtctcccaccggcgacgtctacgtcggtggaaccactgggcttctgatctgggccgtcaccctcgctgggatcctcggcggcggcgccctcctcgtctacaacaccagcgccctctccggctaaggatatccaatgcatgcgcttcttgcgattcgtcatgtaaaatcagggtgtctgtctataatctagcctccatggatgctcaaccttcgtcatgtaacaataatcagtgctactcttcattacataattttgatgctatatatatataccccatccctccctaataattcgttctatctgcgtagcgaggttaattcaaaaaaaattcgtaaaagatggtgaagctaattaagtgaaatataaaatatgtgacatacatacatacgtacgcacgtgcatacatactcctccggttacaaattcaaccaaatgatgatcagctcctccttaggtcttgtttaggagcaaatgtaacgaagggaatttaaatagtaaaataatattctagcctgctcagggcctgttcgtttttcacggattgaagacctgaaatagttcttgaccggattgtttctctaatttatataagttttgataggttggaatgaatcctggtccaataccagagaaacgaacgagccctcaatctactccgttacttttgtttacaaacaagcccttaagcttccgaaacgaacgacgaaacccgcaactgatggtactgcttctagtgcacggcttgcgactgcttgtcttcgtgctcgtctcagtgataaccaactagctagcacagttgcagtggtaggcggctgtgcaggaagcaagtcagaggaagatcagattgagcgcaagagctgaaacttgaaaatttccaaaacctttttaagtctttagactgtctccattacgtgaaatagagaacgtggaactatagaagacacggtttacagaaagaagtttgaaatagaggatgtgataaaagatctgctagaaatagcctcacgtgtacgtgtacccccgcaggccgcttggcactgagtgactctcccacttttccacaactattacttgataaaatatatttggtccctcaaacaacaaacaaatcatctgatacattcgggggtaagttgtaaacgcaatcttgaaccacatagctatagcttccccccccccccccctggttgtattttccagcaggca

SEQ ID NO: 122021 - DNA, 246 bp, Zea Mays
atgctaatcatggagagtgcttctcactatatgcttaaagataatgcctttcttttaaagaatcagaatggggtatttgaaagtggtacctctccaccaaacttctttacccccaaatactttggattggaatcgcgaccattttttgttgatccagcagtccttttcgtggcccagcgcctaaatatcatgtttagtccaccagataactctggaagcatgtattctttaggcagatgtagttaa

SEQ ID NO: 122022 - DNA, 504 bp, Zea Mays
atggcccagttatggtcacgtgtcgctgatccgctaccccaaatgcgaaaggtcatagtcgctcgtgagactaagatcgaaaaggttcttaaaatatgcatttttttcatgtggatggacgattatgtcaagatgtttgaaggggcaggggtggtgtgtggctctagggagatgatggcgtctaatatgtgggatgaacgagcagtagcaaatagagcagatgtgactacgaactgggacaaatttgttgtcgaactgaagaagatgaatgacaacatggtcgagttgaagaagataaaggacaacatggttgagttgaagaagatgtttggagcattttatgcttctatgatttttattgtattccttttctttgtgatgaactataattgtaagcgctaaatatgggattcatggtgaacctgtgctgaatatttgtgatgttgaatttgtgatggacatttgtggtggtaaatgtgtcgattcagtcagggtcttgttgtg

SEQ ID NO: 122023 - DNA, 471 bp, Zea Mays
atggagagggcgctggctcaagccatggagaaggggttcggctgccctccatggctgcctggatctcaggcgcggcaggggttcgctccaggcgctgaacatgggaggagtggaagggggcgtcggtctggggaggatggcggccaggtggggctggtcgatggaatccacggcaaggcgggggtggccggacttgagaagggcaggaagccagatgggagagggagcgtacgtgcagaaagcaaacaaggagcccaagccaaggggacgagctcacctgctcgagctcggaccctgagaaatgccctgcgcgctggattagagatggagatcttgggtttggttccatggcgtcggtcgacattggaggaaggaaggaggaacagaggtgcttctctgctctgcgcaccgtggcggccatgggccagagaagagcgccccggcgtccatcgctggagcagaggcacatag

SEQ ID NO: 122024 - DNA, 1912 bp, Zea Mays
atcctcgcccgcaacaccatttccgaacgggtcgcgcccgagcccgatatgcccgcgaagcccaggcccagccagacccaaagcgatgcgacggagatcgtgagatcgcgcgccgcagcctcctcccccgcccccgccgccggcgatgacctccgcagtcctcgccggccggaatgaggtccaccaggcgcatcagcaccaccgccaatgggctggcgcccgcgtcccgctcatgcccaagccgtcctccaaccctaaccctaggcgccaccgcgcgggcccaaaccctatccccagtggctcgccgccggagccgcgggccgctccggccgtcgcggccgagccctcgccgtcgccttcggggcacctgaacttcaggccgtcggaaatgacccccgccgaggcccggcacctccgcgcgcggctcaccagcgagctctgccgcgtccgcgctttcctctcccgcatcgactcgtggcaggacgggcagcgccggcgccggggccccgagccccccgcgcgcggcccgtccccgccgccggcgctggtggaggcgatgcggaagcggtgcgcggacatcctgatgcggctgcggaggtcgaagaagagcgtgtggttcaactccccggtcgacgtggagggcctcaagctgcacgactaccgcgccatcatccggagccccatggatctcggcaccgtcaagcagaacctcaccgccggccggtacccctcgcacgaggcgttcgctggcgacgtccggctcaccttcaacaacgcgctgcggtacaacccgcccgaccaccacgtgcacaggtacgccggcaacctcctcgcctcgttcgaggggatgtacaaggaggccgtctcgtggttcgagcagcagcgccagcagctcgagccaccaatgcagcccgatttgccgccgccgccacagctcccggtcgtctctgtgccagtgcaagcgcccccgaggatgggtgggggcgggaggaggcccaagcccaaggcccgggagccaaacaagagggagatggacgaggaggagaagcagaagctgagggtagagatcgagaacttacccgaggagaagatgctgaatgtgctgcagattgtgcagaagaggaacagcgatccagcgttcactggggaggttgtcgagctcgatttcgacgagctggatatggagaccctctgggagctcgatcggttcgtggtcaattggaggaaggctctgaagaagagccagcggaactctatggtgaatggcgatgctgccgcggcggtgaatggagacgccatcgatgtgacagttgttccggacgacgacgacatggtcgaggttgctgtcaatccgtccgtggcggtcgagatcggagagtcggctgacgttccagagaaagaaatggaggccgagatggtcgacgattacgtggatataggcgacgagatgccgacagtgaattaccagtcagtggagatcgagagggattccccggcggctgccagcagctcaagcggatcaggaagtggctcgtcttcatccagcgattccgactcggactccgattctgacggggacgatgccagcgccccgcactaggtgtggctgttgttgctgttttatctgactgtactgtaggattagcgatgagtaggtgactgaaaaggttccatttgatgaggcgttttgaagaacggtatagagaagcctgtagggaactcttgttcatgcaatgcaagtggttgtgttcgtctgtgtatgtgtgggtgcagcatttaggttgtcggtacttgggtgatgggtaggtggtagatgcttgggtagattgggaggcttctgtaaagaggggaatataagctggaacaaagaggaaaagtagcaatgccggccggggcatttcttcatgacgtc

SEQ ID NO: 122025 - DNA, 2027 bp, Zea Mays
atcctcgcccgcaacaccatttccgaacgggtcgcgcccgagcccgatatgcccgcgaagcccaggcccagccagacccaaagcgatgcgacggagatcgtgagatcgcgcgccgcagcctcctcccccgcccccgccgccggcgatgacctccgcagtcctcgccggccggaatgaggtccaccaggcgcatcagcaccaccgccaatgggctggcgcccgcgtcccgctcatgcccaagccgtcctccaaccctaaccctaggcgccaccgcgcgggcccaaaccctatccccagtggctcgccgccggagccgcgggccgctccggccgtcgcggccgagccctcgccgtcgccttcggggcacctgaacttcaggccgtcggaaatgacccccgccgaggcccggcacctccgcgcgcggctcaccagcgagctctgccgcgtccgcgctttcctctcccgcatcgactcgtggcaggacgggcagcgccggcgccggggccccgagccccccgcgcgcggcccgtccccgccgccggcgctggtggaggcgatgcggaagcggtgcgcggacatcctgatgcggctgcggaggtcgaagaagagcgtgtggttcaactccccggtcgacgtggagggcctcaagctgcacgactaccgcgccatcatccggagccccatggatctcggcaccgtcaagcagaacctcaccgccggccggtacccctcgcacgaggcgttcgctggcgacgtccggctcaccttcaacaacgcgctgcggtacaacccgcccgaccaccacgtgcacaggtacgccggcaacctcctcgcctcgttcgaggggatgtacaaggaggccgtctcgtggttcgagcagcagcgccagcagctcgagccaccaatgcagcccgatttgccgccgccgccacagctcccggtcgtctctgtgccagtgcaagcgcccccgaggatgggtgggggcgggaggaggcccaagcccaaggcccgggagccaaacaagagggagatggacgaggaggagaagcagaagctgagggtagagatcgagaacttacccgaggagaagatgctgaatgtgctgcagattgtgcagaagaggaacagcgatccagcgttcactggggaggttgtcgagctcgatttcgacgagctggatatggagaccctctgggagctcgatcggttcgtggtcaattggaggaaggctctgaagaagagccagcggaactctatggtgaatggcgatgctgccgcggcggtgaatggagacgccatcgatgtgacagttgttccggacgacgacgacatggtcgaggttgctgtcaatccgtccgtggcggtcgagatcggagagtcggtatggcattcagaagggctctggctgtttttatatggtctttttaaccagtgatgtttggactgcattccgatgttgatcctgttttgtttcgtttcgtttcgtttttggacaggctgacgttccagagaaagaaatggaggccgagatggtcgacgattacgtggatataggcgacgagatgccgacagtgaattaccagtcagtggagatcgagagggattccccggcggctgccagcagctcaagcggatcaggaagtggctcgtcttcatccagcgattccgactcggactccgattctgacggggacgatgccagcgccccgcactaggtgtggctgttgttgctgttttatctgactgtactgtaggattagcgatgagtaggtgactgaaaaggttccatttgatgaggcgttttgaagaacggtatagagaagcctgtagggaactcttgttcatgcaatgcaagtggttgtgttcgtctgtgtatgtgtgggtgcagcatttaggttgtcggtacttgggtgatgggtaggtggtagatgcttgggtagattgggaggcttctgtaaagaggggaatataagctggaacaaagaggaaaagtagcaatgccggccggggcatttcttcatgacgtc

SEQ ID NO: 122026 - DNA, 552 bp, Zea Mays
tccatggacattcttagcatcaagcgtgttatcagatgtgcaaccaccttcagtgtcagtttctgagcagtagtcactaacagtatcccttacttcacatcgattcagtgtttgtttcagattgtctatttttcctgcattttcctgaaaagaaaatccttttagtttgcataaaataaaattcttttgtgcaaaatctatcttagtaacttacttggcttcttcgatattatcaaatctagccatatgaatgtaatgtatgttctccagggcagaaagttgcacattaggtaggttgtcagttcttgcttcaggaactattctgtttttatttttcttatcataacatgctttaggatttttgctgctgaaaccattttaggtttgaccatataatatatatccctactactatataagcacggtgtgtaatgggtttggaaaaggttctggacggacacatggtcaaagtctacaatgatcagtacaatttgactgacaaatattgtcggggaccataattaggggtacccccaagactcctaatctcag

SEQ ID NO: 122027 - DNA, 559 bp, Zea Mays
cgaatcaaaagtatcctctggtttaccaatatacaatgtgaagatcaagggcaatcataggcttgacgtggtgtgccgtgggatgtttctacaagaaagtttatgcaaaggaaaaagaaagaagttttcaaggacgctgatgacgaggccgagcagatgaattggaggagaatgatgagagagatagaggaggcgggatcagctgtacgtacccattctgaagacccagcgaagcgggaaagagccacttccaagggatgctattcttgggactcttgtgcggttcaaacaattgaaaaaatgggatattgtcagtgagattcttgaatggctcagaacacagcattggtggaacttcagtgagatggacttcttgatgcttgtgacagcttatgggaagttgggggattttagcagggcagaaagggtcctcaagtacatgaaaaaaaaggttaacagccatgcgtcatgtcaaaactggtctgatggaggcgtatggaagagggaccgaattttttgtattttagcccttaaacagaagtaaaatcacgtttagacc

SEQ ID NO: 122028 - DNA, 416 bp, Zea Mays
ctacacctcggctcgctggagccgataaggctgccgcgccctccctctctcctgcggtgctcccatggaatcggcggcgattgggtcgcagtccccgctctccttcccctccaacctctggtatctgctcatgtcatatttatggggtaaaaaaaatccagtacccagctgtcagtaatgcgcgggttgcacgggaggaacacgacagtggacaagagtgtgtcggaccagctacacgccagatgggctgcgacgttcgacaaggcccagctgtagcaatgggatggttaccgggccggcgtagatcaacttcttaaaagcattgcgtgaagcttaagtagatgagaaaggagttggaaggagtcatcttgtaacagaattatattccaccgcattctactgaaaacttctctagc

SEQ ID NO: 122029 - DNA, 607 bp, Zea Mays
tagaaaggaggcaagctgaggctaaccgcatcagggagaagtaccccgatagaattcctgtcattgttgagaaggccgagaggagtgacatcccagacatcgacaagaaaaagtaccttgtccccgccgacctcacagtgggacagtttgtgtacgtggtgcggaagcgcatcaagctcagcgccgagaaggcgatcttcatcttcgtgaagaacaccctcccaccaacagctgccctgatgtctgccatctacgaggagaacaaggacgaggacgggttcctctacatgacctacagcggcgagaacacctttgggctgctatgagtggcgccgcgccgccgtggatcgacgtcggacaatgcccctcctcctgtaaatacttaaaaaaaaaataggcgtctcaagaatccgtgtacataataatctggcatgtcttgcatcaaaagcaactcgttgcgtccactgtctgttgaaactattgaagcgtactaaacatttaagcaactcgttgcgtccactgtcagctctgggttgcttcagaagttctgtcacctgctgcgtcctccgtgagcttgtcgatgtggcaaagtaacacagggtgcctg

SEQ ID NO: 122030 - DNA, 645 bp, Zea Mays
tagaaaggaggcaagctgaggctaaccgcatcagggagaagtaccccgatagaattcctgtcattgttgagaaggccgagaggagtgacatcccagacatcgacaagaaaaagtaccttgtccccgccgacctcacagtgggacagtttgtgtacgtggtgcggaagcgcatcaagctcagcgccgagaaggcgatcttcatcttcgtgaagaacaccctcccaccaacaggtttgccataccatcgtggggaaaaacaaaataaaacctacctgtccatggtgcccgtgtgtacaatgctgttactttttcttgtccatgcagctgccctgatgtctgccatctacgaggagaacaaggacgaggacgggttcctctacatgacctacagcggcgagaacacctttgggctgctatgagtggcgccgcgccgccgtggatcgacgtcggacaatgcccctcctcctgtaaatacttaaaaaaaaaataggcgtctcaagaatccgtgtacataataatctggcatgtcttgcatcaaaagcaactcgttgcgtccactgtctgttgaaactattgaagcgtactaaacatttaagcaactcgttgcgtccactgtcagctctgggttgcttcagaagttctgtc

SEQ ID NO: 122031 - DNA, 180 bp, Zea Mays
tccttccttccacaagagagacaaacctagctcgcggattgccggatggaccctcagcagccagaaccagtcagctacctgtgcggagattgtggagctgagaacacgctgaagccgacagatgtgatccagtgccgtgagtggggctaccgcatcctctacaagaagcggacccatcga

SEQ ID NO: 122032 - DNA, 2333 bp, Zea Mays
ggtgggcgggcaacgggatgctcggctgggaatcgtggctgagtgagggcgggcgggggcagttgtagagatatacggaggcacactcgtgctttcccagcacaactcatcactcatcagcaatataatacccaagatacaatctaggcagcctacaatctaacgtactccaggctccagctgatttgtccacgcggcatggcgacggccagcgccgcttcaagcttcctcgtcccggcgactgctatcgccccgacaccctctgcatgcccatccacggttcccaagaacaagaagaatgctgccggccggcggcggcgcacattgcagtgcagggccagcggccggcggggcgacgacgaagacagccgcctcctctggctgccccggcgggaagtgctgaccggtctgggcggcgtggccgccagcttcgtcgggtacccggatctggcttccatcgccctggaagcgaaccccgtggagagctgccggcggggcgagaaggtgacggagaagctggtggagtgctcggacccgaacagagacttcccgtgcccgccggcgtcacgggtccccatcgtggacttcacgccggaggcgagggtgacgcgcgtccgcaggccggcgcacctcctggacccggagtaccaggagaagtacagggaggcggtggggaagatgcgggcgctggacgggtcgaacccgctgagcttcgcggcgcaggcggccgtccaccagtcctactgcgacgggcactaccggctggacccgacggagaagaaccggcccttcgacgtgcacttctcgtggatcttcgcgccgtggcaccgcatgtacatctacttctacgagcgcgccctcggccagctcatcggcgacgacaccttcgcgctgccctattggaactgggacgcgcccgccggcatggggatcccggccatcttcaagcagggcgtctccacggccgacaacccgctgtacgacccctaccgcaacatggagaacatggacgccctgctcgatctggactacctcaagaaacccagacgcgacaccatccctttcgagccgccgacggacccagccgcgcgcgccaagtacgacgacgccgttcaaaccaacctgtgcaccatatacctgcagcaagtccgtgacggcaagggcccccgtgctttcctcggcgagaagctgtgcagcgagtcgagcttccgggtgaaggagatcaacgagcggtccaagcggaggcaggcggacgggcagagcagcaaggtgagcccaagcaagtcgcagagccagggcacgctggagcggatggcgcacacgacggtgcacgtgtggacggggcgggcgaacccggcgacgtgcagcgcggagcagggcggcgtggtggggcacgacggcaagccgcactgccaggtggacatggggttcctgggcacggcggggcgtgacccgctcttctactcgcaccacgcgaacgtggaccggatgtggcacatctggtccactaggctgggcggtaagggcttcgacgacccggagtggctggacaccagcttcgtgttctacgacgactaccggagcccgcggctggtgcggatgaagttccgcgacgtcctggacgcgaccaggctcgggtacacgtacgacaaggagtcggaggcggcgctgccgtggctgaacagcaagccgacccggttctccggcggcggcaaggcgaaggcgaaggcggcgcccaaggtggcgtcggagttcccgctgaccctgacggacgaggccgtggacgtgccggcggtggcggtcccggcgcggcaggccgggaaggacctggtgctgctgatcgagggcatcgagtacgacccccagatcaacaacaagttcgacgtggtcatcaacgtggcccgggaggacgccgcgagggtggggcctaaggacagcgagtacgccggcagcttcagcgccgtgcccagctccaacgccgccggtggcacgctggtgggcaagttcacgctcgccctcgacggcgtgctcgccgacctcgggctcgccggcgcgagcgccgtcgacatcgtgctcgtccctcacacggagggcgagatcaagctgtacttgcccccgaccatcgagaacgcgtgagaactgagatgagatgagacccgccacgcactgctggctggctgtttcgtctgttcaccgtccccatgagccagcagtggcgatttttaagttctaattgaagtagtatatgccgtcctgataatcctaccgctttgtatatatgttgcctggaattataatctcctcatattatataatccaacaaattttgaact

SEQ ID NO: 122033 - DNA, 283 bp, Zea Mays
gtctcgttagtttggtactatgtcatctgagatgtaatgccaagtttttttagtttttatcccttgtcagtcaggttgttgtgtgccactagcattaagtagagaatagctcaaggacaagtacttgtattaaaatgctaggaccttttagttgcaggattcatatggggattcgtgacgaggtgatgcttatgttgttgtttgttttgctaatacagttgggatccactgcaattgggttgaagacgaaggatggtgttgttctcgccattgagaaacgtgt

SEQ ID NO: 122034 - DNA, 2181 bp, Zea Mays
atggtcgcgcaccaccagaagacggtgatcggcggcggcgcgctggagttgccaccggacctcgtgaacttccttggcggcatcgacccgtgcgacggaagacagagcgggccgagggagctatggaacgacatccactgctgcttggtggaacccgcggcatgggacgtgctggagaacttcgagcagaggtggaagaagcaggacaagggcgacaacctcctagtggcgctgaacagggcgtgggcggagctgccgaagaacaatggttgggcgattccacgatctggagaaggagggcattggtggggacttgatggacagggtgacagaggtatggcttttccagtgctcgatgaaatgcctcacgacggcagtgaggcggtgattgttccattctctgaaggttttgattatccaatgttcgatgaaatgtctactgaggaggtggtctgggatgcagaagtgctacttggctgtgattcacttggtttttggcagcggctagctcatggagtggggaaccagatgcccaacgattgcaagcaggatgttgtgcctgatgccccatggatgtttgttggaatgtcacagcaagcaaatacacacccagtgttcagtgaaatgggtcctaaagtggcatgggatgaggagatgcaatcagaaacttatacgcatgaaggtttactgaagcagcttgctcaaggtggagaagccttagaagtatcagctaacaaggatgatgttggtgatgatgtggtggctctgagaggtgaagaagccatagaagaatcgatcaagaaggattctgatgttgaagatgaggcaactgcagtggttttgaaggatggaagcatggagcggtttccttctgcatgtactggccgtgtgcttgaggatagtcttgagaagcagcagaatgctgaagaccaagttgttgccggtgaggtggttgaaggggttagtagtcaattgctgaagttgtatgagcaaaaccgtataacgcaggcatcatcatcacagggaagtgaagcggaagggaactctactgaccgccaaatttgcagcaatcgtcctcaacaggagaaagtgttggggggcaatgaagctcatgttggtgtgatgaataaaattgacaaggataagaagcagaactcgtccaatggtagcatgcctccaccagacattgaaaatgttgatggattaatggagaagggccattatgtcaagcagaatctaccaacaacagctgaggacatgggaggtcgatggagagtaaagaacaatatcctcgagcacctcataagcaaaattatgtttctgaggacaaggagccctgagcagaatagatgtgattctactgtcctggcggtcttcctgaaagtggcaactaatggatccacaaaactgagtcctgagtgcgatggtcaaccttactgtacaaggtgcgtgaccactatgacaggcaaagtgccaagtcgatttctcttgagcctcggtctggatcacttggaggagatgcagcaagaagcatgggagcccatgtctcacatggatctgcttctcgcaaaggagctgcgtcctatggcagacccgtctctagaacttgcagctgctattggtgcgaggtccgacgggccaacgagcaaaatgaccgtctctatgatcttcgagtcggccagctgcacatctagtagaacgggaaccacactcatgctgactgcacccttgcagatggttagcattgacaagttcatgttagccctgtgtgcaatgagtgtgacgaatgagcttgtcaggatgacattttcaccatgtgttggagtgaagcctactgggcttatgtctgaggtttctagggagttgggcattgtcatcattggcagtagcgctgcttctgtgaagatcttcagggatgagagacgacaatcggacatattctgctacattatttcaatggcagcagccgctgataagatcttgcctgttgtaggaagcagaaatggtgcattgctgcttatgcaagcagaactccaagtgctttcatctcttggcgtgcttcttctttggatgattagaccttggaatccaggcattttggctgcacactgtgtcactgttgcttggggacaagcaacgtttcggcggggcggtaatgtaacatccgacccacttgtctga

SEQ ID NO: 122035 - DNA, 474 bp, Zea Mays
atggctgcctcgacctacctccttctcgttgcttttctagcactgctcacttctcaggccattgcctctgatcctagcccgctccaagacttctgtgttgccgacaaacactctccggtgaatgtgaatggatttgtttgcaaggaccccatgactgtgaacgcagatgacttctttaaggcagcaaaacttgaccaaccaagggacaccaccaagagcaaggtgggatccaacgttactttgatcaatgtcatgcagttgcctggactaaacaccttgggcatctcgttggctcgcatcgactatgcacccttaggtcagaatcctccacacacccacccgcgtgccactgagatcctcaccgtgcttgagggcacactctacgttggatttgtcacctccaaccaagctgacaacaccaacaagctattttccaaggtcctcaacaagggcgatgtttttgtgttcccctaa

SEQ ID NO: 122036 - DNA, 912 bp, Zea Mays
gcatcaaaaagatagacacactcaaacaccgcaagctaagaagatcccttgctgaattcagagagcacaaacacaaaagcgagtgcaaaaccaaatggcagccttgacctacttccttcttgttgcctttctagcgttggtcacatctcaggccattgcctctgaccctagcccgcttcaagacttctgtgttgccgacaaatactctccggtgaaggtaaatggatttgtttgcaaggaccccatggctgtgaacgcagatgacttcttcaaggcagcaaaacttgaccaaccaagggacaccaagaacaaggtgggatccaacgttactttgatcaatgccatgcagttaccaggactcaacacattgggcatctcgttggctcgcattgactacgcacccttaggtcaaaatcctccacacacccacccacgtgccacagagatcctcaccgtgcttgaggggaaactctatgttggatttgtcacctccaaccaagctaacaacaacaacaagctatttaccaaggtcctcaacaagggcgatgtgtttgtattcccccaaggacttatccacttccagttcaacccggtccatgacaagccagcagtcgcgatcgctgcactaagcagccagaaccctggagttattactattgcgaatgcagtctttggatcaaagccacctatctcagatgatgtcttggccaaggccttccaggtgcaaaaggggacaatcgattggcttcaagctcagttttgggagaacaaccactactaaaacaatgaagtctgggttcatcatttgatattatagaaatttatttgcattttacatactactccatgtatttactttttcctaggctacgacccataataaaataaatgttctatgtttctgaactataa

SEQ ID NO: 122037 - DNA, 1029 bp, Zea Mays
tccccatgccaaagcatcaaaaagatagacacacacaaacaccgcaagctaagaagatctcttgctgaattcagagagcacaaacacaaaagcgagtgcaaaaccaaatggctgcatcgacctacttccttcttgttgcctttctagccttggtcacatctcagtccattgcctctgaccctagcccgctccaagacttctgtgttgccgacaaatactctccggtgaaggtaaatggatttgtttgcaaggaccccatggctgtgaacgcagatgacttcttcaaggcagcaaaacttgaccaaccaagggacaccaagaacaaggtgggatccaacgttactttgatcaatgtcatgcagttaccaggactcaacacattgggcatctcgttggctcgcattgactacgcacccttaggtcaaaatcctccacacacccacccacgtgccacagagatcctcaccgtgcttgaggggaaactctatgttggatttgtcacctccaaccaagctaacagcaacaacaagctatttaccaaggtcctcaacaagggtgatgtgtttgtattcccccaaggactcatccacttccagttcaacccggtccatgacaagccagcagtcgcgatcgctgcactaagcagccagaaccctggagttattactattgcgaatgcagtctttggatcaaagccacctatctcggatgatgtcttggcaaaggccttccaggtgcaaaaggggacaatcgattggcttcaagctcaattttgggagaacaaccactactaaaacaattaagtctgggttcatcatttgatattatagaaatttatttgcattttacatactactccatgtatttactttttcctagtctacgacccataataaaaataaatgttctgtgtttctgaactataattgtaattgtgttcctagtgtggctctaccaccatgtccttaatcgaaagtgaatgtaatgtatatgacactctatcgtttcccattttattgggacggatca

SEQ ID NO: 122038 - DNA, 1099 bp, Zea Mays
ccatctccatgcccaaagcatcaacagcatttgtagacacaagctaagaagctccgtagctaaattcaaatattacaaacacaaaagtggagtgcagaaccaaaatggctgcctcgaccgtccttctcgttgcttttctagcattggtcacttctcatgccattgcctctaatcctagcccgctccaagacttctgtgttgccgacaaagactctccagtgaaggtgaatggatttgtttgcaaggaccctatggctgtgaacgctgacgacttcttcaaggctgcaaaacttgatcagccaagggacaccaccaaaagcaaggtgggatccaacgttactttgatcaatgtcatgcagctgcctggactcaacacgttggggatctcgttggctcgcattgactacgcaccactaggtcagaatcctccacacacacacccacgtgccactgagattctcaccgtgcttgaggggacactttacgtcggatttgtcacctccaaccaagctgacagaagtaacaagctatttgccaaggttctcaacaagggcgatgtgtttgtattcccccaaggactaatccacttccagttcaacccagtacatgacaagccaacagtcgcgctcgctgctctaagtagccagaaccctggagctattactattgccaatgcagtctttggatcaaagccacctatctcggatgatgtcctagctaaggcctttcaggtgcaaaaggggacaattgattggcttcaagctcagttctgggagaacaaccactactgaaaaaatcgagtctgagttcaatatatgagaataaagaaatgtacttgtattttacatactactctatgtgttaacctttttctaggttgcgactgataataaaataaatgtttagtactattgtactataatcgtaagtttgtgcctattgcggttccaccggtgtgtccttaatcaaaaagtgaatgtaatgtttctgacaatctatcatttcccattttattagggatggttcatataataagccacctctacaaaaagtctatatttcatatagtgggtcatatctacaactgtattgttgcacc

SEQ ID NO: 122039 - DNA, 974 bp, Zea Mays
accttacattcgctttttgattaaggacactgtggtggagccacaacagggacacaattgcaattatagtacataaatactgaacatttattttattatcagtcgcaacctagaaaaaggttaacacatagagtagtatgtaaaatacaagtacatttctttattctcatatgttgaactcagacttgattttttcagtagtggttgttctcccagaactgagcttgaagccaatcaattgtccccttttgcacttgaaaggccttagctaggacatcatccgagataggtggctttgatccaaagactgcattggcaatagtaatagctccagggttctggctacttagagcagcgagcgcgactgctggcttgtcatgtactgggttgaactggaagtggattagtccttgggggaatacaaacacatcgcccttgttgagaaccttggcaaatagcctgttgcttctatcagcttggttggaggtgacaaatccgacgtagagtgtcccctcaagcacagtgaggatctcagtggcacgtgggtgtgtgtgtggaggattctgacctaatggtgcgtagtcaatgcgagccaacgagatccccaacgtgttgagtccaggcagctgcatgacattgattagagtaacgttggatcccaccttgcttttggtggtgtcccttggctggtcaagttttgcagccttgaagaagtcgtcagcgttcacagccatagggtccttgcaaacaaatccattcaccttcactggatgcatgcatagacgagggcaaacaattagatggagaacaggttaataggacatgcatatataccctgaaatgcttattgtacgtagatgtgtgtttgaacaaatgatccttatttaatcaggtatatattataagaacattgcttgagtcaagaggagagcacttatacccggagagtctttgtccgcaacacagaagtcttg

SEQ ID NO: 122040 - DNA, 1703 bp, Zea Mays
atggcgctccgtcgctgcaatgccgccgcgcaacgtcgccaggcttcaccgacgccgaatccgaggtatgtggcctcctcagttgttcatcgtggtccgcttgtcgtgctaagcctttcgggtggtggttggtgcgcgggggcgtcggagcatgaaggcatgataccttctgtgaggatctctcctggctatgcagccttctctggctccagcctacgcttaaaattacattcaattccatccatctctagtctcaaaccctccaaatatgtggtctcctcgctgaaaccactctacctagcaccgctagatggtccacacacttctgagcttaagtcttggagacaaccacttgagttccgttgtgctgcttctgctgccgatgacaaggagtcaaagactcaggtggtgccagttcagttggaaggcgcacagaggttaaagatctccatctatttcgcgacctggtgggcgcttaatgtgatatttaacatttacaacaagaaggttctcaatgctttcccttacccctggctcacctccacactctcccttgcctgcggctctgcgatgatgcttttctcgtgggccactcgtcttgttgaggcccccaagaccgacctagacttctggaaagttcttttcccggttgctgtggcacatacaattggccatgttgctgcgacagtgagcatgtctaaggtggcagtgtcattcacacacataattaaaagtgcagaacctgcattcactgttttggtgtcaaagttcctccttggggagacgtttccagttccagtctatctttctcttcttccaatcattggtggttgtgctctagctgctgtcacagagctgaactttaatatggttggatttatgggtgctatgatatccaaccttgcatttgttttccgcaacatcttctcgaagaggggcatgaaggggaagttcgtcagtggcatgaattactatgcttgcctgtcaataatgtcgctggtcatactgactccatttgctatagctatggaaggtcctcagatgtgggctgctggttggcaaaaggctgttgcagaagttggacccaatgttgtctggtggatcgctgcacagagcgtgttctatcacttatataaccaggtgtcctacatgtctctcgatcagatctctccattgacgtttagcattggcaatacaatgaaacgtatatcagtgattgtttcatctataattatcttccacacgcctgtccgccctgtcaatgcactgggagctgccattgccatccttggcacattcctgtactctcaggcaaaggcgtgaggctaaagctttggccaaaggatcggagccagtagcaggcactggatccagttttgcttgttggagtggcatgtagatataaggttcggttttcgtgagagagagggtaataatggatcagtggctctgctgttccgttcttgtttgttgaccagattgaaatgcacaggccgtgacatgaaccgtcgtcaagtgtacctgaataacaccgtaacgaaattcaccgatgctgtttctttatgggtatgtaatccaaaccggaatcctggtttcaatagaaatagtttctgctatcagaagttattagtcgttgtgcattccagtattttagcagagctaagctgcgagccatgaccatgaccatgagcgcttgaacctcc

SEQ ID NO: 122041 - DNA, 3214 bp, Zea Mays
cagctagctcgcaataactccttcctccccacctccacattctcccatccgccctgctttcccctccaaccatgccgtcttcttcctccccgagatctcgccatgcctgctctcccgcctcctgctagctagcctagcctagccagctgcgtgcgtgcgtgcgtgatcgtttcctgcatgcgatatcaccaacgcttcgctggaagaaggcgtcgtcacagacagggatcgaagaataaaagttgatcgatggtagagagcaagagctagctagggtttgggagctgaggctaggaccgaacgtacgtacgtgctgccattgttcatgacgccggcaaggcgcgtgccgccggcggcgatgatcggccggaatggcttcgcgtttgggtcctcgtcggcgctgtctttaagccaggctgacctcctagacagccatcagctgcagcaagcgttccagcagcagctcttcgatcagatcccgaccaccaccacagtggacgatagcagcgacaacctcatccatggccgctctgacacgctggtagatgagttcgagagcaagtcctgcagcgagaatcccgacggaacctctggtgacgatggcctggaggaagaccccaatcagcggccgaacaagaagaagcgataccaccgccacacccagcaccagatccaagagatggaggcgttcttcaaggagtgcccgcacccggacgacaagcagcggaaggagctgagccgggagctcggcctcgagccgctgcaggtcaagttttggttccagaacaagcgcacacagatgaagaaccagcacgagcggcacgagaacgcgcagctgcgcgcggagaacgacaagctgcgagccgagaacatgcggtacaaggaggcgctgggcacggcctcgtgccccagctgcggcggcccggctgccctcggcgagatgtccttcgacgagcaccacctccgcctcgagaacgctcgcctccgtgacgagatcgaccggatctcgggcatcgccgccaagcacgtgggaaagcccatggtgtccttccccgtgctctccagcccgctcgccgccgccgccgccgccgcccggtccccactcgacctcgccggcgcctacggcgtccagtcagctgctgcgggcctcggcgccgaccacgtgctgttcggcgccggtgccggcgatctgctgaggagcgtgtcggccgggcagctcgacgcggacaagcccatgatcgtggagctggccgtcgcggccatggacgagctcctccggatggcgcggcctgacgcgctgctgtggggtggcggcgcgtcggcaggggcgcagcagcagcagctggacgaggaggagtacgtccggacgttccccgctgggctcgggccgaggcagtacgggctccgtccggaggcgtctcgggacagcgccgtcgtgatcatgacctgcgacagcctcatcgagatactcatggacgcgaaccgattcgcggcagtgttctcgagcatcgtgtcgagggcttccacgcacgaggtgctgtcaactggtgtggcagggagctacaatggtgcattacaagtgatgtcgatggagtttcaggtgccgtcgccgctggtgccgacgcgcgagagctacttcgtgaggtactgcaagaacaacccggacgggacatgggccgtcgtcgacgtctcgctcgacagcctccgccctagcccggtcatcaaatgccggcgcaggccgtcaggttgcctcatccaagagatgcccaatggctactcaaaggtgacctgggtggagcatgttgaggtcgacgacagatcagtgcacaacctctacaggcctttggtcaattcaggcctcgcgtttggcgcgaagaggtgggttggcacactggaccggcagtgcgagcggctcgccagcgccatggccagcaacatccccaacggcgacctcggtgtgatcacaagcatagaggggaggaagagcatgctgaagctggcggagaggatggtggcgagcttctgcggcggcgtgacggcgtctgcggcgcaccagtggacgacgctgtcgggaagcggcgcggaggacgtccgtgttatgaccaggaagagcgtggacgacccgggcaggccgccgggcatcgtcctcaatgctgccacctccttctggctgcccgtcccacccaagagggtcttcgatttcctccgcgatgagacctctcgcagcgagtgggacatcctctcgaacggtggtgctgtccaagaaatggctcacattgccaacggccgggaccatggcaactgtgtctccctccttcgtgtcaatagtgcaaactcgaaccagagcaacatgctgatcctccaggagagctgcaccgacgcctcgggctcgtacgtggtgtacgcgccggtggacgtggtggcgatgaacgtggtgctcaacggcggcgacccggactacgtggccctgctgccgtcgggcttcgccatcctccccgacggaccaccgccggccggtgcggctccgtcccacggagagggcttggacactggcggcggcgggtccctcctgacggtggcgttccagatcttggtggactccgtccccaccgccaagctctccctcggctccgtagccaccgtgaacagcctcatcgcctgcaccgtcgagcgcatcaaggccgccgtctgtgcggaagccggcaacccgcagtagccatccatgcgatatagaggagggagaagggggacatgcagcaaggttttgtggaaatgttagtggggagtcaagaacgcacctcagactctccttgccgtgtggtgctcatactgaaaggaaaaagaaggcgtcaccactatgcaaggggggatggttcgggtattgacttcgccgtccaatcaaactactacagaaaggacgtacgggtgctgtggagaagatggatcgatgctgtttctagggtttacttcctcattgttcgtggtgctgccgtagttcaggctaaggtgcctgtgcctgctcgcagtcgtagctagagaacacagagatttgttgcctctgatctttcctttttggatttgcaaagatttgtagatcagtcatttcgtaaaccgatgcgccttggctaaaacgcgcccgttcgttgttgttcgatcgtagctgccttttgctattcataaaacgatgcaatttcaaccactgagtttcttctag

SEQ ID NO: 122042 - DNA, 3013 bp, Zea Mays
cagctagctcgcaataactccttcctccccacctccacattctcccatccgccctgctttcccctccaaccatgccgtcttcttcctccccgagatctcgccatgcctgctctcccgcctcctgctagctagcctagcctagccagctgcgtgcgtgcgtgcgtgatcgtttcctgcatgcgatatcaccaacgcttcgctggaagaaggcgtcgtcacagacagggatcgaaggctgacctcctagacagccatcagctgcagcaagcgttccagcagcagctcttcgatcagatcccgaccaccaccacagtggacgatagcagcgacaacctcatccatggccgctctgacacgctggtagatgagttcgagagcaagtcctgcagcgagaatcccgacggaacctctggtgacgatggcctggaggaagaccccaatcagcggccgaacaagaagaagcgataccaccgccacacccagcaccagatccaagagatggaggcgttcttcaaggagtgcccgcacccggacgacaagcagcggaaggagctgagccgggagctcggcctcgagccgctgcaggtcaagttttggttccagaacaagcgcacacagatgaagaaccagcacgagcggcacgagaacgcgcagctgcgcgcggagaacgacaagctgcgagccgagaacatgcggtacaaggaggcgctgggcacggcctcgtgccccagctgcggcggcccggctgccctcggcgagatgtccttcgacgagcaccacctccgcctcgagaacgctcgcctccgtgacgagatcgaccggatctcgggcatcgccgccaagcacgtgggaaagcccatggtgtccttccccgtgctctccagcccgctcgccgccgccgccgccgccgcccggtccccactcgacctcgccggcgcctacggcgtccagtcagctgctgcgggcctcggcgccgaccacgtgctgttcggcgccggtgccggcgatctgctgaggagcgtgtcggccgggcagctcgacgcggacaagcccatgatcgtggagctggccgtcgcggccatggacgagctcctccggatggcgcggcctgacgcgctgctgtggggtggcggcgcgtcggcaggggcgcagcagcagcagctggacgaggaggagtacgtccggacgttccccgctgggctcgggccgaggcagtacgggctccgtccggaggcgtctcgggacagcgccgtcgtgatcatgacctgcgacagcctcatcgagatactcatggacgcgaaccgattcgcggcagtgttctcgagcatcgtgtcgagggcttccacgcacgaggtgctgtcaactggtgtggcagggagctacaatggtgcattacaagtgatgtcgatggagtttcaggtgccgtcgccgctggtgccgacgcgcgagagctacttcgtgaggtactgcaagaacaacccggacgggacatgggccgtcgtcgacgtctcgctcgacagcctccgccctagcccggtcatcaaatgccggcgcaggccgtcaggttgcctcatccaagagatgcccaatggctactcaaaggtgacctgggtggagcatgttgaggtcgacgacagatcagtgcacaacctctacaggcctttggtcaattcaggcctcgcgtttggcgcgaagaggtgggttggcacactggaccggcagtgcgagcggctcgccagcgccatggccagcaacatccccaacggcgacctcggtgtgatcacaagcatagaggggaggaagagcatgctgaagctggcggagaggatggtggcgagcttctgcggcggcgtgacggcgtctgcggcgcaccagtggacgacgctgtcgggaagcggcgcggaggacgtccgtgttatgaccaggaagagcgtggacgacccgggcaggccgccgggcatcgtcctcaatgctgccacctccttctggctgcccgtcccacccaagagggtcttcgatttcctccgcgatgagacctctcgcagcgagtgggacatcctctcgaacggtggtgctgtccaagaaatggctcacattgccaacggccgggaccatggcaactgtgtctccctccttcgtgtcaatagtgcaaactcgaaccagagcaacatgctgatcctccaggagagctgcaccgacgcctcgggctcgtacgtggtgtacgcgccggtggacgtggtggcgatgaacgtggtgctcaacggcggcgacccggactacgtggccctgctgccgtcgggcttcgccatcctccccgacggaccaccgccggccggtgcggctccgtcccacggagagggcttggacactggcggcggcgggtccctcctgacggtggcgttccagatcttggtggactccgtccccaccgccaagctctccctcggctccgtagccaccgtgaacagcctcatcgcctgcaccgtcgagcgcatcaaggccgccgtctgtgcggaagccggcaacccgcagtagccatccatgcgatatagagggagaagggggacatgcagcaaggttttgtggaaatgttagtggggagtcaagaacgcacctcagactctccttgccgtgtggtgctcatactgaaaggaaaaagaaggcgtcaccactatgcaaggggggatggttcgggtattgacttcgccgtccaatcaaactactacagaaaggacgtacgggtgctgtggagaagatggatcgatgctgtttctagggtttacttcctcattgttcgtggtgctgccgtagttcaggctaaggtgcctgtgcctgctcgcagtcgtagctagagaacacagagatttgttgcctctgatctttcctttttggatttgcaaagatttgtagatcagtcatttcgtaaaccgatgcgccttggctaaaacgcgcccgttcgttgttgttcgatcgtagctgccttttgctattcataaaacgatgcaatttcaac

SEQ ID NO: 122043 - DNA, 102 bp, Zea Mays
gaaacactatgcaacaacatgaatgcaacaaccaaggcatttatagggctcacttcactaggcttacgccaatatataacaaaagaactctcttttatttag

SEQ ID NO: 122044 - DNA, 823 bp, Zea Mays
atggaggccgagtacttaacgaccgtgcttgacaacaacgccgatttgatgccattttggaggaagcctgcgcctggggagccaccagcagcacccgccgactctgaagctcagttcctctcaggagacgacggcgatgaacacgggcaggccgacgacgaggatggatgtggaggtgaacgactaccaaccgttgggccccaacaaccgccacgatccacccattttggccatttccttgttcaaaggatctacgccctcgcgacatgcttggaggtttcagacttccaggtgcttactgatatttcaccacgcgcccagtagtacgaagcaactgatcccgcaaccacagtttaagagcatgtgagaatgaattgagtcacccagtagcaaccaaataagtggaatagaatggcaatgctgatatgaggggtgtaatggatgttgtagtcacaatttacttttcccagcttcagatcatatgaacaacaatcagtattgcaatcatttcggacaacttgaccagagctgaagagatggagtgtagcagaaaaccagaacatataaaagatagaaaggatcaggcacaacaaaagtggaaaagctatcattgcctgaacttcaccaatgacctttgcagcaacctgaagccatgcgtaatggttattggtaggagctaccagctatcacattcaaaatatagagatgattattaatgcccctatgcaatacttgtcatgtatccaacgattttgcttacccttaagacaggtgttgctgtcagtatacaacgacaatagctattgaggacaggaaagcaatg

SEQ ID NO: 122045 - DNA, 743 bp, Zea Mays
gcctcctctctgtttcagtcgtggagcatcagcaatccacatcatctccgttggccgagcggttccctcgcggcgcccaggatccttcccagacgcgctcggctccctggtctgtctgtcaccttgccgacgcctcctctgctcctccacctgtagctcgcccctatctcctcctctccccatggcggctccccctggatccctccctgcgcgaaccctctcctgcagcacgccagtgccgaccacaatctcccatggcgcaggagctccccattctcctcttgctagggcgccgtcgctgggctcgcccagtctctcgctttctctgctccagcagcaaccgtctcaaggtattccagttcgtgagcagcagcaatcgatatagctcctccgcaccgtggcgcagccagccgtcgatgccatgtccctgcaacctcgtgtcgtcgtcgtgcccgccttggtggagaagaaggttcagttcaacactccctaagtgttcgatgatatgctccggtggccatcgtcgttcttgcaaaaaaatcaagtcggatcatgatgtggtgaggcaagttgtttctgtggctatttaattaataaatggtttggttagataattatcattgtggttgtgtttgatgtaggatgaaataatttggttgtgtgccatgattttttttgacgtcatgattggatagtagaagtgttgtttgaggggaagtttaggtattaggtgcaaattttac

SEQ ID NO: 122046 - DNA, 355 bp, Zea Mays
gacggcgagcacgagaccgaggcgtgctgcacgtcagcaattgacgagaactgaagaccggcaatgaggattcgaggagcgagcgccgcagccacaggcgtgggaaatcgacggcgagcaggacgcggatcagggagcctgcttgatagtcgagcaggggaggacggggttcgacgactcgacggcaaatgcgaacacgccgaagcccgatggacgaggagcgagcgcgccgcagtgacgacgagcaggcgctgccgagtctgcgcagagcttctaaaccacgtgtgttgcggtggtggtccggtggtcggaggagcgcgcgtccaaagatgaagacgatggcccaaggacgagc

SEQ ID NO: 122047 - DNA, 625 bp, Zea Mays
agaacagccgatgccaccatctggcagcaaagctaatatttaacaacatttgctccttggagttcttgataaatcgaccaagaagcttgtagtaggtcactggctaaggtgacatcattcatgatacctgataatttttactaacaggaacaggactataacagtaaggggttgtttgtactaaggcattgtttggtgattactaacaaggatagggccacaacagtaaggggttttgtttggatgaaggcattgcttagtgatttgtcaaggatttggattatatttcccctttactcaaaaagggcctatgcatttagggattagtattggccatgacctgaggacctcttgttagaacttctgtctaaggtaccataacggttttgtgattggtgtgagttaggtcttgtggggggtgtcccgcctccataaggtcgctgctgccattgttgacccccatatggtacaggctggtatcccccagaataaccaccagcatatgctggggggtatggcccatacagtccaggacctgctgatggagcagcagactgtgggttgccacggttttgatggtatccaggtggctgaactcttccactagaatcatggtggttatctc

SEQ ID NO: 122048 - DNA, 236 bp, Zea Mays
tttttttatttgacgcaagttactcaggttccgcttgccatcgaacggaggatggtcttttgacatggaatcgcttcatagtaaatgttgctagggctggacaaaatatcgtggcaaaccacaatgcagggctagtttgaaagctatgatatgtttggttgcgggacagctaggacagagacatcccctggcgtcctctctcacccctccaatattgagggacaacagaggacaac

SEQ ID NO: 122049 - DNA, 2321 bp, Zea Mays
cccttctccttccggtcttcctcttcttcgatcggtgagcatagcacacacgtacgggaaggcccgcagcatcagcactgcgcgagctctctgctcagctcaggaggctctacgcgtccgcgctcgctccatcggccggtaccgctccttcacctactgcataccaagcaccagtctgtctatgtctatctacggttccacgccgccgccgccgatgagcacgccggggagcagggccagggccatcggcctcaccatcacgctgctttccgtcagcggcggcatccacttcagcagcacctgcggcttcggcttgctcctcagcttcacggggatcctcgccggcgccaaccttgtcgcctttggcgtcagcaaggccgacgacaacccggcgcccaccttccctacggcgttcgacagtgcacgtgctctcgcggcgttcatgcgccgcagcaccgccaccgcggggctcgtcatggcttcctgtgccgtcacggctgtctccagcggcgaggctgacccggtgctcttcttcgccatgttcgctctgctcctgctgggggtctcactggtcatcgccggagctcgtggtgagtaatcgggttttcagctcttaatccggtgcgtcggcgatcttgatcctcgattgagtgtcctctgtctacgagcaataatttggtttggtcaaaatacagtcgttgtgtgtgacctgatgaacatcgtgtttcgagtacatgtttgttagctagctcctatgatctctccaatcaaacggtactcgagtagactactcaaattgctttctattgccgtcatacaagaactctctcaatcaggctaaagagcagcacggacgccattgtcactgtacaattaatctgccctaataccataagaaaatcactagacaacaatgcacaatacatgtgaacgaacaacacccggaagcccacgtttcgtagcttccattccattaccaatggctctgtgcctgcgagatgtctgatatacagcacacggtgtactcttgcggtatcatcctgtattcccggggttagaagagcttaccattctatttaacccaatctcgggtacatacaagagcctcaattgttttgatatttaatgtgctccattgcttatgtatcacatttaccttaccgcttaatgcggcctcaaaattaacagcagaagctggcactgccaggacatcacgtgccataattgaaagggttggatactttgtagaattactcatccaccagttcaaaatatcaaaatcatccttccttgggacaataccatcttcaaggtagttgtcaagttctctcaattgttggttccttgtctgtgcattaagatgttcgtcccaatcttccaatgagtcactgtcaaattcatccaactcaacttcacgagttgatgtatcaccacccaagttatttgaaagaccacaatactcatggaacagctcccttattgtatcacgaatggcagatacatacttttccgcattggtaccaaaagctcgctttaaacggaactcgataaaagtaattttgaatctgggatcaagaacaacaggtatcgaaagccacaagtatgaattttgccaatactcattgaatgcttcctgcatctcccaaaccatgttagcaagttcaatgagatcagttgatgcttcttcttgcaaaactgttctaactttccacagttcattgaagtacacatttgatgtggggcagatagggctacaaatcacttcgacagcatgataaaaagccctgagtatcctgcaaacagactcaacagctttgttgtctcctgcagataacaattcttcagatggaaatgccttcttgaaatgcagaagaacttcaagcctaaagtatattatgtgccaccattttgcatcttcgtgtgggcacttcaatcccatatgtgcaacagcttctagaagttgctgtcgagtcagagatgaggacatatgtgcccgaataaatgtctctagtatgttaccaacatgacaaagcacttgttgccctttcgagacaatgttgttaagtacatcattcacacaatcgatattgtatagctcacctcttataggaaggcatttcctttggatgagcaagtccatcagctttgaggttccctcgtcgtttctaatttcactgccagatgtcaagctgaaatgcttctgatcaagattccaatcccttaaagcttcctgtatgacattaaatggtccaatatcagaatctagccctcaggcctccttaaactgtatcatcctttccaaactagtaggcaaggacgaa

SEQ ID NO: 122050 - DNA, 2328 bp, Zea Mays
accacgaagagacaggatcccatcacaggctcacatagtcacaaggaagtccagtcggccatggggagaccgagagctaccaccaccgcagcctcttccaagccgaagccgaagccgaagcccaagcccaagcccaggtccagggccaagcctagggcgacgcccagccccgtctccctgctctccggcatctcctctccttacgcgtgccgcacgccgtcccctgctgccgccgacctcagcttcctctcgccctcctccccgcccgcggaacccggaaccaggaattcttcgcccctcgccgcccccactaccatgtccaccatcggagacctgaggagcctcgccgcgtcgcacctcgactccctgaagcgccgcttggacgcgctccacggcgactatgtccgcgaccttgaggcctcccactcccgcatctccaagcgcgtcaagatggagtcccatggctgcctgcagctagcagaggaagtggacaaggaacagcagaagatagccgacaagatcgccgagcgcgccgagctggtgaagacctcttacaagaagttcgtggctgaagtgcaggcgtccacatcccgtgtgtgcaaggtgactgtccctgagatgacgaagtccatggagagggctattgatggcttgcgcagtcgctacatctccgctataccatcagcttagctggtgctgttgtccacatcaattgaggtcacatgttgagtcttaaatcggcttcgcagcagggacttgcacatttgtacataatatcaccgttgcatgagtacatgagatagttcattgctacatctccatttccagatatcccgaaaagtcaataatagttccttcgatccttggaacttttttttttgcttcgtcgcatttcttgtgcatcccgtaagatgctactgtcgatgtacctttcacgctcagagcatctaatttttaatcatgtttgttctagcagtacgttagctatcgcctcaagcctgaatggtcagttgctgcatgacaattaacaaccaaaacccaggtcttgttttgttctaagcggtaatttctgttcagtttgtagctgccagttgatttgcactttatacttgcgcccgaaaacagtttatgacttcggattaaacccatgattaaaactagctgtttgaattgctgcaaactatgacacgttatgacaacacaacctgtgtttgctgcttgttggtttttcatcatccaattccaatccacgatacactggataaaaccggttcagatttcttttgattaaaacccttgtttcgcactcactctatgctaacaataacgggttctcgattgatatgtcatcttttagctactcagatgttttagtttgctaagtttgaatagtcttttgctgtcatgctcatgcttggttccgtccgtccgtcgaggaatttgtcaaaataggtcgttctaaactgccgctctgcaaaatacgcccgcgctagctcaggtcgtaaaaatgggtcgctcaagcgctgtcactcgccaggagaggtcacggcagcttctggcgtacctggcaggtgggccccagtacgcttgtacctattatgcccttacggtttaactccatgccgtctgttcttcttctctggacgccgagcactccttctcctcctctgtcggcggtcgtgggagacgtacacggcgattaggaggcacgtcgtccaccagtctcctcgcagggatgtcgaagagcacggaaatcgcagataaagcaatcatcttgatgcaggatcatgccaagcatatctatcgtatttgcaatgagaagctaatattgggtaaaggattgactgcatttgaggtcaaagaacttcgtgaagcacttgaattcgccgccgaaggattggaccaggactcccttttttgccaagaggaattggatgcaactgttaaggaggaacaattggagcatgacgagaaggtggcttcacagatgattgaaagcccacttcttctcctgattcggactgcttcctatcccttgaagagcacattgagaagttttggggcgttgattacaactcggaccagatgcctagctactccgactaggctcagagtttatggtgctgtgaaattctggatgtttgggtgtaatggtattttggatgtgtatgtgaactgtaattctggatgtgtggatgtaatggtgaactgactgaatggtgtcttgtgtaatggtattttggatgtctatgtgaactctagttctgggtttaatggtgaactgaaattcagtgttcattgttcagtataatttgttaactccactaa

SEQ ID NO: 122051 - DNA, 2426 bp, Zea Mays
accacgaagagacaggatcccatcacaggctcacatagtcacaaggaagtccagtcggccatggggagaccgagagctaccaccaccgcagcctcttccaagccgaagccgaagccgaagcccaagcccaagcccaggtccagggccaagcctagggcgacgcccagccccgtctccctgctctccggcatctcctctccttacgcgtgccgcacgccgtcccctgctgccgccgacctcagcttcctctcgccctcctccccgcccgcggaacccggaaccaggaattcttcgcccctcgccgcccccactaccatgtccaccatcggagacctgaggagcctcgccgcgtcgcacctcgactccctgaagcgccgcttggacgcgctccacggcgactatgtccgcgaccttgaggcctcccactcccgcatctccaagcgcgtcaaggtggctggtccccgttccctgcctctgcgtagctcgctcactccttcggttgcttcgtcgagttcatcatgtgcgatgatgtgatgactgatgtcatcttctcccgcgtgccctgcgcccagatggagtcccatggctgcctgcagctagcagaggaagtggacaaggaacagcagaagatagccgacaagatcgccgagcgcgccgagctggtgaagacctcttacaagaagttcgtggctgaagtgcaggcgtccacatcccgtgtgtgcaaggtgactgtccctgagatgacgaagtccatggagagggctattgatggcttgcgcagtcgctacatctccgctataccatcagcttagctggtgctgttgtccacatcaattgaggtcacatgttgagtcttaaatcggcttcgcagcagggacttgcacatttgtacataatatcaccgttgcatgagtacatgagatagttcattgctacatctccatttccagatatcccgaaaagtcaataatagttccttcgatccttggaacttttttttttgcttcgtcgcatttcttgtgcatcccgtaagatgctactgtcgatgtacctttcacgctcagagcatctaatttttaatcatgtttgttctagcagtacgttagctatcgcctcaagcctgaatggtcagttgctgcatgacaattaacaaccaaaacccaggtcttgttttgttctaagcggtaatttctgttcagtttgtagctgccagttgatttgcactttatacttgcgcccgaaaacagtttatgacttcggattaaacccatgattaaaactagctgtttgaattgctgcaaactatgacacgttatgacaacacaacctgtgtttgctgcttgttggtttttcatcatccaattccaatccacgatacactggataaaaccggttcagatttcttttgattaaaacccttgtttcgcactcactctatgctaacaataacgggttctcgattgatatgtcatcttttagctactcagatgttttagtttgctaagtttgaatagtcttttgctgtcatgctcatgcttggttccgtccgtccgtcgaggaatttgtcaaaataggtcgttctaaactgccgctctgcaaaatacgcccgcgctagctcaggtcgtaaaaatgggtcgctcaagcgctgtcactcgccaggagaggtcacggcagcttctggcgtacctggcaggtgggccccagtacgcttgtacctattatgcccttacggtttaactccatgccgtctgttcttcttctctggacgccgagcactccttctcctcctctgtcggcggtcgtgggagacgtacacggcgattaggaggcacgtcgtccaccagtctcctcgcagggatgtcgaagagcacggaaatcgcagataaagcaatcatcttgatgcaggatcatgccaagcatatctatcgtatttgcaatgagaagctaatattgggtaaaggattgactgcatttgaggtcaaagaacttcgtgaagcacttgaattcgccgccgaaggattggaccaggactcccttttttgccaagaggaattggatgcaactgttaaggaggaacaattggagcatgacgagaaggtggcttcacagatgattgaaagcccacttcttctcctgattcggactgcttcctatcccttgaagagcacattgagaagttttggggcgttgattacaactcggaccagatgcctagctactccgactaggctcagagtttatggtgctgtgaaattctggatgtttgggtgtaatggtattttggatgtgtatgtgaactgtaattctggatgtgtggatgtaatggtgaactgactgaatggtgtcttgtgtaatggtattttggatgtctatgtgaactctagttctgggtttaatggtgaactgaaattcagtgttcattgttc

SEQ ID NO: 122052 - DNA, 746 bp, Zea Mays
cctgtattttttggttttagggttagggtttagaggtatagtgtttagctgcagtggtgattcactgagagctcgatatgcaccctgtattttttggttttagggttagggtttagaggtttagtgtttagctgctgttgtgattttttatctgctcctcgccgtgtactaatggatgcagggatgtcgaagagcacggaaatcgcagataaagcaatcatcttgatgcaggatcatgccaagcatatctatcgtatttgcaatgagaagctaatattgggtaaaggattgactgcatttgaggtcaaagaacttcgtgaagcacttgaattcgccgccgaaggattggaccaggactcccttttttgccaagaggaattggatgcaactgttaaggaggaacaattggagcatgacgagaaggtggcttcacagatgattgaaagcccacttcttctcctgattcggactgcttcctatcccttgaagagcacattgagaagttttggggcgttgattacaactcggaccagatgcctagctactccgactaggctcagagtttatggtgctgtgaaattctggatgtttgggtgtaatggtattttggatgtgtatgtgaactgtaattctggatgtgtggatgtaatggtgaactgactgaatggtgtcttgtgtaatggtattttggatgtctatgtgaactctagttctgggtttaatggtgaactgaaattcagtgttca

SEQ ID NO: 122053 - DNA, 999 bp, Zea Mays
accacgaagagacaggatcccatcacaggctcacatagtcacaaggaagtccagtcggccatggggagaccgagagctaccaccaccgcagcctcttccaagccgaagccgaagccgaagcccaagcccaagcccaggtccagggccaagcctagggcgacgcccagccccgtctccctgctctccggcatctcctctccttacgcgtgccgcacgccgtcccctgctgccgccgacctcagcttcctctcgccctcctccccgcccgcggaacccggaaccaggaattcttcgcccctcgccgcccccactaccatgtccaccatcggagacctgaggagcctcgccgcgtcgcacctcgactccctgaagcgccgcttggacgcgctccacggcgactatgtccgcgaccttgaggcctcccactcccgcatctccaagcgcgtcaagatggagtcccatggctgcctgcagctagcagaggaagtggacaaggaacagcagaagatagccgacaagatcgccgagcgcgccgagctggtgaagacctcttacaagaagttcgtggctgaagtgcaggcgtccacatcccgtggtacttttgcacacggaaaaaaatacttctctgtatttctgtccggttccacttccatgtgctcgtttctctcttcaacatgctgtgttataactctgttggtggcggccagtgtgcaaggtgactgtccctgagatgacgaagtccatggagagggctattgatggcttgcgcagtcgctacatctccgctataccatcagcttagctggtgagtcgggctgtgttcatacgaactgaatatgggtaaaatgacttatccacattgcacatgttgttcgctgccgaatatctgttatttctagcgactgttaagtgttgaaagaagtagatatatagtacgcacatgtgatggatgatgggtactgctctagtactctagagctaggtcgtcctgccgactgc

SEQ ID NO: 122054 - DNA, 97 bp, Zea Mays
aagattcaatcatatacttgagtaatacttattacactatccagactccagagtcacataatttctcacatacacacaagtaacacacagatattgt

SEQ ID NO: 122055 - DNA, 1741 bp, Zea Mays
gtcttttcttttctacacttgtctctgttttcttacattatagttccttttcattgtacctgtggacttggctgagttgattctatcttccatttggttaaaatctctataatgattggatgataccttttcatgtagaaactgtgatcaatggcaaaccaataataaatttacctcctaagacaattaatctgaataaagtagatttcacacaagaggagcggtcgttttatttgatgctggaagaacgctctcggcaacaattcaaggcatttgctgcggctgggacactcaaacaaaactatgccaacatccttttaatgttgctgcgacttcggcaagcctgtgatcatcctattcttgtaaagggcaatcagtcagaatatggaggtgatggttctatagaaatggcaaagaaacttcctaaggaagtggtgatagatttgcttgcaaaactggaagtggggtcaacactttgtggcttatgcaatgatacacctgaggatgctattgtgacaatttgtggtcatgttttctgctatcaatgtatacatgaacgaataacgactgatgagaatatgtgccctgcccctaattgcagtagaacattaggtcttgaattgttattttcgtcaggagctttaaagatttgcatctctggcaaatcgagttctgcagtagctagttcatcatcagataacgagtcatcttcaatcagtcaaagcagctttgtctcatccaagatacaagcagccattgatatactgaattcaatcattgtcatggatcctcttactgaaagttatacaatggaatcaagcagaagtggactaggccctgtgaaagccattgtcttttcccaatggactggcatgctggatttgctggagctttcactgaatatcaactgtatacagtacaggagactagatggaacaatgtctctcaatttaagagaaaaaaatgtgaaggattttaacactgacccagaggttagagttatgattatgtcactgaaagctggtaatcttggtctcaacatggtttctgcttgccatgtaattctccttgatctctggtggaacccttatgctgaggaccaggcagttgatagggcacacaggattgggcagactaggcctgttactgtatctcgcttgaccgttaaagacactgtggaagatcgtattttagctctgcaggaggaaaagagaaccatggtgaactctgctttcggtgatgacaaagccggcggccatgcgacccggctcaccgtggaagacctgcggtacctatttaggatatgattgcgagggaactctctcaatgcctcggtcaacttgtcaggtcatgatgcgttgtaccttgtaatcgtagtccggcaaaagggcggtgtaccattgcgagggtaggctcattggtccatgtccgccacgccttgctgcagctccagttttgtggtgctcagatttctagatgggtaatctagggctagatagcatgtgtaattataaccccccaaccccccctccccggggcatggaggagagttccgcagtgccaatgctttatgatttagtgtatgtatatacatgatcaccatgtctaacttgcaatgagttgttttagctcgagatgtgagactgatactgccagcgggtcagcattttgtaccttctgtgttatgtccctttgcccgtcatcagaaaatccaaaaaatcaaaacttttgttggtgtcca

SEQ ID NO: 122056 - DNA, 3800 bp, Zea Mays
ctgaatatcccccgaccgcaacggcgccggtctccctcgctccatccttctaggcaggccctcgctctcccgtggatcctccgccgcgccgccgcccctttatctgagccatccagcggagcggagatccatccgttggggcgtggattcagtcccttcccttctcggtggttactcccacagtgagggtaactcgaataactgtgagtgctactgtgagatgggtggtgtgctctctcttttagcttggtgatcatctgaaaaaaggaagtgctgtttatttctgtaagatagaaagcaaaccattggttcatgaatggtttagtcatgctaagaaaaacaaagttctaagaacacatatacagtgcacgtgcttgctggcaatatgaatgaaaactctgccattattatttcggatagtgatgatgactcaattggctcaatattcgatgatgacgaccagccagcgtctgcaatcgcaaggcttgatcaaaatgctgaaggacgaataatcaattttgaggatgaagattggcaaaggagcgctcctgctccaccatcgactaagcctactgagaacaacaatggtcaatacaggattcttccagcatcccttacgaatggtagacatgctgagagtagtcgttatacatttggttcagtggacaggattcatccccatgcaaatccttatatggctatgcgaccgggccattctacttccagtagaattgatagcgtagtggaaaagcacaacagttctacagcagatgcaaatgacaataacaagagggtccttccatcatccttttcaaatggcaacacatcaaaatctatgcatccaattgttgctagcgaaacacgcaagctcccactgcctttatccaccaaaaagtcaccaaatattggtgaaaacagaatggggacaaatattgccaatggaaatttgcagccttcatcttcaataatggcaagaggaacttctagtacacttaatacccataaagtggatgatgatgatgatgtcattgtatatggaggttctagctcacatagggtactgccttcaacgtttgaggcaaccaattctaataacagtgaagttgctaagggctttgagacacacagtcgccttaatcctgaaaatagggtcttagattacgctgagagagcagtatatcaagaagccctgcagaatattagtcgcgaaaaaagtgaagatgatctgcctgagggtgtgctagcagtacctctgcttagacatcagaaaatggcattggcttggatggtttcaaaggagaatagctcacattgtgctggtggaattcttgccgatgatcagggccttgggaagacagtgtctactattgcccttatacaaaaacagaggatggaacagtcgaaatttatgtttgttgattcagatcgtttgaaatctgaagcactaaaccttgatgaagatgatgagggagaacaaactgttagcaatgaacctaaaaaggaccaaggcgcttgttcattgtcaacatctgctggtactagtgctgaactttttgttaatcaaccgaataatgttgtgaataaaatggttgaaaccaaagcagaacgcaagaaaaaagctaaagtttccacatcatctgcatccacctcacgttccatgacaaggccagctgcaggtactctagtagtgtgccctgctagtgttcttaagcagtggtctaacgaattaactgacaaggttagcgaaagtgctaaattatctgttttagtctaccatggtggtgcaaggaccaaagatccacgtgagctggcaaaatacgatgtagttgttactacatatacaattgtggccaatgaagtacctaaacagatggctgatgatgacgcagatcaaaagaacagtgaagaaccctctgctagcaataaaagaaagccatcggcgaatatgcaaaacaaggctaagaaaaagaagaagaaacttaaggactcaaactttgaccttgacagtggtccaattgcaagagtgcgatggtttagggttgtgcttgatgaagctcagacaataaaaaacttccgaactgtagtggccagagcctgttgtgggctaagagcaaagcggagatggtgcttatcaggaacacctatacaaaatgcaattgatgatctgtttagctatttccgtttcttgaaatatgatccgtattgcacgtataactcgttttgcacaatgattaagcacccaattgctagagatgcaattaatggatacaagaaacttcaggctgtgctgaaggtagttctcctgcgtcgtacgaaagaaactgtgatcaatggcaaaccaataataaatttacctcctaagacaattaatctgaataaagtagatttcacacaagaggagcggtcgttttatttgatgctggaagaacgctctcggcaacaattcaaggcatttgctgcggctgggacactcaaacaaaactatgccaacatccttttaatgttgctgcgacttcggcaagcctgtgatcatcctattcttgtaaagggcaatcagtcagaatatggaggtgatggttctatagaaatggcaaagaaacttcctaaggaagtggtgatagatttgcttgcaaaactggaagtggggtcaacactttgtggcttatgcaatgatacacctgaggatgctattgtgacaatttgtggtcatgttttctgctatcaatgtatacatgaacgaataacgactgatgagaatatgtgccctgcccctaattgcagtagaacattaggtcttgaattgttattttcgtcaggagctttaaagatttgcatctctggcaaatcgagttctgcagtagctagttcatcatcagataacgagtcatcttcaatcagtcaaagcagctttgtctcatccaagatacaagcagccattgatatactgaattcaatcattgtcatggatcctcttactgaaagttatacaatggaatcaagcagaagtggactaggccctgtgaaagccattgtcttttcccaatggactggcatgctggatttgctggagctttcactgaatatcaactgtatacagtacaggagactagatggaacaatgtctctcaatttaagagaaaaaaatgtgaaggattttaacactgacccagaggttagagttatgattatgtcactgaaagctggtaatcttggtctcaacatggtttctgcttgccatgtaattctccttgatctctggtggaacccttatgctgaggaccaggcagttgatagggcacacaggattgggcagactaggcctgttactgtatctcgcttgaccgttaaagacactgtggaagatcgtattttagctctgcaggaggaaaagagaaccatggtgaactctgctttcggtgatgacaaagccggcggccatgcgacccggctcaccgtggaagacctgcggtacctatttaggatatgattgcgagggaactctctcaatgcctcggtcaacttgtcaggtcatgatgcgttgtaccttgtaatcgtagtccggcaaaagggcggtgtaccattgcgagggtaggctcattggtccatgtccgccacgccttgctgcagctccagttttgtggtgctcagatttctagatgggtaatctagggctagatagcatgtgtaattataaccccccaaccccccctccccggggcatggaggagagttccgcagtgccaatgctttatgatttagtgtatgtatatacatgatcaccatgtctaacttgcaatgag

SEQ ID NO: 122057 - DNA, 2881 bp, Zea Mays
atgcagccggccgaaagcctgactggctgcattcgggcctggcccttgtgccacttcctccgcaacgcctcgccagttgcaaggactgaatatcccccgaccgcaacggcgccggtctccctcgctccatccttctaggcaggccctcgctctcccgtggatcctccgccgcgccgccgcccctttatctgagccatccagcggagcggagatccatccgttggggcgtggattcagtcccttcccttctcggtggttactcccacagtgagggtaactcgaataactgtgagtgctactgtgagatgggtggtgtgctctctcttttagcttggtgatcatctgaaaaaaggaagtgctgtttatttctgtaagatagaaagcaaaccattggttcatgaatggtttagtcatgctaagaaaaacaaagttctaagaacacatatacagtgcacgtgcttgctggcaatatgaatgaaaactctgccattattatttcggatagtgatgatgactcaattggctcaatattcgatgatgacgaccagccagcgtctgcaatcgcaaggcttgatcaaaatgctgaaggacgaataatcaattttgaggatgaagattggcaaaggagcgctcctgctccaccatcgactaagcctactgagaacaacaatggtcaatacaggattcttccagcatcccttacgaatggtagacatgctgagagtagtcgttatacatttggttcagtggacaggattcatccccatgcaaatccttatatggctatgcgaccgggccattctacttccagtagaattgatagcgtagtggaaaagcacaacagttctacagcagatgcaaatgacaataacaagagggtccttccatcatccttttcaaatggcaacacatcaaaatctatgcatccaattgttgctagcgaaacacgcaagctcccactgcctttatccaccaaaaagtcaccaaatattggtgaaaacagaatggggacaaatattgccaatggaaatttgcagccttcatcttcaataatggcaagaggaacttctagtacacttaatacccataaagtggatgatgatgatgatgtcattgtatatggaggttctagctcacatagggtactgccttcaacgtttgaggcaaccaattctaataacagtgaagttgctaagggctttgagacacacagtcgccttaatcctgaaaatagggtcttagattacgctgagagagcagtatatcaagaagccctgcagaatattagtcgcgaaaaaagtgaagatgatctgcctgagggtgtgctagcagtacctctgcttagacatcagaaaatggcattggcttggatggtttcaaaggagaatagctcacattgtgctggtggaattcttgccgatgatcagggccttgggaagacagtgtctactattgcccttatacaaaaacagaggatggaacagtcgaaatttatgtttgttgattcagatcgtttgaaatctgaagcactaaaccttgatgaagatgatgagggagaacaaactgttagcaatgaacctaaaaaggaccaaggcgcttgttcattgtcaacatctgctggtactagtgctgaactttttgttaatcaaccgaataatgttgtgaataaaatggttgaaaccaaagcagaacgcaagaaaaaagctaaagtttccacatcatctgcatccacctcacgttccatgacaaggccagctgcaggtactctagtagtgtgccctgctagtgttcttaagcagtggtctaacgaattaactgacaaggttagcgaaagtgctaaattatctgttttagtctaccatggtggtgcaaggaccaaagatccacgtgagctggcaaaatacgatgtagttgttactacatatacaattgtggccaatgaagtacctaaacagatggctgatgatgacgcagatcaaaagaacagtgaagaaccctctgctagcaataaaagaaagccatcggcgaatatgcaaaacaaggctaagaaaaagaagaagaaacttaaggactcaaactttgaccttgacagtggtccaattgcaagagtgcgatggtttagggttgtgcttgatgaagctcagacaataaaaaacttccgaactgtagtggccagagcctgttgtgggctaagagcaaagcggagatggtgcttatcaggaacacctatacaaaatgcaattgatgatctgtttagctatttccgtttcttgaaatatgatccgtattgcacgtataactcgttttgcacaatgattaagcacccaattgctagagatgcaattaatggatacaagaaacttcaggctgtgctgaaggtagttctcctgcgtcgtacgaaagaaactgtgatcaatggcaaaccaataataaatttacctcctaagacaattaatctgaataaagtagatttcacacaagaggagcggtcgttttatttgatgctggaagaacgctctcggcaacaattcaaggcatttgctgcggctgggacactcaaacaaaactatgccaacatccttttaatgttgctgcgacttcggcaagcctgtgatcatcctattcttgtaaagggcaatcagtcagaatatggaggtgatggttctatagaaatggcaaagaaacttcctaaggaagtggtgatagatttgcttgcaaaactggaagtggggtcaacactttgtggcttatgcaatgtaagcaatctggtctctattttgatgttcgcctgttttttatcttcttttctcttctttttggtataatcatgagcctcatgtgtacttctggatgtgttattagttggattgttgggtcgtcg

SEQ ID NO: 122058 - DNA, 762 bp, Zea Mays
tttttttatttttttttattttgaccttttttaactgaaactcaattcatttcctttttttgggtgcacttgagaaactatcatagaattgcaaattaacatagtgcagaacaactagaaatatcaggtgcaaattgatctgcgaaagaggaagcaatcaagagagggatgggtgggaatttatgtttatgtttcagagagaaaatgaagatcagatcaaagggtaagatcataatgatatggaggcaaaaaacgaaattcagatcagggagttctaaaaaaatcagaccagcaaaaagacaagtttcagacgattgaaaactcgataatgcaaactacgaatcagctgcacaagtgaaaggcattatatatatattcttttttgcgactatttgtggactgtaagtatataaaaatctagcctaccaaaagcaagaatgatcctaccgagtcaaccgaggctttgataccagatgatgggcgcatgcgtacagattacgcgggagcaattgttgtggcccgatcttctcgaaggatcttcgaaacttgataaatatcgctacgtgacctgacgaagaggctgcgcaccacgagatcttgcacacgcgacgaacaaccgagacaatcgcccttccacgtaccgatgaagccagcccacgcaatcacgtcgtatagacgtgaaggcacaaactgggtgaaccgcagttcggtgttctacaactccctcgggaattgaaagaacaagtctgcaagtctctcaag

SEQ ID NO: 122059 - DNA, 1239 bp, Zea Mays
accgatcaacttcaaaagatttcttctgcagtttctcaagtcgagaagctagtgggggacgacgccaccgagagggaacgcgacacgagatcgccatcgccatggggggaggagtcatgcgcaccgccgcgaaggtcagcatcgccgggggcgcggcggcggcgaaaagcggccggttccgcaacgccgctccggtcttcgccacggcccccgccgccgcgggttccgaagcggcgccgcttgtctccgtctcgagtggcgaggtgccccccgccgcggcgcagtgggcggcgtcctgggagctggacgactgggagtttgcggactggagggacgacgccgcggcggcggcggcggtagtggagagggaggcaacggcggccgccgccaagcccaggctggtcttcgcgccgccgtcgagggaggaggccgaggaggccacgaccgagctcagggacgccgtagagagggcttatttcaacgagtcgccagttgaggttgttaaggaacaagataaagagtttaataaactggcaactgatgccatgattccttctatgcctggacatgtggttcaagcttttacgttgctgaaatcaagcacggaggctcagagtgttgtcgcctcccttgcatcagatagaaatgtctgggatgcagtattgaagaacgagaaggttatggagttttataagactcaccagacaactctagttcagacatcccctaacgaagccgtcacagtagagttgccggggaagctggaagatgctgcctctgaaaacacatccagcggcgaactccccgctggctcaggcctgagtttctccgatttcgtggacaatgcgaagaagacagtgatggacgtggtccataacataaccgacttcttcaaggacttgttcgacgactcagccaagacccagactggggcaggcccttcagcagctgagaagggcccttctatggcagatatggctgtcggcggatccttcatggctctggccatagcggtcatcctagttgttatgttcaagagggcatgatatagccatgagtatcttctgggatccacggtgctttaaatctgtcgaaaattactcgtctatcgtttggtcaagaactcctgactgtaatgtaatgtacagcttgtgtccttgtccttggaaacagcacactaaaaggctatctatgatatacaacggtgtgtatcttggtttctcaacctctgatgtgcag

SEQ ID NO: 122060 - DNA, 102 bp, Zea Mays
caagtgaattggtttcgcctaggtgccattatgaacaactgcatacccgctagaatgccttctggctgtttaataagaagtggatcagctttaatttaaaag

SEQ ID NO: 122061 - DNA, 787 bp, Zea Mays
ccaatgattgatatggaaatgaaacgaaatgactacctttctagtatttaccataaagatgatacgagttgtttgcgcatgctaagattgaggagagcaccattctttttgttgtgtgatacactaaaacaaagaagccttctttctgataatatccattgttgtgttgaggaacaagtagcaatgttccttcacacaattggtcacaacgagaggaatgctgttgtaggaaaaaaaattcaagagatcaggggaaattgtcagtcgctactttaagttagtacttcgtgctgtcggtgaacttcgtgatgaccttattaggcctccatctcttgaaacttcagtcaaaatccttggaaatcctcgatggtatccttactttgagaattgtattggcgcaattgatggtacacacatacgagctagtgtccccaagtctcgtgaggcagcttttcgaggtagaaagagtttcacaacccaaaatgtgatggctgcggtagactttgaccttcgcttcacatatgtgctagctggttgggagggttcggcacatgatgccgtcgttctagtcgatgccttacaaaggcataatggtctcgttgtacctaaaggaaaatattacttcgttgattgtggttatggtgcaaaaccggggttcttatcaccttttcgcggtgtccgataccacttaaaatagtggggtaatgataacatgccagaaaatgagaaggaattatttaatttaaggcattcacaactacgggtcactgttgagcgtgcctttgga

SEQ ID NO: 122062 - DNA, 2439 bp, Zea Mays
gatggccgcccctgcgtccgcctcctccatataaagaactcgccgcgcgtctcccccaccagggacctgcaggccacctcgacctccttccgttcctcgtcgtctcgtgttgtttctcgcgttgccattgccccagctgtccgcccgcgcccgcggcaatggcaggcggcgtggtggtgaacgcggccgggggcaagacgtaccccggccgcatgacgccgttcgtgttcttcacctgcctggtggcgtcatcgggcggcctcatcttcgggtacgacatcggcatctccggcggtgtcacgtccatggcgtcgttcctcaaggagttcttcccctccgtgtacgccaaggcggcggcgaacaaggacacgaaccagtactgcaagttcgacagccagctgctgacgctgttcacgtcgtcgctgtacctggcggcgctggcgacgtcgttcgtggcggcgtccgtgacgcgggtgttcgggcgcaagtggtccatgttctgcggcggggtgaccttcctggccgggtcggcgctgaacggcgccgccaccgacgtgatgatgctcatcatgggccgcatcctgctgggcgtgggcgtcggcttcgccaaccagtcggtgccgctgtacctgtcggagatggcgccggcgaagctgcgcggcatgctcaacatcgggttccagctgatgaccaccatcggcatcctggcggcgaacctgatcaacttctggacggcgggcatcgagggcgggtggggctggcgcatcgggctggggctcgcgggcgtgccggcgctcatcatcaccctgggcgcgctggtgctccccgacacgcccaactcccttatcgcccgcgggttcaacgacgacgccaaggcggtgctggtgaagatccgcggcacggacgacgtgcaggacgagtacgacgacatggtggcggcgagcgaggaggcgaacgccatcgagcacccgtggcgcaacatcctggagcgcaggtaccggccgcagctgacggtggcagcgctgatccccttcttccagcagctgacgggcatcaacgtgatcatgttctacgcgccggtgctgttcctgaccatcggcttcggcgacgacgcgtcgctgatggcggccgtcatcacggggctggtcaacatgttcgccaccgtggtgtccatcgtgtgcgtggaccgcctgggccggcgcgcgctgttcctgcagggcggtacgcagatgttcgtctcccagatcgtggtgggcacgctgatcgcgctccagttcggcaccgccggcgtgggcgagatgtcccgctccaacgcctggctgctggtgctcttcatctgcctctacgtcgccgggttcgcctggtcgtgggggccgctgggctggctcgtcccctcggaggtgttcgcgctggaggtccggtcggcggggcagagcatcgccgtgtgcgtcaacatgctgctcaccttcatcatcggccaggccttcctcagcatgctgtgctcgctcaagttcgggctcttctacttcttcgccgggtggatgttcatcatgaccaccttcatcgccctcttcctgccggagaccaagggggtgcccatcgaggagatgaacctcgtctggagccgccactggttctggggcaagtacgtcaacgtcgacacacaacacggcggcgccagcccgagatccaacggcgtctgatctgagcaagctgcagcaacacctcggcacctgacctggccatgcatgcacacgtatactataatctaacaacgtagctgacctgggcaaattgccagcctgacagggccagggtgctcgaatgtctcactctcaccgccgactaactttccatcaaaattgattcttgttcatactccatagcatgcacagattgattgaactgctacttgagattcttgtcattgttattagagagagagacagagacagaacgattggcatagcatgcagaattgtttggaagaagctagcaaagcagttccttgtttgtatcctctgtaccagaagatgagtttgatctaggattaatccctgcaaggcaaggtaaagtaaattcatgttgtactcaaaactaacttctcccatatctgtacgtcgtataaaacaaatccctgcaatgtgcaaagattgtcccgcgtagtgattttttcgtctccagcaagatctcaaacaagccccaaatctaagtgtaacatgtttgcatttgaattaaaaaattgaatcccttattgtgacatgtttgcatctgagttcgaaaaatccagctgtttttgttatggttgaatatatgctaaaatagtgccttggtcaagatttatttttgtcacatatatagaacacaaccatgcaaaactacaagttgctggagtgtagtgctctcgtgtggtgcgaactagctcacgttttggagaat

SEQ ID NO: 122063 - DNA, 904 bp, Zea Mays
ttgttggctgtcattgtggctgacgagggagtggaggagcactgtgacccacgaggcaacgacgagggagacaatagcagcataatgcgtcttcaggtagtgcgcaggtcgagcgagcacaccacggtgccgagctcctcggcagagatgaacccagatctgagggacaggggcttgcctggagatgagaggaggggcgacgtgtgccggaacgcgaccaccgccgtgtacagggtgcggtgtgggcggaggccggggacgacgatgcggcagcatggtggagtgaggggcgtaaggtttggaggcggtgccacacggcgggcgtggtggtggtgttcttaggtcaccccttgaggaggtggggccgatggagtggcgccatcggctgtggcatcgccaaagtcgtcgcagtcgaaggactgggaagtgatgcgcgggaggtcaccgtcggaggggggaagaggtgatgaatccgagagtgggaggagatgtggcgacggggagagggaagaggcgctgaggatggggcaggcgcgtgatgaggacacgagggcggctgtcacggcgggggcaacaacctctggtgtcactgtcatcggagcaacaacctccacgcggatgggcttgctctccgacgccttacccacagccttgccttgcttcggttgagccgtcggcaccgaccggaccttctctactttcccggtgaaagcccgccgggcgcggaccgactccgtggatgcatccgaggatcaagacgcgctgagcggcaagcccggatgcgacagcggcgcgtcgttcctcctcgacggcggcccaggaggtgtgcgccgcggcgacggcaccggggatgcaaagctagggtgctcgcacggttggacgatcgggtgggggcggagcgatg

SEQ ID NO: 122064 - DNA, 783 bp, Zea Mays
ggagacaatagcagcataatgcgtcttcaggtagtgcgcaggtcgagcgagcacaccacggtgccgagctcctcggcagagatgaacccagatctgagggacaggggcttgcctggagatgagaggaggggcgacgtgtgccggaacgcgaccaccgccgtgtacagggtgcggtgtgggcggaggccggggacgacgatgcggcagcatggtggagtgaggggcgtaaggtttggaggcggtgccacacggcgggcgtggtggtggtgttcttaggtcaccccttgaggaggtggggccgatggagtggcgccatcggctgtggcatcgccaaagtcgtcgcagtcgaaggactgggaagtgatgcgcgggaggtcaccgtcggaggggggaagaggtgatgaatccgagagtgggaggagatgtggcgacggggagagggaagaggcgctgaggatggggcaggcgcgtgatgaggacacgagggcggctgtcacggcgggggcaacaacctctggtgtcactgtcatcggagcaacaacctccacgcggatgggcttgctctccgacgccttacccacagccttgccttgcttcggttgagccgtcggcaccgaccggaccttctctactttcccggtgaaagcccgccgggcgcggaccgactccgtggatgcatccgaggatcaagacgcgctgagcggcaagcccggatgcgacagcggcgcgtcgttcctcctcgacggcggcccaggaggtgtgcgccgcggcgacggcaccggg

SEQ ID NO: 122065 - DNA, 826 bp, Zea Mays
agaaatgtactttcttatttctgggaagccacaaacatcatccaaaaaacttcattattgaactataactcataagcaatctaaaagagggcaccgccaatgatgggttgttggtagaacgttgttgggtttgtcaaagcaagttggttgaatggcagcaattgttgcagttgtaagagggtgccagcgttaggcgcagcgtgcaggtagaacggcaacaactgttgttgtgtcaagaaggcaacagggctcacatcagctagctggctgaatggtggtagctgttgctgttgtaaataagcagcagagttcaatgctgccagttggttgaatggaagaaattgctgggggtaggcagcagctagctgactgaatggtagttgttgttgcaaataagcagcagagttcaatgcagccagttggttgaatggaagaaactgctgttgctgagagtaggcagcaaggtttcctagcacaagttgttgtagttgttgtgccttgatgttttgtgccaacaaatgcaccaaaggtaactgctgtaatagggctgacggttgttggaggaacaagggtgataaaggtaagatgcctgctgcgattgcctgttggatcctgtagggttgaagaattgggttttcacatactgaagacaccgctggtgagaggtatgggggaagaaaggaagctataggagcttgtgagcattgtgggaaaatggttgcggtagcagcacttgcagaaagaccaaggagcataaggaagcaaaatattttggctgccattgttggtacactattgtgctttctatgttgctagttggtctcaa

SEQ ID NO: 122066 - DNA, 267 bp, Zea Mays
atttcggaggcctgctctcatagaactcttgtacgtaagtgttgtaatggagtactcatctgacagttgagttgtgacaaagaagtattcgagatcaaatgataggatggtgtttatattagcgagtcaggagacctaaatagtcagggtgagactagagaatgagagagctaaaatggcatgtgagatcaatggtcaggtgttgtcggccatgcccttattccccagcagtttgacggtcgcgccgacgagtaggacgagtaggga

SEQ ID NO: 122067 - DNA, 979 bp, Zea Mays
tttacaaaacgtatgcgtcacacgtttccatcggcaagcctaacatagcacattctgcatggctatagggtcccacctaacaaagtacatatttttggagattataccatcctcgtcatgtttgtgtgtgttaatgcttaattaaccgagtagcacaccacaacgatgatttatacctcattactcccgatcttagagcaaaataactatcgaccacatttggagactagaagcacataagaatctagaaatgtactttcttatttctgggacgccacaaacatcatccaaaaaacttcattattgaactataactcataagcaatctaaaagagggcaccaccaatgatgggttgttggtagaacactgttgagtttgtcaaagcaagttggttgaatggcagcaattgttgcagttgtaagagggtgccagcgttaggcatagcgtgcaggtagaacggcaacaactgttgttgtgtcaagaaggcagcagggctcacatcagctagctggctgaatggtagtagttgttgctgctgtaaataagcagcagagttcaatgctgctagttggttgaatggaagaaattgctgggggtaggcagcaactagctggctgaatggtaattgttgttgcaaataagcagcagagttcaatgcagccagttggttgaatggaagaaactgatgttgctgagagtatgcagcaaggtttgctagcacaagttgttgtagttgttgtgccctgatgttttgtgccaccaaatggaccaaaggtaactgctgtaatagggctgacggttgttggaggaacaagggtgataatggtaagatgcctgttgcgattgcctgttggatcctgtagggttgaacaattgggttttcacacattgaagacaccgctggtgagaggtatgggggaagaagggaagctataggagcttgtgagcattgtgggaaaatggttgcggtagcaacac

SEQ ID NO: 122068 - DNA, 788 bp, Zea Mays
atttcattggatccttttgatacgacctgaagtggctaacaagtagtgacatcgtgctcacttgctttgtgcaggtcaagggattgctcaaggagaagaaactggagagtctggtcgaccaagatctagaacacaactacgtcgacgttgaggtggaatctctggtacaggtcgcactcctctgcactcagagcaaccccatggaacgccctaagatgtcagaggttgtgaggatgctcgaaggcgatggtctcgccgagagatgggaggagtggcagaaagcggaagtagtacggcaagaggtcgagctaggccctcatcgaacttcggaatggatcctcgacttgaccgacaacctccacgctgaacagctgtcagggccgaggtgaaggcagctttggactcactgattcttgtatcttgcaagggcaatagcgatgtgtatcaatcatcctagtcaagaatcccccatttgttcataccaatcgttgggtgaagcgaggagatgtggtcagccatgatgtgcattggatgtatgttgctgaggtgacatggctgagttcatatatgcgagggcagcagagctcgacaagctagtgtcgtgcgctgtcggtgcatgcactagtggtcctggatttgcgaaggttggaaggaactgacgcgaaccgttctgactcccctcctacaaaaggatcggatgatataggtgtgcctatggacctgttctgggtggcaaggttaatcagaagtttccgtgctgagtgttgtaattatgtctctagactgta

SEQ ID NO: 122069 - DNA, 875 bp, Zea Mays
atttcattggatccttttgatacgacctgaagtggctaacaagtagtgacatcgtgctcacttgctttgtgcaggtcaagggattgctcaaggagaagaaactggagagtctggtcgaccaagatctagaacacaactacgtcgacgttgaggtggaatctctggtacaggtcgcactcctctgcactcagagcaaccccatggaacgccctaagatgtcagaggttgtgaggatgctcgaaggcgatggtctcgccgagagatgggaggagtggcagaaagcggaagtagtacggcaagaggtcgagctaggccctcatcgaacttcggaatggatcctcgacttgaccgacaacctccacgctgaacagctgtcagggccgaggtgaaggcagctttggactcactgattcttgtatcttgcaagggcaatagcgatgtgtatcaatcatcctagtcaagaatcccccatttgttcataccaatcgttgggtgaagcgaggagatgtggtcagccatgatgtgcattggatgtatgttgctgaggtgacatggctgagttcatatatgcgagggcagcagagctcgacaagctagtgtcgtgcgctgtcggtgcatgcactagtggtcctggatttgcgaaggtagggggagctaaggtgctgtggctgtcatctgggtctgcgataagttaattgtactgacagttgacatctaactattttgtgtatctaatgtaaggttggaaggaactgacgcgaaccgttctgactcccctcctacaaaaggatcggatgatataggtgtgcctatggacctgttctgggtggcaaggttaatcagaagtttccgtgctgagtgttgtaattatgtct

SEQ ID NO: 122070 - DNA, 2679 bp, Zea Mays
cccgtgtctcgtatcgccattctacccaaccgcaacgaaaatgagcccaggcgataaaggctgagtccgtccgtcgaaaagcgagcgcagagtgggagagagaagggggtcgattcggagagatcgagaaagaggagggaggcggagggcgacgtggcggtgggtgctgaagcggagcctgcagcgcccgctcgagtactcgccggatcgcccgacctgccggtacagcgctgcagacagcctgatccggccgatccggcgggaatggcggcgcgaggagggatctagcggaggtggtggggtcgcgcggcaatggcggaggcagagccgcggcgccggtgggcggtgtgggcgctactgctgctgctccaccccgccgcgctcgtgctcgccaacaccgaaggtgatgccttgcatagcttacgtaccaacttaaatgatcctaataatgttctacaaagttgggatcccactctggtcaacccctgcacttggtttcatgttacctgcaataatgacaacagtgtcatcagagttgatcttggaaatgctgcactatcaggaactttggttccgcaacttggacagctctaaaacttgcagtacctggagctctacagtaataatatcagcggaattatacctagtggatttggaaaccttacaaacttggtcagtttggatttgtacctgaacaacttcactggtccaataccagattcattggggaagctattgaagctgcggttcttgcgtcttaacaacaacagcctttctggttcaattccaaaatcattaactgctatcactgcactccaagttctggatctgtcaaataacaatttgtctggagaagttccatcaactggttccttttctttattcacccctatcagttttgcgaacaaccctaacttatgtggtcctggcaccacaaaaccttgtcctggtgctcctcccttttctccacctccatacaaccctacaccccctgtgcaatcaccaggaagtagctcttctagtactggagcaattgctggtggagtggctgctggcacagccttgctatttgctgttcctgcaattagttttgcctattggcagcgcaggaaaccacaagaacatttctttgaagtacctgccgaggaagatccagaggtgcatcttggccagcttaaaagattttcactacgagaattacaagttgcaacagatggcttctgcaataagaacattcttggaagaggtggatttggcaaagtctacaaaggacggctggcagatggatctttggttgctgttaagagactaaaggaggagcgcacgcctggtggggaattacagtttcaaacagaagttgagatgattagtatggctgtacacagaaatctattgcgtcttcgtggattctgtatgacaccaacagaaaggttgcttgtgtatccatacatggctaatggaagtgttgcatcacgtttaagagaccgggcaccagctgaacctccgctagattggcaaacaaggagaaggattgctttgggttctgctaggggcctgtcttatttacatgaccattgtgacccaaagattattcatcgtgatgtcaaagctgcaaatattttgttagatgaagacttcgaggctgtggtgggggattttggtttggccaaactaatggattacaaggatacccatgtaactactgctgttcgtggaacaattgggcacattgcacctgaatacctttcaacaggaaaatcctctgagaaaactgatgtatttggctatggaattacacttttagagcttattacaggacagcgggccttcgatctagcttgccttgctaatgatgatgatgtcatgcttcttgattgggtcaagggattgctcaaggagaagaaactggagagtctggtcgaccaagatctagaacacaactacgtcgacgttgaggtggaatctctggtacaggtcgcactcctctgcactcagagcaaccccatggaacgccctaagatgtcagaggttgtgaggatgctcgaaggcgatggtctcgccgagagatgggaggagtggcagaaagcggaagtagtacggcaagaggtcgagctaggccctcatcgaacttcggaatggatcctcgacttgaccgacaacctccacgctgaacagctgtcagggccgaggtgaaggcagctttggactcactgattcttgtatcttgcaagggcaatagcgatgtgtatcaatcatcctagtcaagaatcccccatttgttcataccaatcgttgggtgaagcgaggagatgtggtcagccatgatgtgcattggatgtatgttgctgaggtgacatggctgagttcatatatgcgagggcagcagagctcgacaagctagtgtcgtgcgctgtcggtgcatgcactagtggtcctggatttgcgaaggtagggggagctaaggtgctgtggctgtcatctgggtctgcgataagttaattgtactgacagttgacatctaactattttgtgtatctaatgtaaggttggaaggaactgacgcgaaccgttctgactcccctcctacaaaaggatcggatgatataggtgtgcctatggacctgttctgggtggcaaggttaatcagaagtttccgtgctgagtgttgtaattatgtct

SEQ ID NO: 122071 - DNA, 2686 bp, Zea Mays
cccgtgtctcgtatcgccattctacccaaccgcaacgaaaatgagcccaggcgataaaggctgagtccgtccgtcgaaaagcgagcgcagagtgggagagagaagggggtcgattcggagagatcgagaaagaggagggaggcggagggcgacgtggcggtgggtgctgaagcggagcctgcagcgcccgctcgagtactcgccggatcgcccgacctgccggtacagcgctgcagacagcctgatccggccgatccggcgggaatggcggcgcgaggagggatctagcggaggtggtggggtcgcgcggcaatggcggaggcagagccgcggcgccggtgggcggtgtgggcgctactgctgctgctccaccccgccgcgctcgtgctcgccaacaccgaaggtgcgcggtgatgccttgcatagcttacgtaccaacttaaatgatcctaataatgttctacaaagttgggatcccactctggtcaacccctgcacttggtttcatgttacctgcaataatgacaacagtgtcatcagagttgatcttggaaatgctgcactatcaggaactttggttccgcaacttggacagctctaaaacttgcagtacctggagctctacagtaataatatcagcggaattatacctagtggatttggaaaccttacaaacttggtcagtttggatttgtacctgaacaacttcactggtccaataccagattcattggggaagctattgaagctgcggttcttgcgtcttaacaacaacagcctttctggttcaattccaaaatcattaactgctatcactgcactccaagttctggatctgtcaaataacaatttgtctggagaagttccatcaactggttccttttctttattcacccctatcagttttgcgaacaaccctaacttatgtggtcctggcaccacaaaaccttgtcctggtgctcctcccttttctccacctccatacaaccctacaccccctgtgcaatcaccaggaagtagctcttctagtactggagcaattgctggtggagtggctgctggcacagccttgctatttgctgttcctgcaattagttttgcctattggcagcgcaggaaaccacaagaacatttctttgaagtacctgccgaggaagatccagaggtgcatcttggccagcttaaaagattttcactacgagaattacaagttgcaacagatggcttctgcaataagaacattcttggaagaggtggatttggcaaagtctacaaaggacggctggcagatggatctttggttgctgttaagagactaaaggaggagcgcacgcctggtggggaattacagtttcaaacagaagttgagatgattagtatggctgtacacagaaatctattgcgtcttcgtggattctgtatgacaccaacagaaaggttgcttgtgtatccatacatggctaatggaagtgttgcatcacgtttaagagaccgggcaccagctgaacctccgctagattggcaaacaaggagaaggattgctttgggttctgctaggggcctgtcttatttacatgaccattgtgacccaaagattattcatcgtgatgtcaaagctgcaaatattttgttagatgaagacttcgaggctgtggtgggggattttggtttggccaaactaatggattacaaggatacccatgtaactactgctgttcgtggaacaattgggcacattgcacctgaatacctttcaacaggaaaatcctctgagaaaactgatgtatttggctatggaattacacttttagagcttattacaggacagcgggccttcgatctagcttgccttgctaatgatgatgatgtcatgcttcttgattgggtcaagggattgctcaaggagaagaaactggagagtctggtcgaccaagatctagaacacaactacgtcgacgttgaggtggaatctctggtacaggtcgcactcctctgcactcagagcaaccccatggaacgccctaagatgtcagaggttgtgaggatgctcgaaggcgatggtctcgccgagagatgggaggagtggcagaaagcggaagtagtacggcaagaggtcgagctaggccctcatcgaacttcggaatggatcctcgacttgaccgacaacctccacgctgaacagctgtcagggccgaggtgaaggcagctttggactcactgattcttgtatcttgcaagggcaatagcgatgtgtatcaatcatcctagtcaagaatcccccatttgttcataccaatcgttgggtgaagcgaggagatgtggtcagccatgatgtgcattggatgtatgttgctgaggtgacatggctgagttcatatatgcgagggcagcagagctcgacaagctagtgtcgtgcgctgtcggtgcatgcactagtggtcctggatttgcgaaggtagggggagctaaggtgctgtggctgtcatctgggtctgcgataagttaattgtactgacagttgacatctaactattttgtgtatctaatgtaaggttggaaggaactgacgcgaaccgttctgactcccctcctacaaaaggatcggatgatataggtgtgcctatggacctgttctgggtggcaaggttaatcagaagtttccgtgctgagtgttgtaattatgtct

SEQ ID NO: 122072 - DNA, 321 bp, Zea Mays
atggaagcaaagcaggctgaagcacgctgggagaagatgatgctggccatcgagaagctgacaggcaaggttgatgccatggaggaagagaggacgctgtttcgcaagcaaatggaggagaccgggaaggctgtttctcttcttcgggtggaagccatggcaagggatatggatcgttatgggaatgaagaagcaggagaaagagacaacaaaaattctcagaatagaggagaaagaatgcacagaggtactgcagcacgatggttgcaggtagtcaggttgaagcaagggttgggtgattggaggaatttgtctaggctg

SEQ ID NO: 122073 - DNA, 1803 bp, Zea Mays
agccgatgtctctcctctcctcgtgtgttggtggtccgactccaatcccacaacgagacaaacgaggagaatggaaggaagagccgtccgcgaaagcaggcagcgggcagccaccgcacggtgagcacggcgaccccgacaaagcctgaccgccgcccgttccgttccagcacgcgcgcgtttcccggtgcaggggataactagcgccaccacccagaccgcaccgcgcgtcacccatcgcatccaccggtcgttcgtcgtcgccggacacctcgccgccggccgtcgcgcgcgcgtctatgggcggcttcgctatccaccccgcccatggacgccccagcgacagcctgccgtccgccggcaccgggaggtcgacgacgtcctcgtctgcctcctccctcgacgacaacggcgtccgcggccagcaggcccgcacaccgggccacacgctggaggagccgccatcgcggcggcggcaccaggcgggctcgtcgtcccggccggcccggctgttccagaggctgcggcacgcgctgcccctcctgacgctggcgccgcgctgcgggcggatgccgcaggtcggcacgcccgccgagatcgcggcggcggccgcgtcgtcgtccttctccgtctcctcgtcctcctcgtcgtccgcgccgcccgtgcccaggggcgtgaccttctcgggcgcgtcgcggccgtgccgccgcgtgacgggcacgctctacggccaccgcaggggccgcgtcgtgctggcgctgcaggagacgccgcggtgcctgccgagcctcgtcgtcgagctggcgctgcagacgcacgcgctgctgcgcgagctcggcaaccccgcgggcgcgcgcatcgtcctcgaaaccgagcgccgcgcggcactggaggccgccccctcagccgccgccgcccgagacggaggaggcggggcgtcgcgggctaataataagcgcggagtccgcgcgccgccgccgccgctgctggacgagccgtcgtggaccatgttctgcaacggcaagaagaccgggtacgcggtgcgaaggcaggccacggacgacgacctcgctgtgatggagacgctgcgggcggtctccatgggcgccggcgtgctccccgggagggccgccccttcgtcggcgcccgacgcggctgcggcggcggcagcggacgacgaggtgccctacatgcgcggctgcttcgaccacttcgtcgggtcccgggactcggagtcgctgtacatgatcgcgccgcagggcggcggcacgggcccggagctggccgtcttcttcgtcaggctctgacctccgatccgatccgccccgcgccttgcctctagctatctcctcgcccccatgcatgcgaagacggcccaagggcatccattaaccgccacgtacatatacatcgtcagcattcattggatggtgcaacctaaagattgactaacaagaaagagttaagaatcaaagagagagtcgcccaatctttgatcgtgcaacgacctcaagattgactaataaggtcttctggttaatttttttttggctgattcgttattaggttgttgtatacgaggtgttcttggatttgtgccctatgcagcattgcaccatctatcattagtcagacattcatcagagtacataagagagtagtcactggacggtggaactgtggtccaaaaagttgtttacttcagaatgtttttttcccattgtgagatattctttcagtcttataatagtagtcgttttagctattgtttttaatatctatattcaaatagatgataacgaa

SEQ ID NO: 122074 - DNA, 1396 bp, Zea Mays
caccaggggaaaaagtaaagagataaacggatagaacaggcgtggagcgcgcgaccccgtacgtctccaccgctgcaggaactccccccctccccggcggcccgcgcgcccaccaaccatggcagtcgcagccgccgcccaccacctgcccgttgtgccgcaccgccttgtcccggtccggcacaccagtagcagcccgccgccgcatccggcctcccgctgctccgccgcggggaagccgcccgtccagctccacgcggcgcaagcgagggcgtctgggttcgccgcgcgcgtcgcgttcaacccttccgggaactacgacctgtccctctccatgggcgaagacgagaccccgcaggtccagcctccgccgccgcctacccaagggcgcttcgaaatcgttatcaacaacgacaacatccgaacgctcgacctatcgccagtcgaagcagcactcggcgacttgagctccttgacaccagctgcttcaagaaccctgctggaccagaccgtcgggttcaccatcagctacgagagggaggacgagtacgacacgcgggagctgtcggagttccccgacatacggctgtggttcgtgaggctcgacgccgcgtacccttggttcccggtcgtgctcgactggagagccggcgagcttgccagatacgccgcgatgctcgtccctcaccagatgagcatgcggatgggcgtcgtcttcaacccggaggcgctggagctgttcgtgatgaagaaggtgttcgccgtcgacgcttggctgaagcagcagagccatcccaaaccgaggctgaagacggcggacatggcaaggatgctcggcttcggcgtcggagatgagctgttcgacctgatcgagaagtaccctgtccatcgttcgtgataaaaaaataattaaacaacaaagctgagaatagggatccgatcccacacacagaagaatcagtcgtctggtcggtgctgctgcctgctgctcataccatacccacacccttgaagtagaaactaaggcacgtttgctttgctccaggagaccaggagcgctctgatgttgtcgtgttcctcgcgtcgccttctcggcctgttgtactcagtagcgccgcagagtctctagcatgagacgacctcgaggagtctatgttgtcgtctatggatggaacagtcagcatagaccaaggccgtgacctttcctccggtgctagccctttcgcatgtatcggataaatttggttctgctaatcactaccaaaatttagctctttgccgagtgtcatattctttgccgattgtttttttttgcactcggcaaagaagctctttgccgagtgccacgcaaaaaactctcggtaaaagaaaacactcggtgaagaagctctttgtc

SEQ ID NO: 122075 - DNA, 1356 bp, Zea Mays
accaggggaaaaagtaaagagataaacggatagaacaggcgtggagcgcgcgaccccgtacgtctccaccgctgcaggaactccccccctccccggcggcccgcgcgcccaccaaccatggcagtcgcagccgccgcccaccacctgcccgttgtgccgcaccgccttgtcccggtccggcacaccagtagcagcccgccgccgcatccggcctcccgctgctccgccgcggggaagccgcccgtccagctccacgcggcgcaagcgagggcgtctgggttcgccgcgcgcgtcgcgttcaacccttccgggaactacgacctgtccctctccatgggcgaagacgagaccccgcaggtccagcctccgccgccgcctacccaagggcgcttcgaaatcgttatcaacaacgacaacatccgaacgctcgacctatcgccagtcgaagcagcactcggcgacttgagctccttgacaccaggttcacagccagcatacgcccatgccattagctttaacttgcattcaccgaccttattacagtgaaatttatgtgcattgttcagctgcttcaagaaccctgctggaccagaccgtcgggttcaccatcagctacgagagggaggacgagtacgacacgcgggagctgtcggagttccccgacatacggctgtggttcgtgaggctcgacgccgcgtacccttggttcccggtcgtgctcgactggagagccggcgagcttgccagatacgccgcgatgctcgtccctcaccagatgagcatgcggatgggcgtcgtcttcaacccggaggcgctggagctgttcgtgatgaagaaggtgttcgccgtcgacgcttggctgaagcagcagagccatcccaaaccgaggctgaagacggcggacatggcaaggatgctcggcttcggcgtcggagatgagctgttcgacctgatcgagaagtaccctgtccatcgttcgtgataaaaaaataattaaacaacaaagctgagaatagggatccgatcccacacacagaagaatcagtcgtctggtcggtgctgctgcctgctgctcataccatacccacacccttgaagtagaaactaaggcacgtttgctttgctccaggagaccaggagcgctctgatgttgtcgtgttcctcgcgtcgccttctcggcctgttgtactcagtagcgccgcagagtctctagcatgagacgacctcgaggagtctatgttgtcgtctatggatggaacagtcagcatagaccaaggccgtgacctttcctccggtgctagccctttcgcatgtatcggataaatttggttctgctaatcactaccaaaatttagc

SEQ ID NO: 122076 - DNA, 1778 bp, Zea Mays
atggcgctgtcggagctgcaggcgcgggcgcggttcgtgcagtcggcggcggcgagcgcgggtgtgcacctccacttcgacgaggagcggtggctgagccgggtgcggcggaccctggagcgggacaccgccgaggcgctgggcgcggcggcgaaggtgctggaagtgccgccggtgctgcgggcgacgcggcccgaggcgtacctgccgcatcactttgcgctggggccctaccactgcgaccgccccgagctcagagacatggagcgctacaagcttgcggccgccaagcgcgccgagaggctcttcgccgagggccacaagctggaccacctcgtccagtgcctgctccaggaacaggacaagatccgggcgccataccacaggttcctggagctgagtgaccagacgctggcgtggatgatggccatcgacacgtgcttcctcctcgacttcctcgagagctacgaccaccgccacgaggccaccgccggcatggtgtcctcggcgacccactggatcgacgccaccgtgcgcgacgccatgatgctggagaaccagatcccgctcttcctcttctcccaggccctggcgctccgccaccccaatgccgccgccgacgcgctgcacgccgtgctcggccgcttcatcaaggaggtgtctcccatcaagaccaccgccgagctggccgtcgccgacgtcgccaggcacgcgcacatgctcgagctcctctaccacttcctcgtccccggtttcgacggggacgatggcgcccgggagccgccgccgatggtgcccgaggagttcgtcaccatcgacatgctcgacccgtcgcagcagcagcagcagctgcccgactacgacaaggtgaagcaggcgtgcatgcaggtgtccggcctcgacgtggcgcccgtccggttcatcaagaagaacctcatctcccggccgatgcgcgtggcatcgagcctcccggggaagatcacacgcaaggtgccgctgctggccgcagtggcgccgctggtgaccaagctgatggcgtcatcgtccactgacggcgacgcggaggcgcggctcaagggcgtcgacctggggagcatcatcagctcggcgctggcgcaggagatcacgatcccgtcggtgtccactctggcgcgctggggcgtccggttcgcgccggcgcccgagggcatcgcggggatctgcttcgacgccgcgacggccacgctgcgcctgcccgtcgtcacgctggacggcaacacggaggtggtcctgcgcaacctggtggcctacgaggcggtggccgtgcgcgggcccctggtgctggcgcgctacacggagctgatgaacggcatcgtcgacacgcccaaggacgtgaagatcctgcggcagagcggcgtggtggtcaaccatctcaagagcgacaaggaggccgccgacctgtggaacgggatgtgccgggcgacgcggctctgcaaggtgccccggctagacgccgcgatacgggcggtcaacgcgcaccggagccggcgggcggcgtcgcgggcgcggaaactgctcaagaagtacgtgttccggtcgtggcggatcctgacgctgctcgccgctctcgtgctgctgctcatgacggcgacgcagaccttctgctccgtgtacccctgtacccgatctttaggatctgtgttccagaccccgcaagtcggaggaacccgcaggtgattttagtgttcagcaaatgaataatagtgagctggtggctcaaagcttgcctgcgaatgcgt

SEQ ID NO: 122077 - DNA, 3193 bp, Zea Mays
gcgaaagtaacgcaaaggagccgctgtcggtagcagccgccgccgctggtagagcttaaacagcctcaaggatccagagggttcttggcccccatttccgcaattgttgccacctgcttttagttcccatttcctcaattggggccatctgcttttagttcctcttcttcactcgcggagttatcaaagcttcagatttcttgcttctccgcggcagtttgctaggggtcggagtgccggagccagagccacgcgggagtttgagctggattggttcttcaattgagcgtggcggccggcgtcaggtagaagtttccatggttcttggtttgttgttggagtgtaggagataacacggggaaggagattgcgggagggtaacggaggtcggggagctggcggcgggccacgggatgatggagccccaagtggtggacctcgaggatgacagcatcaacttctgggcctccctcggcgtcagcccccacgtggaccagatgccgctgcacagcgtccatattgtcgaccaccaagctcagtcagcgctggcagctgcggctgcggcgatacagccgcagtccgtctgcagggacctcttcccggtggagtccgacgcctgcctggagcctcggctggggatggagtttgagtccggtgaggctgccaagaccttctacattgcctatgctggccgtgttggtttctctgttcgcattgcccggtcacgcaagtctaagtgcagtgagtccataatcatgctaagatttgtgtgctcaagggaagggttcagtaaggagaaacgtgtggtcacagctgggaagaagacgaggaagcgccctgcctccatcagggagggttgcaatgccatgctcgaagtgctccgcagaggtgatagcaagtggattgtcaccaagcttgtcaaggagcacaatcatgaggtcgggttgcccagtcgagtgcagtatattgccatcgagagtgatactgtggttgacccttacattggtatggaattcgagtcccttgagtctgccaagacattctactactcgtatgccagccgtgtgggatttgaagctcgtgtacgccagtcccgcaagtcacaggatgagtcactcaagatgctgaagcttgtgtgctcaaggcatcggtaccattctggacgggagagcaatggagaggataccaagagagtacgtgcgatggacccctcgagggatggttgtgatgcattgtttgagataattcggaagggaaaagacacctggacagtctccaaactcatcctagagcatacccatgagctgaaaccagcaccagcaagtagagttcactgtgttcgctcgcaaggtgaggtacttgtcattgcaaataacttttctgacactcgtaatctccttctgaatggccaagattctcagcatccaagagaggtgaggtataatgatttagggccagaggatgctcaaagcttatttgaataccttaagaagagacaggaagaggacccttcatttttctatgctgtgcagtatgaaaagaatgggcactccaccaatatcttctgggctgatgctaaggctaggatggcttactaccattttggtgatgctgttaggtttgagacaacgtatcggaaaaacaaggagactatccctattgtcatattctcaggtgttaatcatcatgtgcagcctgttgtttttggctgcgcactacttcttgacgagtcagaagcatcatttacatggttgtttgagaaatggcttgaagcaatgcacatgggtccacctgtttctttgctaacagagttgaaccgaggaatggcagctgctgttgccaaggtattgcccaatacccaccatattttctgtgaaaggcatatcttagacacaatgaaggaggatctacatggtacgtttccggatccagtggctttagtaactgatctaaggaagtgcattgatgggtccagaatagaagaactgtttgactcaggttggaactcggtcatcataaagcatgaactcagcaacaatgagcttttacagtctctctatgatattcgccaacgatgggccccagcatacacgaaaaatgtattttatcccagaaatctgatgccaacaacctttggaagtattgagaaggctattcagaagtacttttcgtccaagactgaattgcgggtggctgtttgtcaacttggacaagtaatttctagttcatttgaagctgaagttcaggcagattatttcacaatgtttcaaatgccagcgttgagtacagcctcaccagtagaaaaacaagggagttcaatattcactagcacaatttttggcttatttcaggggcaatttgttgattcttttgggtaccacgcagagagacttgaggatgacacagtacacaagtatcgtgttaacagatatgaaggtgatgaggagatacatactgtctatttcaatcctgatcaaggtacggtgaattgtagttgctgcctgtttgagagctgtggtatcttgtgcagacacgctcttcggattttcattatcgaaggagtacatgaccttccaaaggcttatattctgaaacgttggacaaagcatgcaaaaaatattgacacctctgataattacattgatctgaggggggaccgtgatgatccttcaactgcaaggttcaatgatctcttctgtcatgtggtaaaatttgcaaaagaaggttcaaaatctgctgaaatctatgcagtcgctaaagattcactgtccaaggcttttgatgaggtagttcagtcatcgaagaacttcagagggcagcaaaatctgcaaagctatacaatgtcactgaaaaggtcaatcaagaagtttggtaagggcagagattcctccgataaaagctcaaagaggtcagcatctaaacatcccctaatggagtgtgatgatgtagatgaccaaatatattgaatttgggaacaatatgattttacctgtcataccttgtgtgtagcatcatgcaatctaatagtaccaattagattgtagctgactgcagaatttggttattaacagatctagtaactgtaagggttctagtgaacccctaacattcagagattaacgctcaaaagagttgtagaaagatgccttttttgaaacatttataaatactactgcagatagaccatttcttt

SEQ ID NO: 122078 - DNA, 2628 bp, Zea Mays
cctctcctctcctccttcaccggctccgaacgctcacccgcacctccatgccgcgcgcgcgcggtaacacacctccgtgagtctcctcttgctcgtagtaaaacactagcggaccagaaaacgcctctctatctctctttcctcgtcagtccctctctctcggcgtgtggtgggcatagcttccctgcctccacttgtcttctttgtttcctctgctgagggctagtaggatcagttcagttcctcgccgccggtctcctactgcgtgcacttctgctgcctgctgtcctagccctgtaccgccgactctactgtacctcatcattcgccttgctgcatccgccgcctcggtcgcgcaggtgaagcggacgccatgaccgcgacgccggcagtgatcgggctgagcgctgggcaccgcctcctcgccacctcgttcggctcccccgacctcgcgtccccggacgcgcactcgtcgctgcagttcgcggccgccgcaccgaagctcaccgtcgtcgcgcaccgcgcccccgcctcctcttcctcctcctctccgcccaacgtcgggcgcggctcttccgccgccggccacgcgcgcgcgcgcgccatccgggcgctcaggaaccactccgcgcccgcgctcgccacgccaccgccgcctcctctaccggcggacccgactccggacctagactcggagttcgagtcctcgctcgaggccatcgtgctgctgcagcgctccatgctcgagaagcagtgggagctccccttcgaggacgacatcatttccactgacgacgagcaggacgacagggttagcaaggccacggtggtggcggcgcggtcgggcgtctcggcgcggcagcggcggatgagcggccggcggcggggagctggtcggaagagcgttgccatcagcccggagctgatgcagagccggaaccgcatctacctcaggggcaccgtcagcaaggacctcctcacgcacaagcaggtcatccagctctccaggaagatcaaggacggcatctggcttcagcaccaaagatcaaagctgaaggagaaactggggaacgagccatcatacaagcagctggcacagtcactgcggatatcagctcctgaactgcgcgcaaggatgcgcgagtcgtttctcgcgagggagatgctgacaatgagcaacatccgtctggtcatatccattgcccacaagtatgataacctcggtgtcgacttggcagaccttattcagggtggtctgatagggctactccgagggatcgaaaaatttgatgcatcgaggggattcaggatttccacctatgtgtattggtggattcgtcagggtgtttcaagagcattggctgataactcaaaaacgttcaggctccctacgtatttgcacgagaggttgatagcaattcgtggtgcaaagtacgcgttagaggatcaaggaattgctccgacaatagagaacatagcagagtcgctcaatatatcggaaaagaaagtgcacaatgctacagaggctgtgaacaaggttctttcactggatcaacaggcgttcccctccttaaacggtctacctggggacacactccatagttacatagaggatcaaaacgtcgcaaatgatccatggcatggatttgaggaaatgtatctcaaggaggaagttaacaatcttataaattcaaacctcaacgagcgtgagagggacattattcgattataccatggcataggaaaacagtgccatacatgggaggatattagcagacaatttgggttgtcgagggagcgtgtgaggcaagtaggactcgttgcgatggagaagctgaagcatgctgcgaggaggaagcatttggatgcattgcttgaggattattgagtgagatgtttttcgtttacacaaatgcagtggctgtatatactcggaaacatagggttcatcatccttgaaaggctttaccgctactcactcggcagataactatacatgtacatttgtgacaatcaataggcacgattcagatatctatgtctgcagctgcacagtcatcaaaacgacccaacaaaaagagaagctgtttttttccttgggaagcttcgtaaattttctgtaatgtatcatttagcaccttaatcagcagaagagcaacatttatgtaccggatctgtattattatctagttacaattacatggaagcaaaatgcttacaggaatatggtgcctacaaaatttatcttacatgtgcctaaaatgtgcgatcaaataaatttcaggagaaatttctgaatatcttggaaaacttttgttgacatatgggcatatggccagagtttggtcagggtaattccgcaagaatatgtacgtgacgtctcatttaggcctgcatattccatcaataattctagttgcatcaaatcaaccagaagatttttgcatgtctgaaatagcaacaatatggtggtattctgcaaatgattttgggaaacttgaaatgatagacctcaagaaaaatctctgaacattcccgagaactcctgattgacgtgtagcatgagctctaatcaaggcaactctacaaaaatgtatgtgtgatgaagcaattaaggaaatgcttgaa

SEQ ID NO: 122079 - DNA, 1452 bp, Zea Mays
atggatcatggattccagccaggcgcccggctccatccgccgcgcgttctgccgcgcctcgctgtgccggcccacgccgcctctgacgagtgagcccaatcatttcgcatctggctctcgcaggcggcaggtcgcagagcagcccagccccagacccacctcgtccgcttcgtcctctcgtctcctcgcactcgctagctgacgctgcgtgcgccaaaagcagcactgcagcagcaggtccagccgtcgcccccacttcccaccactgccacgcgcgcgccggatcgagggagggcacgcagacgcggaggagggaggatgagtctcttcgggcttggacggaaccagaagacattccgccccaagaagagcgctccatcaggcagcaagggagcacagctccgtaagcacatagatgccactctcggcagtggaaaccttagggaagctgtgaggttgcctcctggagaggatatcaatgaatggcttgctgtgaataccgtggatttctttaaccaagttaatatgctgtatggcacgctcacagaattctgcacacctgagagctgcccaacaatgacagctggcccaaagtatgagtacagatgggctgatggtgtgcagataaagaaacccatagaggtatcagcaccaaaatatatggagtatctgatggattggattgaaggccagcttgacgatgaatccatatttcctcaaaaacttggcacaccattcccaccaaacttcaaggaagtagtgaagacgatattcaagcgcttgtttcgtgtttatgcccacatataccactcgcatttccagaagattgttagccttaaagaggaggcccatctcaatacctgtttcaagcacttcattctgtttacaaatgagtttggcctgattgacaagaaggagctggctccactccaggagctcattgaatccatcatcgttccttactgagactacggtgtagtaaacgtggatatagagctctcagtgcagatggctgtgaagtgtccatccgtgacagaacttcactgcatagagctatatgtgcatgtacctgtgtgtttctaaatgatcatgtattggccatgtaagtgtgcctgttatcagttatagaagggtgatgatgatcatgtactgcaaaaagagaaagcacaagaatgtgttggattgatgtatgcagtgtttattttcctcctggttgtggaaccgtcagtttgtctgcttattgctagacattctctccgttctataaattgtaggtcgttttaattttgctccaactttgatcaagtttacatgcaaatatttcgacatgcaaaaccaaataaatgtattgtcaatgctcaaacgatttaatgtaactactctcatgtactagatgtttgatcgaatcctttataaatttagtcaaagttaaactagtttatttgtgtttta

SEQ ID NO: 122080 - DNA, 1485 bp, Zea Mays
aaacgcatgcgagtatgcgacgaccctttcgtcgaattttgaaagggatcggtaggaaaattaaaatttggggaactatcaaacacatctcgttaccatctagctcgttggtcagtcgccgtcagcccaatacccaccatccccaccaacggccggccgccgcggcggagcggagcagagagcaaccatggcgtcgaagcagatggaggagatccagcggaagctatccctgctggagtacccgcgggcgaacgcccccgcgcaatccctcctcttcgccggcgtcgagcgctaccgcctcctcgagtggctcttcttccggctcctaggcgacagatcgcccttcacgcagcagaactggcaaggggatagcctggaccgcgacgaggagaacaacaggatccaacacctggcggagatagccaacttcttgggcatcacaccttcggcggacaccgaggcgattcagggtcgaggtagctatgaggagcgggtggaactgctccatcttattgttgacctagtggaagctagttgctacgctgacaatccagaatggagtgttgataagcaattggagaaggatgtgcaactagtagattcaattgctgagaaacaagcccaaattttttcagaggagtgcaagcttttccctgcggatgttcaaatacaatcaatttaccccttgcctgatattgctgaactagagttaaagctctcggagtataccaaaaagatgtctaatctgcagcaaatggttcaggagttagcatcgaagtatgattataatccaaatgaagactatgcggagacagagttgaagttgagggaatacttgcaatcatttttggaaacggttaaatccttcaacacaatatatactaaggaaatccatccttggacccacatgatggaagtgccacaattgcatggcttcggtccagctgctaatcgcctcttggaggcatataatacccttttaaagttcttgggaaatctgaggagcctccgagattcatacactgcaatggctgctggttcactgtcggcttctaatgagccttcatctgtgaccaagattatttcagactgcgaatctgcactcaccttcttgaatcacagcctttccatcctttcaacttccgtggcacgtgagcaggggggaacgctatgattttacagtatttggatagtaagatatagtcagtgaacttatgtatgtaagcttctattaattcaattgtttgcttcctataaaaaatcagttgtttgcattttaatttcagctagtgcatgtactccctttgatccaaattataaattgttttgatattttccaaattatgtctagatacacaatcataattgtttatgtagaaaaagtcgtggtggtctagattcacaataatctctactagaaaaagaccgtgtcacagactatagcgatgattaaggagtaaatccctagcaagcctgttgtatgtt

SEQ ID NO: 122081 - DNA, 1824 bp, Zea Mays
gggagcacgtaatttatatgttgggcgctgggtagggtttggatgcgccttctggctgggggaggcgagtgagagctagtggggctttgaggcccatttgcggatacttggtctcactgcaggccttgggccttctagccgatagttatgaattttagcccaattagcgggctccttatgaatcaatcctgatttgcaactaaacgcatgcgagtatgcgacgaccctttcgtcgaattttgaaagggatcggtaggaaaattaaaatttggggaactatcaaacacatctcgttaccatctagctcgttggtcagtcgccgtcagcccaatacccaccatccccaccaacggccggccgccgcggcggagcggagcagagagcaaccatggcgtcgaagcagatggaggagatccagcggaagctatccctgctggagtacccgcgggcgaacgcccccgcgcaatccctcctcttcgccggcgtcgagcgctaccgcctcctcgagtggctcttcttccggtacgcgccgcatttcctttcctctccgcttctcctgctttctgggagctgtgatctctctgctgggtttggccttcgattttgggattcgggctaggaactgacggtctgctcgtttggtgtgtgcgcgttccggaggctcctaggcgacagatcgcccttcacgcagcagaactggcaaggggatagcctggaccgcgacgaggagaacaacaggatccaacacctggcggagatagccaacttcttgggcatcacaccttcggcggacaccgaggcgattcagggtcgaggtagctatgaggagcgggtggaactgctccatcttattgttgacctagtggaagctagttgctacgctgacaatccagaatggagtgttgataagcaattggagaaggatgtgcaactagtagattcaattgctgagaaacaagcccaaattttttcagaggagtgcaagcttttccctgcggatgttcaaatacaatcaatttaccccttgcctgatattgctgaactagagttaaagctctcggagtataccaaaaagatgtctaatctgcagcaaatggttcaggagttagcatcgaagtatgattataatccaaatgaagactatgcggagacagagttgaagttgagggaatacttgcaatcatttttggaaacggttaaatccttcaacacaatatatactaaggaaatccatccttggacccacatgatggaagtgccacaattgcatggcttcggtccagctgctaatcgcctcttggaggcatataatacccttttaaagttcttgggaaatctgaggagcctccgagattcatacactgcaatggctgctggttcactgtcggcttctaatgagccttcatctgtgaccaagattatttcagactgcgaatctgcactcaccttcttgaatcacagcctttccatcctttcaacttccgtggcacgtgagcaggggggaacgctatgattttacagtatttggatagtaagatatagtcagtgaacttatgtatgtaagcttctattaattcaattgtttgcttcctataaaaaatcagttgtttgcattttaatttcagctagtgcatgtactccctttgatccaaattataaattgttttgatattttccaaattatgtctagatacacaatcataattgtttatgtagaaaaagtcgtggtggtctagattcacaataatctctactagaaaaagaccgtgtcacagactatagcgatgattaaggagtaaatccctagcaagcctgttgtatgtt

SEQ ID NO: 122082 - DNA, 291 bp, Zea Mays
atgaagttgtactccgctcctttagctatcttgggttcgggccatttagctccttccggcactcgtatgcacttgaagccttggtttctgtacaggcgtagcgcggccacgttgtttacgtcgcagtgcagtgccatcgaccggcatccccagctccttgcccgagcctctgcttcttggaccaacatcttcgcgatccctttccgtcgctcctccttccgcaccgcgacgtttgctatatacgcaatacctgtccttctctgcttcaggggtccccttctcggaagatag

SEQ ID NO: 122083 - DNA, 662 bp, Zea Mays
atcgccatttgcaacgagcagtctgacggtacttagaacaacagcagaacaaaagaagtatattcagatatatatatatctcggtagaagtgtagcagaggtgaccatgagctactggggaagcccaggcggggcgccgtcgtgggcggcgagccgggggccgtcgccggtggtgccgctgctcgtggtggcggcgctgggatgggtcatctgccaagagaccctgatggggtggtacgagcaggtgacggaggtgcaggagacggtggcggacaacgccgtgctcctggtcctcggcgccggggtgctgctgctggccctggccgtggccggcaaccggagcgaggtggtgctagtgccggcggcgctggtgctggtcatgttcctcatccagaacatcgtgctcgccgctctcctgctgctggtcgtggtctacttcgccggaatatactactacaggccggacagagggtacgggtacgggtacggcggtggttttggcggcggcgagtggggcagcggcgcgggcaccgggctggggttgtacatgctgctgctactgtgcctgctactgtgcgccatgttctccgacagcggcggcagctggtggatcccagccgtgctgctggtcgcgtgcgtgctctgcctcaatctcttctacg

SEQ ID NO: 122084 - DNA, 599 bp, Zea Mays
gctcgctgtggctaccggtggtcgagctcctccccttggccgcgctctccttcgcttgtgccttacccatcgagctccagcgtttgccagcttagagctcgccccttgcgtgtccctcgtctccacgcatgcatcagctccctgcgccctcgcctgctgctctggcttgccactatttcggtcctaccccacctttccggttaccggccgtcgtcgtggacacgccccgacagtaccaccaattgatcgtcgactcctaaaacctcaccagcgttctcctcgccacgccctagatttaaggagaaatccccggatttgtaaaggagaaagcgaagtgagcgccgcctactaagtgttcgatggaaggtccgaaccgggaacctcgactttctcacggatcttcgggtcggtttgtgaattggtgagcctgttcgctactctatttagttaatttgatcgttgtattgattaaagttgtggtcgatgattttcttgtttatagcgcaagcatatggtgtgtcgactttcagattcattgttgtccacatgtgcgatagttggtgaatgaatatgtcaaaggagagtaaattctttaggta

SEQ ID NO: 122085 - DNA, 597 bp, Zea Mays
gggtgtggcatttatctcccctcacacacgttctttgcttcgcttcggcaccgcacaggccctgctccatcgtcacttgtccctgcgctgacgctcgctgtggctaccggtggtcgagctcctccccttggccgcgctctccttcgcttgtgccttacccatcgagctccagcgtttgccagcttagagctcgccccttgcgtgtccctcgtctccacgcatgcatcagctccctgcgccctcgcctgctgctctggcttgccactatttcggtcctaccccacctttccggttaccagccgtcgtcgtggacacgccccgacagtaccaccaattgatcgtcgactcctaaaacctcaccagcgttctcctcgccacgccctagatttaaggagaaatccccgaatttgtaaaggagaaagcgaagtgagcgccgcctactaagtgttcgatggaaggtccgaaccgggaacctcgactttctcacggatcttcgggtcggtttgtgaattggtacgttaagggatcatgtgatatggaggaccagagctgagtcgaccacaatatggtgttaagcgtgggcttcttcgcaaggga

SEQ ID NO: 122086 - DNA, 934 bp, Zea Mays
ttattgatcttcccgatgcctcgtaacaacaatccctccgacgaagaaaatgtcaatcctaccgcgaaagcagcagcaacaacagcttctgtgccgtccaggaaatcatggctcccggcaggcttcggaggaagcggcaagcatggcgcaaccatcgacattcccctcggggatcctaagaagaaggagagagagctgctgtcatgggagcaggaactgaaacggcgggaacaggatattaaacggagggaggatgcaatgaacagagctggtgtcactttggaagtgagaaattggccgcagttctatcccatcatacatcacgatatagccagtgaaataccaatccatgctcaaaagttgcaatacacggcgtttgctagctggctaggactgattgcctgtctcgtttggaatctgtttgctgtgttagtggaatcaattcatactgaagatatcgttattttcctcctcgctgtaatctatgcaatattcgggtgtcctctttcatacatgctttggtacagacctctgtaccgtgcaatgagaactgacagtgtggtaaccttcggccagttcttcatcttctactcggtgcatgttggattttgtgtagttgctgcaattgctcctccaataatatttaaggggaaaactctcacgggtattcttgttgcaatcgaagttttagatggagatatattcgctggtgttctttatcttttgggttttgcgctgtttaccttggaatcttttataagcatctgggtgcttgagagagtgtacatgtatttcagagggcataggtgaatactggctatgagataatgcggtcattcagagaagtagtttatgtgagagcaatatcaggctgacatggtgtaaagcaaaaagttcaagattggaaaacaatgaattctctgtgcctagttat

SEQ ID NO: 122087 - DNA, 790 bp, Zea Mays
tgacagcccataccacaagttgggccacaacgggccgggctttaatcccgtaggtgcatctaaaagtcctcgtctttctctttgttctttcccgaattccccagggtacggtccacttcgctcgcaaccttccccagccatggcgaccgcgacgcggaggctgctccccgcgctcctcaggaccctagctccagccggcgcgcgcggcctctccaccgagaaggctgttggcgcagccgccgtcgtcggcagccacaccgctaagtggatgcaggacacgagcaagaagtcgccaatggaactgatcaacgaggtacctccaatcaaggttgatggtcgcattgccgtctgtgaaggggcttctgaaggtgttggacttggccacccaatcgagtacatctgccttgatctggaggcacctaatgtgtgcaagtactgtggtctccgttatgttcaagttcaccatcactaaattgagaagataatgctgtctaccgctgcagaagctgagttgaggagtttatgtgcacacacatttgttccacaatgttctgtagcgtactttgaactatgcttgcgggcaaaatattacctttgatgatcatcctcttctcgggcgatcttttattaatcctgtcttagtatggttcatttttctacagatgaattgtgctcctttttcagaatctatacaagctgtgtgtattgaagttttactctgaataagcatggaactaactctaaggcaatttaatctcagaagttctagttttctggagttccatgatcc

SEQ ID NO: 122088 - DNA, 261 bp, Zea Mays
atggcgctccctgaactaacgcccctgtcgctgcccgcatatatggccgtcgccacccacaacccactagaggttaggatcttaacccttaatgcttcatacttcttgaagaacgatggccattttgtcattttaatcaagggtaattgtatcgactccaccctgtctgctgagaccgtgttcgctgttgaagttggagaagctcaaagcacatcaattcaagcatgcctagcaggtgacgatggagccctacgagcatga

SEQ ID NO: 122089 - DNA, 1832 bp, Zea Mays
gcctccacaagtttcatttcacaaacaaaagaacgggcgagagagaaaggagaaagacagcgctctctcactcccttgtctgcaacaagagtgtggtttcaagggattgcaagagagggtgtgcgatcgatctatggagcttttcccctcccagccggacctctcactgcagatcggcctccccgctcgcgctacgtcccaccaccacggcgctgccctgagcgccaggctcctcgcggcagccgcaggtggcagtgtcggtggcggcaacggggtccctggcaacccggcggcggctatggcgccgtccctgcaggtgcccattcccataccgctgcagctgccgctgccgatgccccccaacgccgccgccatgctacgacccatacgcggggtaccgctgtaccagcacccgcacacgcacgcggtgccgccgacgttcccgccgcacgcggcgggcgcgggcccgtgcttctgcgagccttgccacgtcgccgcgggcgcctggcgccgcgccgggtgcggcttcggggctcgcgtcgccgggttgttccccccggcgaagcgcgccgccagggcgccgcgcatgcgctggacgtccacgctccacgcgcgcttcgtccacgccgtcgagctgctcggcggccacgaaagggcaactcccaagtcagttcttgagctcatggacgtgaaggatctcaccctggctcatgtcaagtctcacttgcagcttgtagttttggcatcaaagtggaagaaaatgtacaggaccgtgaagaacaccgaaaggccggcagcttcgtcagatcaagctgatgggttcgagagcgggtcgtcatcggctggcgagatctgcgacgacgacaactcctcgctggatctgcacggcactgacggcaggcggccggagtcgtcgtcggcagttcggcatggaaggttaactgcctgtaacgatcatgggagcagcaccggtgctcatggtggtgccctctggaacagctcctcaagggaagactgggccggctttcccagcgactccaacaccggcagcatgagcatgcattctcgatctctcaaggatcagacgatgcagtccaagagcctggagatcctgtcggacatgaactcctcctgcgtgtcggagacgacgtcgtgtgccagcgagttgaacctggagttcaccctagggccacgcatcaggcactagcagcacgcaaagcaatcataggccggtacgtcatggaggacggcgacaagcagcatcggaggattagctaggctagggacggggaaaagggggtgctttgcactgcatgcatgttcatgtgatcgatcgatcgtgctaagatggaggatgcattcatatcatggtcccagagacaggacaccatacatgcatctttcactgttaaaaggaggccatgcatggacagacagcagctagcatccaggaaagaaggattaaaggtgtaggagcagcagctaggtacgtcgtagtggtagaggtgaggtgatcgcgatatgatcgaaagctagcgaacagccgccatgtgtgtaatggggtcgtcgttgttagatcgagcgcgtttaggatcggacaatctgtttaaaggcctttttgcagcaacattgcaatatgcatgagcttgttgcgttgctagctaggggcccgggtacgtccaaaggaacaaaagggatgacctgtgttgttgctttctcctgcattcttcacatgcccttgagcgctccattgtcacgtggggccaaacaaaatcacaaaacaagttgacaagacaataaaatagatgtaatattgcatatagaaattagtg

SEQ ID NO: 122090 - DNA, 2243 bp, Zea Mays
ggttctcgttcctttcttccccactacaacatctgtcaccgtgaaatctcggctacctccttctgacttctggtacctcgccgccggggacccaactccgatccccaccccaccataccaaagccaccgcggctgcggctgcggcttccgcatcatcaatggtgctgatcactctcgtccgcgactacatcgaccgcatgctccacgacatcccgggcatgaaggtcctcgtcctcgacccccaaaccgttgggatggtgagcgtggtgtacagccagtcggatctgctgcggaaggaggtcttcctcgtcgagaccatggacaacgcctccagctccagggagtccatggcgcacctcaaggccgtctacttcctccgaccctccgctaacaacgtccagaagctccgcaggcaactcgccatgccgcgcttcgccgagtaccacctattcttctccagtatattgaaggtcccgcagattcaaatacttgctgactcggatgaacaggaggttgtgcagcaagttcaggagttctatgctgatttttgtgccattgacccataccatttcactctcaacatacaaaataaccacatgtatatgctcccaacagtggtcgaccctcctggtatgcaaggcttctgtgatcgagccgtcgacggcattgcttctgtcttcttggctttgaagcgccgccctgttattagatatcagaggacatcagatgttgcaaaaaggattgcacaagaaactgcgagattgatgtatgagcaggaaagtggcctgtttgattttagacgaacagaaaactcttctttgttgttggtgatcgacagaagggatgatcctgttacgcctttacttaaccagtggacataccaggctatggttcatgagcttattggaatcgagaacaacaaggtggaccttatgggatttgctaatattcctaaagaccagcaggaggttgttctatcatcggttcaagacgatttttttagagctaacatgtttgagaactttggggaccttggtatgaacctcaaaagaatggtagatgattttcaacatctttccaagagcagccttaatctccagagcataggtgacatggcaaagtttgtgagcaactatcctgaatatcgaaagacacatggaaatgtaacgaaacatgtaaatttggtgagcgagctgagcagaattgtggaggaaaggaaacttatgctagtttcacagacagaacaagagctagcatgtactagtggacaagcagcagcctttgaggctgtcacttccttgctaaacaatgaaagcgtatctgatattgaccgcttacgattagtaatgctctatgctttgcggtatgaaaaagagagtccagttcaattgatgcaacttttcaacaaattagcttctcattctgcgaaatacaagtcagggcttgttcaattcctccttaagcaagctggcattgataagagaacaggcgacttgtatgggaaccgtgatctgttaaatattgctcgcaatatggctcgtgggcttaagggagttgagaatgtctacacccaacaccagcctcttttgttccaaacgatggaaggaattgttaaagggagattgcgagatgctgactatccacttgttggcaatcatttccagcagggcaggcctcaagatgttgtcatattcattgttggagggacaacttacgaggaagcaaggtcggtagccctttataatgcggcaaatcctggagtccgttttttccttggaggttccgtggttctaagttcaaagagatttcttgaagatttgggagaggcacaaaggatatcaaaatcaagcactataatatgagctgaatggttttatctcccatttgaagagtatcatagtatgatttgacagtgttgactcaattttgcatagaataaaatttgtgataaatctgtaacatagttctaggtgcataggatcaaatttcttgaagatatgtagctgctccagcttctaacaccttctcttggtgtattgtctgcaaaagcaagagaatatcagtgtacaaattgattgttagcgcttgtgaagtcctgctagcgtcacagataaacaaatggcaagggcaggtgcactaaacaaaagtttcctcctaatctttctttttgttgattgttctaaactgcagagccacatcacttgatgcatactgtcagatagaatgaaatcagcgttctacta

SEQ ID NO: 122091 - DNA, 330 bp, Zea Mays
atgcgcgtacggcgtacctggagccggcacggcggtgacggtgctgcagacggcgcagcagaccgacgtcgcaccagctgggtacatgaggaggttccggcacccggtgcagacgagctggctctgggccccattgggcggcgtgaatggcgccggaggagctgggtacggagcaagcggaaccggcattgccgtgccggctgccttatccgacgacgcacgcagctcggggaggcctcgcagattccggcggcgttcaggcggcagagaccagctgcttcgccccgcatgaaaccctggaaacgacacagcacgtgcaggagacgctga

SEQ ID NO: 122092 - DNA, 2132 bp, Zea Mays
aaaaaacgcacgccacgtaagtcacccgctctcaacgcatttccgtcttctcctccgacgagttgccccaatccgcccagacctccaacatcgcaacggagcccaccctgcctgcctcgccgcgatccctccgcgctgctcgaggctcctgtcctgaaccaatcgagaacgccgacttccggggacgggatcatctaaagccgcctccttcccgttgaatccgccgagattcggcgtgaggcgaggttaccgacttcccttgcgcgtagggccggcaggagcgcccgctggccatggcgtgccggggcttctttgagtgcgtcctcaagctcctcaacctcgtcgtcatggcggttgggctggccatggtgggctacggcgccttcctgctcgtgacctggcttcaggtcgcgccgctcccgccgccttcgtcgtcgccggacgccgtgccacccagcggggagctcgtgcggctcgggaggccgctgctgctttttgttgatgcatccctgtcggatgggaccgcggagaggctctccagtgcctggtttatttttgcgtttattggtgtcggtgctatactctttgtcacatcgatctttggttgtgctggagctagaaatggatgctgcttatctattgtatcctttttaattctggattcttatttatgaacccaatatcatgtgatgtggtcatatccaattttgttcctgtttactgtcaaatatcaagtaagttgtgctgagtggagcaaggaatcaaccataataatcatcgatatgaattcatatcctcaaggaacatcgaaatatgggaaatgacacacaagatgcagctaatgttcaaaggcttgattaataattaactacacaaaggtttcatatgtactttgtaatgctttgctgttccctactttctgattttgatataagtctcccattagaccattagcaacaacttattttctgtggttcataccatggttttcttgacatctggaatagtactcattcctcattattttgttcatactggtcgagcttgctgcaggaggcttcattttcttcaaccatagctggaaagaggttattccagttgacaaaactggaaactttgacatgatgtacagttttttgaaagagaattggagaattgcaaagtgggttgcacttggagctgttgtatttgaggcattgttgttcactgtagctatcatagtacagtcaggcaaccaaaccgactatgacagcgacgatgagtacatcggcgcaaggtccggaatacggcagccattggtgaaccagcaagctgctgctgctgctgctgatcctagggtgcccaatctcgactaccgcccaatccggaacgacgcatggagccaacggatgagagagaagtacggggtggatagcttcgatccgaacaggtttcagccggccaccatatctcctggagaacaaagaaaccgatgcacgattctctgaggcaagttctacatatatccaaccgcgcaattaacaccgagttgcagagagtatgcgcctggattattcggtgttgcctggctgtgtggcatccggagggcttcacattctcgtctgtatttttttttttggtttacatagtccaaactcagcacaccagtgctgtttttgtaataagtattgaaccaagttcgtgttctagataacgttccaatgtgcataaaaactttccctgttaccagacatgtctgttacggaaagcttttacatcgtcagagatgtccatgcgggcatatgaagctgttgagctttcctgtcgtgcattattgtgacagagcgagcatattcgtatggaaaaaaggcatctgttcctcagctctgctccaaaaggagtgatgtgttcccctgccaaagatccacacaagctatcagtcgtcttacagatcaagatctggctatgacatgttaggtcctgatcagcactgcatattgtgtctgctgtctaaaagctggaaaagtgatgtcgatactgtaagactatgaaagtgcctcgatgtattgcataggaggcttaaaatatatcgagacacatgaaactctaaccctaatgggccagtggtgctagcctacctacacataggaaca

SEQ ID NO: 122093 - DNA, 2151 bp, Zea Mays
aagaacacaaagctagagataatgctagttagatgttttttgtagctttgaattagagtgtgtgatgtaattttgcttttgttatgaacattagacaataaactgaacttacgaacttttgtatagagctggttatactttttttccttctaacaaaatgatttataaacgagatagtcattacatagctgtggtaactttaattaatacaaatattaattttgattttgttcaaatttatttgtcttatcttttatttttttatttttttttttgaatttagagctctaatgtgaattttgggccaaaaactgaatttcgggccaaaaattgaatttcgggccctaatgtgaatttcgggccaaaaaatgaatttcgggcttttataatttcgggccacccaaaatgagcccggcacgtttaatcaattacgggccgggccgtgggccgagggctaggcacatgggccggcccggcacggcccgaaattcaaacgggccaggccgacccaaaattcaaacaatacggaccttttgaggcttgggccgggccgggccgggcggtccgaatgtacacctataccttgaggtttcaccgaagtgatatgttactggaactcctagttattaattaatattccggcttaggaggagaataaaaaacgcacgccacgtaagtcacccgctctcaacgcatttccgtcttctcctccgacgagttgccccaatccgcccagacctccaacatcgcaacggagcccaccctgcctgcctcgccgcgatccctccgcgctgctcgaggctcctgtcctgaaccaatcgagaacgccgacttccggggacgggatcatctaaagccgcctccttcccgttgaatccgccgagattcggcgtgaggcgaggttaccgacttcccttgcgcgtagggccggcaggagcgcccgctggccatggcgtgccggggcttctttgagtgcgtcctcaagctcctcaacctcgtcgtcatggcggttgggctggccatggtgggctacggcgccttcctgctcgtgacctggcttcaggtcgcgccgctcccgccgccttcgtcgtcgccggacgccgtgccacccagcggggagctcgtgcggctcgggaggccgctgctgctttttgttgatgcatccctgtcggatgggaccgcggagaggctctccagtgcctggtttatttttgcgtttattggtgtcggtgctatactctttgtcacatcgatctttggttgtgctggagctagaaatggatgctgcttatctatttactcattcctcattattttgttcatactggtcgagcttgctgcaggaggcttcattttcttcaaccatagctggaaagaggttattccagttgacaaaactggaaactttgacatgatgtacagttttttgaaagagaattggagaattgcaaagtgggttgcacttggagctgttgtatttgaggcattgttgttcactgtagctatcatagtacagtcaggcaaccaaaccgactatgacagcgacgatgagtacatcggcgcaaggtccggaatacggcagccattggtgaaccagcaagctgctgctgctgctgctgatcctagggtgcccaatctcgactaccgcccaatccggaacgacgcatggagccaacggatgagagagaagtacggggtggatagcttcgatccgaacaggtttcagccggccaccatatctcctggagaacaaagaaaccgatgcacgattctctgaggcaagttctacatatatccaaccgcgcaattaacaccgagttgcagagagtatgcgcctggattattcggtgttgcctggctgtgtggcatccggagggcttcacattctcgtctgtatttttttttttggtttacatagtccaaactcagcacaccagtgctgtttttgtaataagtattgaaccaagttcgtgttctagataacgttccaatgtgcataaaaactttccctgttaccagacatgtctgttacggaaagcttttacatcgtcagagatgtccatgcgggcatatgaagctgttgagctttcctgtcgtgcattattgtgacagagcgagcatattcgtatggaaaaaaggcatctgttcctc

SEQ ID NO: 122094 - DNA, 284 bp, Zea Mays
gttccgctgattagttatgaatgtgatactttttatgttcgtcttaggagttaggttttattctgtcgcatattgaaaaaaatgaacttaccctgaccgcttcctggatgccgctggaatttgaccctaccgataatgacgattatgctatgcaccagcttgataagcgtgataatacggctatggcgggggttgcctggtttttctacatttttctacgaatttcgaaagcctccgtgactgcgaacatgatggagaacaaacacaactgggtgggatacctc

SEQ ID NO: 122095 - DNA, 411 bp, Zea Mays
accgcccttccttccgtcgtgctcatcttcttctcccacgcccaggcaggctcatgtgatggtcgatcttgatggatggacgcagacgcagttgaaaagctagcgggagccatcgccatcgccaataaagcagtaaaggaagcagcggctcgcggagaaaagcgacgacgtgcagggcaggcaggcaggcgtcttctacaagactcttccatcgcccaccttttaagcttttcttcttcttcttttttttttgacaactttagctttctcaagatctactcgctcagtgtctacaagactccatcgaaccatacagagaagagaaatatatacagttttttccgtctctctaaggtgcaacggtacaacggatttcgtctctctagggggaagtacagtggaacaacgtag

SEQ ID NO: 122096 - DNA, 1095 bp, Zea Mays
atgggctccaccgccggcgacgtggccgcggtggtggacgaggaggcgtgcatgtacgcgatgcagctggcgtcgtcgtccatcctgcccatgacgctgaagaacgccatcgagctgggcctgctggaggtgctgcagaaggaggccggcggcggcaaggcggcgctggcgcccgaggaggtggtggcgcggatgcccgcggcgcccggcgaccccgccgccgcggcggccatggtggaccgcatgctccgcctgctcgcctcctacgacgtcgtccggtgccagatggaggaccgggacggccggtacgagcgccgctactccgccgcgcccgtctgcaagtggctcacccccaacgaggacggcgtgtccatggccgccctcgcgctcatgaaccaggacaaggtcctcatggagagctggtactatctcaaggacgcggtgctggacggcggcatcccgttcaacaaggcgtacgggatgacggcgttcgagtaccacggcacggactcgcgcttcaaccgcgtgttcaacgagggcatgaagaaccactcggtgatcatcaccaagaagctgctggacttctacacgggcttcgagggcgtgtcgacgctggtggacgtgggcggcggcgtgggcgccacgctgcacgccatcacgtcccgccacccgcacatctccggggtcaacttcgacctgccgcacgtcatctccgaggcgccgccgttccccggcgtgcgccacgtgggcggggacatgttcgcgtccgtgcccgccggcgacgccatcctcatgaagtggatcctccacgactggagcgacgcgcactgcgccacgctgctcaagaactgctacgacgcgctgccggaaaatggcaaggtcatcgtcgtcgagtgcgtgctgccggtcaacacggaggccacccccaaggcgcagggcgtcttccacgtcgacatgatcatgctcgcgcacaaccccggcggcaaggagcggtacgagcgcgagttccgcgagctcgcaaagggcgccggcttctccgggttcaaggccacctacatctacgccaacgcctgggccatcgagttcatcaagtga

SEQ ID NO: 122097 - DNA, 174 bp, Zea Mays
atggtgaatgtcgaggtcagcatcgattacatgctgtggacgaagggcaaggtgttcgtccgcgtgggcgaggtcggcgccgagcttgcggccaccttgcgcgcgttgccggagcccgccatcatcgtcggcattgtcatgggcgtgtttctcttcttcaccaatatatgctag

SEQ ID NO: 122098 - DNA, 1610 bp, Zea Mays
gcttcagtgagtgagtgcgtaaaagtagcaaaagataccggccgtgcgcaagaccgaactaatcgccatggcgcctccgtccccacatgcgctcgtcatcccctacccggcgcagggccacgtgatacccctcctggagctcgcccacgcgctggtcgaccggggcttcaccgtcaccttcgccaactccgagttcaaccaccgccgcgtcgtggccgccgccatgccggagtcggagtcgccgacgctgctgggccggagggggatccggctggtggcggtgccggacggcatggggcccggggaggaccggaacgacatcgtcaggctgaccctgctcacggcggagcacatggcgcctcgggtggaggacctcatcaggcgcagccgcgacggcgacggcggcgcggagggcgggcccatcacctgcgtcgtggcggactacaacgtcggggcgtgggcgctcgacgtggcgcggaggaccggcgtcaggtccgccgccatctggccggcttcggccgccgtgctggcgagccttctcagcatcgacaagctgatccaggacaagatcatcgacccacaagatgggtctgcactgagccaaggcacgttccagctgtccccggacatgcccgtgatgcagacgtctcacctcgcgtggaactgcataggcaaccacgacgggcaggaggcgctgttccggtacctccgcgccggcgtccgcgcggtggaagagtgcgacttcatcctctgcaactctttccacgacgccgagccggcgaccttcgcgcggttcccgcggatcgtcccagtcggccctctcctcacgggcgagcgccgtcgccgtggcagtggtggcaagcaggcggcagcggtggtggggcatttctggcggcccgaggacggcgcgtgcatggcctggctcaacgcgcaggcggcgaggtccgtcgtgtacgtggccttcggcagccacaccatgttcgacgcgcgccagttccgggagctggcactggggctggagctctctggtcggccgttcctgtgggtcgtgcgccctgacatcgtcctcggcggcggcggcatccacggctaccccgacggcttcctcgaccgcgtcagcgcgactggccgcggcatggtggtggcgtggtcgccgcagcagcgggtgttggcgcaccctgcggtcgcgtgcttcgtctcgcactgcggctggaactcgaccatggagggcgtccgcaacggggtgcccttcctcgcctggccctacttcaccgaccagttcgtcaaccaggcgtacatctgcgacgtctggaaggtcgggctcccggccgaggccgatgagtcgggcgtcgtcaccaaggagcacatcgccagtagggtggaggagttgatgggtgacgccggcatgagggagagggtggaggacatgaaaagggctgcgcgtgggagcgtcacccgtgggggctcgtcgcaccgcaacttcgacatgtttgttcaggcaatgaaaaggcgtgaatcaatagattcacagaataattaatgtatgtgttttatatatgtatatagattcgttgttatttatataaatataaaaataaaaatttaaaact

SEQ ID NO: 122099 - DNA, 987 bp, Zea Mays
atggttgtattaatcttcttgcagcaatgggaaacgaaaaagcatatagccattgggaagcagagctgcctcctaaatatgatagggttggtatagagactttcatccgtgcaaaatatgaggacaagagatgggtaccaaggaatggaacattgcgactttcctccggtgttcgagatgagaagagccaagagtctccagctagtgctaattagagtggacatcatagatcttcatttgagcaaaaccatgcttcaccagctcttccgagcaaagttgcacctgtagcttcaaggataccctctcaggcatcacctcagcccccaaaggtagaaccaccagttcctaaggtggtttcacctcctcagccacaaaaatctcctgccaaagttgaggcaacaccccctaaagttgagaagccatcagttgcgccgcctcctaaagttgattatgctactgatctctttaacatgttatcaatggatggaacaacagagaaagagccagagtcatctccaaacgacgataatgcctgggatggcttctagtctgcacaaccagtacctagctcggaggaaaaagattctgccaaaccagcagaaagcaagacccaatctacatctggaatagaagacttatttaaagattcgccagctgtgtcgttatcctcagctccagctatttcccaagaaaatgcaaagaatgatatcatgagtttgtttgagaagtccaatatggcatcaccatttgctgtccaacagcagcagttggtgtttatgtctcagcagcaagctcttctaatggctactcttaaagatggaaattcaccacaaatagttccagggaataccaatcaactaaacactaacgtttctaatccccctcttggaaccttgcctttccaaaactggacaaatcttggctatcaaaatcctgggttgactctagcagcagcacagaatggtgccacaatgaggagcatttcag

SEQ ID NO: 122100 - DNA, 991 bp, Zea Mays
cagttgatgaggctctatgccacccatacctggcatcccttcatgagataaacgacgaacccgtctgcccagcgcctttcagcttcgacttcgagcagccatcgctcaccgaagaagatatcaaggagctcatctggagggagtctctcaagttcaaccctgacccagtccgctgaatagttcccagtgtacacacgagtaaactaggatggcatgtctatcagctccatggggacaaaaggcatgaagcaactgcagcaagatgagtgtacaagtgacatcatcatcaccacatctcgtggcttgtcaatagcgacaccgtaacgtcaaaaatattggacatttgtgaaacaagaagcttgatcaataatttctagtggagaaagctggcagcttatctgcatcttgttaggttgtatctacctcccttcagttgtatgcgtaacaaatgtagtcagaaccttgtcactgcctatgggaccatggtaacacagttgtccacaaactacagacagcagctcaacacgtcaccttccagcagttactgttattatgttctaaaatcttgatgaacataaaaccacataatattttgtgactactcacccgaatttgttccagcaattgggcaccattccccgagcattacgcaaacattcctcatacaacatcacgttcttcaaaccagacacatgatacgaggttacacaccaaagcatttgaatagcatccacaacatgcaggaaggagtaccgacacatttgtttaagggcacatgggcatcaagctttaatagacacatgaacagaacagataatcattgcatcagaaatggacgcgacaagcaggcacggagctttttcccagctggacacaatcaggaacagcaaaaaggaaaagagaaaagataaagagataaaaggcccggcacagtaaagacaactctacttaatagagatctagacagaaaatcatgatgccttctttaaaa

SEQ ID NO: 122101 - DNA, 85 bp, Zea Mays
gttccccgctatgtgcagtggtggtgccatggatttgcttgagaggatgctcgtgtttgatccgagcaagaggattactgttaat

SEQ ID NO: 122102 - DNA, 2428 bp, Zea Mays
atggccgctgacgagctctcaccgtacatcctcctgcttcctctactcgcgctgccactcgtcgtcgcgctactggcccgccgccgcgcgcttgggagggacgacgccaggctacctccgggaccatgggcgatgccggtcatcggccacctgcaccacgtcgccggggacgcgcccccgcaccgcgccctgcgtgacctctcgcggacctacggccccctcatggcgctccgcctgcggaccgtccccgtggtggtggcctcgtccccggccgccgcgcgcgaggtcaccggcacccacgacgccgccttcgcgtcgcgccccgccgcgccggcgctgcggctcctgaccggcggcgcggagggcgtcaccttcgcgccgtacggcgacgcgtggcggcggatgcgcagggcctgcgccgccgggctcttcagcgcgccccgcgtccgctccttccgcgccgtgcgcgaggacgagctcggccgcctcctccgcgccgtcgccgcggccgcgtccgcgcctgcgcctgcgccggtgaacctgacccggcgcatgtcgcggttcgccttcgactcctcggcgcgcgccgtcgccggcagccggagcgagcaccgtgacgaggtcctgcgggcgctgcaggacgcgctcaagaccctccccaagctgagcctgctggacttcttcccgtcgtcacgcctcgccgctctcgccagccacgtgccccgcgtggtcgcgcgccgccgcgccgctatgcggcccatcggtccgggtctggacgccgtcgtggactccatcgtcctggagcacctggagaggagagacagcgatgtcgacgacgacgaggacttgcttgatttgctgttgaggatgcagaaggacgtggactcccagtaccctttcaccaccctcaacatcaaatccgtcatcatggacttgtttgttgccggtggcgagacgtcggcgacggccatgcagtgggcaatgacggagctgatacggaaccctcgggcgatgcggaaggcgcaggccgaggtccggtcggcgctcgcggggcagagcacggtgacggaggccggcctcaccgacctacactacctgcggctagtcatcaaggagacgctccggctgcacccgccggcgccggtgctgctccgggagtgccttagcgcacgcgaggtgctcggctaccacgtcccgcggggcgccatggtgctggtgaacgcgtgggcgatcggcagggacccggcgcactgggacgcgccggaggagttcgcgccggagaggttccaggagcttgacggcgcgagggacgacttcaggggggcggcggacttcgagtacgtcccgttcggcgccgggaggaggatgtgccctggcgcggccttgggcctagcgcatgtggagctcgcgctcgctgctctgctgttccatttcgactgggagatgccggaggggatggttgctgaggagatggacgtgacggaggcggctgggatcaccatgcccccacgctctgagctgctgctggtcgctatccctagggtgccggtgcctgtgcctgttgattgaacaaataacgccacttgtagttgggtagtcgtgtacaccatctgaacttgtaataacaagcaaaaaaaaattgtgtgtgagtacagctattgctcaatagaggctttgaagttcagatgtagtacgcacctgcatgacagatcgtgaccccggccagaagacagtatccagtcgtgcctgccttcttcgccgcctgggcgggggttcttgaggaagctcacgcacattgccccgatggggcacaccagagtgctgagtgcccaagatcttcgctcaggtgtacctgcacggctgcacttgcagtgaaacctctcaaacctaataacacatccacagttacaagttagaccttaggactgcggatgtatccatgtttaataattttgttgaactgacgatcatgtttcagtacaagttcggtcggtcggtacactgacctcaagcaggctgcaacggcgaagatgaagccagggcaaaggttaggcatggcggaggtgatcgccggcaaggtgcgtagtatactgacaccctacaccctgcatccattcccggtcctgccatccacaggctgcatcggccggagtgccggaccatacaccgggcaccgccactgaacatcagaactcaagagagtcaaaacccatgtgattcggtggccgatgatgatcgatattagactactcttgttgtatttatgtacattcccatacagaccatcgtttcagtctacaggcagttggacatagctactgtactacagtccatgcagctcattgttccgtgcaaccatgctaacattccagcggccaatcgtcagatgtaatcgccctgcacgatctttctcgcgatgtacttcccc

SEQ ID NO: 122103 - DNA, 111 bp, Zea Mays
ggcaaaggttaggcatggcggaggtgatcgccggcaaggtgcgtagtatactgacaccctacaccctgcatccattcccggtcctgccatccacaggctgcatcggccgga

SEQ ID NO: 122104 - DNA, 1569 bp, Zea Mays
atggccgctgacgagctctcaccgtacatcctcctgcttcctctactcgcgctgccactcgtcgtcgcgctactggcccgccgccgcgcgcttgggagggacgacgccaggctacctccgggaccatgggcgatgccggtcatcggccacctgcaccacgtcgccggggacgcgcccccgcaccgcgccctgcgtgacctctcgcggacctacggccccctcatggcgctccgcctgcggaccgtccccgtggtggtggcctcgtccccggccgccgcgcgcgaggtcaccggcacccacgacgccgccttcgcgtcgcgccccgccgcgccggcgctgcggctcctgaccggcggcgcggagggcgtcaccttcgcgccgtacggcgacgcgtggcggcggatgcgcagggcctgcgccgccgggctcttcagcgcgccccgcgtccgctccttccgcgccgtgcgcgaggacgagctcggccgcctcctccgcgccgtcgccgcggccgcgtccgcgcctgcgcctgcgccggtgaacctgacccggcgcatgtcgcggttcgccttcgactcctcggcgcgcgccgtcgccggcagccggagcgagcaccgtgacgaggtcctgcgggcgctgcaggacgcgctcaagaccctccccaagctgagcctgctggacttcttcccgtcgtcacgcctcgccgctctcgccagccacgtgccccgcgtggtcgcgcgccgccgcgccgctatgcggcccatcggtccgggtctggacgccgtcgtggactccatcgtcctggagcacctggagaggagagacagcgatgtcgacgacgacgaggacttgcttgatttgctgttgaggatgcagaaggacgtggactcccagtaccctttcaccaccctcaacatcaaatccgtcatcatggacttgtttgttgccggtggcgagacgtcggcgacggccatgcagtgggcaatgacggagctgatacggaaccctcgggcgatgcggaaggcgcaggccgaggtccggtcggcgctcgcggggcagagcacggtgacggaggccggcctcaccgacctacactacctgcggctagtcatcaaggagacgctccggctgcacccgccggcgccggtgctgctccgggagtgccttagcgcacgcgaggtgctcggctaccacgtcccgcggggcgccatggtgctggtgaacgcgtgggcgatcggcagggacccggcgcactgggacgcgccggaggagttcgcgccggagaggttccaggagcttgacggcgcgagggacgacttcaggggggcggcggacttcgagtacgtcccgttcggcgccgggaggaggatgtgccctggcgcggccttgggcctagcgcatgtggagctcgcgctcgctgctctgctgttccatttcgactgggagatgccggaggggatggttgctgaggagatggacgtgacggaggcggctgggatcaccatgcccccacgctctgagctgctgctggtcgctatccctagggtgccggtgcctgtgcctgttgattga

SEQ ID NO: 122105 - DNA, 1292 bp, Zea Mays
atggccgctgacgagctctcaccgtacatcctcctgcttcctctactcgcgctgccactcgtcgtcgcgctactggcccgccgccgcgcgcttgggagggacgacgccaggctacctccgggaccatgggcgatgccggtcatcggccacctgcaccacgtcgccggggacgcgcccccgcaccgcgccctgcgtgacctctcgcggacctacggccccctcatggcgctccgcctgcggaccgtccccgtggtggtggcctcgtccccggccgccgcgcgcgaggtcaccggcacccacgacgccgccttcgcgtcgcgccccgccgcgccggcgctgcggctcctgaccggcggcgcggagggcgtcaccttcgcgccgtacggcgacgcgtggcggcggatgcgcagggcctgcgccgccgggctcttcagcgcgccccgcgtccgctccttccgcgccgtgcgcgaggacgagctcggccgcctcctccgcgccgtcgccgcggccgcgtccgcgcctgcgcctgcgccggtgaacctgacccggcgcatgtcgcggttcgccttcgactcctcggcgcgcgccgtcgccggcagccggagcgagcaccgtgacgaggtcctgcgggcgctgcaggacgcgctcaagaccctccccaagctgagcctgctggacttcttcccgtcgtcacgcctcgccgctctcgccagccacgtgccccgcgtggtcgcgcgccgccgcgccgctatgcggcccatcggtccgggtctggacgccgtcgtggactccatcgtcctggagcacctggagaggagagacagcgatgtcgacgacgacgaggacttgcttgatttgctgttgaggatgcagaaggacgtggactcccagtaccctttcaccaccctcaacatcaaatccgtcatcatggtatgtatcttgctcctctctccttcaatcccttccctgttacatcgcacattcagccatcgtcgacacacacacacacacaggacttgtttgttgccggtggcgagacgtcggcgacggccatgcagtgggcaatgacggagctgatacggaaccctcgggcgatgcggaaggcgcaggccgaggtccggtcggcgctcgcggggcagagcacggtgacggaggccggcctcaccgacctacactacctgcggctagtcatcaaggagacgctccggctgcacccgccggcgccggtgctgctccgggagtgccttagcgcacgcgaggtgctcggctaccacgtcccgcggggcgccatg

SEQ ID NO: 122106 - DNA, 1090 bp, Zea Mays
tctccacgaggccctttgcactgacatacccccctgttctatcaatctatctatttattaatttctttttgtttttatgtctgctcctttgctatcttctattatttcctaactttgctggtagaactcttcaggtggtgagggttggatgatgatcagttgcatagttcaaatgattacttctgtaatgactatgattacactgaattgtctttcgctcctaactgacaatcttctgaccacctgatttttcctggtaatcttagaggatttgtgtaccaccatatttacaacacactgattttgttatgtttatctgatttttaaattttaatttatttaattcagaagttttattacttcttagaacacatgtccataaatattgcttccgtctgagtacttcactgcaccaactgtacatgtgacttggtagtaatatatatggaagaattccctacacgacatgtgtaggcatagacactacactaagtaatcagattatgcagtcttaagttcacccgggagtataagtttgtgccattaacagcatgtttaactgattctcatatcagattatgcagtcttaagttcacgcgggagtataagtttgtgccattaacagcatgtttaactgattctcataaatatcgcgaatgcttgaattgcagattccacacctgagacctgctgagtacaagaggtccaggttggcaaggaaccaaaggactgtgaatcgtccatatggtggtgttctgtctggtactgcagttagggagaggatcatccgtgcctttttggtcgaggaacagaagatagtgaagaaggtgttgaagatccaaaagaccaaggataaggcctccaagagctagacgatataggccacaatgtttgagtccattcgaatttatttcagcaggaaaatttctcgcgggtatggggaatcttggtacttatgctagtagtatgtgagatgggtgtggtttaaattttgagcgtaagttgagttctgttaacttgttaagttcggtggaatgttttaaactatgtggatgtcagattttgttaatgtttgcgcagtttgccccaa

SEQ ID NO: 122107 - DNA, 817 bp, Zea Mays
ccaaattcagaccatccatatcagatgaaggtgctggtaatctcaagtcacagatcggaccgcccattctcttggaaaatcatctcccgccgtcagatctaggtcacccggcagccatcctataaaacctctccatctctcctccttacttccgtccccgccgccacgccagagaggagaggaagagcgcgcggagagtgagagcccgggagccgggagaagcagcggctgggagcaagatggtgcagcgcctcacctaccggaagcggcacagctacgccaccaaatcgaaccagacccgcgtcgtcaagacacctggtgggaaacttgtgtaccagtacaccaagaagcgcgcgagcggaccgaagtgcccagtcaccgggaagaagatccaaggaattccacacctgagacctgctgagtacaagaggtccaggttggcaaggaaccaaaggactgtgaatcgtccatatggtggtgttctgtctggtactgcagttagggagaggatcatccgtgcctttttggtcgaggaacagaagatagtgaagaaggtgttgaagatccaaaagaccaaggataaggcctccaagagctagacgatataggccacaatgtttgagtccattcgaatttatttcagcaggaaaatttctcgcgggtatggggaatcttggtacttatgctagtagtatgtgagatgggtgtggtttaaattttgagcgtaagttgagttctgttaacttgttaagttcggtggaatgttttaaactatgtggatgtcagattttgttaatgtttgcgcagtttgccccaa

SEQ ID NO: 122108 - DNA, 862 bp, Zea Mays
ccaaattcagaccatccatatcagatgaaggtgctggtaatctcaagtcacagatcggaccgcccattctcttggaaaatcatctcccgccgtcagatctaggtcacccggcagccatcctataaaacctctccatctctcctccttacttccgtccccgccgccacgccagagaggagaggaagagcgcgcggagagtgagagcccgggagccgggagaagcagcggctgggagcaagatggtgcagcgcctcacctaccggaagcggcacagctacgccaccaaatcgaaccagacccgcgtcgtcaagacacctggtgggaaacttgtgtaccagtacaccaagaagcgcgcgagcggaccgaagtgcccagtcaccgggaagaagatccaaggagtatgtgccgcccacctttctattttatcctctcgttattgcgttaggtcgttgcatcatgctccatgcaaagatttcaactttaatgctgtttgatcagcctaggctaagagttcctgatggaacatgtatttaaaccgcggcattagtattttgtgtagcttatgactcattcttgtgaagtgtcattgcaaactggggatttaagtgcacctattattgttgaatcatgttgcgggctcttggttggaacagtttatcatcccagggcagtgtacacatctgagcacaatgtgttgtgttgtcaaattttgcttgtgttataggtcgtatcaagttgtcctttctccaggcctgccttccttttttgttttgagtttgttggccaacaattatatagttacaattgacaaacatatgtctgaatttcctgtgaagatttcagcattttgttctgtttgtct

SEQ ID NO: 122109 - DNA, 103 bp, Zea Mays
cttcaatctaacaacagagatgaccccacctttgaaaaattagataggtttttatctagtctggactgggatctcatgtacaataatattgcagctactgccc

SEQ ID NO: 122110 - DNA, 2131 bp, Zea Mays
gcaccacgcaaaccgagctcgagaacaccaccacgaacaagaaagaaacacggccgcggcggggcggggcggggcttcttctccttttccaactcgctgcccgttgcgtgattccgccgcgtcgcgtcgcgtgtgcatttgcgcgcgcgcgcaggagccgccgctccgatcgccctgaaaaagatggcgaatagtaggaagcctcctggcctcaggttactcggaggcgccggctcactgacaacgtaccagacactagtcctggtcctcacgttcttggcatacacatgcttccacatgactcggaagatcccaagcatagtcaagagcgctctggacccgcagacgaaggtggggttctcgcactggggacggttgcacgccagcagaaacgctctcaccaccggctggctgccgttcaacaccgccgacggctccgcgctgctcggcgagatagacgtcgcgttcctcgccgcgtactccgccgggatgttcttcgccggccacatcggcgaccgcatggatctgagggtcttcctgacggtcggcatggccggcaccgccgtgttcacgacgctcttcggcgctggatactggctgaacgtccacagcttctactatttcttggttattcagatggtttctggcctgtttcagtcagttggctggccttcggttgttgcggttgtcggcaactggttcgggaagagtaagagaggattgatcatggggatatggaacgcacacacctctgtcgggaatatagcaggctcgctgctcgccgcgttcctcctgaagttcgggtggggctggtcgtttgccgtccccagccttatcatggcgctcgttgggttgatggtgtatgttttcctgccggttagtcctgaggccatggagattgacagtgacggcggtgagcttaactgcgagaaggacgctgtgaaggagcctctcttggaaccaggccaagaagtgaaacatagtgcagtggggttcttagaggcatggaggattcctggggtcgcgccgtttgctctgtgcctcttcttctccaaactggtcgcgtataccttcctgtactggctgccgttctacatcagccatacacgcattggtggcgagtacctctccgacgccacggcaggaagcctatcgacgatcttcgacgtcggcggcgtgctgggaggggtcctggcgggccacatctccgaccgcctgaacgcgcgcgcgatcacggccgcgagcttcacttactgcgcgatccccgcgctcttcctgtaccgcacgtacgggagcatgtcgatggcgtggaacgtctcgctcatgttcgtcacggggatgttcgtgaacgggccctacgcgctgatcacgacggcggtgtcggccgacctcggcacgcacagctcgctcaacggcaactcccgggcgctggccaccgtgacggcgatcatcgacgggacggggtctgtcggagccgccatcgggccgctggtgacggggtacgtctcgtcgaggagctggagcgccgtgttcaccatgctgatggcggcggctctcctcgctgggctcctcttgagcaagctcgtgtgcgccgagctgcaagggaaaacgcattccagcgtgagcaaggacgcaggcggtgaacatggtgcctactcagatgaagtgtaagtctgaagccctggttagtaagcccacgttcccgacctgaagatgaaaaggcagagatttagctgctgagtgacttgctcaaatggcaattcagatgattttcttttgttttgtgtggtagaagatgtaagtgtgtgcttagattggtttttcaggtttactagactctagagcccaaatacaggcacattttaggcgcctttgtaaataaggtcgggctcatactagttaccattgctagttgctcaattgtatgtgatgtttagggtatatgtcaaatggagggcgaaccaccttttgtacactggaatggccaactctgcatttactttgaatgttggccttctttttgtacgtgtaaaccgtgtgaaggttcagagaattttgaattgaagcatctaggctgaccgctagtgtttggttgcgccgggattgccttgctcaaaggagctgtttggtt

SEQ ID NO: 122111 - DNA, 1056 bp, Zea Mays
tcctatgaatgtgctttctaataggccttcttcactcgctcgtgtttcaggcattggtggcgagtacctctccgacgccacggcaggaagcctatcgacgatcttcgacgtcggcggcgtgctgggaggggtcctggcgggccacatctccgaccgcctgaacgcgcgcgcgatcacggccgcgagcttcacttactgcgcgatccccgcgctcttcctgtaccgcacgtacgggagcatgtcgatggcgtggaacgtctcgctcatgttcgtcacggggatgttcgtgaacgggccctacgcgctgatcacgacggcggtgtcggccgacctcggcacgcacagctcgctcaacggcaactcccgggcgctggccaccgtgacggcgatcatcgacgggacggggtctgtcggagccgccatcgggccgctggtgacggggtacgtctcgtcgaggagctggagcgccgtgttcaccatgctgatggcggcggctctcctcgctgggctcctcttgagcaagctcgtgtgcgccgagctgcaagggaaaacgcattccagcgtgagcaaggacgcaggcggtgaacatggtgcctactcagatgaagtgtaagtctgaagccctggttagtaagcccacgttcccgacctgaagatgaaaaggcagagatttagctgctgagtgacttgctcaaatggcaattcagatgattttcttttgttttgtgtggtagaagatgtaagtgtgtgcttagattggtttttcaggtttactagactctagagcccaaatacaggcacattttaggcgcctttgtaaataaggtcgggctcatactagttaccattgctagttgctcaattgtatgtgatgtttagggtatatgtcaaatggagggcgaaccaccttttgtacactggaatggccaactctgcatttactttgaatgttggccttctttttgtacgtgtaaaccgtgtgaaggttcagagaattttgaattgaagcatctaggctgaccgctagtgtttggttgcgccgggattgccttgctc

SEQ ID NO: 122112 - DNA, 2078 bp, Zea Mays
gcaccacgcaaaccgagctcgagaacaccaccacgaacaagaaagaaacacggccgcggcggggcggggcggggcttcttctccttttccaactcgctgcccgttgcgtgattccgccgcgtcgcgtcgcgtgtgcatttgcgcgcgcgcgcaggagccgccgctccgatcgccctgaaaaaggtgccaattgttactgattccagatataggtgttcctgcgctggaactaactgcgccgcgaccttcctcagcaatcttatgctcatgtctcactctcaacagatggcgaatagtaggaagcctcctggcctcaggttactcggaggcgccggctcactgacaacgtaccagacactagtcctggtcctcacgttcttggcatacacatgcttccacatgactcggaagatcccaagcatagtcaagagcgctctggacccgcagacgaaggtggggttctcgcactggggacggttgcacgccagcagaaacgctctcaccaccggctggctgccgttcaacaccgccgacggctccgcgctgctcggcgagatagacgtcgcgttcctcgccgcgtactccgccgggatgttcttcgccggccacatcggcgaccgcatggatctgagggtcttcctgacggtcggcatggccggcaccgccgtgttcacgacgctcttcggcgctggatactggctgaacgtccacagcttctactatttcttggttattcagatggtttctggcctgtttcagtcagttggctggccttcggttgttgcggttgtcggcaactggttcgggaagagtaagagaggattgatcatggggatatggaacgcacacacctctgtcgggaatatagcaggctcgctgctcgccgcgttcctcctgaagttcgggtggggctggtcgtttgccgtccccagccttatcatggcgctcgttgggttgatggtgtatgttttcctgccggttagtcctgaggccatggagattgacagtgacggcggtgagcttaactgcgagaaggacgctgtgaaggagcctctcttggaaccaggccaagaagtgaaacatagtgcagtggggttcttagaggcatggaggattcctggggtcgcgccgtttgctctgtgcctcttcttctccaaactggtcgcgtataccttcctgtactggctgccgttctacatcagccatacacgcattggtggcgagtacctctccgacgccacggcaggaagcctatcgacgatcttcgacgtcggcggcgtgctgggaggggtcctggcgggccacatctccgaccgcctgaacgcgcgcgcgatcacggccgcgagcttcacttactgcgcgatccccgcgctcttcctgtaccgcacgtacgggagcatgtcgatggcgtggaacgtctcgctcatgttcgtcacggggatgttcgtgaacgggccctacgcgctgatcacgacggcggtgtcggccgacctcggcacgcacagctcgctcaacggcaactcccgggcgctggccaccgtgacggcgatcatcgacgggacggggtctgtcggagccgccatcgggccgctggtgacggggtacgtctcgtcgaggagctggagcgccgtgttcaccatgctgatggcggcggctctcctcgctgggctcctcttgagcaagctcgtgtgcgccgagctgcaagggaaaacgcattccagcgtgagcaaggacgcaggcggtgaacatggtgcctactcagatgaagtgtaagtctgaagccctggttagtaagcccacgttcccgacctgaagatgaaaaggcagagatttagctgctgagtgacttgctcaaatggcaattcagatgattttcttttgttttgtgtggtagaagatgtaagtgtgtgcttagattggtttttcaggtttactagactctagagcccaaatacaggcacattttaggcgcctttgtaaataaggtcgggctcatactagttaccattgctagttgctcaattgtatgtgatgtttagggtatatgtcaaatggagggcgaaccaccttttgtacac

SEQ ID NO: 122113 - DNA, 282 bp, Zea Mays
tgctattgctgacatagtcgaaggccgccatgggctgcttgctccgccgtctgttccccttcctggtcggcgcggccgtcggggtgtacgcggcgcagaactacaaggtgcccaacatccggcgcctcgccgaccgcggcgccgacgccgccaggcgctacgaggaggcctaccgcaagaagcctgctgccgccgcggacgacgacgcccgtcccgtcggcggctgcaggaagaagaaggtggtgcaggtggatattgacgacgacgaccaagagtaggtag

SEQ ID NO: 122114 - DNA, 251 bp, Zea Mays
aagaagagaccgaaacatggtcccggctgaaaaaatccccgaaccctggcccccatcactagcgggccgtcaccgcccactctgcaacggcccagccggagggtggcgcgcaggacgtaacccgggagcgggcggggcacagcgaggggatttttttaaccaagccagaaattcgcccccgagggggatcgaacccaggacttggaggtgctactcggaagccttaaccattacgctagaggccctttcgc

SEQ ID NO: 122115 - DNA, 504 bp, Zea Mays
atgcacatgctgggatggaaggcacaaaaggcaaattaaatgatggtaacaaaagagtgcaacacctcgaacttgttatatattcaaacaataacaatgctgctcagttatagtttttgaatggatagatgctatcctcatagtatgtctcagtttaacgagaagtccatcatggcagccacaaaaagcagtaagcaaactacaaactgtaatgtgaacacttggttgcacttaaacaaagttgacatgatgtttgatgtgaccagcaatatagttgtaatgaaaacaatccctaaattaaccgatgtacatcatagaaagtcaaaaaaacttgtttggaaacagcaacagaggcagcaaatgataagaacacagtagcagattatggaattggaggcgctcagcagcttattattcaaatgaatatcatcatcatactagcaatgtatgcttaacaagaagctgttaatgggaaggagaggaggaggaatggatcgatatata

SEQ ID NO: 122116 - DNA, 344 bp, Zea Mays
ggacgggtgcctcgacatttttggggaatatgtggaaacataagcatcgtgtttctgtagcagaggttcaagtagccaacaagcatcgggtaataccatccagaaacaatggagcactaccatctccaatgaagcatcctcttgcctccagaataaaagggaggagccttatgcgagtagagcatcggagacgaagaggcattgccaccctgaactgccttggatggtagcgtagtaggagtatatgattggccacggcattgccagcttgttagtatagtattgctcgaatgcaaataagaatgctggtatccttgcgttgaacatggatctgttgttgccga

SEQ ID NO: 122117 - DNA, 2626 bp, Zea Mays
cagagcatgagaggcggagggagcggccgcggccatgggaacgaccaatacagccacaaccaccatcacagctcgttgtgctgcctctctgccgcgccgccgctggctggggacgccaccccgacgctgactccggagccagaggctgccgccgcctcgattgcctcgacggtgtcgacggttgtggtggagggcgtgctgcacaagtggaccaactacggtcgcgggtggcgggagcgctggttctcgctccgcgacggcgtcctgtcctactccaagattcgggccaacgcgggggcgaagacgggggcgggggcgacggacggtgacggggaggttagagtgattggttctagggtggaaggagcgcgccgcacggagaagcctgccggcgtcgtattcctcaaggtgtcagcatttcgggaaagtaagtcagatgacaggagattttacatattttcccccactaagacgcttcacttgaagacaaactcaaaagttgaccgtgttgcctggattgaggctttgatcctggcaaggagtgtttattctcttgggtcacttagcgggagagcaacttttgtgcagagtgatgtttcaatttcaactgcaaggcttagagatcgaatgcatcaggagggtttgaatgagagtcttatacaggactgtgaacaaattgtgctttccgagttctcaagctaccggaagcaactgaagtgtcgttacgaggattacttaagcttgtttgggtcctgcagacataattttgaggaaggtaaagatggaagtataacacaggggacattgacacgaaatgacttctctagttctaggcatggaaattttagcgaatatagcacaacagaatctgatgagcatgagtttgagaaacacgatggaggcgaattgatttgtgaagatgaatctgcattctttgattctatagattacttcacagagtcagacaacaggtcttcaaccatgttaagtggcaaggaagtagtggattcccaaacacatgattccagtaataatatacaagcacaaatcagacgacggagtaggctgcctgaccctattgagaaagagaaagggatcagtctctggtccattattaaagatagcgttggaaaggatttgacacgagtttgtcttccagtttacttcaatgaaccactctcatcccttcagaagtgctttgaggatttggagtattcatacctcttggatcaggcatatcaacatggaaaagtgggggacagcctcatgagaatcctcaaagtagctgcttttgcggcctctggctatgcttcatctgttgcaaggccttgcaaaccattcaatccattgctaggagagacctatgaagctgattaccctgacagaggaattcgtttttttgcagaaaaggttagtcatcatccaatgctgattgcctgccactgtgaaggcaagggctggaaattctggggcgacagcaatctcaaatccaagttttggggacagtcaattcaagttgaaccagttggcattttgactctagaatttgaggatggtgaaatcttccaatggaataaggttacaacaaccattcacaatctcattcttgggaagttgtactgcagccaccatggaacaatgcatataaaagggaatcgccaatattcatgtaaactgaagttcaaagagccatcacttcttgaccggaatccccatctagtacaaggctttgtagaggacaacaatgggaacaaagcttcgtttttgatagggatgtgggacgaaagcatatattgtagtaactctgatacttccaaggtgaagagcgccgatcaactgaaaggtgcctcgctgctgtgggaaaagaacaaacctgctcctaacccaactcgatacaatttatcttcattcgcgatcacactgaatgagttgaccccagggctgcaggagaaacttccacctactgattcacggctgagaccagaccagcgccacctagagaatggtgaatacgagaaagcgaatgcagagaagctgaggttggaacgacggcaaagaatgtctactaaacttcaagacaatggctggaaatcccggtggttcgagcaagacaccgaggacgggacgtattgctacaaaggtggatactgggaaacaagagagaggggcttctgggatgggtgcctcgacatttttggggagttcgtggagacataagtgccctgttcctgcagtagcagaggttcaagcagccaacacgccacccagaaacaatggagtactgccatctccaatggagcatcctcttgcctctagaagagaagggggaggagccctgtgcgaggagtagagcattcgagatgtgaaggcattgtgccttgaatggtagcatagcatatgattggccacgaataggcattgccaccttgttagtatagtatagttcgatccaatgcaaataagaatgctgacattcattctttggttccttcttgcgttgaacatggatctgttgtcgtggaagaaatttgcttgctcggctaggcaaaagtctgcctacactgtatttgtttgccgatcgaaaaccaaagcaagtcaccatctataactcttcacttccatgaga

SEQ ID NO: 122118 - DNA, 1327 bp, Zea Mays
catttaatttccgatagagttatgccccttcgtttacatttttactgatcatccatttcttaattttgtggtactttgaattggagactttaatttcattgcattgctattcaacatttccaccaataggttagtcatcatccaatgctgattgcctgccactgtgaaggcaagggctggaaattctggggcgacagcaatctcaaatccaagttttggggacagtcaattcaagttgaaccagttggcattttgactctagaatttgaggatggtgaaatcttccaatggaataaggttacaacaaccattcacaatctcattcttgggaagttgtactgcagccaccatggaacaatgcatataaaagggaatcgccaatattcatgtaaactgaagttcaaagagccatcacttcttgaccggaatccccatctagtacaaggctttgtagaggacaacaatgggaacaaagcttcgtttttgatagggatgtgggacgaaagcatatattgtagtaactctgatacttccaaggtgaagagcgccgatcaactgaaaggtgcctcgctgctgtgggaaaagaacaaacctgctcctaacccaactcgatacaatttatcttcattcgcgatcacactgaatgagttgaccccagggctgcaggagaaacttccacctactgattcacggctgagaccagaccagcgccacctagagaatggtgaatacgagaaagcgaatgcagagaagctgaggttggaacgacggcaaagaatgtctactaaacttcaagacaatggctggaaatcccggtggttcgagcaagacaccgaggacgggacgtattgctacaaaggtggatactgggaaacaagagagaggggcttctgggatgggtgcctcgacatttttggggagttcgtggagacataagtgccctgttcctgcagtagcagaggttcaagcagccaacacgccacccagaaacaatggagtactgccatctccaatggagcatcctcttgcctctagaagagaagggggaggagccctgtgcgaggagtagagcattcgagatgtgaaggcattgtgccttgaatggtagcatagcatatgattggccacgaataggcattgccaccttgttagtatagtatagttcgatccaatgcaaataagaatgctgacattcattctttggttccttcttgcgttgaacatggatctgttgtcgtggaagaaatttgcttgctcggctaggcaaaagtctgcctacactgtatttgtttgccgatcgaaaaccaaagcaagtcaccatctataa

SEQ ID NO: 122119 - DNA, 1271 bp, Zea Mays
catttaatttccgatagagttatgccccttcgtttacatttttactgatcatccatttcttaattttgtggtactttgaattggagactttaatttcattgcattgctattcaacatttccaccaataggttagtcatcatccaatgctgattgcctgccactgtgaaggcaagggctggaaattctggggcgacagcaatctcaaatccaagttttggggacagtcaattcaagttgaaccagttggcattttgactctagaatttgaggatggtgaaatcttccaatggaataaggttacaacaaccattcacaatctcattcttgggaagttgtactgcagccaccatggaacaatgcatataaaagggaatcgccaatattcatgtaaactgaagttcaaagagccatcacttcttgaccggaatccccatctagtacaaggctttgtagaggacaacaatgggaacaaagcttcgtttttgatagggatgtgggacgaaagcatatattgtagtaactctgatacttccaaggtgaagagcgccgatcaactgaaaggtgcctcgctgctgtgggaaaagaacaaacctgctcctaacccaactcgatacaatttatcttcattcgcgatcacactgaatgagttgaccccagggctgcaggagaaacttccacctactgattcacggctgagaccagaccagcgccacctagagaatggtgaatacgagaaagcgaatgcagagaagctgaggttggaacgacggcaaagaatggtatccgctctcgcttcatagatcacaatccatacatgttgtttcttcatgttctctgtctcattgcagtctactaaacttcaagacaatggctggaaatcccggtggttcgagcaagacaccgaggacgggacgtattgctacaaaggtggatactgggaaacaagagagaggggcttctgggatgggtgcctcgacatttttggggagttcgtggagacataagtgccctgttcctgcagtagcagaggttcaagcagccaacacgccacccagaaacaatggagtactgccatctccaatggagcatcctcttgcctctagaagagaagggggaggagccctgtgcgaggagtagagcattcgagatgtgaaggcattgtgccttgaatggtagcatagcatatgattggccacgaataggcattgccaccttgttagtatagtatagttcgatccaatgcaaataagaatgctgacattcattcttt

SEQ ID NO: 122120 - DNA, 2552 bp, Zea Mays
cagagcatgagaggcggagggagcggccgcggccatgggaacgaccaatacagccacaaccaccatcacagctcgttgtgctgcctctctgccgcgccgccgctggctggggacgccaccccgacgctgactccggagccagaggctgccgccgcctcgattgcctcgacggtgtcgacggttgtggtggagggcgtgctgcacaagtggaccaactacggtcgcgggtggcgggagcgctggttctcgctccgcgacggcgtcctgtcctactccaagattcgggccaacgcgggggcgaagacgggggcgggggcgacggacggtgacggggaggttagagtgattggttctagggtggaaggagcgcgccgcacggagaagcctgccggcgtcgtattcctcaaggtgtcagcatttcgggaaagtaagtcagatgacaggagattttacatattttcccccactaagacgcttcacttgaagacaaactcaaaagttgaccgtgttgcctggattgaggctttgatcctggcaaggagtgtttattctcttgggtcacttagcgggagagcaacttttgtgcagagtgatgtttcaatttcaactgcaaggcttagagatcgaatgcatcaggagggtttgaatgagagtcttatacaggactgtgaacaaattgtgctttccgagttctcaagctaccggaagcaactgaagtgtcgttacgaggattacttaagcttgtttgggtcctgcagacataattttgaggaaggtaaagatggaagtataacacaggggacattgacacgaaatgacttctctagttctaggcatggaaattttagcgaatatagcacaacagaatctgatgagcatgagtttgagaaacacgatggaggcgaattgatttgtgaagatgaatctgcattctttgattctatagattacttcacagagtcagacaacaggtcttcaaccatgttaagtggcaaggaagtagtggattcccaaacacatgattccagtaataatatacaagcacaaatcagacgacggagtaggctgcctgaccctattgagaaagagaaagggatcagtctctggtccattattaaagatagcgttggaaaggatttgacacgagtttgtcttccagtttacttcaatgaaccactctcatcccttcagaagtgctttgaggatttggagtattcatacctcttggatcaggcatatcaacatggaaaagtgggggacagcctcatgagaatcctcaaagtagctgcttttgcggcctctggctatgcttcatctgttgcaaggccttgcaaaccattcaatccattgctaggagagacctatgaagctgattaccctgacagaggaattcgtttttttgcagaaaaggttagtcatcatccaatgctgattgcctgccactgtgaaggcaagggctggaaattctggggcgacagcaatctcaaatccaagttttggggacagtcaattcaagttgaaccagttggcattttgactctagaatttgaggatggtgaaatcttccaatggaataaggttacaacaaccattcacaatctcattcttgggaagttgtactgcagccaccatggaacaatgcatataaaagggaatcgccaatattcatgtaaactgaagttcaaagagccatcacttcttgaccggaatccccatctagtacaaggctttgtagaggacaacaatgggaacaaagcttcgtttttgatagggatgtgggacgaaagcatatattgtagtaactctgatacttccaaggtgaagagcgccgatcaactgaaaggtgcctcgctgctgtgggaaaagaacaaacctgctcctaacccaactcgatacaatttatcttcattcgcgatcacactgaatgagttgaccccagggctgcaggagaaacttccacctactgattcacggctgagaccagaccagcgccacctagagaatggtgaatacgagaaagcgaatgcagagaagctgaggttggaacgacggcaaagaatggtatccgctctcgcttcatagatcacaatccatacatgttgtttcttcatgttctctgtctcattgcagtctactaaacttcaagacaatggctggaaatcccggtggttcgagcaagacaccgaggacgggacgtattgctacaaaggtggatactgggaaacaagagagaggggcttctgggatgggtgcctcgacatttttggggagttcgtggagacataagtgccctgttcctgcagtagcagaggttcaagcagccaacacgccacccagaaacaatggagtactgccatctccaatggagcatcctcttgcctctagaagagaagggggaggagccctgtgcgaggagtagagcattcgagatgtgaaggcattgtgccttgaatggtagcatagcatatgattggccacgaataggcattgccaccttgttagtatagtatagttcgatccaatgcaaataagaatgctgacattcattcttt

SEQ ID NO: 122121 - DNA, 2421 bp, Zea Mays
caaggtctttgggggtcccaagaattaaagcatgtacagtccatccaagtggccgcatatagagatagggaataaaatggaggacatatggtctgtctcagattgaatcaggggggtcttgaggattttcaggaactgagtaggttgtttgtatcagggggatcttgtggatattgaggaactgtgtaggttgtttggttgaggtagattgcagattggatttgttttggtttcttgagatccttgtttgccccttcatttttctttcgattttcattttgtcacccccaaccaaagattgaagttgaaggggtaggtgtccgatttttttcttttcctggggaataccattccttgttccttaaatcagcttccatatcctctttgcggtttcttaatagaaggttttgagcttttctataagatattatggatgctggtctgtgactgtgtatttttatgcttttcctaggtttgaatgcctgatgcataatattgcataaggccaagggaagttctacacatttttcatgcgcaaggctgcctagttacaaacatatgggagctgataagttactatgtttctaggtgtcagcatttcgggaaagtaagtcagatgacaggagattttacatattttcccccactaagacgcttcacttgaagacaaactcaaaagttgaccgtgttgcctggattgaggctttgatcctggcaaggagtgtttattctcttgggtcacttagcgggagagcaacttttgtgcagagtgatgtttcaatttcaactgcaaggcttagagatcgaatgcatcaggagggtttgaatgagagtcttatacaggactgtgaacaaattgtgctttccgagttctcaagctaccggaagcaactgaagtgtcgttacgaggattacttaagcttgtttgggtcctgcagacataattttgaggaaggtaaagatggaagtataacacaggggacattgacacgaaatgacttctctagttctaggcatggaaattttagcgaatatagcacaacagaatctgatgagcatgagtttgagaaacacgatggaggcgaattgatttgtgaagatgaatctgcattctttgattctatagattacttcacagagtcagacaacaggtcttcaaccatgttaagtggcaaggaagtagtggattcccaaacacatgattccagtaataatatacaagcacaaatcagacgacggagtaggctgcctgaccctattgagaaagagaaagggatcagtctctggtccattattaaagatagcgttggaaaggatttgacacgagtttgtcttccagtttacttcaatgaaccactctcatcccttcagaagtgctttgaggatttggagtattcatacctcttggatcaggcatatcaacatggaaaagtgggggacagcctcatgagaatcctcaaagtagctgcttttgcggcctctggctatgcttcatctgttgcaaggccttgcaaaccattcaatccattgctaggagagacctatgaagctgattaccctgacagaggaattcgtttttttgcagaaaaggttagtcatcatccaatgctgattgcctgccactgtgaaggcaagggctggaaattctggggcgacagcaatctcaaatccaagttttggggacagtcaattcaagttgaaccagttggcattttgactctagaatttgaggatggtgaaatcttccaatggaataaggttacaacaaccattcacaatctcattcttgggaagttgtactgcagccaccatggaacaatgcatataaaagggaatcgccaatattcatgtaaactgaagttcaaagagccatcacttcttgaccggaatccccatctagtacaaggctttgtagaggacaacaatgggaacaaagcttcgtttttgatagggatgtgggacgaaagcatatattgtagtaactctgatacttccaaggtgaagagcgccgatcaactgaaaggtgcctcgctgctgtgggaaaagaacaaacctgctcctaacccaactcgatacaatttatcttcattcgcgatcacactgaatgagttgaccccagggctgcaggagaaacttccacctactgattcacggctgagaccagaccagcgccacctagagaatggtgaatacgagaaagcgaatgcagagaagctgaggttggaacgacggcaaagaatgtctactaaacttcaagacaatggctggaaatcccggtggttcgagcaagacaccgaggacgggacgtattgctacaaaggtggatactgggaaacaagagagaggggcttctgggatgggtgcctcgacatttttggggatagcagaggttcaagcagccaacacgccacccagaaacaa

SEQ ID NO: 122122 - DNA, 1068 bp, Zea Mays
tttttatttttttatgagtaagatgttagaaatggttagaggaggctaataaatatattttgatgttttaacgacttgaagaacacattgatttatatttttgttttttgaactattaaagaaagcaaattgatttgtaaagggactattatataaagcgaattgatttgtaaaaagggaccgggaaaaaactagtacttttgggccgttcgcaggctcccatcttctcccgcataatcttcctcccgcacatcccgatcctccagctgtggcatgggtcttgtgcagtgttggtgggctgaccagttgggctatggcctgctcgcataatcttcctcccgcacatcccgatccttctctcggcggcccgttggtcacgtgactcatccccctgtgctctcctctcgtggccttgtttcctggcggcgacggctggtcgagcggcgccgcccttggctaggtcttcgctgggtccttccccggcgacgagcgtccatctggggtcgactgaactgagcaggcagtaggaagagacactatgttgttcttctcctacttcaaggagctggtggggaaggaggtgacagtggagctcaagaatgacttggcgatccgcgggacgctccactcggttgaccagtacctcaacatcaagctcgagaacacccgcgtagtcgaccaggacaagtatccccacatgctttcagtgcggaactgcttcatcaggggctcggtggtgcggtacgtgctgctcccgcaggacggcgtggacatcgacatcctccacgacgccaccaggagggaggcgcgcggaggctgatcctgatgcgcacccgctccctcacctgctggctgctgcttcatccccgattgtacgaagcatgcatgtacggtgtgtggtagacagatgccccagtttagttctttggtgcttgccttgacatagatattccaggttggatgatgacctgaatcacctgatatattattgtcatatcatatgcaatgttcttgcatggggttgctatattattaccatatcgtattatcacatcatagacacttaaa

SEQ ID NO: 122123 - DNA, 2603 bp, Zea Mays
gcaatcgttagaagagaaatcaagacagatgacaacacacctcttgcacaaaggctgaaaatgggagagtcttcgaaaggcaagtcatctgcaaagagtgtctttaagaagagtcctgcttctgtgaagaaggacatcaagaaaatgaaagggaaagggaaattaaagaagaacatgaaaaattctcagttctcaaagataatgaaggtcccccctggatctggtggaggaaagaaatggactaccttggagcacaatggtgttattttccctcccccatacaagcctcatggtgtcaaaatgctttacaatgggaaacctatcgatctgacaccagaacaagaggaggttgcaacaatgtttgctgttatgaaagacacagactatgcggccaagccaacattcattgataactttttcactgattggagaaaagttcttggtaaaaatcatattattaagaacttcgagctttgtgatttcacaccaatatatgaatggcacctcagagagaaggagaggaagaagcagatgacaacagaggagaaaaaaacattgcgggaagacaaattgaaacaagaggagaagtacatgtgggctgttgtagatggtgttaaagaaaaggtcggaaatttcagagtagaaccgcctggcttgttcaggggacgtggagaacatccaaagatggggaaacttaagcgccgcattctaccaagtgatattacaataaatattggaaaaggagctccagtccctgagtgcccgatacctggagaaagttggaaagaagtcaaacatgacaatactgttacatggttggccttttggaacgatccaattaacccaaaggatttcaagtatgttttcctggcagcaagcagctcactgaaggggcaaagtgacaaagagaagtatgagaagtccagaaaattgaagggtcatatacaaagaattcgtgagaattatacaaaagatttcaaaaacaaagatgtgacgaggaggcaaatagctgtggcaacataccttatcgataaactagcccttagggctggcaatgaaaaggacgacgatgaagctgatactgttggttgctgtacgctgaaggttgataatgttacatgtatgcctccaaatcagattcagtttgactttctgggtaaagattcaataagatactttaacaccgtagaggttgaagagcttgtgtacaaggcaattgagggtttccgtgctggaaagaagccaggacaagatctatttgacaagattgatacatctaggctaaatgctcacttgaaggatctaatgcctgggctcactgcaaaagtgttccgtacatataatgcttccataacattggacggaatcgtgagttgaaaagaatcttgtcttactgggtttcatttgtccattctttcgaacttcttaggtttgcatggacacttagagctgttgatgtagatgtattgttttcttctggtattttaatgtttataaatgttacttgttctacagctcaacttaatgcaaataagtaattggtcaatgttacacagtttgtcatatcttcattttttgcacctctgattttttactttctgatagcatgtaagcatgctattgacttattacgcatgttcatgtgactatcctgttagaatggtctaagtgtatatatacttgtgctgatattacagttgcatgaagaaacagaagatggaactgttttagaaaaaatcgctgtctatcagcgggcaaacaaagaggttgccatcatctgtaaccatcagcgtagtgtctcgaaatcacatgagtcccagatgactagaatgaacgaaaagattgatgagttgaagtcccagatggaggagctgaaagcagacttgaacaaagcaaagaaagggaagcctctaggctatgattcagaggggaagccaaagaggaacttggctcctgaagcgtaacacatctcaaccaccaatacattttgttgtattttgtttttgtgtgttagaacaaagagtagggtaggcaacctgacaaaacctacttgcaggattcaaaagaaggttgcaacacttgaaggcaagatagagaagatggagatggataagaggataaaagaggatctgaagacagttgcgcttggaacgtcaaagatcaactatcttgatcctagaataaccgtggcatggtgcaaacgccatgaagtccctattgagaagattttcaacaaatctctcctcgcgaaatttgtatgggcaatggacgttgacccggaattcagattctaggagaccattggctaccatgtgccagccagtttggtccagtttccagcccttctccctggacactaattgcagctaggaaaggaaagagctcggtgtttgttttttcaaagtccccaccccccctgctcgtggaacgaaggaaagcacccgtcattctctttgtaggcccttcttttttttttcttttggttcaattgcgctaagttcaatatgtattctgctgagaaatctgagctcgtttgagaacggttggacattgaattcatagtgagttttaatcttgaatatagatgacttgttgagggatga

SEQ ID NO: 122124 - DNA, 2178 bp, Zea Mays
gcaatcgttagaagagaaatcaagacagatgacaacacacctcttgcacaaaggctgaaaatgggagagtcttcgaaaggcaagtcatctgcaaagagtgtctttaagaagagtcctgcttctgtgaagaaggacatcaagaaaatgaaagggaaagggaaattaaagaagaacatgaaaaattctcagttctcaaagataatgaaggtcccccctggatctggtggaggaaagaaatggactaccttggagcacaatggtgttattttccctcccccatacaagcctcatggtgtcaaaatgctttacaatgggaaacctatcgatctgacaccagaacaagaggaggttgcaacaatgtttgctgttatgaaagacacagactatgcggccaagccaacattcattgataactttttcactgattggagaaaagttcttggtaaaaatcatattattaagaacttcgagctttgtgatttcacaccaatatatgaatggcacctcagagagaaggagaggaagaagcagatgacaacagaggagaaaaaaacattgcgggaagacaaattgaaacaagaggagaagtacatgtgggctgttgtagatggtgttaaagaaaaggtcggaaatttcagagtagaaccgcctggcttgttcaggggacgtggagaacatccaaagatggggaaacttaagcgccgcattctaccaagtgatattacaataaatattggaaaaggagctccagtccctgagtgcccgatacctggagaaagttggaaagaagtcaaacatgacaatactgttacatggttggccttttggaacgatccaattaacccaaaggatttcaagtatgttttcctggcagcaagcagctcactgaaggggcaaagtgacaaagagaagtatgagaagtccagaaaattgaagggtcatatacaaagaattcgtgagaattatacaaaagatttcaaaaacaaagatgtgacgaggaggcaaatagctgtggcaacataccttatcgataaactagcccttagggctggcaatgaaaaggacgacgatgaagctgatactgttggttgctgtacgctgaaggttgataatgttacatgtatgcctccaaatcagattcagtttgactttctgggtaaagattcaataagatactttaacaccgtagaggttgaagagcttgtgtacaaggcaattgagggtttccgtgctggaaagaagccaggacaagatctatttgacaagattgatacatctaggctaaatgctcacttgaaggatctaatgcctgggctcactgcaaaagtgttccgtacatataatgcttccataacattggacggaatcttgcatgaagaaacagaagatggaactgttttagaaaaaatcgctgtctatcagcgggcaaacaaagaggttgccatcatctgtaaccatcagcgtagtgtctcgaaatcacatgagtcccagatgactagaatgaacgaaaagattgatgagttgaagtcccagatggaggagctgaaagcagacttgaacaaagcaaagaaagggaagcctctaggctatgattcagaggggaagccaaagaggaacttggctcctgaagcgattcaaaagaaggttgcaacacttgaaggcaagatagagaagatggagatggataagaggataaaagaggatctgaagacagttgcgcttggaacgtcaaagatcaactatcttgatcctagaataaccgtggcatggtgcaaacgccatgaagtccctattgagaagattttcaacaaatctctcctcgcgaaatttgtatgggcaatggacgttgacccggaattcagattctaggagaccattggctaccatgtgccagccagtttggtccagtttccagcccttctccctggacactaattgcagctaggaaaggaaagagctcggtgtttgttttttcaaagtccccaccccccctgctcgtggaacgaaggaaagcacccgtcattctctttgtaggcccttcttttttttttcttttggttcaattgcgctaagttcaatatgtattctgctgagaaatctgagctcgtttgagaacggttggacattgaattcatagtgagttttaatcttgaatatagatgacttgttgagggatga

SEQ ID NO: 122125 - DNA, 83 bp, Zea Mays
ttgtatgtctgcccgaccataacatctctccctgccttcaagaacagctcgtcctcgagctgatgatctgggtactggtcctt

SEQ ID NO: 122126 - DNA, 2904 bp, Zea Mays
gcaccttcggcttttgctccgacgccggcgagcgagaccgagaggcgaggcgagccaccgcggcggcggttgcagcgatggggtccatgacgatcggtgccaagtacaagaccacgatcaaggaccccggcaccccgggcatcctccgcatgaacggtgataggttcaccttcacccctaatgatccacgatcggcaatgaagttcaatgttgatttccgaaccatcaaaggtcacaagttcaataaagtagagggtaacaaagcagcattattgaacctttcaaaagaagacaaggctggaggctacatatttgagtttgacaatgttggtaaccgtgaccaatgtcgagactttgtagctagggttttaggcaaacatcaagggatagtgcctcctagaccaactgtggctcctgaaaactcagttgcttctgctgctctggaacaactcagtgccgcagaagtggagagacgggttaaactgttgcgagaagacagcgaattgcagaaattacataagaagtttgttcttggaaatattctgcaagaatctgaattttgggcaacaagaaagaatttacttgatgatgaagcaaataagagatcaaaacaaaagccaggtttcaagagtgcacttgtagatattaggccaacaactgatggtcggacaaacaaggttactttccagatcacacctgagatgatacatcaggtccacctttccactctgcttctttatcatgaactaatacatatatactgcttggtatcatcaatttttctgttgtctcaactgttataattgcaaaatttatatactatgctgtaaaatgaaaaagtacgtcattttgtgggttatggagtttctgaacattgttgttggtaaaaggcttccaaagatttttttaatctgtatatgaatgtgtagcaagccctgtaccttctctgtctccttagtagctttcatgcatgatgcagtgatcctctattgaactatttttatatcttgaaattatagttttcattgtgtgcatgtgactttgatgcgaccaaagggaattaatgagcaggaacactgaaaattatgcttccaccctagccagttaggttaggcttagtccatagctgcaaagaccatcttacttgctttgaaccctacctgcgctgggccctgtttgctcaagaatactccattatgcctgaggcatatattattcatggaaacaggtgctgaattctatgattctatatctgatgtactttcaacttgttaacaccatatatcctattttacagatttttgcagaaaagcctgctgtccgtagagcatatttagattttgttccaaaaaagatgtcagaaacccgattttgggaaaaatactgtagagctgagtatctagtcaggacaaaaaacactgcagcagcaacagctgaggcagctggagatgaggaattagctatcttcctgaagaatgatgatatactggccaaggaggcaaagttgaagataaaacgagtcgatccaacattagacatggaggcagacactggagatgattacattcatcttccggaccatgggattcaccgtgatggtagcaaagagacagtcgatgctgacagtgagttggcgaggaggacgctgtctcaggacctgaaccgtcatgcagctgttgttcttgaagggagatctcttgatgttgagtcaactgatccaaagactttagctgaagcccttgcaagatccaagaaagaaccaccttctacttctaatgttgatgatgataatcatgagagactaatgaaggtggctagaatgacagagatagaggatctgcaagctccacgaagtcttctgtatgcaccactttgtataaaggatcctagagaatattttgattcccaacaagcaaatgctctgagatctctaggtggcagcaatggtggaagaaaagcccatagttgcagcttgagcactgaagaagtgttccatcatttaatggatcaaatgtcttctgttaaagttaataggcttaactgtccgattgttcagtctgatatggctcttaaggttcttaatgaattaaacgaagggatttctcgttcaaggagacttaacctcaagaatcctcaagaaggtctccttggtcagctgcctcaacatacacgggacgagcttatggatcattggacggctatccaggaattgctacgccatttttggtcatcgtatccaataacaagtgcagtactttataacaaggttcaaagagttaaagaagctatgacacagatatatcaaaagctgcagcttataaaggaattggcacagcctgatgtaagacatgaaatatctcggctagtaaagcccatgactcaggccttggatgccgccttcaaccatgatttggaacagcagcagaaatcgtccaaggccggaaacaggcacaacgggttttgagcctaggagattggtttgaccaacacatgaagcgagacggacggacgggctgtgcccgaatacacaagagctgctgcagaattcttgaggcttgtacgattttgttcttttccccctcgcttattaatagctgccggaggagcctgctgtttgcagccccggaatcttgatctatgcatcaattgtttgtaactgactgaatagtgaagactcgcaacgcatgatgctgccgacgcgttgtacttgtacatggcagtaatggctattcgagatagaaccaaagctttaccattttgttttatgcggttcgttcatggccgccgggcagaattatacacatgtatgtcatctacagcgttacaaacataccattatatatcacagtaccgatgacatctgtcagctcccacccaggagttgctgtaaactatatggatccc

SEQ ID NO: 122127 - DNA, 2320 bp, Zea Mays
gcaccttcggcttttgctccgacgccggcgagcgagaccgagaggcgaggcgagccaccgcggcggcggttgcagcgatggggtccatgacgatcggtgccaagtacaagaccacgatcaaggaccccggcaccccgggcatcctccgcatgaacggtgataggttcaccttcacccctaatgatccacgatcggcaatgaagttcaatgttgatttccgaaccatcaaaggtcacaagttcaataaagtagagggtaacaaagcagcattattgaacctttcaaaagaagacaaggctggaggctacatatttgagtttgacaatgttggtaaccgtgaccaatgtcgagactttgtagctagggttttaggcaaacatcaagggatagtgcctcctagaccaactgtggctcctgaaaactcagttgcttctgctgctctggaacaactcagtgccgcagaagtggagagacgggttaaactgttgcgagaagacagcgaattgcagaaattacataagaagtttgttcttggaaatattctgcaagaatctgaattttgggcaacaagaaagaatttacttgatgatgaagcaaataagagatcaaaacaaaagccaggtttcaagagtgcacttgtagatattaggccaacaactgatggtcggacaaacaaggttactttccagatcacacctgagatgatacatcagatttttgcagaaaagcctgctgtccgtagagcatatttagattttgttccaaaaaagatgtcagaaacccgattttgggaaaaatactgtagagctgagtatctagtcaggacaaaaaacactgcagcagcaacagctgaggcagctggagatgaggaattagctatcttcctgaagaatgatgatatactggccaaggaggcaaagttgaagataaaacgagtcgatccaacattagacatggaggcagacactggagatgattacattcatcttccggaccatgggattcaccgtgatggtagcaaagagacagtcgatgctgacagtgagttggcgaggaggacgctgtctcaggacctgaaccgtcatgcagctgttgttcttgaagggagatctcttgatgttgagtcaactgatccaaagactttagctgaagcccttgcaagatccaagaaagaaccaccttctacttctaatgttgatgatgataatcatgagagactaatgaaggtggctagaatgacagagatagaggatctgcaagctccacgaagtcttctgtatgcaccactttgtataaaggatcctagagaatattttgattcccaacaagcaaatgctctgagatctctaggtggcagcaatggtggaagaaaagcccatagttgcagcttgagcactgaagaagtgttccatcatttaatggatcaaatgtcttctgttaaagttaataggcttaactgtccgattgttcagtctgatatggctcttaaggttcttaatgaattaaacgaagggatttctcgttcaaggagacttaacctcaagaatcctcaagaaggtctccttggtcagctgcctcaacatacacgggacgagcttatggatcattggacggctatccaggaattgctacgccatttttggtcatcgtatccaataacaagtgcagtactttataacaaggttcaaagagttaaagaagctatgacacagatatatcaaaagctgcagcttataaaggaattggcacagcctgatgtaagacatgaaatatctcggctagtaaagcccatgactcaggccttggatgccgccttcaaccatgatttggaacagcagcagaaatcgtccaaggccggaaacaggcacaacgggttttgagcctaggagattggtttgaccaacacatgaagcgagacggacggacgggctgtgcccgaatacacaagagctgctgcagaattcttgaggcttgtacgattttgttcttttccccctcgcttattaatagctgccggaggagcctgctgtttgcagccccggaatcttgatctatgcatcaattgtttgtaactgactgaatagtgaagactcgcaacgcatgatgctgccgacgcgttgtacttgtacatggcagtaatggctattcgagatagaaccaaagctttaccattttgttttatgcggttcgttcatggccgccgggcagaattatacacatgtatgtcatctacagcgttacaaacataccattatatatcacagtaccgatgacatctgtcagctcccacccaggagttgctgtaaactatatggatccc

SEQ ID NO: 122128 - DNA, 2353 bp, Zea Mays
gcaccttcggcttttgctccgacgccggcgagcgagaccgagaggcgaggcgagccaccgcggcggcggttgcagcgatggggtccatgacgatcggtgccaagtacaagaccacgatcaaggaccccggcaccccgggcatcctccgcatgaacggtgataggttcaccttcacccctaatgatccacgatcggcaatgaagttcaatgttgatttccgaaccatcaaaggtcacaagttcaataaagtagagggtaacaaagcagcattattgaacctttcaaaagaagacaaggctggaggctacatatttgagtttgacaatgttggtaaccgtgaccaatgtcgagactttgtagctagggttttaggcaaacatcaagggatagtgcctcctagaccaactgtggctcctgaaaactcagttgcttctgctgctctggaacaactcagtgccgcagaagtggagagacgggttaaactgttgcgagaagacagcgaattgcagaaattacataagaagtttgttcttggaaatattctgcaagaatctgaattttgggcaacaagaaagaatttacttgatgatgaagcaaataagagatcaaaacaaaagccaggtttcaagagtgcacttgtagatattaggccaacaactgatggtcggacaaacaaggttactttccagatcacacctgagatgatacatcagatttttgcagaaaagcctgctgtccgtagagcatatttagattttgttccaaaaaagatgtcagaaacccgattttgggaaaaatactgtagagctgagtatctagtcaggacaaaaaacactgcagcagcaacagctgaggcagctggagatgaggaattagctatcttcctgaagaatgatgatatactggccaaggaggcaaagttgaagataaaacgagtcgatccaacattagacatggaggcagacactggagatgattacattcatcttccggaccatgggattcaccgtgatggtagcaaagagacagtcgatgctgacagtgagttggcgaggaggacgctgtctcaggacctgaaccgtcatgcagctgttgttcttgaagggagatctcttgatgttgagtcaactgatccaaagactttagctgaagcccttgcaagatccaagaaagaaccaccttctacttctaatgttgatgatgataatcatgagagactaatgaaggtggctagaatgacagagatagaggatctgcaagctccacgaagtcttctgtatgcaccactttgtataaaggatcctagagaatattttgattcccaacaagcaaatgctctgagatctctaggtggcagcaatggtggaagaaaagcccatagttgcagcttgagcactgaagaagtgttccatcatttaatggatcaaatgtcttctgttaaagttaataggcttaactgtccgattgttcagtctgatatggctcttaaggaaatcctaactacctaaatggtatgggcctaggttcttaatgaattaaacgaagggatttctcgttcaaggagacttaacctcaagaatcctcaagaaggtctccttggtcagctgcctcaacatacacgggacgagcttatggatcattggacggctatccaggaattgctacgccatttttggtcatcgtatccaataacaagtgcagtactttataacaaggttcaaagagttaaagaagctatgacacagatatatcaaaagctgcagcttataaaggaattggcacagcctgatgtaagacatgaaatatctcggctagtaaagcccatgactcaggccttggatgccgccttcaaccatgatttggaacagcagcagaaatcgtccaaggccggaaacaggcacaacgggttttgagcctaggagattggtttgaccaacacatgaagcgagacggacggacgggctgtgcccgaatacacaagagctgctgcagaattcttgaggcttgtacgattttgttcttttccccctcgcttattaatagctgccggaggagcctgctgtttgcagccccggaatcttgatctatgcatcaattgtttgtaactgactgaatagtgaagactcgcaacgcatgatgctgccgacgcgttgtacttgtacatggcagtaatggctattcgagatagaaccaaagctttaccattttgttttatgcggttcgttcatggccgccgggcagaattatacacatgtatgtcatctacagcgttacaaacataccattatatatcacagtaccgatgacatctgtcagctcccacccaggagttgctgtaaactatatggatccc

SEQ ID NO: 122129 - DNA, 3594 bp, Zea Mays
atgccagccatccaagggaagaaggacgacaaaccctctgaagaacctagtagcatcgtcgcagatggcaagcaaagcgcggcagcggcagcggccgaggacggcggatcgttccccttcttcggcctgcttcgctacgcggacgcgctggactggctgctcatggtgtcggggaccgtgggctccttcgtgcatggcatggggccttccatgtcgtactacatactggggaagactctcgacgttgtcgggagcaacatgggcgacaacgaggccacggtccatgaactcactaagttgattccgtatatgtggatgttagcagttgttacccttcctggtgggatgattgaaaccgcaagctggatgtatacaagccagaggcagatgacacgcatgcggatagcatatctgagatcagtgctcagccaagatatcggagccttcgacaccgacttaaccactgcaagtatcatggctggggcaaccaaccacatgagtgtcatacaagacgcaattggtgaaaagatgggtcacttcatgtcaaacttctccacgttcttagttgctatcattgttgccttcgcgtgctgttgggaggtcggcctgctctccctgctagttgtgcctatgctcctcatggttggagcatcttactcgaaggcgatgatcagcatgtccctcgcaagaacatctttcgtgtctgaagcgaccgctatcgtagaacagaatcttgcacatataaagaccgtattctcattcgttggagaaaagtcagctatcaaatcctttagcaattgcatggatagtcaatacgcgttaagcaagaaagagtcgatggtgaaaggtctaggtttgggaatgttgcagatcgcaacattctgttcgtattcactggtaatctgggttggagcggttgctgtgactgaaggaaaagcaaaacctggtgaaacgattgcagccgtcattaatgtcctctccggtgcaatatatatatcaaatgcagcgccagatctgcaggccttcagccaagccaaagttgctgggaaagaagtgtttaaggtcatcaaaagaactccagcaataagctacgaatcgaagggaaaattcttggaaaaggtcactggagatatagaaatacgggaggtgcacttcacatatccatcgcgtgaggataagccagttctccaaggtttctcactggctatacaggcaggcaatattttagctcttgtggggagcagtggatgtggaaagagcacagtgatttctctggttcaaaggttctacgatcctatgtcaggtgtggttctcattgatggccaagacattaaaacactcgacctgaagttcctgcggacaaatataggttcagtctcccaagagccatcgctattttcaggtaccatcatggacaacttgagaattggcaaaattgatgcaactgatgaagagataattgaagcagccaaaacagctaatgtgcactcttttatatccaatcttccaaaccaatatgcaactgaggtaggagaaagaggtttgcaattatcaggaggtgcagacaagatcgttctcgtggagaatggaacagtggctcaatctggaacacatgaagaattgctggagaaaagtgcattctactcaagcgtatgcagtatgcaaaatctggagaaggattctggcaagagcaagacaagatttgttgatgaggtcaaagaagaaaaggaaaaagaagaatcacaagaaggaatttacaacaaactatcattcacttctagtgaacaagaaaaaacactagaactgaccgagcaaccaaagcaagcaatcagaaagagaacatcaactttctatagaatattccttagaacttttaaactgctcccggagaaggttctgctgggctccatagcagcagcaatctctgggatctcaaggcctgtatttgctttctacatcatgacagttggcgtagcatacattaaaccagatgcaaagagtatagtcagcacgtactcagtaattttattcctcattggactgctcacgtttttcagtaacatgttccagcactatatatatggcctagttggtgaaagggcaacaaataacctaagggaggccctcttttcaggttggtttgaacaaccaaagaacagtgtcggctttctaacctcacgtattgtcggtgacacctccatgattaaaaccatcatatctgatcggatgtctctcattgtccagtgtatctcttcaattttgatagccacagtgttgagcacagtagtgaactggaggatgggtcttgttgcatggactttgatgccattccatttctttgctggccttgtacaagtcaggtcagcaaaaggttttgccactgacttctctgcatctcaccgggagttaatttccctcacttcagaggctgtcagcaacattcgtacagtggcatcgtttgttcaggaagacgaaatactaaagaaagcagacttatcactccaagaaccaatgcgtacaagcaaagtagaaagcatcaagtatggtttagtacaagggacttccctctgcttgtggcatatgacacatgccatcgcattgagtttcactatcatgctacttgataagaacctatcatcattcaaagactgtgtacgatcgtaccaagcgtttgcaatgacaatatcttccatcacagagctatggtccttgatccctctagtcttgtccgctatcacagtattagaccctgcacttgacatacttgacagagaaacacagattgtaccggatgttccagaagtgcattctgaagaaagattagcaggtgacattgtgtttcaagatgtcagtttcagctacccctcaaggccagaagtgatcatactagatggcttcaatctagatattgaaccagggcaacaggtggcattggtaggcccaagtggttcaggaaaaaccacagtgttggctcttctgctaagattctatgatccttgcgaaggacgggtgcttgtgaacgataaggatatccgggactacaatctgagatacctgagaaagcacataggactagtgcagcaagagccaatgttgttcaacttgtctattagagagaacattagctacggaaatgaaggtgcatcagaatcagaaatagttgcggctgcaatggaggcaaacatccatgagttcatcagtggcctgtcaaatggatatgacactgtggttggggacaaaggaagtcagctttccggaggtcagaagcagcggatcgccattgcaagagctatactaaagaggcccaccataatgctactggacgaggcgacgagcgctctagatggccaatctgagatggtggtgatgagctccctggtagcaaaagagtggagaaacaatggcgagctttcaagcaagatcacaagcatcacgattgcacatagattgtccacaatcacgagtgcagaggtgattgtcgtgatggataaaggtcaggtggttgaattgggaagccatgaagcattaatctcggcaaaagatggtgtttactcgagactgtacagtatgcaaagcaaaggagtcaaagactaa

SEQ ID NO: 122130 - DNA, 334 bp, Zea Mays
ggtggagttctcggactcgttgatcccggagcagtgcaaggccctggaggttgttctcccgcccaagccagtaacatagtacactgacatggagctggacgagtgcgaggatacgatgccctatgatgtgaacatcaaagaggagatgcggaggcggcagcagcagcaccaggaggcctacgacgaggatgatgatgtgccaggcggtgggcagagggtgcagtgcgcccagcagtaggcagcttgcggcaaatttgttgtttcgctttgggcgactattgagtttacccgcttgtattggtcttatgatacttcggttacaagagtgcagtat

SEQ ID NO: 122131 - DNA, 1957 bp, Zea Mays
agctgaggagaaaggacttgattgggaagccgcctcagaaaggacgctcctccccaaccccatccccgcccccgcgggctcggaaagctgaggagaaaggacttgattgggaagccgcctcagaaaggacgctcctccccaaccccatccccgcccccgcgggctcggcgggttgcgctgctgcggtgcggtgagacgcgggggcacggacggaggccgccactggatctcgtggagctggcccgcgccgagagcgatcatgagctctagaggccttgtccgcctcccggtttcctgtagtgctgctgttgatggagtcaatggatgcctcacctacagtacatgtcgttcaagaaactactactatcagtattctcataccactaacttgcaaatttcaccagtagaccagatgcctttgcctcggaaattaaagaaatcaattcagcgaaacgcttactttttaacccagaagaggaagctcgtaccacactgttcatcagaccttagtacctcctgcagaggagtgcccaactatttatcaatcaatgttttgcaagaccaatcaaatacaaaacagggagctattcgtaaagcgcttgtcattttgaatcctaattctggattccgcagctctcgggatgttttctaccagaaagtgcaatcaacattgaaggcttcaagatggaagtcattgaaacagcatatgccgggcatgcaaaggttctttcttctactgttgacctcaaaaaattccctgatggtattatatgtgttggtggcgatgggatcgtcaatgaggttttgaatggattacttagtagagacgattttgacgtggcaattcgatttcccattgggataatacctgctggttctgataattcattggtgtggactgttcttggcatcagggatcctgtttctgcggcaatcgctttagctaagggggatttcacaccaatagatgtgtttgccgtaaagtggatccaagctggagtgactcattttggtttgacagcttcctactatggtttcgtagctgatgttctgcaactgtcagaaaagttccgcgtgcagctcggtcccttccgttacgttgttgctggccttctgaagtttctttcattaccccagtacagatttgaggtggactatctcccttcatcgctgcaggggagaagttctgaatcaagaccactggctgaaaaacgtcacgaacagctttctgatgacggcaaggttaggagaggcacacagaccaacggtaggatcaaagacgactgggttaccaggaacggggagtttcttggcatttttgtttgcaatcacttctgcaagcctgcccaggggttactttctcctgttatcgcaccgaaagcgcggcacgacgacggcagcctggacctgattctcgtccatggaagcggcaggctgagactgttttgcttctttgttgcctatcagctctgctggcatcttctactcccctacgtggaatatgtcaagataaaagaagtgaaggttaggccagttggcagtacccacagtggttgtggcgtcgacggtgagcttcttgatggagagcgcggtgctgaatggcagtgctcgctgcttccagcacaaggcaggctgcttggccaggatcccggtgctttcaactagttagggctcgttcggttagctctcaatccatgtagattgagtgagattagatgagtttgaatcccaaacaagtcaaacttcttaattttttccaatcccatctaatccatgtgtattgggaataaccgaacaaggcttactgttttatctgtccagcagtaccgaggttgttggttaatttcatgataagagagcgagtttcagcaatgttcgtatactgattatacagtattctgtctctatagattgtagctgcagcagtctgaacaactgattttaatttttggccact

SEQ ID NO: 122132 - DNA, 1952 bp, Zea Mays
agctgaggagaaaggacttgattgggaagccgcctcagaaaggacgctcctccccaaccccatccccgcccccgcgggctcggaaagctgaggagaaaggacttgattgggaagccgcctcagaaaggacgctcctccccaaccccatccccgcccccgcgggctcggcgggttgcgctgctgcggtgcggtgagacgcgggggcacggacggaggccgccactggatctcgtggagctggcccgcgccgagagcgatcatgagctctagaggccttgtccgcctcccggtttcctgtagtgctgctgttgatggagtcaatggatgcctcacctacagtacatgtcgttcaagaaactactactatcagtattctcataccactaacttgcaaatttcaccagtagaccagatgcctttgcctcggaaattaaagaaatcaattcagcgaaacgcttactttttaacccagaagaggaagctcgtaccacactgttcatcagaccttagtacctcctgcagaggagtgcccaactatttatcaatcaatgttttgcaagaccaatcaaatacaaaacagggagctattcgtaaagcgcttgtcattttgaatcctaattctggattccgcagctctcgggatgttttctaccagaaagtgcaatcaacattgaagctttcaggcttcaagatggaagtcattgaaacagcatatgccgggcatgcaaaggttctttcttctactgttgacctcaaaaaattccctgatggtattatatgtgttggtggcgatgggatcgtcaatgaggttttgaatggattacttagtagagacgattttgacgtggcaattcgatttcccattgggataatacctgctggttctgataattcattggtgtggactgttcttggcatcagggatcctgtttctgcggcaatcgctttagctaagggggatttcacaccaatagatgtgtttgccgtaaagtggatccaagctggagtgactcattttggtttgacagcttcctactatggtttcgtagctgatgttctgcaactgtcagaaaagttccgcgtgcagctcggtcccttccgttacgttgttgctggccttctgaagtttctttcattaccccagtacagatttgaggtggactatctcccttcatcgctgcaggggagaagttctgaatcaagaccactggctgaaaaacgtcacgaacagctttctgatgacggcaaggttaggagaggcacacagaccaacggtaggatcaaagacgactgggttaccaggaacggggagtttcttggcatttttgtttgcaatcacttctgcaagcctgcccaggggttactttctcctgttatcgcaccgaaagcgcggcacgacgacggcagcctggacctgattctcgtccatggaagcggcaggctgagactgttttgcttctttgttgcctatcagctctgctggcatcttctactcccctacgtggaatatgtcaagataaaagaagtgaaggttaggccagttggcagtacccacagtggttgtggcgtcgacggtgagcttcttgatggagagcgcggtgctgaatggcagtgctcgctgcttccagcacaaggcaggctgcttggccaggatcccggtgctttcaactagttagggctcgttcggttagctctcaatccatgtagattgagtgagattagatgagtttgaatcccaaacaagtcaaacttcttaattttttccaatcccatctaatccatgtgtattgggaataaccgaacaaggcttactgttttatctgtccagcagtaccgaggttgttggttaatttcatgataagagagcgagtttcagcaatgttcgtatactgattatacagtattctgtctctatagattgtagctgcagcagtctgaacaactgattttaa

SEQ ID NO: 122133 - DNA, 102 bp, Zea Mays
acagctaattttgaaggatgtttatataacatttgtttcagtttcttaagcaatacatggcattcagaaatttacaattacaccatttgggcattgcctggc

SEQ ID NO: 122134 - DNA, 150 bp, Zea Mays
atgggatcgaggaatgggaacgtggtacacggtacactgctaaaaataggttttaacactacgggaacgagattgttcccacgttcccggaacggaacgaacgttctcggaacgaggaacgtggacacattcctagttcccggttactaa

SEQ ID NO: 122135 - DNA, 453 bp, Zea Mays
atgaagatgtcccggtcctccagcaacctcttcatgcagcagcagcaacggccggacgcgacgactctggcgggtgccgccagcgacgaagacgaagacgtgggcggctgccggtcgctcaatgccaacggctcgatgctgaaaaccaccttcctgcagccaccacctacgtctcccctgcgcacctccaccgtctcgccggcgaggatgtgcgtggtcctcgggtcggccccgcgcgagatgacgcaagtgtactcctcgcagtcggcgtactcgctcgcctgtttgcctagggttccgcggccccctcgccgtcctcctcccggccgccttgcctttgtcgcccttcttcttcttcttgagggactcgagcgccgcgaacacgttgccggtgttgagcttgacctcctccgccgctccgccccgcctcccgccgcccaccataccccctga

SEQ ID NO: 122136 - DNA, 615 bp, Zea Mays
gaagggaggagagcaaagcgagcagcacgggatccaaaatccaccacgatgagcagcggtggcgggcggaaggcggcgggccccggcggcgaggaggcggaggtggaggcgcttatccgggcggcgcaggacgcggtgctcctgaagctcaaggcgaactcccacctcgtctcctcggcctccagccctccttcgctcgacgcggcggaactcgatcccctggacagcgacctcgcccggcgcttcgacgcgctcaagtcccgcgcggcggcgccgaatccgaagccggccggagccggagccgcccttggagggatggatgagctggaggcgcggttcgctgcgctgaagggggcggcggggcccgagaaggacacgagggtgaggctggaggatctgggaggggagtcgtcggaggacgaggcggacgaggtggacaaggtgatgcgctgggccatggatgccgcgcggctcgacgtcgctgcggcaggctccggcggccaggcgacgaagcgcgctgacggcgacgaggaggaggaagagaaggatgagaagagcagcgttgcacagattggatttctttgttcttctggtgttttgtcccgttacaattag

SEQ ID NO: 122137 - DNA, 2333 bp, Zea Mays
aaaagtaccctcgatctccaaccggttcaccactcaccactcaacagccctcccctctcatcatctcctccccccgcacctgcacagcctctcccgccgcgcgccgcctccgcgcgccatccagacgccagtgcgcgtcgcggtccgctgcccgcggtgcgttcaccctctccccatctcccttttcctctcccgcgcgcccttccctacgcgcctccgccggcgacgagtgcccaccagctggtgttacacacgtgtaacaatacattacatggcgctagtacagttcaatggtgccttgcttccccaactcggtgaaaaacctcggccgctatcctcgccgcctgcagttgcaagggctacctatgccgatgcaaggttcctggcaccgaaaaccagttcaagaggtagaggtaaacacctgctatcacctagttatagtttgcattcacagacctcttctgaacaaataaaccatgtaccgtcgtcaagatctcgccagaaaaggggctcaagttttgtcgtcagagctgaagctgatttctataacgtacttggtgtctcaagaaatgctagtaaatctgaaatcaagagcgcctatcggaagcttgctaggagctatcatccagatgtaaacaaagatcctggtgctgaacaaaagttcaaggaaatcagcaatgcttatgaggttttgtctgatgatgagaagcgatcaatctatgataaatatggagaagcaggtctgaaaggtgctggcatgggcacaggagattactcaaacccgtttgatctattcgagtccctgtttgaaggattcggtgggatgggtggaatgggtggcggtcgtgctgcccgtaacagaccaatgcaaggtgatgatgagagctacaatctggtactcaatttcaaggatgcggtgtttggtgtggagaaagagattgagataaccagattggaaggctgtaacacctgcgatggaagtggtgctaagccaggtacaaaggcaacgacatgtaaaacttgtggaggccagggccaggtggtctcctccacaagaacaccactcggaatattccagcaagtctccacctgcaatacctgtggtggcaccggcgaattctccacgccttgcaacacctgttcgggcgatggccgagtgcgaaggacaaagaggatcagtctaaaggttcctgccggagtggattctggaagcaggctgagggttcggtctgagggtaatgctggccggagaggaggccctcctggggacctttatgtcttcattgacgttctctctgatcctgttcttaagcgagatgggacaaacattctctacacgtgcaaggtttcttacatcgacgcaatccttgggacaaccgtcaaagtccccactgtcgatggaatggttgacctcaagataccttcagggactcagccaggcacaactctggtgatggccaagaaaggtgttccgcttcttgggaagtcgaatgctcgcggagaccagcttgtgcgcgtacaggttgagatcccgaaacggctgagcagcgacgagaagaagctagttgaggagcttgcaaacctgaacaaggctcagacagccaatagcaggagttgatttattgagcaaatctttttaggacaccatgcttgtggtcacaggcaattttgatgcaaattgcagtgatgaaaagagttggtagtggttcaacacttctacgaactaaagaggtacactggagcgaagcgtgtcatgctcatgccatatctgtggcctcgtttctaagctattggaaaccaagtcggtgaccactggacgtcttgcaatagcttaacatatacgactttattagccattttttgttacacggctttttgtattcttgagagccttaggcaaaatctctggtagtggaatcaggcttagacttttacatttcttgcagaaatgctgcaccattgatggaatatgtaagctgcaccatggaaatgtgactgcagttttatggtttgtgatgcgtcgggggtttattgttttgctcttcaagttcgttatctaaacaatacatttatttgcccctggcaggggcagctgttgatttgaagctgcctctgcgcagagcaggtgcatttttgtggtctaggcagctgttgacatgaagctggttgttctgtgtttgcaactacttgggactctaatttaattttgttcctgtatgatgtttttaataaaatcgcaaatgctttttttctgcatgcacatgcgtaaaggcatccgcatgcacagtaggcattacaaatccggttggaaaggacgaaaatttgtccaaaaa

SEQ ID NO: 122138 - DNA, 3308 bp, Zea Mays
ctcccttcatgccaccaccaccgccagcatggccgccaccacgggcacctcgtcctcgccgccgcagctcccggtccacggcggcctcctgctcctgctccctctcctgaccattacctccgccgcgtcgtcggcgccgctgcccctcctcgcgctgctctccctgaagtcgtccctgcacgacccggccggcgcactgcgcgcttggacgtacgccgctgcggcgtccgcgggcgccacgcggtcgctggcgccgccgtggtgcgcgtggccgggcgtgtcctgcgacccggccacgggggacgtcgccgggctcgacctctcccgccgcaacctctccggcaccgtctccgccaccgcggccaggctgctggcccgcacgctgacgtcgctcaacctcagcgcgaacgcgttcgcgggggagttcccgccgtcggtgttcctgctccggcggctccagtcgctcgacgtcagccacaacttcttcaacggcacgttccccgacggcgtcgccgggctcggcggctcgctcgccgcgctcgacgcctacagcaactgcttcgtcggctcactgccgcgcggcctcggcgagctccgccggctgcagagtctcaacctcggcggcagcttcttcaacgggaccatcccagccgagatcggccagctccgttcgctgcggttcctgcacctcgccgggaacgcgttaaccggtcggctcccttcggagctcggcggcctcgcgtcgctcgagcagctcgagatcggatacaatgcatacgacggccgcattcccacggagctcggcaacctgacgcagctccagtacctcgacatcgcggtcgccaacatgtccggcccgctgccaccggagctcggcaagctcgcgcggctcgagaagctcttcctgttcaagaaccggctcgccggtgccataccgccgcagtggtcccgcctccgcgcgctgcaggccctcgacctgtctgacaacctgctcgccggcaccatcccggcaggactcggggatcttggcaatctcacaatgctgaacctcatgagcaacttcctttccggtacaatcccgaaggcgatcggcgcgctgccgagcctcgaggtgctgcagctctggaacaactcgctcaccggacggctgccggagtcgctcggcgcgagcgggcggctcgtccgggtggacgtgtcgaccaactccctgtccggcccgattccttccgggatgtgcatcggcaaccgtctcgcccgcctcatcctcttcgacaaccagttcgactggaccatcccagcgagcctggccaactgctcgtcgctctgccgagtccggctggaatctaaccgcctgtctggcgagatcccggtcgggttcggcgcgatccgtaatctgacatacctggacctgagctccaactcactcaccggcggcattcctgctgatctcgtggcttctccgagcctcgagtacatcaacatctccggcaaccccgtcggcggcgcgctcccgaacgtgtcgtggcaggcgccgaacctgcaagtgttcgcagcgagcaagtgcgccctgggcggcgaggtcccggcgttccgcgccgcggggtgttcgaacctgtaccggctggagctggcagggaaccatctcactggtgccatccctagtgacatcagcacctgcaagcggctggtgagcttgaggctgcagcacaatcagctcagcggcgagatcccagcagagctcgccgccttgccgtcgatcactgagatcgacctgtcctggaacgagctcagcggcgtcgtcccgccgggcttcgctaactgcaccacgttggagaccttcgacgtgtccttcaaccatttggtgaccgctggctcgccgtcagcgtcgtcaccaggcgcccgtgaggggaccgttcggcgcaccgcggcaatgtgggtttctgccgtggcagtgtccttggcggggatggtggcgctcgtcgtcaccgctcgctggctgcagtggcgcgaggacggcactggcgcgcggggggttggtagcaggggcggcgcaggtgcacgccccaacgtggtcgtcggaccgtggcggatgaccgcgttccagaggctcgacttcaccgccgacgacgtggcgcggtgcgttgaggggagcgacggcatcattggcgccgggtcatcggggacggtgtaccgcgcgaagatgccgaacggggaggtcatcgcggtgaagaagctgtggcaaccgtcggcgcagaaggagggaggagctcaggcgccggaggagccaccaaagcggaaggacgaggcagacgcggacgacggcaacaggagcatgctcgccgaggtggaggtgctgggtcacctccggcaccgcaacatcgtccggctgctggggtggtgcaccgacggcgaggcgacgctgctgctctacgagtacatgccgaacggcagcctggacgagctcctgcacggcgccgtgtgcaggggcaagcaggcggggctggactgggacgcgcgccaccggatcgccgtgggcgtcgcgcagggcatgagctaccttcaccacgactgcgtgccggccgtggcgcaccgcgacctcaagcctagcaacatcctgctcgacgcagacatggaggcgcgcgtggcggacttcggcgtcgccaaggcgctccagggcgccgcgcccatgtccgtcgtcgccggctcctacggctacatcgcaccagagtacacgtacactctccaagtagacgagaaaagcgacgtgtacagcttcggcgtggtgctgctggagatcctgatcggccggaggtccgtggaggcggagtacggcgagggaagcaacatcgtggactggacgaggcgtaaggtcgccgccggcaacgtgatggacgcggcggagtgggcggaccagcagacccgcgaggcggtgcgggacgagatggcgctggcgctgcgggtggctctgctctgcaccagccggtgcccgcaggagcggccgtcgatgagggacgtcgtgtccatgctgcaggaggtcaggcgcggccggaagatactagctcctgggatggccaagaagcagccaaagattaattaacaaccaccacgtgtgttacgacttgcgtgtaggtgtattattgtactactactcactatgaaatcgtacttactttgtcgtgtagtcatgtcatgtataatgtcttactagatcactcatcactgtatgagtacattaaagtttcaagactttcagaggtcatatttcaatggtaggcagaccgagttgaaatatatattccagttttctt

SEQ ID NO: 122139 - DNA, 528 bp, Zea Mays
cgcctcctgtctgctctggctagaagaactcccttggaaaagggaacgtgcaccagggagtatcctgctagccgcattaagaaaccccctagcagtgcgctttgttttcctaccactcatcctgttcaatagaaaaacattagggcttgttcggttattcctaatacacatggattggatggaattggaaaaaattgagaagaagtttgacttgtttgggattcaaatccatccaatcccactcaatccacatggattgagagctaaccgaacaagcccttaaaggtattagctccataaaattaatttttaattttaaaaaatcaaataatacatcacataaaatgaaaattatgcattacacatcaaaattcatcggaatcacgatcaaggagtcttcttcgatccaaagctcgcaatgtggcttttttgttccttggattttgtttttgtttcggtgcaacacactcatcaacagtgacatcgtaacggtctccgactagtgagttcagtgcaacaccctcatcg

SEQ ID NO: 122140 - DNA, 345 bp, Zea Mays
atggcgtatggacgaagatcaccgaccacttccttgataataactccagctgttccatgcaactcaagtaggaactccacaacatccaacaaaggtgacctctctattgttgcctattattctcaactcctcaggacactcggcgtggctctgatagaatatgagaagcctatcaaggacagggccctcgttcaccacctcatccacgacctcaatgccaagtatcatgtcttgcgcctgatgctactggccatgctcgtcttctcagtgttcatagaggctcaagatcaactcattgtcactgagaacaccttcacctccgacttgccaaaaaatctaggatga

SEQ ID NO: 122141 - DNA, 1599 bp, Zea Mays
agctgtccgatcagtcacctcctcttccggcctcccgccgccgttgccgaattcttcttcttttatgccgctccgctgccgctcctacttttgccttgcatgtccaccgccgcggcgccgccgtcactctccctgcaccgcccagcggtgaccgccaccagcaccagagtagccgccgcgccgccgccgagcaacgccgcgcacctcgccagcctcgacaagctcttccgcaaccgcggcggcgtcgagagcgcggcctcgcccgccgtcgccgctgccgcaccgcagaggaggcagcagccgctgctgcggctcccgtccttcttcacgcggaccggggcgaggggccaggagccggcgcccacgctgtcgccgcgccggctcgagcgcctgctccagcccgtggcgcccgacgggccgtcgccgcgcggggacatcgcggcggcgtggcgccgcctgcacggcgaggacggctggcgcggcctgctcgacccgctgcacccggacctgcgccgcgagatcgtgcgctacggcgagttcgtcgacgccgcctacggcgccttcctgtcccgccccgacgccgagccgggccgccgcgcgcgcgtcccgctccaggacgccgcgtaccgcgtcaccgcgccgctcttcgccacctcctccgtcggcctccccacctggctggccgccgccgcgccgtgcgccgggcagcggaccagtctcgtcggctacgtcgccgtctgcgacagccccgccgagatccggcggatgggccgccgcgacatcgtcgtcgcgctccgcggcacctgcaccgtcctcgagtgggccgagaacgtgcgcgccggcctcgtcccggccacccactgtgacaccgccgccgccaccgcaccggacacatccaacgccaaggtcgaatgcggcttctggaacctgtacaagaccgccggcgaccgctccgcgagcctgtcggagatggtcgtgtccgaggtgcggaggcttctcgacatgtacaagggcgaggaggtgagcatcacggtcaccgggcacagcctaggcgccgccctggccgtgctcatcgcggacgagctctccggcggcatcgccggccgcgcgggggcgccggtggcggtgttctcgttcggcgggccgcgggtgggcaaccgcgcgttcgcggcgcgcgtggaggcccgtggcgcgcgcgtgctccgcgtcgtcaacgcgcacgacgtcgtgccgcgcttcccgcccggcctcccgctcccgggctacgccgacgtcggccgcgagctgcgcctcgacagccgcgcgtcgccgtacctccggccggacgccgacgccgcgtgctgccacgacctggaggcgtacatccacctcgtcgacggcttcctcggctcgcattgcccgttccgggacaacgccaagcgcagcatcctgcgcctcgtcaagaaccagggcggcaacgtcaagcagctctacatgagcaaggccaaggacatgcgcatccagctcgacggcggcggcgccgccgacatggccgggtctatgcttggtcgcgtcgacatgcctggcgcggcgagcaccgtggtggagtgtgtgcactga

SEQ ID NO: 122142 - DNA, 1450 bp, Zea Mays
accgcttgtacatttcccctcccccccccccacacacgccggtgcgtcgcctgcgcaatcatacttcctaccctccccacctcttccacggttccaccccgtccctctcctctcgagaagcacccgcaccatacatcttccggcgcccgacgcggacggcgagccgctgctgctgctgccgccggaggaggaagggcaccagggccagcgggtgcaggaggaggaggagcagcagcaggccgccggccgcttggggctgtgccacatgccgctctggggggccgccgcgtccgcggcgccggcagccgacggcgacgccgcccgcgcgccgtcgggatccggcggcggcgtcaaggtgatccggtcgctgctccccacccggcgccgcctccgcctagatccgcccgccaagctctacttcccatatgagcccggcaagcaagtccggagcgcggtcaggatcaagaacatcagcaagtcccatgtggccttcaagttccaaacgactgcaccaaagagttgcttcatgaggcctccgggcggtgtgcttgctccaggggaaagcatcatagcaacagttttcaagtttgtggagcatccggagaacaacgagaagccgatggacaagtgcaaggttaagtttaagattgtcagcctgaaagtcaaagggccggtggagtacgtccctgaactgtttgatgagcagaaggaccaggtcgcggtcgagcaaatattgcgggtagtattcttggatgctgagcgcccaagcccacaaatggacaaactcaagcgccagctagctgaagcagaagcagcccttgaggcacgcaagaaacctccagaggacaatggtccccgtattgttggtgaaggccttgtgattgacgaatggaaggaacgaagagagaggtaccttgctcgccagcagatcgaaggtgttgattcggtgtagacacgaggcagccctgtaaactatgcagaatgaacataccgttttatgggcacgcactccagctgtcaaatggatttggagcttgattttgcgaaggttcggatttggagcaatcaagcaacaatgaggcttttgtgtatttggggttcacgctgaacttctgtcctgggtttgggtgtgtgtagataagcagccactgcttggtaatagtaatagtacgtccttcagccatgtactcgtgttgtggaatgtgggtctctatgtgaatgtgatgcattctctagctgctgtcccgtcaacattaaaagtgtaattgtaatgtcaaaaggcacactccaaggtgattcagtggtagttctgccatcatgttagttgttacagtaattcttccatcacttgtttgtacaactcatacatgtcatgccaccctgagatttatgtcattcagttgtcagtcagttgcttggtcccaatgaaacattctggactaggcttagc

SEQ ID NO: 122143 - DNA, 1258 bp, Zea Mays
cccacctcttccacggttccaccccgtccctctcctctcgagaagcacccgcaccatacatcttccggcgcccgacgcggacggcgagccgctgctgctgctgccgccggaggaggaagggcaccagggccacagcaggccgccggccgcttggggctgtgccacatgccgctctggggggccgccgcgtccgcggcgccggcagccgacggcgacgccgcccgcgcgccgtcgggatccggcggcggcgtcaaggtgatccggtcgctgctccccacccggcgccgcctccgcctagatccgcccgccaagctctacttcccatatgagcccggcaagcaagtccggagcgcggtcaggatcaagaacatcagcaagtcccatgtggccttcaagttccaaacgactgcaccaaagagttgcttcatgaggcctccgggcggtgtgcttgctccaggggaaagcatcatagcaacagttttcaagtttgtggagcatccggagaacaacgagaagccgatggacaagtgcaaggttaagtttaagattgtcagcctgaaagtcaaagggccggtggagtacgtccctgaactgtttgatgagcagaaggaccaggtcgcggtcgagcaaatattgcgggtagtattcttggatgctgagcgcccaagcccacaaatggacaaactcaagcgccagctagctgaagcagaagcagcccttgaggcacgcaagaaacctccagaggacaatggtccccgtattgttggtgaaggccttgtgattgacgaatggaaggaacgaagagagaggtaccttgctcgccagcagatcgaaggtgttgattcggtgtagacacgaggcagccctgtaaactatgcagaatgaacataccgttttatgggcacgcactccagctgtcaaatggatttggagcttgattttgcgaaggttcggatttggagcaatcaagcaacaatgaggcttttgtgtatttggggttcacgctgaacttctgtcctgggtttgggtgtgtgtagataagcagccactgcttggtaatagtaatagtacgtccttcagccatgtactcgtgttgtggaatgtgggtctctatgtgaatgtgatgcattctctagctgctgtcccgtcaacattaaaagtgtaattgtaatgtcaaaaggcacactccaaggtgattcagtggtagttctgccatcatgttagttgttacagtaattcttccatcacttgtttgtac

SEQ ID NO: 122144 - DNA, 888 bp, Zea Mays
cgccgtcgcgtgtggcctttgcggggcgtgcttctggccgacggtgacggtggacggtaacggcggcggctcggccaaggcagccacattcacgacacagcaatagagacaagatatctgtatgctagcaatcgggagcttggtgatcattttcagacaaaacgtgatggtgaaaatggtgttgatgcatcaattgaaaagagaacaccaaagctacttcagtttacctttcaagagttgaaatctgccacgcttaactttaggccagacaacattcttggggagggtgggttcagttatgtattcaaggggcggattgagccaaacagcacagctcctgcaaaacctggcacaggggttactgtggcagtcaaaagtttgaagccagatgcgcctcaaggtcatagagaatgggtgacagaagttaactttatgggacagttgcatcataaacaccttgttaagctgattggatattgtattgaggatgatcaaaggttacttgtatatgaattcatggcacggggaagtcttgaaaatcatcttttcagaagggctcttcccctaccttggtccaacaggatgaagattcctctaggtgtcgcgaaaggactagccttcctccatggaggtcccaaacctgtaatttacagggattttaagacatcgaatgttcttcttgatgtggagtacaacgcaaaactatctgatttcggtttagcaaaagctggtcctcacggtgataaaactcatgtatctactcgggttgttggcacctatggttatgctgcaccagagtatgtaatgacagatgcgctttttttgagaccaagccctaagggcaacaatggggatgaccagcgtcttggtttatcaagaggaagttaa

SEQ ID NO: 122145 - DNA, 372 bp, Zea Mays
atggtgctacctaacttgtctaccatgttcaatagtttaagagctgctggtggtagagctaatggtgatggatccaagaagatagagaacataagaaggtccattactcatgcaaatgctaagagcaagagtgaaaagttccctaccctcacatcaaggtgtgggttcaaagtgacaaatgtgaatgctagcaacatcaaatgtgtgctctatttaatggaagaaggaatgatggaggacaagctgaatatacttgccccaattgctacgtcgaggagatcaaatgtgggctgcgcaaacctttaccacaacggcaaagagcttgattcaagctgcactttcaatgacagcgatgctaccaagactccatga

SEQ ID NO: 122146 - DNA, 903 bp, Zea Mays
ttcttcttgcttcatgactgcatcctggttggagaacaaataccctgctgtacttttgcctctatttattcaccaattggtcatcgaacaggtcgcagctcacaacaccatttgtaagcaggtgatcttccattcagcaaccttctcagctggtacaagtccgagagcacgctacaatggcgaggatgggagttgctattctggtctgcgtagtggttttagccctggacgtcacagctggcatactaggaattgaggcgcaggctgctcagaacaagactaagaaggtgacgatcctcttcatccagtgcgagaaaccagtgtacagagcgtaccagcttggcctcgcagctgcagtgctcctggtagttgcccacgcggtagccaacttcctcggcggctgtgcctgcatctgctcccagctggagttcatcaaggcgtccatcaacaggaagctggcagccaccaccataattctctcatggatcgccctgattgccggattctcgctgctgctcgccggcgccatgtccaactccaagtccaagacgtcgtgcgggttcactcacggacacaccttggccctcggagggatcatgtgcttcgtccacggcgggatcaccgtcgcctactatgtcaccgccactgccgcagcgcacgaggttccttagtcgagcattttgcccgagagatcaccgctgttctttccttggtccagctgctccttgcttttctccttgtgatttgacatctacaagcatccgaagatatatgccttttttccgttcaaaaaaaaagaatacatgcctgttgtttgatttgttgctattgctgaggaaaaaacatgtcaaagttagcgtcagtgtgccacagtaatttaatttacgttgttgagaaagacaa

SEQ ID NO: 122147 - DNA, 2203 bp, Zea Mays
aattccaattttctcctacctaccactgccggactgcggaatccggaggtatatccgcaaaacccaaggagaacccccacccgcttggctcgccatggacctgcagctcgcgccaccaccccacgctaacctccgcctcctcccccgccgccccaaggccgcctccgcctccgcctccacctccgctgtcaccgccgcgccctccacctcctgctcctcttccgcggagcccctcaagccccgcccacgcctcccgcgccagagccccgcgcccaggcccaggcccaaccccgctcgcctccccgccctctgcgctgccatcgagcggcacgcggcggctggccgccacgctgaggccctcgacctgttccgcctcgcccgcgcggcggctcccttcacgcccctcccggcccgcacctaccacgccctgctccgcgccgctgccgcgctgcgggagcccggcgcggccgcggcggtggcctggcacgtcgagagctccggcttcgagctcgacctgtacacgcacaaccacgtcctgaggatgtacctcgagtgcgggatgctcgccgaggcgcgccaggcgttcgacgggatgcccgaccggaacggcgtcacgtgggggatcatgatgggcggcctcgtcgaccggggccgcccccgggccgcactggcgctgttccgggagatgtgggcggaggccggtggggacgctccgccgaggtccctcgtggtggctgtccgtgcggctgcgtcctcggggtcggcgcgagccgggcggcagctgcactgctgtgttgtcaaggcgggggcgtgtggtgacgtcgctgaccggtacctgacgtgcgcgctgctcgacatgtacagcaagtgtggccggattgacgaggcgaggcgggtgtttgacgggctgccacgtcctcatcggacgactgtcgtggcatggaactccatgttggcggcgtatgttctccatggccacagcgaggaggcgctggagctgtaccaaaagatgtgcagcactcatgtcgccatggaccagttcacgttctcgaccatgctaggggtgttctctaggctggggctgctggagcacgcgaagcaggcgcacgctggcttgatccagagaggattgccactggacattgttgggaacacggcgcttgtggacctgtactgcaaatggggaagaatggaggacgcgagaaatgtcttcgagaggatgcctaggaggaacttgatctcatggaacgctctgatagctggatacggctaccatggcatgggagataaggcgatcgagatgttcgagaggctgatagctgagggtgctgtgccaaaccatgtaacttttctggcagtgctgaatgcatgtaggttttcaggtcttgttgacgaagggaagaggattttccagttgatgactgaaaatctgaggataaaaccacgggccatgcattatgcatgtgttattgagctttttggtagagaaggtctacttgatgaatcctattcaatgataagaagagcaccgttcactccaactgcaaacatgtggggagccttgcttactgctagcaggatccacaagagcatgcatcttgcaaaattttctgccgagcagctattggcaatggaacctgagaaaataaacagctatgttgtgctcctcaacttgtatgttagctctggtagacaggacagcgcctgcaaggtagttgaaacactgaagaggaaaggtttatatattggtaatgcctgtagctggatcacagtcaagaaaacggatcacaggtttttctttaaagatactttgcatccacaaagtgctgaaatatacaggaggctggacacattaatgaaggaggtacgagaagctggctttgttgctgaggagaatgaattgctccctgatattcatcctgacgagcaaaagatatcaagagcttaccacagtgagagactggcaattgcttttggccttatcagcacagccccacagactcccttgaggatcagtcaaagccatcgtttgtgcagtgactgccacaatttaattaagtttgtgtcaagagttaccaagagggaaatcattgttagggatggtagcaggttccaccactttaaactcggggtctgctcttgtggtgactactggtaattgggtatgtcgaactatctaatggttttattttctgacactaaa

SEQ ID NO: 122148 - DNA, 1948 bp, Zea Mays
aacacaaaatgtgcatcgccgccgccaccatatagaaccacttatcatgaaccgccgccatcacatccactgcctcaactagtgttaccacctatggttcattgttgtgtctgcttcttgtagcactgttggtctacaaacattcatatttctctcaacatctggcacagcatgccgccttccaaagcacgccgaaagaggtcacttcgtgatatcactgccaccgttgccactgggactgttgccaactcgaaacctggctcatcatcgacgaacgaggggaagcaacaggacaagaaaaaggagggtccacaggaaccggacatcccaccattaccgccggtggtggtgaatatagtcccacgacaaggattaggatgtgaagtagtggaagggctactcgtgcctagtcggaagcgagagtacaagcccaatagcaagtatactgtgggaaatcacccgatctatgccatcgggttcaatttcattgacatgcgctactatgatgtctttgccatcgccagttgcaatagtgtgataatttaccgatgccttgagaatggtggttttggtcttctacaaaattatgttgatgaggataaggatgagtcattctacactctaagctggaccatcgatcaagttgatagctcaccgctgttggtggccgcaggaagcaatcggatcattcgggtcatcaattgtgctaccgaaaagttagataagagcttagttggccatggtggttcaatacatgagataaggactcatgcctcgaagccatcactcatcatttctgccagcaaggatgaatctattaggctatggaatgtccatactgggatttgcatcttagtctttgcaggggctggaggccatcgacatgatgtgttgagtgttgacttccaccctaccgaggttgggatttttgcaagttgtggcatggacaatactgtgaaaatttggtcaatgaaagaattttggatatatgttgaaaaatcatattcatggactggccatccatcaaagtttccaacgaggaatatccagtttccggtcttgactgctgcagtacactctgactatgttgattgtacaagatggcttggtgacttcatcctatcaaagagtgtaaagaatgcagttttgctttgggaaccaaaaccagacaagcgtaggcctggggaggggagtgttgatgttcttcagaagtacccggtgccaaagtgttcattatggtttatgaaattttcatgtgatttttactccaaccagatggcaataggcaacaataaaggcgagatctatgtctgggaagtgcagtccagcccgcccgtcttaattgaccggctgtgcaaccaggaatgcaagtcgccgataaggcagaccgcagtgtcattcgacggaagcacgatccttggagccgccgacgacggcgcgatctggcggtgggacgaagtggaccctgctgcttccagctccaaacctgatcaagctgctgcgcccgccgccggtgtcggtgccggtgccggtgccgacgccgacgccgacgcctgagcgagaggaccgtcgccgcccgccggttcacatcgatcgtactccgtgctggttgattagctttacccattggtatgttttggttcagagtcgccagatctagtgtgtggctgaacgttgaatgttaggatgctgctgtttgttatgctctgagtcttgagttcactttgttaatttgcaccgtggatgagatgaataacttgacgttgcaactttgcatcccatatatgccgtaaatctgccgtctgttgtttgttctgcgttgtctagaattagtggagatgctgtgctggatggaatgtatgctagtctattaaaccgtgctccactctgagataatcgaccaacttgtcttattattgaaagaactgtggaaaaaaccaaaaaaaaa

SEQ ID NO: 122149 - DNA, 1845 bp, Zea Mays
ggtctaggcggatccggtggagccaccaacccctccttgccggaagtcctagcgccaccagtttatatacccgccgcctatctaccccccacccctcgaattgttcccatggccgccgccattcgcggaagccctacccgcgccgccgcgccgacccagccgcgcgcggtgctgcgggtggcgtcgtccgccgcgccagcctcctcctcctccgcccgcccgcgcaggggcgccgtggcagaggccgcaatgcagccggccaaggcggtcgccgcggaggcggcctcccccgctgccgcgctggagatggggaacggcgccgcggtcgcggggctgcagcggcccgacgccatggggaggtttgggaggttcggcggcaagtacgtccccgagacgctcatgcacgcgctcaccgagctcgagaacgccttccacgcactcgccaccgacgacgagttccagaaagaacttgacggtattctcaaggactacgttggacgtgagagccccctttacttcgcggagcgcctgacggagcactacaagcgcgctgatggcacaggcccgctcatctacctcaagagggaggacctcaaccacacgggcgcccacaagatcaacaatgctgtggcgcaggccctgctcgccaagcgacttgggaagcagcgcatcattgccgagacaggggctggccagcacggtgtcgccaccgccaccgtgtgcgcccgtttcgggctgcagtgcatcatctacatgggcgcgcaagacatggagaggcaggcactcaatgttttccggatgaagcttcttggtgcagaggtgagggctgtacattctgggacagcaaccctgaaggatgctacttcagaggctatccgtgactgggtcactaacgtggagaccacacactatatattgggctctgttgctggcccgcacccgtacccgatgatggtgagggagttccacaaggttatcggcaaggagacccggaggcaggccatgcacaagtggggtggcaagccggacgtcttggtcgcttgcgtcgggggtggatcaaacgccatgggcctgttccacgagttcgttgaggatcaggatgtgaggctgatcggagtggaggcagctggccatggcgtagacaccgacaagcatgcggcgactttgacaaagggccaagttggagttctccatggatctatgagctatttgctgcaggacgacgatgggcaagttatcgagccccactccatcagtgctggactggattaccctggcgttggacctgagcacagtttcttgaaggacatcggacgcgctgaatatgacagcgtgactgatcaggaggcactggatgctttcaagcgcgtctcccgtctggagggcatcatcccggccctggagacctcccacgcgctcgcctacctggagaagctgtgcccgaccctgccggacggcgtgagggtggtgctgaactgcagtgggcgaggcgacaaggacgtgcacaccgccagcaagtacctggacgtctagaacaccggagaggagggctgaatgagagttttgcatgccaatttttgaagggttcagcagttatgtagcgctgttttttttgtgataagagtacaaataacctggaagctaaagctagtattgttgtagccgccctttgttctttttttgagttgttgttctgtatctgaaatgttttggagtgcataatgatcaataaacaagtaaataccaaaatctttgtccatgatttgtttggccgaggagtggagaagaataaagtggctctatccattttttggatgttcggttttcaataaaataagagtggag

SEQ ID NO: 122150 - DNA, 2006 bp, Zea Mays
ggctcagctcaacgagcggctggcctcccacgcagtccgcctgcacgatccggtgggcccggcgcgacccgcccgtccccgcgcccggtccaccagcgccagcgcaagcgaggcagcccgggcgcggagccctgtccgtgcaccgggtctaggcggatccggtggagccaccaacccctccttgccggaagtcctagcgccaccagtttatatacccgccggtgggtacccgcgcctcacaccaccacgcagcagtgcgcccagccagcctatctaccccccacccctcgaattgttcccatggccgccgccattcgcggaagccctacccgcgccgccgcgccgacccagccgcgcgcggtgctgcgggtggcgtcgtccgccgcgccagcctcctcctcctccgcccgcccgcgcaggggcgccgtggcagaggccgcaatgcagccggccaaggcggtcgccgcggaggcggcctcccccgctgccgcgctggagatggggaacggcgccgcggtcgcggggctgcagcggcccgacgccatggggaggtttgggaggttcggcggcaagtacgtccccgagacgctcatgcacgcgctcaccgagctcgagaacgccttccacgcactcgccaccgacgacgagttccagaaagaacttgacggtattctcaaggactacgttggacgtgagagccccctttacttcgcggagcgcctgacggagcactacaagcgcgctgatggcacaggcccgctcatctacctcaagagggaggacctcaaccacacgggcgcccacaagatcaacaatgctgtggcgcaggccctgctcgccaagcgacttgggaagcagcgcatcattgccgagacaggggctggccagcacggtgtcgccaccgccaccgtgtgcgcccgtttcgggctgcagtgcatcatctacatgggcgcgcaagacatggagaggcaggcactcaatgttttccggatgaagcttcttggtgcagaggtgagggctgtacattctgggacagcaaccctgaaggatgctacttcagaggctatccgtgactgggtcactaacgtggagaccacacactatatattgggctctgttgctggcccgcacccgtacccgatgatggtgagggagttccacaaggttatcggcaaggagacccggaggcaggccatgcacaagtggggtggcaagccggacgtcttggtcgcttgcgtcgggggtggatcaaacgccatgggcctgttccacgagttcgttgaggatcaggatgtgaggctgatcggagtggaggcagctggccatggcgtagacaccgacaagcatgcggcgactttgacaaagggccaagttggagttctccatggatctatgagctatttgctgcaggacgacgatgggcaagttatcgagccccactccatcagtgctggactggattaccctggcgttggacctgagcacagtttcttgaaggacatcggacgcgctgaatatgacagcgtgactgatcaggaggcactggatgctttcaagcgcgtctcccgtctggagggcatcatcccggccctggagacctcccacgcgctcgcctacctggagaagctgtgcccgaccctgccggacggcgtgagggtggtgctgaactgcagtgggcgaggcgacaaggacgtgcacaccgccagcaagtacctggacgtctagaacaccggagaggagggctgaatgagagttttgcatgccaatttttgaagggttcagcagttatgtagcgctgttttttttgtgataagagtacaaataacctggaagctaaagctagtattgttgtagccgccctttgttctttttttgagttgttgttctgtatctgaaatgttttggagtgcataatgatcaataaacaagtaaataccaaaatctttgtccatgatttgtttggccgaggagtggagaagaataaagtggctctatccattttttgg

SEQ ID NO: 122151 - DNA, 1443 bp, Zea Mays
gcgcgacccgcccgtccccgcgcccggtccaccagcgccagcgcaagcgaggcagcccgggcgcggagccctgtccgtgcaccgggtctagcctcctcctcctccgcccgcccgcgcaggggcgccgtggcagaggccgcaatgcagccggccaaggcggtcgccgcggaggcggcctcccccgctgccgcgctggagatggggaacggcgccgcggtcgcggggctgcagcggcccgacgccatggggaggtttgggaggttcggcggcaagtacgtccccgagacgctcatgcacgcgctcaccgagctcgagaacgccttccacgcactcgccaccgacgacgagttccagaaagaacttgacggtattctcaaggactacgttggacgtgagagccccctttacttcgcggagcgcctgacggagcactacaagcgcgctgatggcacaggcccgctcatctacctcaagagggaggacctcaaccacacgggcgcccacaagatcaacaatgctgtggcgcaggccctgctcgccaagcgacttgggaagcagcgcatcattgccgagacaggggctggccagcacggtgtcgccaccgccaccgtgtgcgcccgtttcgggctgcagtgcatcatctacatgggcgcgcaagacatggagaggcaggcactcaatgttttccggatgaagcttcttggtgcagaggtgagggctgtacattctgggacagcaaccctgaaggatgctacttcagaggctatccgtgactgggtcactaacgtggagaccacacactatatattgggctctgttgctggcccgcacccgtacccgatgatggtgagggagttccacaaggttatcggcaaggagacccggaggcaggccatgcacaagtggggtggcaagccggacgtcttggtcgcttgcgtcgggggtggatcaaacgccatgggcctgttccacgagttcgttgaggatcaggatgtgaggctgatcggagtggaggcagctggccatggcgtagacaccgacaagcatgcggcgactttgacaaagggccaagttggagttctccatggatctatgagctatttgctgcaggacgacgatgggcaagttatcgagccccactccatcagtgctggactggattaccctggcgttggacctgagcacagtttcttgaaggacatcggacgcgctgaatatgacagcgtgactgatcaggaggcactggatgctttcaagcgcgtctcccgtctggagggcatcatcccggccctggagacctcccacgcgctcgcctacctggagaagctgtgcccgaccctgccggacggcgtgagggtggtgctgaactgcagtgggcgaggcgacaaggacgtgcacaccgccagcaagtacctggacgtctagaacaccggagaggagggc

SEQ ID NO: 122152 - DNA, 687 bp, Zea Mays
atgcctgccactgtatacttggagctgctcgacaggagcgccgttggtggcattgcaaacatcatctatagtcctcgggcacaacaaggtcagtcgatgacgccaacgcagatcatcccatcggatccggtattcttgacgaatatccctgaagatgggaaacccacgctgctggtgcaaacaccgccggtaaaatatgtagctgactatggaaatccagcctgtgggcggagcagcaacagccgcagcggcagggccagggtcaggaggcgctgcggcatcagcataggggcgagggtggagtcgagcgagacgacgtggtcggcgcggcgccaggtcgtggcgtgcgctgctgtttgccggtcgtggcgcgaggtcaccaaggaggtggtgaagacgctcaaggagtgcggcaggatcaccttccccatgtcccttaagcaggttggcactctctgccttttctctactttgatgatcaatcacatgttgaggacctccatggcacctatgttggtgtgggttgtgccgcctcatcgtgaccgtcatcgattgggcctccgagggtacttgcagatagatgtcggctctatggacgaacactcgaccaagtcagatgaggagtatgagggcctagccatgcgcgacgtgatggctactggtccaacaatgagcagcaagctgtga

SEQ ID NO: 122153 - DNA, 1028 bp, Zea Mays
ttggggtagacactttttctcctaaacttggtaatacaaaaattataggggtctagacatctttgctattatgaaatttcatgattttagcccagcaggtctgggagatatggaatttagaacttgcccagaaggtcaggcggtgatgccaacacagatcatccaatcagatccggaatgcctgccactgtatacttggagctgctcgacaggagcgccgttggtggcattgcaaacatcatctatagtcctcgggcacaacaaggtcagtcgatgacgccaacgcagatcatcccatcggatccggtattcttgacgaatatccctgaagatgggaaacccacgctgctggtgcaaacaccgccggtgattccagtgtaggccccattgcccttggacgggatgtcgctgactacaatggagtacctttctttcttcgatgtcagtcgattatgtttactatggaatatggatgttctcttatatgcttggttgtagctcctgacacgcagttgtagcttggctcgaggcgggcatcagcgacgacaaacatcctgctcaatttgttgtatgataaatactgcgaaaggatgctggtgtttcataagatgaccgtgcagctcatgaaaatccagagggtggagtcgagcgagacgacgtggtcggcgcggcgccaggtcgtggcgtgcgctgctgtttgccggtcgtggcgcgaggtcaccaaggaggtggtgaagacgctcaaggagtgcggcaggatcaccttccccatgtcccttaagcaggttggcactctctgccttttctctactttgatgatcaatcacatgttgaggacctccatggcacctatgttggtgtgggttgtgccgcctcatcgtgaccgtcatcgattgggcctccgagggtacttgcagatagatgtcggctctatggacgaacactcgaccaagtcagatgaggagtatgagggcctagccatgcgcgacgtgatggctactggtccaacaatgagcagcaagctgtga

SEQ ID NO: 122154 - DNA, 1021 bp, Zea Mays
ggtcatgttctctggcaaacacacacacacacacacacacacacacacacacacacacacacacacacatcgtttgctgttgcaacaaagctctacacgggaagacaggctgcttctttcttgcagtctctggtccagaagcctgaagaaatggcgtcacccaacgtcacattccttgccttcttcgtggccctcgcactatcggcgcttcacaccgacgcagcagcggcggcggcagaaaccttgcaccataggagcgacacatggtgcgtggccaagccgtcgacgcaggaggcggcgctgcggggcaacctggagttcgcctgctccgagagcgactgcggcgccatccagggcaccggcggctgcgcccagcccgacagcctgctgtcgcgggcgtcggtggccatgaacgcctactaccaggcccgggggaggaactcgtggaactgcttcttcaacggcaccggcataatcaccatcactgaccccagccttggcacctgcaaatatgcttgacacgacgggctgctctgctgctgctgtgctcaacggacgatgaataaggctgtaggggaatgatgcatcttttccttctctttgttttgttattgtgtctgtgtgagtgagcagggagtatccttgcagaaccaaccagtatcatgtctgagcactgtagagagaatttccgtgcttttatttcccaaatacagttctactccaggccagtggctggaggggagtttaggaacaggtgtcaaaggtctcaggtactgaacaaataccaaaatatagaagaaatcccagaggaagccaggtgccagatccattaaaaagaccaccacagttcaagcgtcagttcatactaaaaacattgcaccttacaaccaaaggtcaatcctaatccggcagatcagaatgccagtacacaaaagctaagtgcaattattgttcactagtagagaatctgaaaagacggaatataaagttcttactggcattcatcctccacactccatcc

SEQ ID NO: 122155 - DNA, 2837 bp, Zea Mays
tgttagagacgttcttttaataaaatgctgtctcttatatttttttattattctcttataatagtccttttaagatacaagacatttacgtacatgccctgataacgtgaagcgagcaagcctgggctgcagccgatgggctgtatcacgcagctgcagcccaaacagctgaccgattgccgcggacccgggaggccgggacgagagagacgagcgggagcagccagcacgacgcctgtccgtctcccactctccctccattcccctctctctccttctgcctgtgcccgcgtggccgcgtctgtacctgtacggccaccaccatttccatctccgatccccgcgaccccccacccagccccaggcgcccgggctagatccggcccacgcgtctactcgccccctccggctccccttctccctaatcgccgtcgccgggggtgcaggcacagcggctgcttccgctcccgctcccgaggggggaggcggcaggcaatggcgcggcgggtgcggccgtcgcacctggtgctggcgctggcggcagcctacctcctcctcatctccctcaagttccgccgcgtgctggacctggccgccaccgacctcgcggacgaccctgccgccgccgccgccgccgccttctcttctccgtcctccgccgaccacctgcccccgcccgggtccgcttccgccacctcctcctcctcctcgcccccgttcccggtccgccccttctggcaccgctacgaccgtgtgtccctccccgacctcgcgtcccgcaaccgctccgcgctcgaccgcatggccgacgacgcctgggcgctcggcctcaccgcctgggaggacgccgccgccttcgcaggggacccctgggcgctgctcgccgccgccacctcccgcgcctccgacgccgccaagtgcccctccgcggtctcccagcgcgcgcggggccgggtcgtcttcctcccctgcggcctcgccgcgggctcgtccatcaccgtcgtcggcacgccgcgcgcctcgcacagggagtacgtgccgcagctcgcgcggatgcgccagggggacggcaccgtcatggtgtcccagttcatggtcgagctccagggcctgcgcgccgtcgacggcgaggacccgcccaggatactccacctcaaccccaggctcaggggggattggagccagcaccctatcctcgagcacaacacctgctacaggatgcagtggggcgccgcgcagcgctgtgacggcacaccacccgacgacaatgacgacaaagtcgatggattccccaaatgtgagaagtggatacgcaatgacattgttgacaccaaggagtccaagacgacatcatggttgaagagattcatcgggcgtgcgaagaagcctgcaatgacatggccattcccctttgtagaggagaggctatttgttctgactatacaagctggagttgaaggtttccacatttatgttggtggtcgacatgtgacatcttttccttatcggccggggttcactcttgaagatgcaacagggttatttgtcaagggtgatgtagatatacattcagtttatgccactgcacttccttcgtcgcatcctagtttttctcttcaacaagtccttgagatgtcagaaaagtggaggtctcggccactaccaaaaggccccgtttcccttttcattggaatactgtctgcatcaaatcatttcgctgagcgcatggctgtgaggaaaacatggatgcaggctccagaaataaagtcttctgaagccgtggctcgattctttgttgcactgaattcaaggaaagaggtcaatgtaatgttgaagaaagaagcagaatactttggagacattgtcattttgccatttatagaccgctatgagctggttgttcttaagacaattgctatctgtgagtatggggtccagaacttgactgctgcaaacatcatgaaatgtgacgatgatacatttgtgagagtagatgtagttctgagacgcatcaagttgaacaatggtgacaaaccattatatatggggaaccttaacctcctgcacagaccattgaggactggaaaatgggcagttacagacgaggagtggcctgaggatatctacccgccatatgcaaacggaccaggctatgtgatttctggtgacatagcaaaattcatcgtgtcacagcatgccaatcagagtttaagactgtttaagatggaagatgtaagcatgggcctatgggtcgagaagttcaattcaacaaatcctgtccaatattcccacagctggaagttctgccagtacggttgcctggagaactactacacggcccactatcagtcacccaggcagatgctgtgcttgtgggataagttggttcgtggtcaggcatcctgctgtaactacagatagcagagtgaagctaaggattgctggacgctgtcctctcttcatcataccccagccaggtttaggtcggttggctggtattttctttttcgacacaatcgtagtgtagtaggtgttgttgctcctccgtcgctggctcaaatatgagctaaatgcatgggtgtgcggtaggagattgaagatttaggaagccccaaccagttggttattgttttttacacgatctgtattggtccaattgtggcgttggcgtccttgttcttgtaattgatccaattttgatgtagtaggccagattagagggaatattccagatcagatgtacgtctccgttcttttcttatagtaataactagacacaatttgccctgatctttgcaggatcctgctgctgaagatcttcagcattcctttgtttt

SEQ ID NO: 122156 - DNA, 253 bp, Zea Mays
ccctgtttgcagaaggaagtagagtaagaaaaacccatccaatgagagaattccttcagaagatttatgtagaaatggttgattggctggaactaacttttgataaagattaacaagtgaaaacccttcacaagagaaaatagagacttacatgtgatccttaactctcagaggagaagacatgcgtaaatcatatattgatatctacagaaaatcccaaaaatgttgatgcatactgagattaaaaaaataa

SEQ ID NO: 122157 - DNA, 1655 bp, Zea Mays
gctaattccaatgccaatggcggccgcggccggcgcgggcgagcccggtccgcgctcggaggcgtccggcttcggctctggctgcaaccacctgcggccgcggcgggggcctccacccccgtccccgtcccccgcggtcgggaagccgctcccgtccggcgcggtgccgcgccatgcgttcgtgttcgacggcgagggcggcttctccgaggcaccctggggccttgcggtgtccggttcgtcgcggaccggggagttcacgtggcaccacgtggagctcccgcgctccgcgggcgccgcggcggccaagccgctccaccacgcgcaggcgctcatcgagctcctctgcccgccgctcacgctgcaggagatcctcgcgttcgtcgccacgggcccgcactgcgcctcctcgggcgacggcgcgctcctgctccgcgtcagcgcgccgggccccgtcggcagcgcgtacgcgctccgcctcgccgcgcgcgtcaccgagagctccgtcgtcaccgtgtccgtcggcggggtcccgcgcctcgcgttcgggaccaggcaggcgtcgctcctctcggaggttccgctcggcgtcgccgcctcgctctccgacgagggccatggcgggggccgcgccgtcgacggcggcgtgatcatcgatgagcgcctgctcgagtcgctgctggccatgaaccacgcggacggcgcgcacacggacaacccggtgccgcggacggtgtccaacctcctcgtgcacgtcctcggcacgcacgtagaccacgtccacgacattgtcacgcgcctcgagatggacctggacgccgtcgagctgcagctcgacaaaggtggtcactttttgaggaagcttttgctggatggcaggagattcccaaaaatgcatctggatctacagcggttgcttcaggttgtttctcactgtgaacaagtattcccccgcgtgaaggaaaaatgtgcgagcaagagttggttcgcaacaggagatatagcagcccttgaagatctgataggtcgtctcagaaggctcaaagaaaacctagggttcattacaaatagaatcaccacacttcaggctagtctggacagttggcaatcggagcagataaacaaaagcttgtactacctttcatttctctccataatattcctgcctctttccattgtcactggagttttcgggatgaacgtcggtggtgtgccgtggacagggcagaacaagaaccctaaaaaccgggatggcttcatgaatgtcatgctaatatgtgttgcaatcttgttacttctgttgctgtgtttcttgtttccttcattatattctcatgtgacgtcatggagaacccgccgtgagctgacccggagcaactctcagaacagaagacatctgaaactcttcaaaggtcacaaggaaggttacatgcgcctatgacgacaatacagttgcaaactacggtgtccatttcagctgtaaggtgattgtcagtgatgttgtaagtgtaagatttgtggggaaagatcctagatagccaacacatgtacaggtttgaaggagaccctccatggctccatttgaggttcataccttgttcattgcttagtttgtttttgttgtagattcatggctgtcactgcaccttttattt

SEQ ID NO: 122158 - DNA, 540 bp, Zea Mays
ggtttaggtttgccagcagcagcaatttaaacgaataaacaggatccctttctttctccaattttcgtgtgcgtattaattagcttgcatgcttgggccggcgatgtctgagctcgtgtgtggcggctgcttcaccatgctggtgcactcccgcagcgcaactaacgtacggtgccctcactgcggcaggctcggctcgacaagatcaggaaaccagatggggcacctgtcgtgcgggcaatgccggacaaccctggcatacccgccgggagcgacgacagtcgggtgcccgacatgccgcaacgtcaatccagttccaaccagggatgctcggccgcagcagacgatggttctggtggagaatcctaagacgctggatgaaaagggcaaactggtgagcagtgttgccgttggtgtcacctcgtggaaaagatgaccaacaactcacttcattccggctaatctcgtcatcatcgacaacgacgacagctaatgtaaaatcaagtgtgttttgaagcgcttgatgtttttcatataagg

SEQ ID NO: 122159 - DNA, 295 bp, Zea Mays
ggagacgtggaaagagggaggacatcgaacaaggaaccctggaaccggctgcgtccggcagattggcggcgtgccgtcgtgtacgaactccaactataccatactccagaaatcttcgtgagaggaagtcgagcgccgggagcggtgctcaactcatctgctcatcggggttctaacatttggtattcggagctgagactggagcactcgcacggctacttcaccaggcctcaagccatggcgccgtcgcaggtggaggatctgatggcgcaactgttggctaagatcgaggagg

SEQ ID NO: 122160 - DNA, 241 bp, Zea Mays
gtctagaaaagattcatttgctgctacgacagtagggagggtgaaagacggctctgagttcccagaaaatccaagtttgctataccctgtgccgttgtcgatgacgatggccgggcgcgcggtggcgtccatgactggcaggtccggcgagtcccggccggctcatgtctcctccgtcgccgccgccggattggccgggaggcggggcatcggggtccgccgcgatcgaggcctgcgcgcg

SEQ ID NO: 122161 - DNA, 1681 bp, Zea Mays
ggagccccctttcgcacgtgcgcgctgaaaccggtcgccgtcacgcccgtgccgtcgccgctgtttcgcgttcgcgcggccgcccaccatttctgcgccccgcccccacagaaaagcttcgcccatgccgtcgctgccgacgcgctgctctcttcttctctgcccctcctcctcctccactcgttcgaacccgccatggccgcctccaagcccctgcggctacgcctcgcggtgccgctcgccctcgccctcctcctcgcgctcgccctcgtcaccaacttcctctgggcctcctcctcccgacgagtctccccgctgtcggccccgtcttcttccagaacggtgatggggaagagcgccaaggcagtgtggcgcctcaacgcgacgtacgcagacttgccggcgccgcactgggactgggaggagatgcccgcggcgcctgtgccacgcctcgacggggcgtcggtgcagattggggatctcctctacgtcttcgccgggtacgggaacatcgaccatgtccattctcatgttgatgtttataatttcacctctaacacatggacccaaaggtttcatatgcccaaggagatggcacattctcatttaggaatggcctcagatggcagatacatctatgcagtttcaggacagtatggaccacagtgccgcgcctcgattaatcgcaactttgtttttgacactgagactagagagtggcatgggttgccccctttaccacttcctaggtatgcaccagctactcagctttggcgtgggcggctccatgtgatgggtggaggcaaagaggaccgccatgaacctggattggagcattggagccttgctgtcaaggatggcaaggcactggagaacgagtggcgagctgaagtacccataccacgtggtggacctcatagggcgtgtattgtagctaatgataaactatttgtgattggtggacaagagggagactttatggctaaaccaggatcacctatttttaaatgtgtacggaggcatgaggttgtgtatggcgatgtgtatatgctagatgatggagccaagtggaaggaactgtctccaatgccaaagccagattcccacattgaatttgcatgggttgtcgttaacaactccatagtaattgttggtggaactacagagaagcatcctatcaccaaaaagatgattcttgttggtgaagtcttccgttttgatttggaagcactgacctggtcagtcattgggcgcatgcctttccgaatcaagacagccttagctgggtactgggaggggtggctctattttacttctgggcagcgggatcgtgggcctgataatccagctccaaagaaagttgttggaagtatgtggaggacgaggctacacttgtgacggtagaagaagtgaaagtttttctgaaaattgtagatttgcgtctgatttctagtccaacagctaggtccctctcagagaattgcttttatcctgtattttgttgtttggaatgcatattatctattttttactagatattttaaatttaacatttaggctttcagcttgtaaattgccttaatactaacagcaaaacaatgtaaataccgccttttgaacagagatttgcctaatcaaagcaagggtctgtttggaagtaaagtattttttatagtttcta

SEQ ID NO: 122162 - DNA, 1662 bp, Zea Mays
ggagccccctttcgcacgtgcgcgctgaaaccggtcgccgtcacgcccgtgccgtcgccgctgtttcgcgttcgcgcggccgcccaccatttctgcgccccgcccccacagaaaagcttcgcccatgccgtcgctgccgacgcgctgctctcttcttctctgcccctcctcctcctccactcgttcgaacccgccatggccgcctccaagcccctgcggctacgcctcgcggtgccgctcgccctcgccctcctcctcgcgctcgccctcgtcaccaacttcctctgggcctcctcctcccgacgagtctccccgctgtcggccccgtcttcttccagaacggtgatggggaagagcgccaaggcagtgtggcgcctcaacgcgacgtacgcagacttgccggcgccgcactgggactgggaggagatgcccgcggcgcctgtgccacgcctcgacggggcgtcggtgcagattggggatctcctctacgtcttcgccgggtccattctcatgttgatgtttataatttcacctctaacacatggacccaaaggtttcatatgcccaaggagatggcacattctcatttaggaatggcctcagatggcagatacatctatgcagtttcaggacagtatggaccacagtgccgcgcctcgattaatcgcaactttgtttttgacactgagactagagagtggcatgggttgccccctttaccacttcctaggtatgcaccagctactcagctttggcgtgggcggctccatgtgatgggtggaggcaaagaggaccgccatgaacctggattggagcattggagccttgctgtcaaggatggcaaggcactggagaacgagtggcgagctgaagtacccataccacgtggtggacctcatagggcgtgtattgtagctaatgataaactatttgtgattggtggacaagagggagactttatggctaaaccaggatcacctatttttaaatgtgtacggaggcatgaggttgtgtatggcgatgtgtatatgctagatgatggagccaagtggaaggaactgtctccaatgccaaagccagattcccacattgaatttgcatgggttgtcgttaacaactccatagtaattgttggtggaactacagagaagcatcctatcaccaaaaagatgattcttgttggtgaagtcttccgttttgatttggaagcactgacctggtcagtcattgggcgcatgcctttccgaatcaagacagccttagctgggtactgggaggggtggctctattttacttctgggcagcgggatcgtgggcctgataatccagctccaaagaaagttgttggaagtatgtggaggacgaggctacacttgtgacggtagaagaagtgaaagtttttctgaaaattgtagatttgcgtctgatttctagtccaacagctaggtccctctcagagaattgcttttatcctgtattttgttgtttggaatgcatattatctattttttactagatattttaaatttaacatttaggctttcagcttgtaaattgccttaatactaacagcaaaacaatgtaaataccgccttttgaacagagatttgcctaatcaaagcaagggtctgtttggaagtaaagtattttttatagtttcta

SEQ ID NO: 122163 - DNA, 2094 bp, Zea Mays
accattcactcacattcaccctgcccaccccgaacaataaacaacagcttcaccctcctcctccagtgcaggccgtcggcggctggcggcgtcatttctcctccttcctctggcctgccctgccctgccctgcccgcgcgataaccatctctcgcaactcctcttcgtactcctcgtctccaacgccggcaacaactacagagcttcagcttcccaagcgcgagacatgcgtgcggaaacacagacggcggagtagcgtagcgccacgatgggattgccaagctggttaattactctatctattaaatttctggaggtgcaggtaggtagccaagaagacatgagatgggggcgtccttgggctccgccgccagcaaggaccggcagcaggagcacggcggcgaggctccgcgaccagatccctgcaagaagacgcggctctcgtcccctctctgcactatccacggtagccacggccacccgaggctgatcccagggctcccggatgaggtctctctgcagatcctcgcgaggatgccgcggatggggtacctcaaggccaagatggtctcgcggagctggaaggcggcggtgaccggcgcggagctgtaccggctgaggaaggagctcggcgtggccgaagagtggctgtacatactgacgaaggcggcggcaggtgggcagaagctggtctggcacgctctcgatccggttagcaaccaatggcagaggctgccgctcatgcctgggatcgagtgcaggagtggcggcgtgtacgggctgggcttgcgggacctggtgagcgtcggcgtaggtatcttcgacgtcatcagaggctggctcgggcagaaggaactgtcaggcggcgtaccaccgttctgtggctgcgccgtcggcgccgctggtggctgcctctatgtcctgggcggcttctccggagcttccgcgtcgaagcgcgtgtggaggtacgacccctccgccaactcatggcgggaggtgagcccgatgcgcgccgggcgcgccttctgcaaggcgagcctgctgaacgacaagctgtacgtcgtgggcggcgtcagcaagggcgagaacgggctaatagctccgctccggtccgccgaggtgttcgacccggcgactggggcctgggccgagctgccggacatgctgttctccaagtcgcaggccatgccgacggccatagctgacctgctcaagcccgtcgccgccggagtgacctcgtacggggggaagctgcacgttccccagagcttctattcctggccattcgccgtcgacgtcggcggagaggtgttcgatccggagacgaactcgtgggagcagatgcctgcgggcatgggcgagggctggcctgcgaggcaggctgggacgaggctgagcgccgttgtggaaggggatctgtatgccctggagccgacgacctcctcttccggcggttgtgagatcaagatgtacgacgcgcaggaggatgcttggaaggtcgctgtgagccaggttcgtgctggggcatttgacgagtcggacagcccttgcttgcttgctgcgtttcttggaaagctccatttggtcgtcaaggatatgggcagcaggatcagtgtcgtgcagatggactctctgatgaagccagtggattcgccagccctttcggctgccacgacatgccgaaccccggatgtctcctcggagcagacacatgtctggaaagccattgcatcgaagaacattgcagctgctgaacttgtcagctgtcaggttctcagcatctgagttcgtaaaatcgagcttctctggaacttctttgtgtaagtctgtgcagtagatgtgtttctgccacacatctgaacatcagagactatttctttctttcagcaatgcacaattgtttgtgcaatctgcgtaattgttatctgtgtatataacatcacatagaactgaataaggttgacgcagctttgtccaatcccaaaggcaacggcgccgactcaatcaatcaccggaccaatctgaaccctgttcattgttcagactgctgtgcattcctgttttcacacacctagtttggttttcttcatagaa

SEQ ID NO: 122164 - DNA, 2010 bp, Zea Mays
cactcacattcaccctgcccaccccgaacaataaacaacagcttcaccctcctcctccagtgcaggccgtcggcggctggcggcgtcatttctcctccttcctctggcctgccctgccctgccctgcccgcgcgataaccatctctcgcaactcctcttcgtactcctcgtctccaacgccggcaacaactacagagcttcagcttcccaagcgcgagacatgcgtgcggaaacacagacggcggagtagcgtagcgccacgatgggattgccaagctggtaggtagccaagaagacatgagatgggggcgtccttgggctccgccgccagcaaggaccggcagcaggagcacggcggcgaggctccgcgaccagatccctgcaagaagacgcggctctcgtcccctctctgcactatccacggtagccacggccacccgaggctgatcccagggctcccggatgaggtctctctgcagatcctcgcgaggatgccgcggatggggtacctcaaggccaagatggtctcgcggagctggaaggcggcggtgaccggcgcggagctgtaccggctgaggaaggagctcggcgtggccgaagagtggctgtacatactgacgaaggcggcggcaggtgggcagaagctggtctggcacgctctcgatccggttagcaaccaatggcagaggctgccgctcatgcctgggatcgagtgcaggagtggcggcgtgtacgggctgggcttgcgggacctggtgagcgtcggcgtaggtatcttcgacgtcatcagaggctggctcgggcagaaggaactgtcaggcggcgtaccaccgttctgtggctgcgccgtcggcgccgctggtggctgcctctatgtcctgggcggcttctccggagcttccgcgtcgaagcgcgtgtggaggtacgacccctccgccaactcatggcgggaggtgagcccgatgcgcgccgggcgcgccttctgcaaggcgagcctgctgaacgacaagctgtacgtcgtgggcggcgtcagcaagggcgagaacgggctaatagctccgctccggtccgccgaggtgttcgacccggcgactggggcctgggccgagctgccggacatgctgttctccaagtcgcaggccatgccgacggccatagctgacctgctcaagcccgtcgccgccggagtgacctcgtacggggggaagctgcacgttccccagagcttctattcctggccattcgccgtcgacgtcggcggagaggtgttcgatccggagacgaactcgtgggagcagatgcctgcgggcatgggcgagggctggcctgcgaggcaggctgggacgaggctgagcgccgttgtggaaggggatctgtatgccctggagccgacgacctcctcttccggcggttgtgagatcaagatgtacgacgcgcaggaggatgcttggaaggtcgctgtgagccaggttcgtgctggggcatttgacgagtcggacagcccttgcttgcttgctgcgtttcttggaaagctccatttggtcgtcaaggatatgggcagcaggatcagtgtcgtgcagatggactctctgatgaagccagtggattcgccagccctttcggctgccacgacatgccgaaccccggatgtctcctcggagcagacacatgtctggaaagccattgcatcgaagaacattgcagctgctgaacttgtcagctgtcaggttctcagcatctgagttcgtaaaatcgagcttctctggaacttctttgtgtaagtctgtgcagtagatgtgtttctgccacacatctgaacatcagagactatttctttctttcagcaatgcacaattgtttgtgcaatctgcgtaattgttatctgtgtatataacatcacatagaactgaataaggttgacgcagctttgtccaatcccaaaggcaacggcgccgactcaatcaatcaccggaccaatctgaaccctgttcattgttcagactgctgtgc

SEQ ID NO: 122165 - DNA, 2124 bp, Zea Mays
accattcactcacattcaccctgcccaccccgaacaataaacaacagcttcaccctcctcctccagtgcaggccgtcggcggctggcggcgtcatttctcctccttcctctggcctgccctgccctgccctgcccgcgcgataaccatctctcgcaactcctcttcgtactcctcgtctccaacgccggcaacaactacagagcttcagcttcccaagcgcgagacatgcgtgcggaaacacagacggcggagtagcgtagcgccacgatgggattgccaagctggtcagctcttccaaatccaaaagaattgatttttttcttgtcatgacgattggttctttcaatccttataggttaattactctatctattaaatttctggaggtgcaggtaggtagccaagaagacatgagatgggggcgtccttgggctccgccgccagcaaggaccggcagcaggagcacggcggcgaggctccgcgaccagatccctgcaagaagacgcggctctcgtcccctctctgcactatccacggtagccacggccacccgaggctgatcccagggctcccggatgaggtctctctgcagatcctcgcgaggatgccgcggatggggtacctcaaggccaagatggtctcgcggagctggaaggcggcggtgaccggcgcggagctgtaccggctgaggaaggagctcggcgtggccgaagagtggctgtacatactgacgaaggcggcggcaggtgggcagaagctggtctggcacgctctcgatccggttagcaaccaatggcagaggctgccgctcatgcctgggatcgagtgcaggagtggcggcgtgtacgggctgggcttgcgggacctggtgagcgtcggcgtaggtatcttcgacgtcatcagaggctggctcgggcagaaggaactgtcaggcggcgtaccaccgttctgtggctgcgccgtcggcgccgctggtggctgcctctatgtcctgggcggcttctccggagcttccgcgtcgaagcgcgtgtggaggtacgacccctccgccaactcatggcgggaggtgagcccgatgcgcgccgggcgcgccttctgcaaggcgagcctgctgaacgacaagctgtacgtcgtgggcggcgtcagcaagggcgagaacgggctaatagctccgctccggtccgccgaggtgttcgacccggcgactggggcctgggccgagctgccggacatgctgttctccaagtcgcaggccatgccgacggccatagctgacctgctcaagcccgtcgccgccggagtgacctcgtacggggggaagctgcacgttccccagagcttctattcctggccattcgccgtcgacgtcggcggagaggtgttcgatccggagacgaactcgtgggagcagatgcctgcgggcatgggcgagggctggcctgcgaggcaggctgggacgaggctgagcgccgttgtggaaggggatctgtatgccctggagccgacgacctcctcttccggcggttgtgagatcaagatgtacgacgcgcaggaggatgcttggaaggtcgctgtgagccaggttcgtgctggggcatttgacgagtcggacagcccttgcttgcttgctgcgtttcttggaaagctccatttggtcgtcaaggatatgggcagcaggatcagtgtcgtgcagatggactctctgatgaagccagtggattcgccagccctttcggctgccacgacatgccgaaccccggatgtctcctcggagcagacacatgtctggaaagccattgcatcgaagaacattgcagctgctgaacttgtcagctgtcaggttctcagcatctgagttcgtaaaatcgagcttctctggaacttctttgtgtaagtctgtgcagtagatgtgtttctgccacacatctgaacatcagagactatttctttctttcagcaatgcacaattgtttgtgcaatctgcgtaattgttatctgtgtatataacatcacatagaactgaataaggttgacgcagctttgtccaatcccaaaggcaacggcgccgactcaatcaatcaccggaccaatctgaaccctgttcattgttcagactgctgtgc

SEQ ID NO: 122166 - DNA, 2230 bp, Zea Mays
aaagatgagaaaccggccataggcccaaccgtttagttatcaacattatcttccctgtttcattatttcgccgccgttcgcagtcgaaccgccgcgcggccgtcgagttgaagaggcgaggcaaaggcaaggagagcggcaaggagaggaaaggacgccatggcgaccgcttcagtgactttcaagtcacgggaggatcaccggaagcagctcgagcttgaggaggcgcgcaaggcggggcttgcgcctgcggaggtcgatgaggatgggaacgagatcaatccccatatcccccagtacatgtcctcggccccatggtatcttaatgctgagaagccgagtttgaagcatcaacggaagtggaagtcagatccgaactacaccaagtcgtggtatgataggggtgcgaagcttttccaggccaacaagtacaggaaaggtgcctgcgagaactgtggagccatgactcatgacaagaagtcttgcatggagcggcctcgaaatgtgggagctaagtggacaaatgttaacatagcacctgatgagaaagttgaatcatttgaactggactatgatgggaagcgtgatcgctggaatggttatgacgcttcaacctacactcgtgttatcgctgactatgaagctagagaagaggccaggaaaaagtatctgaaagagcagcagctgaagaaacttgaggagaaggataccgagaaggatgatgagaatgcgggtagtgaagacgaagaagatgacctgaggatagatgaggccaaagttgatgagagtgcccagatggactttgctaaggtagagaagcgtgtgcgcacaacaggtggtggaagcactggtactgttaggaatttgcgtatcagagaagacacggcaaaatatcttttaaaccttgatgtcaactctgcatactatgatccaaaaacccgctccatgagggaagaccccttgccagatgcagatccaaatgataagttctatgtggtaagtaattgatggcatatgacattaaccctttacacagttttaaatatgaaaaccttctgttctctaggctcttggtttctgttttctgatgtgatattatggtgaagggtgacaaccaaaatcgtcttagtggtcaagcgctggagttcaagcaactcaacatccatgcatgggaagcttttgaaaaagggcaggatatccatatgcaagcagccccatctcaagcagaactgctgtacaagagtttcaagatcaagaaagaaatgttgaagtctgaacataaggataaaattattgagaagtatgggaatgctgcgtcagaagatacaattcctcgggagctgcttcttgggcaaagtgagagagagattgagtatgaccgtaccggtcgaataattaaaggacaggatgtagctcttcccaagagcaaatacgaagaggatgtattcattaataaccacacgagtgtgtggggttcatggtggaaagatcatcaatggggctacaagtgctgcaagcagactatcaagaatagttactgcacaggcttggctggaatagaagctgccgaggcctcagcagatctaatgaaggccaatatggcccgcaaggaggctgcagaagatgaacctgtacagcatgaagagaagcgactagccacttggggaaccgacgtgcctcaggatcttgttcttaatgagaagaagctggaggaatctctaaagaaggagactgcaaggagaaaagaggagaaggatgaaagaaagaggaagtataacgtgaagtggaacgacgaggtgactgcagaagacatggaggcttaccgaatgaagaggattcaccatgacgatcctatgaaagattttctcaactgaaaagtgtggtagataactagatgttcatggcactgtatcacattggttgcaccgtgccttgcatcagtgttgtgttactgtagggtggctacgcctgtcctaaggatatggccagcagaccgtgcatgtggcagtgtgtgttgcacttaaattatgatatgggaggggtaaggctggagatagcttaaccagagtggtggtggtgctgtgatctagtggcagaatgtaagaaactggctacaccttttacaagctgcgtgttggagatgtatggggctgtttgcgttggattgaccgctgcagttgtaatctatagagacaaaaatattgtagaagcagttgtaatctatatgtaa

SEQ ID NO: 122167 - DNA, 1286 bp, Zea Mays
caacaaggaccataaaaaagattatacggaagtaaaaggttattaatagtgccaacaatactaaaaggagaacgttatcctagatcatggttcagcacatgtattctatcatagttatcacaagctaggagcacatgcaaagatcgtgagttaactatatgtttggatgcaattaagaaatactaagaactgtatcctcctttgctttgggtgcattataattttgtgtcttgactggatgccaccaatccagtctaattgttgggctgttagcatcgcttcaatgttaggtatggtctgagtactaaatgctagtgagtaaccttaatttatatctacaggatgtagctcttcccaagagcaaatacgaagaggatgtattcattaataaccacacgagtgtgtggggttcatggtggaaagatcatcaatggggctacaagtgctgcaagcagactatcaagaatagttactgcacaggcttggctggaatagaagctgccgaggcctcagcagatctaatgaaggccaatatggcccgcaaggaggctgcagaaggtattttgtcgaaaaaatacttctatttattatttatatctggacagcttctattggctgtaggataactggtgccatcgagtaaacctttacctgttcaaaagttcccaccttccattgataaaatcataattggtgccagctttttatcaagcatgagctcgcacctaagtgccagttttatttgccaccatttaactattctcctaactatatgaacagtgtgttgttatatttagtgtgttatgaggtcttgttagtttcatacttgcatgtcgtcttgtgtcaagataagttgagacagacaatgagatgcaaatatggctaggtgcaatatgttttgttcacaaataaacttgtttaaatgaggtgacatgccactcgcttcaattacccatgtgtggccaccattatgcattgcagtaacttaaaatctgttcaatgcagatgaacctgtacagcatgaagagaagcgactagccacttggggaaccgacgtgcctcaggatcttgttcttaatgagaagaagctggaggaatctctaaagaaggttagtgtcttgtttttgaccttaggggcttgtttgggagcaagtggaatgaaggggattgagggggctagaatgaaaaaaataaccatttgccactatttggaggtgtgtggcaaaatttttgccctccattacccttggtgtcttcgttcataatttccccccctactgaagctt

SEQ ID NO: 122168 - DNA, 385 bp, Zea Mays
tactacgcaacaggatcccatagcaatacgagaaatgtgcaacgtctcataagaacaggcactgcataaattgaaggaaagaatgatttccatcgtctaactagctaacttttgtacagtttccgatattacattcacgacacggaaatggctctaaaactacccctcaaaaacggctggcaccagctcaagagccatcaccatcactccttgtgccttctccccactaccccatctcttctcccatttcatccgaatttatggcctcatcatatatatcactccttgtgccttctcctcccttttcatccgcttttatggcctcatcatatatgcagtaaactcgccattccattttagggcttattcagttgctacctctgtt

SEQ ID NO: 122169 - DNA, 1497 bp, Zea Mays
gctttaaaaggacacgagcgcttaaacccccaccccatatccgcatccgctgcctccgcctctcgagtctcgtccacccgtcatcctcctagctcctctactcgccagtcgccatgggcaagattaagatcggaatcaacggcttcggaaggatcggcaggctcgtggccagggtcgccctccagagcgaggatgtcgagctcgtcgccgtcaacgaccccttcatcaccacggactacatgacctacatgttcaagtacgacaccgtccacggccactggaagcacagcgacatcacactcaaggactccaagacccttctcttcggtgacaagccggtcaccgtctttggcatcaggaaccctgaggaaatcccgtggggtgaggctggcgctgagtatgtcgtggagtccaccggcgtcttcactgacaaggacaaggctgctgcacatctcaagggtggtgccaagaaggttgttatctctgccccaagcaaagacgcacccatgtttgttgttggtgtcaatgaggacaagtacacctcggatgttaacattgtttccaatgctagctgcaccacaaactgccttgctccccttgctaaggtcattcatgacaacttcggcattgttgagggtttgatgacaactgttcatgccatcactgccacccagaaaactgttgacggaccctcagccaaggactggagaggtggcagggctgccagctttaacatcattcctagcagcaccggtgctgccaaggctgttggtaaagttcttcctgatctgaatggcaagctcactggtatgtccttccgtgttcctactgtggatgtctcggttgttgacctcaccgtcagaatcgagaagggggcctcctatgaggatatcaagaaagctattaaggctgcttccgagggtccactcaagggtatcatgggttatgcggaggaggatctggtttctaccgacttccttggtgacagcaggtcgagcatcttcgacgccaaggccgggatcgctctgaacgaccacttcgtcaagctcgtctcgtggtacgacaacgagtggggctacagcaaccgcgtcgtcgacctgatccgccacatgttcaagacccagtagaggggttttttccccctgcttctcatggatggttgctgcttgtgtatgccgagaataaatgtggatggcgcgtgcctctgggtcgccaggttcatgctgagtctggacatgttttgcacttttgcttcccttcctgctaccatctgtgacagaaccgctcgctaatatgggacctgagattagctttttgctgcttgtggtgaggttgcagttttgttctgtgtttctgtgttgttagcaatcctatgattcaggtgttcgaatgaagaagataggctgctgcagaggaattgggtgttagctctttcttacccagttggaactgtaaatagtaattaatgaagaaagtagatgtcgcgtacctggtagc

SEQ ID NO: 122170 - DNA, 1493 bp, Zea Mays
gctttaaaaggacacgagcgcttaaacccccaccccatatccgcatccgctgcctccgcctctcgagtctcgtccacccgtcatcctcctagctcctctactcgccagtcgccatgggtaattcctcgctcccggattcagcgtcgggcaagattaagatcggaatcaacggcttcggaaggatcggcaggctcgtggccagggtcgccctccagagcgaggatgtcgagctcgtcgccgtcaacgaccccttcatcaccacggactacatgacctacatgttcaagtacgacaccgtccacggccactggaagcacagcgacatcacactcaaggactccaagacccttctcttcggtgacaagccggtcaccgtctttggcatcaggaaccctgaggaaatcccgtggggtgaggctggcgctgagtatgtcgtggagtccaccggcgtcttcactgacaaggacaaggctgctgcacatctcaagggtggtgccaagaaggttgttatctctgccccaagcaaagacgcacccatgtttgttgttggtgtcaatgaggacaagtacacctcggatgttaacattgtttccaatgctagctgcaccacaaactgccttgctccccttgctaaggtcattcatgacaacttcggcattgttgagggtttgatgacaactgttcatgccatcactgccacccagaaaactgttgacggaccctcagccaaggactggagaggtggcagggctgccagctttaacatcattcctagcagcaccggtgctgccaaggctgttggtaaagttcttcctgatctgaatggcaagctcactggtatgtccttccgtgttcctactgtggatgtctcggttgttgacctcaccgtcagaatcgagaagggggcctcctatgaggatatcaagaaagctattaaggctgcttccgagggtccactcaagggtatcatgggttatgcggaggaggatctggtttctaccgacttccttggtgacagcaggtcgagcatcttcgacgccaaggccgggatcgctctgaacgaccacttcgtcaagctcgtctcgtggtacgacaacgagtggggctacagcaaccgcgtcgtcgacctgatccgccacatgttcaagacccagtagaggggttttttccccctgcttctcatggatggttgctgcttgtgtatgccgagaataaatgtggatggcgcgtgcctctgggtcgccaggttcatgctgagtctggacatgttttgcacttttgcttcccttcctgctaccatctgtgacagaaccgctcgctaatatgggacctgagattagctttttgctgcttgtggtgaggttgcagttttgttctgtgtttctgtgttgttagcaatcctatgattcaggtgttcgttatatagaattaaaccaccaaatatatgggacaagtgaatagaattaaaccaccaaatatctgggacaaccatc

SEQ ID NO: 122171 - DNA, 1570 bp, Zea Mays
gctttaaaaggacacgagcgcttaaacccccaccccatatccgcatccgctgcctccgcctctcgagtctcgtccacccgtcatcctcctagctcctctactcgccagtcgccatgggtaattcctcgctcccggattcagcgtcgggtttctctctctctctctacaattatcactacctgctgctccctcatgcaccgtgctcaaatctgaccaaagtgggttctgctgactgttttttgtgtttttttggggtctctcgatcttctctggatgcaggcaagattaagatcggaatcaacggcttcggaaggatcggcaggctcgtggccagggtcgccctccagagcgaggatgtcgagctcgtcgccgtcaacgaccccttcatcaccacggactacatgacctacatgttcaagtacgacaccgtccacggccactggaagcacagcgacatcacactcaaggactccaagacccttctcttcggtgacaagccggtcaccgtctttggcatcaggaaccctgaggaaatcccgtggggtgaggctggcgctgagtatgtcgtggagtccaccggcgtcttcactgacaaggacaaggctgctgcacatctcaagggtggtgccaagaaggttgttatctctgccccaagcaaagacgcacccatgtttgttgttggtgtcaatgaggacaagtacacctcggatgttaacattgtttccaatgctagctgcaccacaaactgccttgctccccttgctaaggtcattcatgacaacttcggcattgttgagggtttgatgacaactgttcatgccatcactgccacccagaaaactgttgacggaccctcagccaaggactggagaggtggcagggctgccagctttaacatcattcctagcagcaccggtgctgccaaggctgttggtaaagttcttcctgatctgaatggcaagctcactggtatgtccttccgtgttcctactgtggatgtctcggttgttgacctcaccgtcagaatcgagaagggggcctcctatgaggatatcaagaaagctattaaggctgcttccgagggtccactcaagggtatcatgggttatgcggaggaggatctggtttctaccgacttccttggtgacagcaggtcgagcatcttcgacgccaaggccgggatcgctctgaacgaccacttcgtcaagctcgtctcgtggtacgacaacgagtggggctacagcaaccgcgtcgtcgacctgatccgccacatgttcaagacccagtagaggggttttttccccctgcttctcatggatggttgctgcttgtgtatgccgagaataaatgtggatggcgcgtgcctctgggtcgccaggttcatgctgagtctggacatgttttgcacttttgcttcccttcctgctaccatctgtgacagaaccgctcgctaatatgggacctgagattagctttttgctgcttgtggtgaggttgcagttttgttctgtgtttctgtgttgttagcaatcctatgattcaggtgttcgttatatagaattaaaccacc

SEQ ID NO: 122172 - DNA, 1526 bp, Zea Mays
gctttaaaaggacacgagcgcttaaacccccaccccatatccgcatccgctgcctccgcctctcgagtctcgtccacccgtcatcctcctagctcctctactcgccagtcgccatgggcaagattaagatcggaatcaacggtgagtttgtcccctctccccatgctacgctatttctcctcctcgagctggttcggtccgatctgagttgcgccttctctctgcgactgcgtccgcgtccgcgtccgcgtccgctcaggcttcggaaggatcggcaggctcgtggccagggtcgccctccagagcgaggatgtcgagctcgtcgccgtcaacgaccccttcatcaccacggactacatgacctacatgttcaagtacgacaccgtccacggccactggaagcacagcgacatcacactcaaggactccaagacccttctcttcggtgacaagccggtcaccgtctttggcatcaggaaccctgaggaaatcccgtggggtgaggctggcgctgagtatgtcgtggagtccaccggcgtcttcactgacaaggacaaggctgctgcacatctcaagggtggtgccaagaaggttgttatctctgccccaagcaaagacgcacccatgtttgttgttggtgtcaatgaggacaagtacacctcggatgttaacattgtttccaatgctagctgcaccacaaactgccttgctccccttgctaaggtcattcatgacaacttcggcattgttgagggtttgatgacaactgttcatgccatcactgccacccagaaaactgttgacggaccctcagccaaggactggagaggtggcagggctgccagctttaacatcattcctagcagcaccggtgctgccaaggctgttggtaaagttcttcctgatctgaatggcaagctcactggtatgtccttccgtgttcctactgtggatgtctcggttgttgacctcaccgtcagaatcgagaagggggcctcctatgaggatatcaagaaagctattaaggctgcttccgagggtccactcaagggtatcatgggttatgcggaggaggatctggtttctaccgacttccttggtgacagcaggtcgagcatcttcgacgccaaggccgggatcgctctgaacgaccacttcgtcaagctcgtctcgtggtacgacaacgagtggggctacagcaaccgcgtcgtcgacctgatccgccacatgttcaagacccagtagaggggttttttccccctgcttctcatggatggttgctgcttgtgtatgccgagaataaatgtggatggcgcgtgcctctgggtcgccaggttcatgctgagtctggacatgttttgcacttttgcttcccttcctgctaccatctgtgacagaaccgctcgctaatatgggacctgagattagctttttgctgcttgtggtgaggttgcagttttgttctgtgtttctgtgttgttagcaatcctatgattcaggtgttcgttatatagaattaaaccacc

SEQ ID NO: 122173 - DNA, 1433 bp, Zea Mays
gctttaaaaggacacgagcgcttaaacccccaccccatatccgcatccgctgcctccgcctctcgagtctcgtccacccgtcatcctcctagctcctctactcgccagtcgccatgggtaattcctcgctcccggattcagcgcaagattaagatcggaatcaacggcttcggaaggatcggcaggctcgtggccagggtcgccctccagagcgaggatgtcgagctcgtcgccgtcaacgaccccttcatcaccacggactacatgacctacatgttcaagtacgacaccgtccacggccactggaagcacagcgacatcacactcaaggactccaagacccttctcttcggtgacaagccggtcaccgtctttggcatcaggaaccctgaggaaatcccgtggggtgaggctggcgctgagtatgtcgtggagtccaccggcgtcttcactgacaaggacaaggctgctgcacatctcaagggtggtgccaagaaggttgttatctctgccccaagcaaagacgcacccatgtttgttgttggtgtcaatgaggacaagtacacctcggatgttaacattgtttccaatgctagctgcaccacaaactgccttgctccccttgctaaggtcattcatgacaacttcggcattgttgagggtttgatgacaactgttcatgccatcactgccacccagaaaactgttgacggaccctcagccaaggactggagaggtggcagggctgccagctttaacatcattcctagcagcaccggtgctgccaaggctgttggtaaagttcttcctgatctgaatggcaagctcactggtatgtccttccgtgttcctactgtggatgtctcggttgttgacctcaccgtcagaatcgagaagggggcctcctatgaggatatcaagaaagctattaaggctgcttccgagggtccactcaagggtatcatgggttatgcggaggaggatctggtttctaccgacttccttggtgacagcaggtcgagcatcttcgacgccaaggccgggatcgctctgaacgaccacttcgtcaagctcgtctcgtggtacgacaacgagtggggctacagcaaccgcgtcgtcgacctgatccgccacatgttcaagacccagtagaggggttttttccccctgcttctcatggatggttgctgcttgtgtatgccgagaataaatgtggatggcgcgtgcctctgggtcgccaggttcatgctgagtctggacatgttttgcacttttgcttcccttcctgctaccatctgtgacagaaccgctcgctaatatgggacctgagattagctttttgctgcttgtggtgaggttgcagttttgttctgtgtttctgtgttgttagcaatcctatgattcaggtgttcgttatatagaattaaaccacc

SEQ ID NO: 122174 - DNA, 1963 bp, Zea Mays
agggagctgggctagtctggtgctccggttgccaaatctacgacgaccgagacgttatcgggaacgtgaagcccaggacggacggggcgggcaggagcggccacatctcatctcatccttccaccgcggccggcagcacatcacgggcctgccgtgccgccaccgtggcgttttattgtctgttcgaaaccaccactgcctgcgccttcttctggagaaaggcaggcggaggcggacaggccacccccgcacctcattccacaattatttgcgcccgtcccatggtttatattcattattattattaaaatcacgctttctgtagcatccgctgcctccgcctctcgagtctcgtccacccgtcatcctcctagctcctctactcgccagtcgccatgggtaattcctcgctcccggattcagcgtcgggtttctctctctctctctacaattatcactacctgctgctccctcatgcaccgtgctcaaatctgaccaaagtgggttctgctgactgttttttgtgtttttttggggtctctcgatcttctctggatgcaggcaagattaagatcggaatcaacggcttcggaaggatcggcaggctcgtggccagggtcgccctccagagcgaggatgtcgagctcgtcgccgtcaacgaccccttcatcaccacggactacatgacctacatgttcaagtacgacaccgtccacggccactggaagcacagcgacatcacactcaaggactccaagacccttctcttcggtgacaagccggtcaccgtctttggcatcaggaaccctgaggaaatcccgtggggtgaggctggcgctgagtatgtcgtggagtccaccggcgtcttcactgacaaggacaaggctgctgcacatctcaagggtggtgccaagaaggttgttatctctgccccaagcaaagacgcacccatgtttgttgttggtgtcaatgaggacaagtacacctcggatgttaacattgtttccaatgctagctgcaccacaaactgccttgctccccttgctaaggtcattcatgacaacttcggcattgttgagggtttgatgacaactgttcatgccatcactgccacccagaaaactgttgacggaccctcagccaaggactggagaggtggcagggctgccagctttaacatcattcctagcagcaccggtgctgccaaggctgttggtaaagttcttcctgatctgaatggcaagctcactggtatgtccttccgtgttcctactgtggatgtctcggttgttgacctcaccgtcagaatcgagaagggggcctcctatgaggatatcaagaaagctattaaggctgcttccgagggtccactcaagggtatcatgggttatgcggaggaggatctggtttctaccgacttccttggtgacagcaggtatggatttgcttctatcatttagcaaccaactaacgaaactgtgctactacggaattctcagtgttcctccatgattcatttttgtcattctgcctttttcccactcaggtcgagcatcttcgacgccaaggccgggatcgctctgaacgaccacttcgtcaagctcgtctcgtggtacgacaacgagtggggctacagcaaccgcgtcgtcgacctgatccgccacatgttcaagacccagtagaggggttttttccccctgcttctcatggatggttgctgcttgtgtatgccgagaataaatgtggatggcgcgtgcctctgggtcgccaggttcatgctgagtctggacatgttttgcacttttgcttcccttcctgctaccatctgtgacagaaccgctcgctaatatgggacctgagattagctttttgctgcttgtggtgaggttgcagttttgttctgtgtttctgtgttgttagcaatcctatgattcaggtgttcgttatatagaattaaaccacc

SEQ ID NO: 122175 - DNA, 1825 bp, Zea Mays
agggagctgggctagtctggtgctccggttgccaaatctacgacgaccgagacgttatcgggaacgtgaagcccaggacggacggggcgggcaggagcggccacatctcatctcatccttccaccgcggccggcagcacatcacgggcctgccgtgccgccaccgtggcgttttattgtctgttcgaaaccaccactgcctgcgccttcttctggagaaaggcaggcggaggcggacaggccacccccgcacctcattccacaattatttgcgcccgtcccatggtttatattcattattattattaaaatcacgctttctgtagcatccgctgcctccgcctctcgagtctcgtccacccgtcatcctcctagctcctctactcgccagtcgccatgggtaattcctcgctcccggattcagcgtcgggtttctctctctctctctacaattatcactacctgctgctccctcatgcaccgtgctcaaatctgaccaaagtgggttctgctgactgttttttgtgtttttttggggtctctcgatcttctctggatgcaggcaagattaagatcggaatcaacggcttcggaaggatcggcaggctcgtggccagggtcgccctccagagcgaggatgtcgagctcgtcgccgtcaacgaccccttcatcaccacggactacatgacctacatgttcaagtacgacaccgtccacggccactggaagcacagcgacatcacactcaaggactccaagacccttctcttcggtgacaagccggtcaccgtctttggcatcaggaaccctgaggaaatcccgtggggtgaggctggcgctgagtatgtcgtggagtccaccggcgtcttcactgacaaggacaaggctgctgcacatctcaagggtggtgccaagaaggttgttatctctgccccaagcaaagacgcacccatgtttgttgttggtgtcaatgaggacaagtacacctcggatgttaacattgtttccaatgctagctgcaccacaaactgccttgctccccttgctaaggtcattcatgacaacttcggcattgttgagggtttgatgacaactgttcatgccatcactgccacccagaaaactgttgacggaccctcagccaaggactggagaggtggcagggctgccagctttaacatcattcctagcagcaccggtgctgccaaggctgttggtaaagttcttcctgatctgaatggcaagctcactggtatgtccttccgtgttcctactgtggatgtctcggttgttgacctcaccgtcagaatcgagaagggggcctcctatgaggatatcaagaaagctattaaggctgcttccgagggtccactcaagggtatcatgggttatgcggaggaggatctggtttctaccgacttccttggtgacagcaggtcgagcatcttcgacgccaaggccgggatcgctctgaacgaccacttcgtcaagctcgtctcgtggtacgacaacgagtggggctacagcaaccgcgtcgtcgacctgatccgccacatgttcaagacccagtagaggggttttttccccctgcttctcatggatggttgctgcttgtgtatgccgagaataaatgtggatggcgcgtgcctctgggtcgccaggttcatgctgagtctggacatgttttgcacttttgcttcccttcctgctaccatctgtgacagaaccgctcgctaatatgggacctgagattagctttttgctgcttgtggtgaggttgcagttttgttctgtgtttctgtgttgttagcaatcctatgattcag

SEQ ID NO: 122176 - DNA, 1325 bp, Zea Mays
agggagctgggctagtctggtgctccggttgccaaatctacgacgaccgagacgttatcgggaacgtgaagcccaggacggacggggcgggcaggagcggccacatctcatctcatccttccaccgcggccggcagcacatcacgggcctgccgtgccgccaccgtggcgttttattgtctgttcgaaaccaccactgcctgcgccttcttctggagaaaggcaggcggaggcggacaggccacccccgcacctcattccacaattatttgcgcccgtcccatggtttatattcattgcaggcaagattaagatcggaatcaacggcttcggaaggatcggcaggctcgtggccagggtcgccctccagagcgaggatgtcgagctcgtcgccgtcaacgaccccttcatcaccacggactacatgacctacatgttcaagtacgacaccgtccacggccactggaagcacagcgacatcacactcaaggactccaagacccttctcttcggtgacaagccggtcaccgtctttggcatcaggaaccctgaggaaatcccgtggggtgaggctggcgctgagtatgtcgtggagtccaccggcgtcttcactgacaaggacaaggctgctgcacatctcaagggtggtgccaagaaggttgttatctctgccccaagcaaagacgcacccatgtttgttgttggtgtcaatgaggacaagtacacctcggatgttaacattgtttccaatgctagctgcaccacaaactgccttgctccccttgctaaggtcattcatgacaacttcggcattgttgagggtttgatgacaactgttcatgccatcactgccacccagaaaactgttgacggaccctcagccaaggactggagaggtggcagggctgccagctttaacatcattcctagcagcaccggtgctgccaaggctgttggtaaagttcttcctgatctgaatggcaagctcactggtatgtccttccgtgttcctactgtggatgtctcggttgttgacctcaccgtcagaatcgagaagggggcctcctatgaggatatcaagaaagctattaaggctgcttccgagggtccactcaagggtatcatgggttatgcggaggaggatctggtttctaccgacttccttggtgacagcaggtcgagcatcttcgacgccaaggccgggatcgctctgaacgaccacttcgtcaagctcgtctcgtggtacgacaacgagtggggctacagcaaccgcgtcgtcgacctgatccgccacatgttcaagacccagtagaggggttttttccc

SEQ ID NO: 122177 - DNA, 1500 bp, Zea Mays
gagcacacgctgctttggcttccacagatcacggccaaagacgcactggtacctcgacgccacacccaaccggcctggccggaggttcatccccttggcgaacacgacggtggagttgtccctgctgtcaacgagcgcagcgtacacaagcctgtcccactgcagcggcgccaccggaggggacagggacagggacagagagacgtccacacacgatggctcggcagggcagtggacgaggctgggtccatcgggtgaggaggcggccaagaggggtcggtggcggcgcagttccgaggagttggcgggggagtacaggcactggaaccgctcgggagatggcagcaacggcccgtccttgaggatcaggagtacacggtccggcatggcgaccgcgtgccggatttggactgacggcagcacggtggtgtcggcgctgctgccacctcgccgcgctctggcatcggaggaaatggcgttcagggttgccgccggccacgccgtcctgagcactggccggaacgttgctgcatcagagacaagaacatgagcacctcgtctatagtgaagaaacaaagcaaacggatggacagacacattcttcatgtgatggcgtgagtttttcctgatgtattcacttggtaacgttccattccaacccaggtcaggtgcgtttccagtgaactcattagcaaatagaccgaaacgaaatccgaatccaacgcaaatttcccgcgagtggtacgaccgcattcagatctaccgcaacgcccccacaaaaaaaaaaggaaccgcctttttcctcgtcttcccaacaacgaacaccaaacacataccaaaatcgtatctaaaaaacgagaaatttgtcgccccaataattgttaataccaccacgctccaagcacaagattctcgtgacaatacaattccggcgacccgcctaaaccccaccaagatccgagagtccacgccgggagaaggcagaaagttcagtgaggaggcaaatggggaggggaaggctgagctcacctccaatgacgtgcacgccgccgaggacgactacgccggcgcacaggaacgcgaagagcgcagcgaagacacgccgctgcggcgccgccgccaccgaccggtgggccctggcagcaggcgaaccgccgccgccgccgctgccacttccagccgccgcaccgcccttacaactcccgagcctgctcagcttcctctccttcgccgatatcgccatcgccggcgccagtcacaaccgccgctgccgctccggcagcagcccagatcccaaagcggcggcagcgagcctcacaggcccacagcatccgcaacgcgctacggggagtcagggagcatcggcgccccgccaatatctcgacggttagttggttgccgtggacgagggagagagaaggcgaagcggcggcgggggccggcgaatccggagcggtcagttgcgttcgcaaggaaggaagcttgctttgccgactcctg

SEQ ID NO: 122178 - DNA, 561 bp, Zea Mays
cttctacaaacatcccgtcccttcgccggcgggcacgaccatcactccaccatgtccgccgccacctcggcggcagcggccgtctcctcgtcgcgcccgtatcccctcctccaacccgcctccagacccgccctcgtttccttccctcggcgacagcttccatccacctcggttgccctgtccgcgtcctcccagctgtcgtcgcggggctcgccgctggcgccggcggccaacccgaagtaccacaacgcgaaggtggacgcgggagacgaggacgcggacggtgaggagctcctgcggcggttccgttggcaggtgtcccgcgcgggtgtcatggaggagatcaggcggcggcgcaggcacgaggacgcccgggacaagcgcaagcgcaaggcgcggtcggcgtcgctgcggtaccgccggaggcgcttcaagggcccatatccttccatcgatgaccaggggctcaaggagcaggacgaggagaacgacaactgggagctccctgcaggagagttgcctccttacattacaggcaggtttgaaaacgttatacaatga

SEQ ID NO: 122179 - DNA, 644 bp, Zea Mays
cttctacaaacatcccgtcccttcgccggcgggcacgaccatcactccaccatgtccgccgccacctcggcggcagcggccgtctcctcgtcgcgcccgtatcccctcctccaacccgcctccagacccgccctcgtttccttccctcggcgacagcttccatccacctcggttgccctgtccgcgtcctcccagctgtcgtcgcggggctcgccgctggcgccggcggccaacccgaagtaccacaacgcgaaggtggacgcgggagacgaggacgcggacggtgaggagctcctgcggcggttccgttggcaggtgtcccgcgcgggtgtcatggaggagatcaggcggcggcgcaggcacgaggacgcccgggacaagcgcaagcgcaaggcgcggtcggcgtcgctgcggtaccgccggaggcgcttcaagggcccatatccttccatcgatgaccaggggctcaaggagcaggacgaggagaacgacaactgggagctccctgcaggagagttgcctccttacattacaggcaggtgaaggtggtccgacaaattgaagcgtggttttgtctgacggagaatttcggcggctaaatcttcagttctttctgttagtcgagtaggtgttgccaaattgtt

SEQ ID NO: 122180 - DNA, 2718 bp, Zea Mays
atggattcgtcggtggaggtagcaggagtccgcagcaacaagatgattgatggcaggcggcattcggtggacatccccgtctcgagggccctgttggccatcatgcggtccagatccctgagggacccggacaccaactcactggccaagttctccgccaagaaaaccatctgggagggcagctccctcgacgaggacgaaatggagggggcgaacaacaagaatgcctacggcaggcacagcttcagctacaacgcgtacgatcacctccagcggaggagggaggagttcggtgacggcctcaggtctggccggctcgccgactcgcccatcaacatcatcaaggccaatgccatggccaaggcggcgctccacaaccagagctgttgctcggccatttccgggatgtcgaggagcacaaaggacagggcctttggcttggtgggtgatggggaggagattggccggagggaggccagcacgttccaggagagctccaggagtttgcttcagaagtaccggcccagatctttctccgagcttgttgggcatggtgttattgctcagtctctttcgggtgccgttttgaaaggaaagcttgctcctatctacctcttccatggtccgcacggcgtgggcaagacgtccacggctagaacgtttgcagcagcgctgaattgccgttccccaggtgagaaccagccatgtggacgctgtgacgagtgcatgcccatattctcgggaagcagcagcagtgtggtagagattgatgcttccaaacttgattgcaagtctagggtcgcggccttgctcaggaatgcctgtgaagtccttgcctcttcacacttcaaggttctgatcgttgatgattgccagcacatggacaaggagggatggtactctatctacaatagccttgaagggattcctgagagcacaatctttgttatgatcacatctgatattgaaaagctaccaagcaattccatagggtggtgccagagctacaggttttgcaagatagatgacgcagagattgcccgcaggttgatcaagatttgtacaaaagaagggatggaattcgaagcggaggcattggaccttcttgctcgcaaggctaacggttccattcgagatgcaattcaaatgcttgaccaactaactctacttggaaagagaatcagcaaatcagtgacacatgagctgataggtgatgtgtcagacgatgaattgcttgatcttctcaatctggccatgtcatcagatgctgctacaattgtgaggagggccagggagcttttgagctcaaaagtcgaccctttgcagctattagctcagcttgcgaatcatatcatggatattttagctgggaagcacccgtcagattcttcagaagttagaagagttaccggcaaacatacatctgctgatgtggatgtacacaaacttaggaatgcattggaaatactctctgaaactgaaaagcaattgaagaccacaaaaaaccagtctacatggctcactgctgcactgttacagtttaatatgagagaaccctactgtctagatgatactgcggtttcaagcatgtttactgaaagtcatacagatgatgggactgcagcactgaaagatgaaagcttagacacgagttcccatctttgttcccagaacaaaatcagttctctagacatgaatctgggagatccagatgtactggagacgatatggatgaaagctcttgaaaactgctcgtcccctccacttcaaaatctactactcaaggatggaaagctgtcatctctgtacacaacccaaggtgtggcggttgctgagctacagttctgccatcctgaggttgtcccaacgtcaaagaacttctggaagccactatgtgcatctctgcagaatctgctgaggtgcagcgtcgacatccgaatcaacctatctcctatctccggcaacggggcgggatccaaggactcgtccgtcagccttgtcatggagtcaagagaagaagaccgcgaggcacaggacccagccacctcaaactgcagaaccgtggtgtcatccgggagagactgcccttccccacccttggggcaggccaaggagagatcgtcccacatcctggggtgcctccatggcggcgcgggtggcgacgccgtggacaccgagccgaggatcctgagctaccagaagatctccgttgtccctgcagcatccaccccaggaaacactcccctgaaagccgctgccgccgctgccggagacgagtcaaaggttgatgatggcggggttcgtcctggctgctgctcgcacattttaccctgtggtgcttgcgctccccgtcagaagccccggacgcgggagaaacgccgtgccaagctgttcagctgctgcttctgcaagatcggaccggactgcaaggcgaagggggaagcagggtagtttgcagcagattagggacagagcaatcctctgctgttagttcaagctggagatgggggcagtagttcagactgtcaagtgtgaccacctgtttactgtagctcgcctccgatggggtggtcaaagacacagttacatgtgcatcggtcgctaacataaaggttattttgtagtcggatgcttaaattttcttggtagcataccatatttataattgtatgtttgatggcgcgcgttagttttaccgaaagcttaaatggacaggtc

SEQ ID NO: 122181 - DNA, 99 bp, Zea Mays
ctattaatgcggtggcggtgacagggagtcgagtcgagtcgagtcgggcgcggcgcggcgcgggcgctgggacggcgacgagacgagacaccgcccgtg

SEQ ID NO: 122182 - DNA, 163 bp, Zea Mays
gcagcagtggatgatgatgcgatcgtttcaccttcttccttgtctgtttgtttctctgctcatgggccgggtcggcatgggcccgcccgataaaaataaaaaaaagtggcgcgtttgtttcagcagcccagtccagccagtggagttgaccaacggtgattag

SEQ ID NO: 122183 - DNA, 276 bp, Zea Mays
atgaagagacaggccttggccgtcgcatctcgtcctgccgccatggtcatggagatccctgtccagtgccagtgccagatcctgtctactgttcattgctggctggctggctggctggccggccctacctcactcccagttattgcacgctacggaatctggaccgaagagtgtgagatcatgaacaaggaccaggagtccaggaccatgcgagcgttcagtaacagaacagaacggcagcatgagcaagaacgcactattgacttggagtgttag

SEQ ID NO: 122184 - DNA, 1716 bp, Zea Mays
caaataaaccgaatgcccacccggccaaacgaactccaggcgaatcgacgcggaccgcaagcgcaaacgcatccggcgtcccaaacccgctaacgcgaaaccccaacacgtcccggcggccgccgcggagaagaacgacggcggcgacggcgacggcgacgccactgatggagtccctggaggcccttgtggcgcacatccaaggcctctccggcagccccgaggagttggcgcacctccacagcctcctcaaacaggcggacggtgaacccctgcgcgcccacgccgctgctctggtccccttcctcgcgcacctcagcccagagacgcactccctcggctacctctacctcctggaggcgtgcgcgacctccagttccaatctgagcgacttcggcggcggggacttcctggtcaccatcggcggcttcctcaccgcgtgctcggcggaccagatacgcctggcgcccgacaaattcctgaatgtgtgtagggtgctgaaggaccaggtgatgcagcttaacatgcccatcagagggatcgccccgctgcgggcggccgtccctaagatccagtcctcgcccgagcagctgaccccagtccacgcagactaccttatcctgtgcctgctggcgaagcagtacaaggctggactcagtgtcctggaaggtgacatattcgaagttgatcaaccaaaggatctgttcctctactgctactacggagggatgatttacgttgggctcaagaagtttcctaaagctctggagcttcttcacaatgctgttactgccccaatgtcatcgttgaacgcaattgctgtagaagcttacaaaaagtatatcctagtttcactcattgtgaatggacaggtcccaccatttcctaagtatacatccatatcagctcaaaggagtatgagaaatcatgcccagatttatgctgagctatctacaagctatagcaatggtagcaaaactgatttagagacattcatccaatcaaattcagcagcatttcaatctgacaacaaccttgggctggtgaagcaagtgctctcctcgatgtacaaacggaacatccaaaggctgacccagacttacttgactctttcacttgaagatattgctaggtctgttcaacttgaaacaccaagggatgctgaaatgcatgtacttcgcatgatcgaagacggagagatccatgcatccataaaccaaaaggatggaatggtcagctttcatgaagatcctgaacaatataaaagtgttgagatggtggagcatattgacacctctatccatagattgacggcattgtccaagaagttggcttcaattgatcagaacatgtcatgtgatactgcatatttgatgacgggaagggatcgtggaagattcgactacgacgacttcgactctgttccacacaagtatttttgagttgatctgagccttatgtgattctgaagtacgatcgtcaacgtagcagccattccctaaagttataattagtttgatcggccaatggcttttgaaaattgaaatgctgtaaattctggtttaaagaatgggtctgtgaaggcagagacttagtctggaattgctcgtggctttaatctgcatctgcttgctgttctagcatatttctcccccaactctgagacaagatttcgtttcctaatcaatttgctcggtagagtatgaccaagatttc

SEQ ID NO: 122185 - DNA, 487 bp, Zea Mays
atgtagttgatgctgatgccattgagctattgttaggcagagcacacatgtaatttggactgattcattccatgatctgtcttagattgacggcattgtccaagaagttggcttcaattgatcagaacatgtcatgtgatactgcatatttgatgacgggaagggatcgtggaagattcgactacgacgacttcgactctgttccacacaagtatttttgagttgatctgagccttatgtgattctgaagtacgatcgtcaacgtagcagccattccctaaagttataattagtttgatcggccaatggcttttgaaaattgaaatgctgtaaattctggtttaaagaatgggtctgtgaaggcagagacttagtctggaattgctcgtggctttaatctgcatctgcttgctgttctagcatatttctcccccaactctgagacaagatttcgtttcctaatcaatttgctcggtagagtatgacc

SEQ ID NO: 122186 - DNA, 100 bp, Zea Mays
gctattttatgttccttttctatttcctactacctcaaatcgaattccttattaaacgcatacttcacaaactcactcatcaaacaaagtgaaaatatgc

SEQ ID NO: 122187 - DNA, 207 bp, Zea Mays
attttttatggttatatatgaacatatgttgtgcctccgtaaaatttcatgattttttgagactatttatatattattaatttcttgttgtagaaaatcatcaaaatacaattaaatccatcaaataacatagcgtcgactgaaaattgcaaataagttaccaatactaataaataatctatacaaagataaccttaagttcccacg

SEQ ID NO: 122188 - DNA, 1124 bp, Zea Mays
gcactgccaggcgacccggcgacccgtcgcggaccgccaccactgttcacctcgcgtagccgaacccaagcaggagagaaaaaagcataagctgagcatccatcaatggcggatgctggcaacgaggccgagggtctgacgctgttgggcctgcacgtgagccccttcgcgttgcgcgtgcgcatggcgctgagcctcaagggcctgagctacgagtacatcgagcaggacctgttccacaagggcgagctcctcctcagctcaaaccccgtgcacaagaaggtgcccgtgctcatccaccacggcaagcccatctgcgagtccctcgccgtcgtggagtacgtcgatgaggtctggcccggcgccgccgccaccatcctccccgccgacccccacggtcgcgccaccgctcgcttctgggccgcctacatcgacggcaagctgtttccggcgtggacagggatcatgaaggcggcgacggaggaagcgagggcggataagctgagggagacgcacgccgcggtcctcaacctggagaaggccttcgccgagatcagctctagctccagcaacgacggcgcggccttcttcggcggcgactccgtcgggtacctggacctcgcgctcgggtgctccctgccgtggttcggggcgctgcgcgccatgctcggcgtcgagatcatcgacgccgcccaggctccgctcctggtggcgtgggccgagcgatttggggagaccccggtggccaaggaggtgctgccgcagccggacgaggctgtggcctacgccaagaagattcaggcctactgggcttctgctaagaactgatgagcaccgaatcctgtcatgatgaaattgaagcagcaatacttgtataacactccaatcatggtgaataaaggcctctaaactgttggttaatacttacttccctttggacgatgtgaaagaagaacggggaaatgaggaaatagggtagaattagtgtaggatgtatctagagatggccaaacgggccgcccggcccggcccgggcccggtgaagcccggccaaaaaccgggccgggcctgctgagccagcgggcttaattttctgtccaagcccggcccgcagcgggccgaaa

SEQ ID NO: 122189 - DNA, 650 bp, Zea Mays
acagcacaggccgccacacaaagctcttgagctccaaatctagcagcagctagagctagagctacaatcaccgaagaagataaagatacacacgactttgtgcaacaatcaccgacacacacatagctagagctagagatggcggcgggaaagctggggcagcagctgatgacgaggctgcacctcgcgaggacccgaccgtcggcgacggcggacgtgccgcggggccacctggcggtgtacgtgggcgaggggcggaagcggctggtcatcccaacggcgtgcctcagccacccagccttcgtcacgctgctgaagcgggtggaggacgagttcggcttcgaccaccgctgcggcggcctcaccatcccctgcgcctccgagaccgagttcgctcacatcgtgggcgccgccgccgccggggacggccaccaccatcactgacgatcgcgtgcgtgcccgcgccgatcgatcgagttagagtccggccgtgtcgatagattaattccgcttccagttccacctagctaggacaaaattattgttctcttttggggtggtgtcgatcgtagcagcaatagtgttgggttttgcttgacgacactgtaaagattgtgattgggaattggaagaataagctcttctctcac

SEQ ID NO: 122190 - DNA, 617 bp, Zea Mays
gtaatctgcaaaggaaggatgaagataaggatttaataaaagcaagttgcaggtccttggagacagttgctatgcagatttttgcacacttaggttacatttttcttttgcgtatgattttgtttattttcatttcgaatatttaaaaaatatctatagtcattgtgcatattaaattgcgattatgcacctttatttaatatatacaatgttaattgacattgtatattctgttatagagttgtatagacctccttttttttcttttgcatatggttttgtttattttcattgcaaatatgtgaactttgtatacctattatccagtgaagagattagaaaagctcccagccgccgaggtcctgcagcggggacaggtcgacaagaatgttataaatcttagattttgagtgatcccaacaatctcgctgcccccagtactcctgatttgattactcaaaatacgatatgctgttgggaaaacaagcatggtggtgtcgcttgctgttgctaaccatgatgaaaggtcatttcaaactatttgcttaacttcagcttccacttatagcctcaactgatagaggtatatgcatgttgcaaaaaaaacttcttttttt

SEQ ID NO: 122191 - DNA, 354 bp, Zea Mays
gatattagcgtcccacttgaatgagtctctgtcaactttgtttgtctcttggtttctccgttataatgcttatatgctcccaagtcagttcatgtcaaccagtaagtgttcaataacattttgtttcaattgtgcataccatttgatatgtttggtcatctcagcacaaaattttagtttgttttggctatctgttttatggagaattaaaccttggataattatgttactttggtgtgattgggcagaatccactaacaacatatttgttcctgtcaaactgtgtatgaatgatttagtttacattttagaagtgtcatccataatttctagatcaaagaaaataaaaaaaaa

SEQ ID NO: 122192 - DNA, 2135 bp, Zea Mays
catttccgccgcccctcttctgctgcctctcgcctcgcgacctccgcttcgtcctcctcccgcagctgctcctgtttttgtttttgtcgatttttgtcgctggagcgaggattttttgaggaatatttcgggattttggggctatttttcggggactttttttttggggggagggaggattttcgttattttctttttttttgaggcgccgccctgaactaaacgggggagatggggagagcgtgcgtgagctccaatggcgactgctcgtgtcgggaggcttagtaggacgactacgagcaggcgggcgcgtgcggggtgctgcgtgcatggaggccaagccgggggaagccagtgttgggcatgcgcctgcgcctatggcggcggcagcaccggttatggcggcgccaccactagaggagactgtgagcttccagcagccgctgccggcgccggccgcggcggcggagaggggcagctcgagcgccgtcctggtgccgcctcttgctacggcggcgggaggcggcgcgatggcgctcgtgccggtgctgatgaaggtgccgaagaagcgagggaggccgcgcaagtacgggccggacgggagcctgatccgcccgctcaacgccacgccgatctcggcgtccgcgcccttgccggccgccgtggcgcctgggcactacacgccggcctccgcggtgggcgccgccatgaagcgtggcaggggacggccccttgacttcgccgccgccgccgccaagcagcaccagcagcatcaccaccagctctaccagcatcagcagcagcagttcggcttccacttcgactccattggtgatatgggggcatgttcagctggtgcaaatttcactccacacataattacagtcgctcctggtgaggatgtgatgacgaaggtcatatcgttttcccaacaaggaccacgagctatctgtgttctctctgcaaatggtgtgatatccaccgttacactctgtcagcctgattcctctggtggcacgttaacttacgagggacgctttgagttgctgtccctgtctgggtccttcatgccaaccgaaaacggcgggacacgaagtcgatcaggtgggatgagcgtgtctctcgcgagtccagacggtcgtgttgtcggtggcggggttgccggcctgctggtggcagcgagtcctgttcaggtatgcatttgcttccgtgtttttgagatctgaatgcctgcctactagaagcctcagttgtgcagctgaactagtgaaactgcatgccccgcaccatttttattttttttgcatctgtatccttctaacggctgtagtttgctgcatataagctcacagtgtaactgatagtggagagtccccatttggcagattgtggttgggagcttcctgccaagctaccagatggagcagaagaacaagaagccacgggtggacgcggcacctgctgccgccgtcccgcagacgcctcccgcagtcccgatctcgagcacagacacccgcagcagcgagcaagggcagcagagctccgcgtcccagagaggggtgaacatgacggtcccgggaggaacctacggcgcggaccagagctgggtgttgtcccctgctccgcagcagccgatggccgaggtgtccaggacgccgtcgtctggggacctgaagatgaccacgtccggatcatgagcactctgaaacccagccggagctagccacccacgcactgactgggagccaaggtccccgctggaagatggaaggatggggtcatggattggttcatttgttcctgactcttgctgcaaatctcgcactagggcggtctagtctagttgttgctgtatgatgagcgcgccaggcaggaggaggggagtctaacaactgcacttgctgccattgtcgaggagtgcgtgtgtgtagtgcagcagctattaacaccacagtttgagtgtgctagcggcgtgtgtttttatttaggcgacattgtcgattaaattcttgtgtcgggattattacctttaccttacgtgctggtttagtttggcaccctgtatctgtatctgtattggatcatgcccacccttggcttaaatcagcattagaaaattctccatgtttcctgtt

SEQ ID NO: 122193 - DNA, 1917 bp, Zea Mays
ctcttctgctgcctctcgcctcgcgacctccgcttcgtcctcctcccgcagctgctcctgtttttgtttttgtcgatttttgtcgctggagcgaggattttttgaggaatatttcgggattttggggctatttttcggggactttttttttggggggagggaggattttcgttattttctttttttttgaggcgccgccctgaactaaacgggggagatggggagagcgtgcgtgagctccaatggcgactgctcgtgtcgggaggcttagtaggacgactacgagcaggcgggcgcgtgcggggtgctgcgtgcatggaggccaagccgggggaagccagtgttgggcatgcgcctgcgcctatggcggcggcagcaccggttatggcggcgccaccactagaggagactgtgagcttccagcagccgctgccggcgccggccgcggcggcggagaggggcagctcgagcgccgtcctggtgccgcctcttgctacggcggcgggaggcggcgcgatggcgctcgtgccggtgctgatgaaggtgccgaagaagcgagggaggccgcgcaagtacgggccggacgggagcctgatccgcccgctcaacgccacgccgatctcggcgtccgcgcccttgccggccgccgtggcgcctgggcactacacgccggcctccgcggtgggcgccgccatgaagcgtggcaggggacggccccttgacttcgccgccgccgccgccaagcagcaccagcagcatcaccaccagctctaccagcatcagcagcagcagttcggcttccacttcgactccattggtgatatgggggcatgttcagctggtgcaaatttcactccacacataattacagtcgctcctggtgaggatgtgatgacgaaggtcatatcgttttcccaacaaggaccacgagctatctgtgttctctctgcaaatggtgtgatatccaccgttacactctgtcagcctgattcctctggtggcacgttaacttacgagggacgctttgagttgctgtccctgtctgggtccttcatgccaaccgaaaacggcgggacacgaagtcgatcaggtgggatgagcgtgtctctcgcgagtccagacggtcgtgttgtcggtggcggggttgccggcctgctggtggcagcgagtcctgttcagattgtggttgggagcttcctgccaagctaccagatggagcagaagaacaagaagccacgggtggacgcggcacctgctgccgccgtcccgcagacgcctcccgcagtcccgatctcgagcacagacacccgcagcagcgagcaagggcagcagagctccgcgtcccagagaggggtgaacatgacggtcccgggaggaacctacggcgcggaccagagctgggtgttgtcccctgctccgcagcagccgatggccgaggtgtccaggacgccgtcgtctggggacctgaagatgaccacgtccggatcatgagcactctgaaacccagccggagctagccacccacgcactgactgggagccaaggtccccgctggaagatggaaggatggggtcatggattggttcatttgttcctgactcttgctgcaaatctcgcactagggcggtctagtctagttgttgctgtatgatgagcgcgccaggcaggaggaggggagtctaacaactgcacttgctgccattgtcgaggagtgcgtgtgtgtagtgcagcagctattaacaccacagtttgagtgtgctagcggcgtgtgtttttatttaggcgacattgtcgattaaattcttgtgtcgggattattacctttaccttacgtgctggtttagtttggcaccctgtatctgtatctgtattggatcatgcccacccttggcttaaatcagcattagaaaattctcc

SEQ ID NO: 122194 - DNA, 2681 bp, Zea Mays
ttgcatgtgaatccaaacgcgggacagtctttcttgcaacgcgtgggtgaagaaggagcgacgcacgactgctgctttatttttagtaaagatttgcatgcattcccggtgcgcccctacccatcgttccctgcacggctgcactcatcgtcctcccgagcgagccccgagccccggccccgccgcccatgtcgcgtgaggcgccgcccggtccgcaactgcttgcggaggtcaccgtcaacaagagcatcttctgcttcccgctcaacgactcagtcgccacctcctctggcgtcttcgccggcgacgacccgctcaagttctacttcccgctcctcctctaccatgtctgcgccgtcttcgcgctctcccgcgccgtgcacgccctgctcggccgcgccaacgtgcccctcgtcatctcccagatcgtggccggcgcgctgctcggcccgtcgctcctgggccgggtgctcccgaacgccagcgcgcccttcgcgacgccggaggggtggctgcagctcaacacggtcggcgcgtacgccttcacactgcagatctttgttatcggcgtgaagacggacctggggatgatcgtcaagtccgggaagaaggccgtggccatcgccttcttcggcgccatcgggccgcacatggccatgtacgccgccgccgccgcgctcggggcgcgcgtgccggcgccgtggaaggccaacttcatgctcaccaacctcaacgtgtggtggtcgctctcggccttcatcgtcgtctgctccacgctgggcgacctcaacctcctctcctccaagctggggcgcctcgctatgtccgcggcgctcatcggcgacttcgccaacaccatctttgtcgcgggcatcacgtcctacctcctcgcgtccagccccttggagagggtccagcggatcggcttcctgtcgctcgtcatcttcgccatcttcataggcttcctgacctacgtggcgcgcccggccatcctgcgcctcatgcgcgacgtccccgagggaggcctcctctccgaggcgcgcctcgtcgccgtgctgctcatcaccatcgtctgcagcttcgccagcgaggtcctgggcctgcacgccacctacgggcccttcatgctgggtctcatgctccccggcggcgccccgctcggggtcaccctcgaggagcgcctcgaccgcctcgtcgccggggtgctcatgccgctgctcttcgcgcagggcggcctcaggctggacgtcttcaagatcaccgacgcctccacgtgcctcctcctcgagatcttcctcctcgtcggcgtcgccgccaagcaggcggcctgcatgctgccctgcatctactgcgggatgtcgccccgggaggccttcatcgtcggcctcatgatgaacttcaagggcatcaccgaggtcgcctacgcctcggcgttcgtggactcggacatcttcgacgagcaggtgtacgccgccttcatgctcaacatcctgctgctgggcgccgccacgtcgtcgctggtcaagcacctgtaccacccggaggagaagtacgtggcgtaccggcggcgcacggtgcagcacaagaagctgggcgacgagctgcggatgctggcgtgcgtgcactcgcaggcggacgtggcgcccatgctggcgctgctggacgccgccagcccgtcgcccgtgtcgcccgtctccgtctacctcctccacctcacgccgctcgtggggctcaccagctccgtgctccgcgccttcaagtacggcgaccggaactgcgtgccgtctgggggcaccgactcggggcgcatcgtcaacgccttccagtacttcgtgcagcagcggcccgtggggtccgcgtcgctgctcccctacgtctgcatcgcgccctacgccaccatgcacgacgacgtctgcgccgtggcgctcgagaagcgcgccatgctcatcgtcgtgcccttccaccagcgcctcgccatcgacggctccgtcgagaacacgacggccagcgccggctccgtccaggccgccaacgtcaacgtgctccactactccccctgctccgtcgccatcctcgtcgaccggggcagcctctccgtcgcatcgtccgccgtggccgggggccccgcggccacagccgacgccgacggcttccctcaccgcgtcgcgctctacttcctcggcgggccggacgaccgggaggcgctcgcgctcgccacgcacatggccgaggacgcgcccatcggcctcaccgtcttccggttcctgccgccgccggagtggcgcaagggcggcgaccccgaggaggaccggctcgacgaggaggcgctgcaggagtacgtccgccgttgggtcgacggccaccgcgtcgcctacagcgagaacctggtctgtagctccgacgagatggtggacaccatccggaagtctagcccggcgtcggacctgctgatcgtcggccggcgagcggacggccccaagtcaccgctaacggtcggcatatcggactggagcgagcacctggagctcggcgtcctcggggacctgctcacgtccacggatttcggatgccgggtctcaacgttggtggtgcaacagcagaccagggcagccgccggtgagatcagccggtcgccggagaagaacgcggcgaagccacctgaatctgacggccacgtttga

SEQ ID NO: 122195 - DNA, 1969 bp, Zea Mays
aacaacaacaaggcggcgagcagagccacgccaaagcgtggggaagcctccaagccgcgggcgatcccgccgaggcgtcgtcgtccaccgcctcctccttgtactcttcgtccctgctgtcagggccgccgcgcgctttatatacagccgacccgcgtgcctgggctcgctgcctgccagcagcaagcaagcgccgaggcggagctcgcgaggcagaggctgacggcgccgatggagtggctggacgagtacgagaagctggtggtccggatgaacacgccccgcgtggtcatcgacaatgccgtctgccccacggccacgctggtgcaggtggacagcgccaggaagagagggctgctgctggaggccgtgcaggtgctcgccgacctcgacctgtccatcaacaaggcctacatctcctccgacggccgctggttcatggacgtcttccacgtcacagaccgcctcggccgcaagctcaccgacgacagcgtcatcacctacatccagcagtctctcgggacctggaacgagccggcccggccggcggcgctcgagggtctgacggcgctcgagctcacggggcccgaccgcacggggctcctgtccgaggtgttcgccgtgctggccgacctgcagtgcggcgtggtggacgcccgcgcgtggacgcaccgcggccgcctggcgtgcgtcgccttcctccgcggggagggcgacgccgaccgggtggcgcgcatcctcgcgcgcctcggccacctcgtccgcggtgacggcgaggccccgggcgccgtggcagccgtgcccgccgcggcggtcgcgcacgtcgaccgccgcctccaccagctcatggccgcggaccacaacaacagcgcgacgccgtacccggccgcggccgtgtccgtgcagagctgggccgagcgcggctactccgtggtgaccgtgcagtgccgcgaccgccccaagctgctgttcgacgtggtgtgcgcgctccactgcctggactacgtcgtcttccacggcaccgtcgacaccgccgccggcgaccgcgcgcggcaggagttctacatctgcagcgccgacgggagccccatccggtccgaggccgagagggagaggctcgcccagtgcctccaagccgccatagaccggaggtcgctagagggcgtgaggctggagctgtgcacgccggaccggccggggctgctgtccgaggtgacgcggacgttccgcgagaacgggctgctcgtcgcccacgcggaggtgtcgacgaaggggggcctggcctccaacgttttctacgtgaccgacgcggatggcaaggcggcgggccagagcgccatcgaagctgtcagggcgagggtcggcgcggactgcctcgtcgtgggcgaggagccccggccgccgcgcgtgttcccggaggccgggcctggcgaccgtgaccacggcggcggcggccttgggctggtctacctcggcaacctcgtgaagcggaacctgtacaacctcggcctcatcaagtcgtgctcgtgaactcggcaccaagaaaagacacgggcggtttctcaaggagacccacccgccattgacgtactgtgtacgtacaagatcgaggaaccggcgccgacggcatcaactaaacaccgcgacatggagcgccgctcaagcagggtgaaattcgggtcgggcatggtgttgtactcgagaggaaatgtcgtcgtccgtcatcaacaggcaccgacgccatggatggacggacggtcggacactgacgacggttgaggaggggtgattagcaataggaatttgtgtagccatctgccatgtacatagacaaattcgttgttgtcggtaccagtagaagaagtagcgcgtagccgtgtagtgggtgcattcatcgtatttaacttctgtcatatttacggaacaggcacatcattttttttcacccgaaacgcttactaaatttgct

SEQ ID NO: 122196 - DNA, 1005 bp, Zea Mays
tgcatcctgacgtctcctccctcatctacctcctctcacctcgcgctcgttgcctcgactagttcggttcttgggagagccagtctgctgctgcttgcggtgactggcaccagcgcgcaaggcttcctagagaccatctacctgcgccgttccgatgggttgcttcgggtgcttcgcgccggaggcggacgaggaccttaggccctccaagcacgacgattcgtcaggggctgatgcgaggaggaaggtcgcgccggatgtggccagcggctacgcgcacagcttcaccttcaaggatctgcttgtggcaactggctacttcaacgaggccaatttcataggagaaggtggattcgggaaggtgtacaagggcaagatcaacggacagtgaagcagctcgctcgagacgctcgagacggagttcttggtcgaggtgctcatgctgacggtgctcaaccatcgcaaccttgtcagcttggtcgggttctacgcgtggacgagaggctgttgcctgctggtctatgagtacatgccgttcggaagcctggagagccatctgtttgacaatcctaaggtctaaggatacagccgggtggcgttatggattcacggccttatttctttctgtgagatctttagaattctttcagggaatggaatgcatatggagcttttcttccatgttaaatggcagtgactctgtcatatctttctaccatccactatttgtggacccatctatacactaaacacacttaaatgttttctagaccgcggagcacgcacaatttactagttaagatatagtttagtttcacaacaatggccgatatagcagaagccaagtgttatgatgatttgttttttcaattctatgttgtgttattggttcagcatgcacatatattgacatgatttatggcatggcatctgccatctttgttatatttatgacatcgttcttgattgatgtgtgcgacatgaatgatggatctttttaacatc

SEQ ID NO: 122197 - DNA, 801 bp, Zea Mays
aaatctctcagataagttgaatagtatcgaaaaccctaatccgtctccctcctatcgcactcgcgtctctttcctattcgcgccgccgccgctgctgcaagcgccagctcgccgtcgtccgaatagtacactctaacgccgccatggggcgtatgcacagccgcgggaagggtatctcgtcgtcggcgctgccgtacaagaggacgcctcctacctggctgaagaccgccgcctccgacgtggaggagatgatcacaaaggcagcgaagaagggacagatgccgtcgcagatcggcgtcctgctccgtgaccagcacggtatcccccttgtcaagagtgtcaccggcagcaaaatcctccgcatcctcaaggcccatgggctggcacccgaaatcccggaggacctgtacttcctcatcaagaaggcggtggcgataaggaagcaccttgagaggaacaggaaggacaaagactctaaattcaggctcattcttgtcgagagcaggatccaccgccttgcccgctactacaagcgcacaaagaagcttccacccacgtggaagtagtaagtcactcaaacccatgcattgtagtttgttcttgtttgtactagcatgactactgaagtaagtggcattagcttggttaacttgttaattgttgatctgctgtgtctggtgatctctacagaggagatgtgtagtattgtagtaattttttaatgtcagtgtattgttgattgtattcagatgctactgattgtttgctacctaatcatgtaatcactacaattccgtgtgt

SEQ ID NO: 122198 - DNA, 465 bp, Zea Mays
aaatctctcagataagttgaatagtatcgaaaaccctaatccgtctccctcctatcgcactcgcgtctctttcctattcgcgccgccgccgctgctgcaagcgccagctcgccgtcgtccgaatagtacactctaacgccgccatggggcgtatgcacagccgcgggaagggtatctcgtcgtcggcgctgccgtacaagaggacgcctcctacctggctgaagaccgccgcctccgacgtgagagccttctcctctccttcgactccattccattcggccgtcgtctggttcgttattgttgggaatgcggatttggttcgttgacgtgtgttgtcgcctggtaggtggaggagatgatcacaaaggcagcgaagaagggacagatgccgtcgcagatcggcgtcctgctccgtgaccagcacggtatcccccttgtcaagagtgtcaccggcagcaaaatcct

SEQ ID NO: 122199 - DNA, 754 bp, Zea Mays
gagctcctcgacccccagagtataccgcagctgggttcgtatccaaaacaagttcagaggatggaaaggaagaaaagagtttatgtttatccggcagaaaattgtgaagatactggcccatgtacgtggacatcaggtaaggaaaaactatcggaaggtagtctggtctgttggcatcatggagaaagtcatactgaggtggaggagaaagggaaggggtctgcgaggtttccaacctgagaaacaacttgaaggtccatcatggcagatccaacctgcaaaggctgaggctgaggatgaatatgacttcttgaaggatggcaggaaacaggctacaggcaggttggatagagcactggctcgtgtgcgttccatgaatcagtatcctgaagcaagagaccagtaccgcaggctgcaagcctgtgttaacagcctacgagagtcccaggcgatgcaggacaggatgctggctgattcagctggcaccgatgggggtgatttcatgactgaattggaggagctatgccgggatgatggcgatgccccgatgtcgactatttcttgacatggagcttactatagatcagttagacagtgacatgttctttaccagactagatgtaatttgttgttactaaatggtctctactcatcgttgaacaccataatataatgatataacagctaatacatggacttctacagattatgataattgatcagtataatttgtggaataattatattttaaagc

SEQ ID NO: 122200 - DNA, 753 bp, Zea Mays
atgaccaagaaatgcagcatgaagtgcatgttgagtcggaggcgccaaggagataaaaaactactagacaagttcattgaccattcaactggcgaccccctagatttacttgaccagaaaacggtgcggttggctctcaaatcagcagcagggaaaaagagggctgcacccgatgacgacgacgagaagttcgaggtggaccctgaaggccgtataatcgtgcgcgaagagcgggagaagtggaaaaagaagccggtccctcgtgacgacgaggaggctgatggaaagagctctgtcagaagccagtccatcaagaagagaaggacatccggctctggctgggcctacactggtcacgagtacaccagcaagagggccagtggtgatctgaagaagaaagacaagatggaaccttacgcgtactggccgctggaccgtaagcttctcaatcgcaggtcggaccgcaaggtgtctgcgcgcaagggtatgtccagtgtcatgaagatcaccaagaagctcgaagggaagagtgcaagcgccgcgctttctgctaaacggtcgggaaaaacgtgaacaggaataattatctcttatatcatattgtaaaatctgaaacagttctcatgtagatggttagcttgcattttacgctacaattacctcagatcacttcttgttgtatcttataccaatttacgaaatttcttgatgtgttttatgacaacctcatgcgctgagagatacattcggtct

SEQ ID NO: 122201 - DNA, 820 bp, Zea Mays
aaggcccaatacggcccaaacttctgccactggcaaagccctaccaacccaagcacctatattatgtccacccacgccgcctccctccgaaaccctagaagcctccaccctccagcgcctccaccttcctcgccgcctcactccctctgaggtcgcagatccgtccggttagacgaagccgcccgcacccatggcctccggtgagctcgcctgcacctacgccgccctcatcctcagcgacgacggcatcgccatcaccgccgagaagatcgccaccatcgtgaaggcggccaacatcaaggtcgagtcctactggccggcgctcttcgctaagctcctggagaagcgcagcgttgaggatctaatcctctccgtgggatctggtggtggcgctgctccagttgctgcttccgccccagctgggggtgctgcagctgctgctgcccctgctgcagaggagaagaaggaagagcccaaggaggagtctgatgacgacatgggcttcagcctgttcgactgagaccctcgctacccagccattagcaaattcgcttatgctgtccaagacttatcttacgttatgtctgtaggcttttgttattacaagtactcaagttttgagtttttgagatgtggctatgacaatgtgatgaagaaccctaaaccatcgtattagagtgaaacttgtttctatatagagttccaagtttcttgaacctcaaacttgctctggttgatgctctgatgttttcagtcggtgctttttaatcgaagtcaaccgattttcgaattgtttgctgaattgcacggtgatcttttt

SEQ ID NO: 122202 - DNA, 802 bp, Zea Mays
aaggcccaatacggcccaaacttctgccactggcaaagccctaccaacccaagcacctatattatgtccacccacgccgcctccctccgaaaccctagaagcctccaccctccagcgcctccaccttcctcgccgcctcactccctctgcagaggtcgcagatccgtccggttagacgaagccgcccgcacccatggcctccggtgagctcgcctgcacctacgccgccctcatcctcagcgacgacggcatcgccatcaccgccgagaagatcgccaccatcgtgaaggcggccaacatcaaggtcgagtcctactggccggcgctcttcgctaagctcctggagaagcgcagcgttgaggatctaatcctctccgtgggatctggtggtggcgctgctccagttgctgcttccgccccagctgggggtgctgcagctgctgctgcccctgctgcagaggagaagaaggaagagcccaaggaggagtctgatgacgacatgggcttcagcctgttcgactgagaccctcgctacccagccattagcaaattcgcttatgctgtccaagacttatcttacgttatgtctgtaggcttttgttattacaagtactcaagttttgagtttttgagatgtggctatgacaatgtgatgaagaaccctaaaccatcgtattagagtgaaacttgtttctatatagagttccaagtttcttgaacctcaaacttgctctggttgatgctctgatgttttcagtcggtgctttttaatcgaagtcaaccgattttcgaattgtttgct

SEQ ID NO: 122203 - DNA, 729 bp, Zea Mays
cctctggctcgcgcccttgcttgccgccgctgccgccgcgattggcgcctaacctcggtgtcgtgtttttcttttcttagcagaggtcgcagatccgtccggttagacgaagccgcccgcacccatggcctccggtgagctcgcctgcacctacgccgccctcatcctcagcgacgacggcatcgccatcaccgccgagaagatcgccaccatcgtgaaggcggccaacatcaaggtcgagtcctactggccggcgctcttcgctaagctcctggagaagcgcagcgttgaggatctaatcctctccgtgggatctggtggtggcgctgctccagttgctgcttccgccccagctgggggtgctgcagctgctgctgcccctgctgcagaggagaagaaggaagagcccaaggaggagtctgatgacgacatgggcttcagcctgttcgactgagaccctcgctacccagccattagcaaattcgcttatgctgtccaagacttatcttacgttatgtctgtaggcttttgttattacaagtactcaagttttgagtttttgagatgtggctatgacaatgtgatgaagaaccctaaaccatcgtattagagtgaaacttgtttctatatagagttccaagtttcttgaacctcaaacttgctctggttgatgctctgatgttttcagtcggtgctttttaatcgaagtcaaccgattttcgaattgtt

SEQ ID NO: 122204 - DNA, 890 bp, Zea Mays
aaggcccaatacggcccaaacttctgccactggcaaagccctaccaacccaagcacctatattatgtccacccacgccgcctccctccgaaaccctagaagcctccaccctccagcgcctccaccttcctcgccgcctcactccctctgaggtcgcagatccgtccggttagacgaagccgcccgcacccatggcctccggtgagctcgcctgcacctacgccgccctcatcctcagcgacgacggcatcgccatcaccgtgcgttctctcacgctgcagtgttcttttaatctcagagttttcttttttttgagcggtcgcgtggttatgtggggggtgtttcttgtttgcaggccgagaagatcgccaccatcgtgaaggcggccaacatcaaggtcgagtcctactggccggcgctcttcgctaagctcctggagaagcgcagcgttgaggatctaatcctctccgtgggatctggtggtggcgctgctccagttgctgcttccgccccagctgggggtgctgcagctgctgctgcccctgctgcagaggagaagaaggaagagcccaaggaggagtctgatgacgacatgggcttcagcctgttcgactgagaccctcgctacccagccattagcaaattcgcttatgctgtccaagacttatcttacgttatgtctgtaggcttttgttattacaagtactcaagttttgagtttttgagatgtggctatgacaatgtgatgaagaaccctaaaccatcgtattagagtgaaacttgtttctatatagagttccaagtttcttgaacctcaaacttgctctggttgatgctctgatgttttcagtcggtgctttttaatcgaagtcaaccgattttcgaattgtt

SEQ ID NO: 122205 - DNA, 1511 bp, Zea Mays
aaggcccaatacggcccaaacttctgccactggcaaagccctaccaacccaagcacctatattatgtccacccacgccgcctccctccgaaaccctagaagcctccaccctccagcgcctccaccttcctcgccgcctcactccctctggtacgtgccgtcggctccacctctggctcgcgcccttgcttgccgccgctgccgccgcgattggcgcctaacctcggtgtcgtgtttttcttttcttagcagaggtcgcagatccgtccggttagacgaagccgcccgcacccatggcctccggtgagctcgcctgcacctacgccgccctcatcctcagcgacgacggcatcgccatcaccgtgcgttctctcacgctgcagtgttcttttaatctcagagttttcttttttttgagcggtcgcgtggttatgtggggggtgtttcttgtttgcaggccgagaagatcgccaccatcgtgaaggcggccaacatcaaggtcgagtcctactggccggcgctcttcgctaagctcctggagaagcgcagcgttgaggatctaatcctctccgtgggatctggtatgcaccctgtcttgctatcaagatactttcgtgtgtttatatgccggtggatggtggttattcttgtagatttaccttattcggttatgtccctagttttttttacaatcttaattcttaacgtctttaaatattgttcgtattacccaaccctgtgatagggtcagttctgtcctacttgaccgattagtagtacattataagatctcacattcattgtaaccgaaccttactgtgtatttgtactcactaaactgagtattaagtatctttctgtttacttgaattgaaccttagtttttttttcaatgctaaatttgacatgtatgtgactccaatcttcattgtgctagtgaaatggagaggcattgccatgagtacattcaggatgcatttggccccttattttgttccagaattaccttacatccactaatgagttccctgtgcatgtttatactggtttatactggaacttcatgctagattgtgttaatttgtcgccctttgtgttgttagtcttgaatttgtgcataagatttttccagttctattctgaaaggactaacaatttgctgtattgaaattcgtttgtaggtggtggcgctgctccagttgctgcttccgccccagctgggggtgctgcagctgctgctgcccctgctgcagaggagaagaaggaagagcccaaggaggagtctgatgacgacatgggcttcagcctgttcgactgagaccctcgctacccagccattagcaaattcgcttatgctgtccaagacttatcttacgttatgtctgtaggcttttgttattacaagtactcaagttttgagtttttgagatgtggctatgacaatgtgatgaagaaccctaaaccatcgtattagagtgaaacttgtttctatatagagttccaagtttcttg

SEQ ID NO: 122206 - DNA, 752 bp, Zea Mays
agttgggagaggtgatctttgcatgtgtccagtagaatttgaaccttctgtaagtgatgatttagtactggagaagaaatctggaaatgggcagcatgatgtcagaggcacacatcatcacataaccagcatgaaacctgaaaaaccaattaacttgcttaggaaagttgatggcaataatatgtgtgttgactgtggtgcttcagaacctgattgggtatcattaaaccttggcgcacttctatgcatagagtgttctggggtgcacagaaatcttggagtgcatatatcaaaggttagatctctgacacttgatgttagagtttgggagccatctgtaatcaatctctttcagtcattaggcaacatgtttgtcaacagtatttgggaagagacgctgccagatgataattcaagtgctgatggatcagacacatcacagtacctctctgttagcaaacctaatctctttatgagaattttggtttattttgtttgattccggctctcatcaagtgactcctccccctcacgctgactttgcggacagatgtctcaattctagtggtggagctacgaacaacaatctgatgtcctgatcgagagcgatggagctaatgtttgaacttgtgaactaaaaatatgaactatggatgtgaacttatgtatttggaattatgtgaatttgtgaacttatgtatttggacttgtgtgaatttgtgatatgaacatatatccatgtgtttgaaatc

SEQ ID NO: 122207 - DNA, 82 bp, Zea Mays
ggaagaatcgacacacatatctagggccaggcccaggagaagtcaaagcaattcagagaagcaggattgctgcatgctgttt

SEQ ID NO: 122208 - DNA, 1866 bp, Zea Mays
ttcccttctcattcctcatcatcgtcttcctcctctggccttcccatcttcttcctctcgtcctcgatcgatcatcctgctaactagctagaggtctggcactagctgctaactagaaaaaaggaagaaagcaagcaagctaagaaggaattgaagatcgtatcatcaatgagcatctcggtgaacgggcagtcgtgcgtgccgccggggttccggttccaccccacggaggaggagctgctcaactactacctccgcaagaaggtggcctcccagcagatcgacctcgatgtcatccgcgacgtcgacctcaacaagctcgagccatgggacatccaagagagatgcaagatcgggtcgggtccccagaacgactggtacttcttcagccacaaggacaagaagtacccgacggggacgcgcaccaaccgcgctacggccgccggcttctggaaggccaccggccgcgacaaggccatctacagcgccgtcaggcgcatgggcatgcgcaagacgctcgtcttctaccggggccgcgcgccgcacggccacaagtccgactggatcatgcacgagtatcgcctggacgaccctgacgccgccgccgtcgccgccacggtagccgctgctgccgcgtcgtccgacggcgggcaggaggacggctgggtggtgtgcagggtgttccagaagaagcaccaccacaaagagtcgtcaggcagatgccgcagcaagcgcggcagtaaaaccgaacacgggcacggcgaggccaagacggcggcgcaccaacgccacggctgcggcctgcagtactcctccaacgacgacacgctggaccatatgctgggcaggcggtcctgcaaacaggagcacgagctgctgccgctgccgccgccggcggctgcgcgggcggcgtccaggtacatccggcccatcgagaccgtgctgggcgggcacgggttcatgaagctgcccccgctcgagagcccggcggcggcggaggcgctgacgacgccgcacgccgtctctgcaggcgacgccaccgccgccggggccctcgacggcctccaccgcgccgggaacgggatcacggactgggtcatgatggaccggatggtggcgttgcacctcaacgggcaggcacccgccgcggaccagctcggcagctgcttcgacgccagcgcggacggcggcggcctcgcctgcttctactccgctgccgccaacaggctgctcggcggcggcgacgacgacctgtggagcttcacgcgatcgtcgtcgacggagcggctgggccatgtgtcgctttagacagacgcccggccgttcgtcgtcgatcgccttacttatgtacgtacgtacgtcgtagggaattagggatcgggaaagcactgccgcatgtgtgtgtgtggctcagtggctggccacacaacctatctccgccgtccatctcgcttgcgggtcccacacacaaagctccggtgaacttgggtcagattgattgaaccatatatatcctcgatgacaatcggttcttcaacttcattaacaaacaaccctagtttattttaaaactaaaacacgataaataaaaaagaacggagagagagtactatatatatatagaaccagtaatgcgatatgcttgtttgacatcctcggaccatagggaccataggagtaggagcaagtttcttctttctttctaggcacataaaaacttgcttaggaggtgacaatcggtctttctttttttatgggccgatccactgaatcgggccttttattgcttgatttgcttgttgataagggcatgtttgtttgtgattgcaatatatctagatcatataatctaacgtattttgaacc

SEQ ID NO: 122209 - DNA, 211 bp, Zea Mays
gttcaacccagcgcgcccaaccagcctgtcgggtgcgccacctgccccacgtctgttagcgcaaaaaaaggaatgcatgcataagtcaaacacgatccaatgcatgcgcgtaaatttaggaaaaatatgtgtggcggtttctatttttaaatgttttatttcctccataaatttaggatcgctgcaacagccatgcagctagacacgtaag

SEQ ID NO: 122210 - DNA, 1887 bp, Zea Mays
ctgctgagtctctcacctgctggcggaggcggcccccaaaagccaaattccccaacccacaccacctccacactccagttttttccggcgcaaagggttagggtttgctgtcggcgatgtcggatcggcagccgtcggaggagccggaggagcaggtggacctggagggggacgacgacggcatggacgacgacgacgccgggtaccgtcgccgcggaagccgggacgactcggaggagcccgaggaggatgacgacaatgacgagcgccacggcgacgccgacgacgacgccgggatggagccggagccggccggaagtaaaggcggggatgacacgggcaaggggcccgacgtcgccggtggcgggcccgaggacgaggaggagaggagcaagtgggatgacatgctcgccctgccgccccatggctctgaggtcttcattggtggcctgccccgcgacatcacggaggaggacctccgtgagctgtgcgagccgttgggagaaatatatgaggtgaggttgaccaaggataaggacacaaaggagaacaaggggttcgcctttgtcaccttcatggacaaggaggctgcgcagcgcgccatcgaggatgtgcaagacagggagttcaaggggaggactttgcggtgctctctgtcgcaggcaaagcacaggctgtttgttgggaatgtgcccaaggggctgagcgaggaggagcttaccaacactatcaaggggaagggtccaggtgttatcaacattgagatgtttaaggatcagcatgacccaaaccgtaaccgtggcttcctctttgttgagtattacaaccatgcctgcgcagactatgccaggcagaaactttcatctccaaacttcaaggttgatgggagccagttgactgttagttgggctgaacctaagggttcaacagatgcttcatctgcagctgctcaggtgaagactatatatgtgaagaacctacctgaaaatgtttctaaagagaagataaaggacctgtttgacaaacatggagaggtcacaaaaatcgttctgcctcctgccaaggctggtcataagagagactttggctttgttcactttgcagaaagatcaagtgcattgaaggcagttaaaggaagtgaaaaatatgaaatcgatggtcaagtactggaagtgtccatggccaaaccattggcagataagaaacctgatcattcacacaggcctggaggaggccctaattatccccttcctccctatggtggtggtggctacatgggagatccatatggtgcttatggtggcggcggtcctgcatacaaccagccaatgatatatggcagaggaccagcaccggcaggaatgaggatggtgccgatggtgcttcctgatggccgccttggctatgtcctgcaacaacctggtggaatgccgcctccgcccccaccgcggaggggtagtgaccgaagagacagtggcagaggtggcgaagggcacagccggcgatatcgcccttactagcttttcccttatgggctctactcccatcatgtggtatgaagcgtttaacttatgagacgagataggagcctgtgttcttgtcccagtataagatctgcgatggcacgatgcttgtaccatctgtttacttatttttatcatgcagtgcatgtgacttgaaactgtgatggacttgtattgctttctgccttatggcacctgtagtagtgaactgatgaaggaagttcatgcggactctgaagctttgttggcttagaatggtaattttgctgtattctatttcacaggagataatctgtcccgaccttagcaattgtcgttcatcttggtgtaactgacgctagagctgaagctagcggcttgtttc

SEQ ID NO: 122211 - DNA, 1869 bp, Zea Mays
ctgctgagtctctcacctgctggcggaggcggcccccaaaagccaaattccccaacccacaccacctccacactccaggttagggtttgctgtcggcgatgtcggatcggcagccgtcggaggagccggaggagcaggtggacctggagggggacgacgacggcatggacgacgacgacgccgggtaccgtcgccgcggaagccgggacgactcggaggagcccgaggaggatgacgacaatgacgagcgccacggcgacgccgacgacgacgccgggatggagccggagccggccggaagtaaaggcggggatgacacgggcaaggggcccgacgtcgccggtggcgggcccgaggacgaggaggagaggagcaagtgggatgacatgctcgccctgccgccccatggctctgaggtcttcattggtggcctgccccgcgacatcacggaggaggacctccgtgagctgtgcgagccgttgggagaaatatatgaggtgaggttgaccaaggataaggacacaaaggagaacaaggggttcgcctttgtcaccttcatggacaaggaggctgcgcagcgcgccatcgaggatgtgcaagacagggagttcaaggggaggactttgcggtgctctctgtcgcaggcaaagcacaggctgtttgttgggaatgtgcccaaggggctgagcgaggaggagcttaccaacactatcaaggggaagggtccaggtgttatcaacattgagatgtttaaggatcagcatgacccaaaccgtaaccgtggcttcctctttgttgagtattacaaccatgcctgcgcagactatgccaggcagaaactttcatctccaaacttcaaggttgatgggagccagttgactgttagttgggctgaacctaagggttcaacagatgcttcatctgcagctgctcaggtgaagactatatatgtgaagaacctacctgaaaatgtttctaaagagaagataaaggacctgtttgacaaacatggagaggtcacaaaaatcgttctgcctcctgccaaggctggtcataagagagactttggctttgttcactttgcagaaagatcaagtgcattgaaggcagttaaaggaagtgaaaaatatgaaatcgatggtcaagtactggaagtgtccatggccaaaccattggcagataagaaacctgatcattcacacaggcctggaggaggccctaattatccccttcctccctatggtggtggtggctacatgggagatccatatggtgcttatggtggcggcggtcctgcatacaaccagccaatgatatatggcagaggaccagcaccggcaggaatgaggatggtgccgatggtgcttcctgatggccgccttggctatgtcctgcaacaacctggtggaatgccgcctccgcccccaccgcggaggggtagtgaccgaagagacagtggcagaggtggcgaagggcacagccggcgatatcgcccttactagcttttcccttatgggctctactcccatcatgtggtatgaagcgtttaacttatgagacgagataggagcctgtgttcttgtcccagtataagatctgcgatggcacgatgcttgtaccatctgtttacttatttttatcatgcagtgcatgtgacttgaaactgtgatggacttgtattgctttctgccttatggcacctgtagtagtgaactgatgaaggaagttcatgcggactctgaagctttgttggcttagaatggtaattttgctgtattctatttcacaggagataatctgtcccgaccttagcaattgtcgttcatcttggtgtaactgacgctagagctgaagctagcggcttgtttc

SEQ ID NO: 122212 - DNA, 1863 bp, Zea Mays
ctgctgagtctctcacctgctggcggaggcggcccccaaaagccaaattccccaacccacaccacctccacactccaggttagggtttgctgtcggcgatgtcggatcggcagccgtcggaggagccggaggagcaggtggacctggagggggacgacgacggcatggacgacgacgacgccgggtaccgtcgccgcggaagccgggacgactcggaggagcccgaggaggatgacgacaatgacgagcgccacggcgacgccgacgacgacgccgggatggagccggagccggccggaagtaaaggcggggatgacacgggcaaggggcccgacgtcgccggtggcgggcccgaggacgaggaggagaggagcaagtgggatgacatgctcgccctgccgccccatggctctgaggtcttcattggtggcctgccccgcgacatcacggaggaggacctccgtgagctgtgcgagccgttgggagaaatatatgaggtgaggttgaccaaggataaggacacaaaggagaacaaggggttcgcctttgtcaccttcatggacaaggaggctgcgcagcgcgccatcgaggatgtgcaagacagggagttcaaggggaggactttgcggtgctctctgtcgcaggcaaagcacaggctgtttgttgggaatgtgcccaaggggctgagcgaggaggagcttaccaacactatcaaggggaagggtccaggtgttatcaacattgagatgtttaagcatgacccaaaccgtaaccgtggcttcctctttgttgagtattacaaccatgcctgcgcagactatgccaggcagaaactttcatctccaaacttcaaggttgatgggagccagttgactgttagttgggctgaacctaagggttcaacagatgcttcatctgcagctgctcaggtgaagactatatatgtgaagaacctacctgaaaatgtttctaaagagaagataaaggacctgtttgacaaacatggagaggtcacaaaaatcgttctgcctcctgccaaggctggtcataagagagactttggctttgttcactttgcagaaagatcaagtgcattgaaggcagttaaaggaagtgaaaaatatgaaatcgatggtcaagtactggaagtgtccatggccaaaccattggcagataagaaacctgatcattcacacaggcctggaggaggccctaattatccccttcctccctatggtggtggtggctacatgggagatccatatggtgcttatggtggcggcggtcctgcatacaaccagccaatgatatatggcagaggaccagcaccggcaggaatgaggatggtgccgatggtgcttcctgatggccgccttggctatgtcctgcaacaacctggtggaatgccgcctccgcccccaccgcggaggggtagtgaccgaagagacagtggcagaggtggcgaagggcacagccggcgatatcgcccttactagcttttcccttatgggctctactcccatcatgtggtatgaagcgtttaacttatgagacgagataggagcctgtgttcttgtcccagtataagatctgcgatggcacgatgcttgtaccatctgtttacttatttttatcatgcagtgcatgtgacttgaaactgtgatggacttgtattgctttctgccttatggcacctgtagtagtgaactgatgaaggaagttcatgcggactctgaagctttgttggcttagaatggtaattttgctgtattctatttcacaggagataatctgtcccgaccttagcaattgtcgttcatcttggtgtaactgacgctagagctgaagctagcggcttgtttc

SEQ ID NO: 122213 - DNA, 2032 bp, Zea Mays
agccctgctgagtctctcacctgctggcggaggcggcccccaaaagccaaattccccaacccacaccacctccacactccagtaagcaccccgcctcccccctcgatctccctcctccaattccttctgctgctgcgactgaatcgaattgctccactgctactaatctctatactactactgcttgctcctgtttcaatcgatcaatcatgccgcgcgtaggttttttccggcgcaaagggttagggtttgctgtcggcgatgtcggatcggcagccgtcggaggagccggaggagcaggtggacctggagggggacgacgacggcatggacgacgacgacgccgggtaccgtcgccgcggaagccgggacgactcggaggagcccgaggaggatgacgacaatgacgagcgccacggcgacgccgacgacgacgccgggatggagccggagccggccggaagtaaaggcggggatgacacgggcaaggggcccgacgtcgccggtggcgggcccgaggacgaggaggagaggagcaagtgggatgacatgctcgccctgccgccccatggctctgaggtcttcattggtggcctgccccgcgacatcacggaggaggacctccgtgagctgtgcgagccgttgggagaaatatatgaggtgaggttgaccaaggataaggacacaaaggagaacaaggggttcgcctttgtcaccttcatggacaaggaggctgcgcagcgcgccatcgaggatgtgcaagacagggagttcaaggggaggactttgcggtgctctctgtcgcaggcaaagcacaggctgtttgttgggaatgtgcccaaggggctgagcgaggaggagcttaccaacactatcaaggggaagggtccaggtgttatcaacattgagatgtttaaggatcagcatgacccaaaccgtaaccgtggcttcctctttgttgagtattacaaccatgcctgcgcagactatgccaggcagaaactttcatctccaaacttcaaggttgatgggagccagttgactgttagttgggctgaacctaagggttcaacagatgcttcatctgcagctgctcaggtgaagactatatatgtgaagaacctacctgaaaatgtttctaaagagaagataaaggacctgtttgacaaacatggagaggtcacaaaaatcgttctgcctcctgccaaggctggtcataagagagactttggctttgttcactttgcagaaagatcaagtgcattgaaggcagttaaaggaagtgaaaaatatgaaatcgatggtcaagtactggaagtgtccatggccaaaccattggcagataagaaacctgatcattcacacaggcctggaggaggccctaattatccccttcctccctatggtggtggtggctacatgggagatccatatggtgcttatggtggcggcggtcctgcatacaaccagccaatgatatatggcagaggaccagcaccggcaggaatgaggatggtgccgatggtgcttcctgatggccgccttggctatgtcctgcaacaacctggtggaatgccgcctccgcccccaccgcggaggggtagtgaccgaagagacagtggcagaggtggcgaagggcacagccggcgatatcgcccttactagcttttcccttatgggctctactcccatcatgtggtatgaagcgtttaacttatgagacgagataggagcctgtgttcttgtcccagtataagatctgcgatggcacgatgcttgtaccatctgtttacttatttttatcatgcagtgcatgtgacttgaaactgtgatggacttgtattgctttctgccttatggcacctgtagtagtgaactgatgaaggaagttcatgcggactctgaagctttgttggcttagaatggtaattttgctgtattctatttcacaggagataatctgtcccgaccttagcaattgtcgttcatcttggtgtaactgacgctagagctgaagctagcggcttgtttc

SEQ ID NO: 122214 - DNA, 1805 bp, Zea Mays
agccctgctgagtctctcacctgctggcggaggcggcccccaaaagccaaattccccaacccacaccacctccacactccagtaagcaccccgcctcccccctcgatctccctcctccaattccttctgctgctgcgactgaatcgaattgctccactgctactaatctctatactactactgcttgctcctgtttcaatcgatcaatcatgccgcgcgtaggttttttccggcgcaaaggtaacgagcgaacacgagccccggtttcccgaccccctctcccagatccgcagcgcgcccgcgcgattccgtccgcccgacgcgagttcccctgtgtattttttttgtgatgatttttttgacctctttgcctggtctagggttagggtttgctgtcggcgatgtcggatcggcagccgtcggaggagccggaggagcaggtggacctggagggggacgacgacggcatggacgacgacgacgccgggtaccgtcgccgcggaagccgggacgactcggaggagcccgaggaggatgacgacaatgacgagcgccacggcgacgccgacgacgacgccgggatggagccggagccggccggaagtaaaggcggggatgacacgggcaaggggcccgacgtcgccggtggcgggcccgaggacgaggaggagaggagcaagtgggatgacatgctcgccctgccgccccatggctctgaggtcttcattggtggcctgccccgcgacatcacggaggaggacctccgtgagctgtgcgagccgttgggagaaatatatgaggtgaggttgaccaaggataaggacacaaaggagaacaaggggttcgcctttgtcaccttcatggacaaggaggctgcgcagcgcgccatcgaggatgtgcaagacagggagttcaaggggaggactttgcggtgctctctgtcgcaggcaaagcacaggctgtttgttgggaatgtgcccaaggggctgagcgaggaggagcttaccaacactatcaaggggaagggtccaggtgttatcaacattgagatgtttaaggatcagcatgacccaaaccgtaaccgtggcttcctctttgttgagtattacaaccatgcctgcgcagactatgccaggcagaaactttcatctccaaacttcaaggttgatgggagccagttgactgttagttgggctgaacctaagggttcaacagatgcttcatctgcagctgctcaggtgaagactatatatgtgaagaacctacctgaaaatgtttctaaagagaagataaaggacctgtttgacaaacatggagaggtcacaaaaatcgttctgcctcctgccaaggctggtcataagagagactttggctttgttcactttgcagaaagatcaagtgcattgaaggcagttaaaggaagtgaaaaatatgaaatcgatggtcaagtactggaagtgtccatggccaaaccattggcagataagaaacctgatcattcacacaggcctggaggaggccctaattatccccttcctccctatggtggtggtggctacatgggagatccatatggtgcttatggtggcggcggtcctgcatacaaccagccaatgatatatggcagaggaccagcaccggcaggaatgaggatggtgccgatggtgcttcctgatggccgccttggctatgtcctgcaacaacctggtggaatgccgcctccgcccccaccgcggaggggtagtgaccgaagagacagtggcagaggtggcgaagggcacagccggcgatatcgcccttactag

SEQ ID NO: 122215 - DNA, 87 bp, Zea Mays
tttaacctttattctgatcttatgtatgcagtgatttctcaggtcttgtccatatattcaaaccaatatggataccatattatatcc

SEQ ID NO: 122216 - DNA, 617 bp, Zea Mays
aaagatgaagtagccaccgacgagcaaaataaccaagcattgcattttccatggcaccatctctcgcctacactcaagaacgagtacatgtcagagagaaaggcaagtaacctctggatgcattgcaacaacgttttgagaggttaaagtacacaatattgccccaagcacaacaagattgggctcgccttagatatgacgactttaaaactatgggagaatataatgcagcaccgcaccgaatatgcaccaaattatctctttgtggtaaggtgataatagccattcaatctgcccgcaactatcgacaagacgcatacaagcagtatggcgatcttatcgatatgatgcaagtaaatgaggcacaagatgatgcattgaaaacgaactttaatgcttatccaaatggaaagggcattatcactgaagttaatgtcgcctcgtacaagataagtgaaagggaaatagggtcaaaccttttcctaaatgattttggtggttgaatttcccaacacaaataattatactaactagtttgctctagattataagttccataggtgccaaaggttcacaacaaaccaatacaaagttaaaagaaagggttcaaaacaaag

SEQ ID NO: 122217 - DNA, 2206 bp, Zea Mays
acgagcggcggtagctagctcatggtagtcgtcgccatggcagtcatgcaagggcaagcaggagcaacgcgtgtcgccgtctccctcgtcttgctcctcctggcaagcctcaccggcgggagccccccgccggaaccggtgtcgtgcgcgcggggcacgtccgactgcacggtgacgagcacgtacgggtcgttcccggaccgcgccgtgtgccgcgcggcgaacgcgacgttcccgcgcacggagaaggagctggtggcggcggtggcggcggccgcggcgtcgcggcgcaaggtcaaggtggccaccagccactcgcacagcttcccgaagctggcgtgcccgggcggccgcgacggcaccatcatcagcacggagcggctgaaccggacggtgcgcgtggacgcggcgcgccggctgctgacggtggagagcggcatgctgctgcgggacctcgtcagggccgccgccgacgccgggctggcgctgccgcactcgccctactggtacggtctcaccgtcggcggcttgctggccacgggcgcccacgggagctcgctgtggggcaagggcagcgccgtgcacgagtacgtggtcgcgctcaggatcgtcacgcccgcgccggcctcccagggcttcgccgtcgtcagggagctcgtggccggcgaccccgacctggacgccgccaaggtctcgctcggcgtcctcggcgtcatatctcaggtcacttttgagctgcagccgcagttcaagcggtcggtgacgttcgtgacgcgggacgacaaggacatggcggagaagctgtccgtgtggggcggcctccacgagttcggcgacgtgtcgtggctgccgcggcaggggaaggccatctaccgcgaggacgaccgcgtggacgtctcgacgccgggcaacgggctgaacaactacatcggcttccgcgcgcagccgacgcttggcctgctgaccgccaggaaagccgaggagcggctggaggagaacggcaccgacgtggcgcggtgcctggcggcgcggctccccgcggcgacgttcgagctgcaggcgtacgggttcaccaacgacggcttcttcttcacggggtaccccgtggtggggttccagcaccggatccaggcgtccggtacgtgcatcaacggcgccgacgacgggctgctgtccgcctgcacgtgggactcccgtgtccgcgggcccttcttctaccagtcgggcttcagcgtggccatgcccaaggtgcccgcgttcgtggccgacatgcagcggctgcgcgacctcaacccgcgcgccttctgcgggatggacgccaagatgggcgtgctgatgcgctacgtgcgggcgtcgtcggcgtacctgggcaaggcggaggactcgctcgacttcgacgtcacctactaccggagctacgacgaaggcacaccccgcaagcacgccgacgtcttcgacgagctggagcagatggcgctgcgcaagtacggcgcgctcccgcactggggcaagaaccgcaacttcgccttcgacggcgtcatcgccaggtaccccgcggcggcgcggttcctggaggtgaaggacaggtacgacccggacggcatcttctccagcgagtggagcgaccaggtgctcggcatccggggcagccccaacgtggtcggcccggggtgcgccatcgaggggctctgcgtctgctccgacgacctccactgcgcgccggagcaggggtacttctgccgccccgggaaggtgtacacggacgccagggtatgcgccttggagcgacgacgcacacgcctcgtcgacgagctgtgacgaatctcgcaaacgaccacattattgctagcttgtcttggatcttgatctgcctcggctttggatttgattggtgcacgtagatctcgtagctgtcagcaaatttgataggtgcatacagtgcagggtcgcacacggtatgcgtatttactatactatgaaataatataataatgtggtttgttggaatatcagatcagtttgatcgaacggcatctctcgcctgctcttttgttatcgttggtgttgtcgttacatgctctgaatcttgttggttagacttttagggcgcgagagagtgctagtccactgggccacatttctcaaagagtggttaggtgctccatgtttatccttgtttaggagctagcagagaagagatgacccc

SEQ ID NO: 122218 - DNA, 91 bp, Zea Mays
gtttcgtgagaagaactagagttgcacatgtagttggtccatgcactgtcaatcttcatttttatctctttaccaattccccatgcatccg

SEQ ID NO: 122219 - DNA, 264 bp, Zea Mays
atgcaggtgcctctcggtttggagctgctccggctaggcttcttgctctgtttgcatgctctcttcctatatgtatacaacggtatactacctatgtcgcctccagatacccaggtcttcgtcgtgtccttctccagcaatgaacatgatttggagatccatgcgggcactaccatagggtgctcgtcccttgtgttcttggctcttggatgcattaggtcgtttctgataccacattggtgcaatggactccatgatgtttga

SEQ ID NO: 122220 - DNA, 1992 bp, Zea Mays
cgatctctcccatcccaaactcccaacgtcctcccctagcacggctttccacggccgtgtccgtgctggtgctgtgcctgcataaaagccacggccagggcagtgttaaggcgtcggagggcgcgaggggaggccgggagggacagccagcagccaagccatggacctctgccccccgcgcctgcaataataccacccctcgccgacgccgccaccatgggcaagaaggcgtggctcaccgccgtcaagcgcgccttccgctcgccctctaaggacgacagcagcagccccgccaggaaggcgtcgcgcctccgcgaggacgccgacggcgaagacgacaaggggaagcgggagcggcggagatggctgttccggaggtcctcgtccccgtcgccggccccggcaccacccgcgccggcccccgcggccgtgacggaggagcagcggcacgccatcgcgctggccgtggcgaccgcggccacggccgaggcggcggtggccacggcgcaggcggcagccgaggtggtccgcctcacgcgccccggcggccacgccgccgcccccagcttcgcgcgccgcgaccaccacgccgccgtcgccatccagaccgccttccgcggctacctcgcccgccgcgcgctgcgcgcgctcaggggcctcgtcaagctgcaggcgctggtgcgcggccacaacgtccgcaagcaagccaacatgacgctgcgctgcatgcaggcgctggtgcgcgtgcaggcccgtgtccgcgaccggcgcatgcgcctctcccaggaatccgtgctctccatgtccggcggcggcggcggcgccggcgccgcgccgtgcggcagcagtaagtcgtcgtacagcgtcgacacgtccgccttttgggaccccaagtacgcccacgactacgccgaccgtcgctccgttgagcggtcgcgcgacggcagcagcttcgccgccgacgactgggacgaccggccgcggacgatagaggagatccaggctatgctgcagacgagaaaagacgcggcgctcaagcgtgagagggcgctctcctacgccttctcacaccagattcggaggaacccagcggcgccgtcggcggacatggacgtggacgtggacgtggacgggcagccgcggtgggcggagcggtggatggcgtcgcgcgcgtcgttcgacaccagccgcagcagcgtacgcggggccgcggcggcggcgcccgggcgcgcgtccatggagcagcaccgcgagccggtgaagacgctggagatggacacggcgaggcccttctcgtactcgacgccgcggcgtcacgcgggggcgtcgtcgccgatgcaccgcgcgcagcagaaccagcatcatccggcggtggccacgccgtcgcctgtgaaggcgcggccgccgatccaggtgcggtcggcgagcccgcgcgtggaccaccaccaccgcgggactggcggcggtggcgggagctacacgccgagcctgctgcactcgcagcggcacgcggcggcggtgcccaactacatggcggcgacggagtcggccaaggcgcgcgtgcggtcgcagagcgcgccgcggcagcgccccgcgacgccggagcgggagcgcgaccgcggcgccaagaagcggctgtcgttcccggcgcagctgcagcaccaggtgctggcggcggagtacgcgcagagcctgcgcagcccgagcttcaagagcgcggcggggcggttctcgtcagagcagcggtccaccgtgtcgtcgtcgtgcgcggacagcctcggcggcggctgcggcggggacgtggggtcgccgtcgtcgtccgccgcggacctccggcgctggctccgctgagtagagctagagagtagtggcgagtggctcgtcacgtcatcagacacggccacgtgctagctgtatttcttcttttcttctttctctaggtgtaattcatggcagcttttctctattttgtattgagccgacggattggag

SEQ ID NO: 122221 - DNA, 1239 bp, Zea Mays
atgccctcggccccagccgcccctcccacgcccggtcgtccccgccccctgccgcgcccggcccccgacgcgcccagcccccgacgcccgcccccgccgaggtcgtcccgaccgccgccgcggccgtccccgccctcggccccgcccgcccccgttgagccttgcaaggggatattgcttttcggacctcctggcactggaaaaactatgcttgccaaagcagtagcaactgaagcaggcgctaatttcatcaatatatcaatgtcgagcattacatctaagtggtttggtgaaggggagaagtatgtaaaggttgttttctcactagcaagtaaaatagcacccagtgttatatttattgatgaggtcgatagtatgctaggaaggagagaaaatccaggggagcatgaagcgatgcgcaagatgaagaatgaatttatggtaaattgggatgggttgcacactaaagataaggagtgtgtggttgttcttggtgttacaaatagaccttttgacctggacgaggctgtgattaggaggttcccccgtaggttaatggtaaacttgcctgatgcatcaaacagagagaaaattctaaaagtaattttggcaaaagaagagctgggatctgatgttgatatggactcgcttgccaatatgactaatggttattcaggaagcgacctgaaggaagctagcactggtgcagtgcctagtgatgttcaaatataccttagggggcacagaggaccagatcctgcaaatccagatgtgttgtgcagccaaaagacaacagatcgtgtggctacatatggcgaggcgatgtctagtcagcacagaccagactatgactggaggacctcacctattgatcctcaggttgtgtatgcaagtggtggaaaagctcatggaaggtacacaatgtttgctaacgtcatcgactcgagccaggtgagggttcagcgtggaggttcatcgaggtctgctgcttgtagctcccgtcgctccactcaagatccagcagaagtggagcaactgcgagaagaacttatgcgacatcaggattacttgaagcaacaagctacgcaacatgaatattatgctacacagattcagcaacaacaaacactcatacaaacccctccagctaccttgtcgacgcatgaacaagacgacgggttagactttgtcgaaaccctcttcaacagtggaggtatcgaccatcactcttcattgtaa

SEQ ID NO: 122222 - DNA, 104 bp, Zea Mays
cttattttcttgaattttgctcatggggctcacttagggttcttaattagggttgcacattcttatcttttcaaagactcaattgttttgatcatgacactttt

SEQ ID NO: 122223 - DNA, 1602 bp, Zea Mays
cacacacagcacagcaccgcaccgcacaaccgtataggtcggccggccggccatccatccatccatccatcctcttgtagtacatgtctagctgggtctccatcgatccgtcgtctgtgtgtgtgtggcgtgtgcgtgggtgtagttagggctggtggtcttgtactagtcgtcctcctcctctcctgctgcgtgcggctataaagaagctaggctgcggggaggggaggtaaatgacacaagcggcaggccgccgtcgatcgatggggggagcatccggaggcgaccacccgcagcagcacggcggcggcgacgatgggcacctgcagcaaggcggcggaggcgacatggtgatgccggggttccggttccaccccacggaggaggagctcatcgacttctacctccgccgtagggtggagggcaagcgtttcaacatcgagctcatcaacctcgtcgacctctaccgctacgacccatgggatctccctgctctggcttcgatcggggacaaggagtggtacttctacgtgccgagagaccgcaagtaccgcaacggcgaccgccccaaccgggtcacgccgtccggctactggaaggccacgggcgccgaccgcacggtctacgtcgaggtcaagcggccgatcgggctcaagaagacgctggtgttctacgtggggaaggcgcccaagggactcaggagcagctggatcatgaacgagtaccgccttccttcaggcgaggccgaccgctaccaaaaggaaatttctctttgcaaagtgtacaaacgaccagggattgaagacaactttcacctcagcaccaccacagcaagatcatctggctcaaaggctgcagcaaccatggaaaagaagcaccaccgaacatcggcgtcgccccgcatggcgccagtgttcgacggtggccactcatcaggttacatgaacaagccatacagtggagcaaacaccaccatgctgggcatggcatcatcagccgcagctcgagcagctacactggcaccacagacgtcaatgttcctatcaaccccctcacttagctccaccacgtcgacagaggaggacggtacatcactctaccacatgaagggtgttaacccaccaatgctgccttcttccacacacgccctgcttaatgcaaactccgctacaatggcaacaattccaatagatgagctgagtagggcaattggatgccaaggagaccctaaccagaccttgccaacacaagctccattgcttccttttcctaacttggaaaagatttgggattggaatccactcctagaatctcccaaggtttgcacaagcttcaagtgactttcaagtggctcgaagcatatatgtgcatgcttgcatgcgtgcacctattatttatgaatacaagtgtgtatatgtgcagacacataattattatttgggctagaatgtggttgagatgtaatggaatatataggatgagatagttctagtcctatctaatgctccactatattaatcaattcaccatcacaaatatgtactatgttgcagtgatcatttgaacttaatttattgctcccaaccactagcattattttac

SEQ ID NO: 122224 - DNA, 258 bp, Zea Mays
tggaccttccacaacgacctcggccttgtcttcgtcgccgcataccagaagatactccacctcctctacgtcgatgacctcctcgccgccgtccgcagggagttctcccacatctacgaccccaagcgcacctcctacgatgactttggggacatcttccgccagctccaccgcgaggccgaggtgcgcgccgaggaaatgaagaagtccaccgcgaggccgaggcacgcgccttccatggagagtgggggcggctga

SEQ ID NO: 122225 - DNA, 1683 bp, Zea Mays
atgcagtatttagtcgcccgcatgcagctgaggccatgcacaggattacaggaagcagtcatgcaagtcctcctgcagttgctcccgttggttctctcggcggcggcggccatcctgatcgcctggcgtgcaacgccgccggtcgtcaaagcacgcctggccgccctccagtccggcatagcacgtgcgcgtaagccaataatgttggtcaccgacttcgccacagcgcaccacctgctcgtgcggggcagcagcgccggctccttctccaaccgcccgccgtccatggcacccagcgccgtcctctcgggccgccgctaccacaacatcaactcggcgccctacggccagctctggcgcgcgctccgctccaacctcacctcgggagtgctccacccgacgcgcctgcgccactacgccgccgcgcggcgccgcgcgctacaccgcctcgccgcggacctcagggagcagcagctcgccgacgacggcgtggaggcgctcgcggcggaaagcatccgtagcgcggtgttcggcctcgtctccaccatgtgcttcggcgacggcggcgtcgacgcggccgtggttcgcgccatggccgacgtccagaccgagctggtcctgtccctgtccgcggtgcgcaccttcgcgttcgtgccgttcctcgcggtgtccaagctagtctaccgcgggcggtggaacaagctcgccgcgatacggcggaagcaggaggagctgtacctcccgctcatcgatggctgccgccgcaggcgtggccgtgacgacgacgactccgacgggacgccgccgagttacgtgcgcacgctcctcgacctccgagtcccggtagaactcgacggcgaccacgatagcagtggaggcgagcagacgcagcagcggaggctcgaggacggtgaactcgtgggactatgctcggagttccttggttctggcaccgagtccgtgtcagcggcgctgcagtggatcatggcgaacctgatcaaacggccagacatgcaggacgccgtcaggagggagatcgacgctgctgtggatgccgatgccgaggaggtcggggaggaggtccttgggaagctggatctcctcaacgctgtcatcttggaggcgctcaggctacatcccaccatcaagtttggatttagggaggtgatgcaagaagaccaagtggttcatgatggccaccgtattcctgtcggcaccaagatggtcttccccctggaggctctagcgagggacaagacggcgtgggacgagcctgacgagttcatgccggaacgtttccatggatgctgcgcgggtggagaaagtaccaagaagctactgtccgtggcggcggagatgaagatgctgccgttcggaggcgggaggaggatgtgccctgcgataggcgtctcgttgctccacatcggctatttcatggcgaaccttgtgagggagttcgagtggcgggaagcggagggcggcgagcacgccggcgtccaactccaccccgacgccaccgtcgagatgttcaacttcatggagcgtccactgcgtgctcgcctcgtaccattacgtcgaccgggaggcaagaagttccgttacgtccattaattatcgatattttcactatctcaactgtcatacatacgttcaatgttacaccggctgttatctatctatcta

SEQ ID NO: 122226 - DNA, 759 bp, Zea Mays
gagatgcaggtttatgtatatttgaatatgcatatgcgtcctttcttttctctgctaggaaaatttgggagctaacttcaagttcaaacaaaatgaaaactgagaaatcgtgcctactaatttgtcttcagtgataaacattccctgggcctgtttcgatctcagtaaattcctgagatactttatggtcaagctatgactgctatttttgcttgctaaatttgtagagactatcttgcttgcctttgctatttttgcttgctaaatttgtatagactatcttgcttttatttccaggacatgtgccacaatgtggtttaaaggaatggtgagatgaaggaatgctatccttcaaggtccagttcgtgcatatactgtcctgttggcttaatgcagctatgagtattccaccaacgccactaccaagctgcagttgtcgctgcacagcggccccagccgaggtcgcctctgcacccacgaaagatgtttaacaccgctgcaactactagaagctattgcggttctgcgacctgactcgacaccatgtggtttacttttctatgttgttgctgatttctccccttgtatgatggtgtgatttatatgcctaggaaacccttccatataatgcatatagcctatctaatatgttgttgtgtattatagattacctgtatggctaacactgcctcactcttgtgtacagacagcctgactatgccctaacctaaatatgctaagcttacaatgtttatttgc

SEQ ID NO: 122227 - DNA, 967 bp, Zea Mays
cgaccaggcaacctctccaagcttccagatcctcacccccgcccactcggctggaggtccacagtccgatcctcatcccacttgggtgtgccgtccccgcgcacacacacatggatggatatgaagggataggaggcagaggcggcgattgcgaagatggtcgggagcatgcaggcggcggacccagcgggtcggataagcgcactgctcgcgctgcgccaactcctcgccatgctccagtcgctggccctgctcctacccgtccagtggcgcgcgtagcgggggcgttcgatgccgcggcctccgtgctgtgactagcgggaaaaggggaaggcaacggcgtcagtggttctacgtgtgctggtcgggtcgctcatggtcgccgcgcgaagggagatagccacacaccgggcgcaggaggctgggcgagagtacgagctgatccccaggtagtgaacatattccatctcgtgcttttatgttcccttcccatctgctagttgttgctattgctctgctttactctgctaatgcagctcgcttctgaaatgtcttttgccttgcaaggttcttggagatgggagcgagattttgaagttttaaggcctgcagtgccgtggcctagctcctcgcggcctcgcttattttcatatttcatttctctctcactctcgcaaactaagcctagggcctgagtttggtgaacaaaccactacaatgcagaccaattaactgatgatctattgtgttgtctcataccttggcgagcattgaagcactactcttgaaatgcttgttttatcatctttacatataatgcttcttttgttttatttactcctgttgtggtcaggagactaccattcatcatgtcattacttattttaatatgagtctggctactcttgttagtgcatttcctgtgaattggtgtagatttgtatgcctctcacactctcgatagaac

SEQ ID NO: 122228 - DNA, 2247 bp, Zea Mays
atgggactagcctgtaggcagagctgctggttggccaggccatatatatgcaccaggggcctgtggtggctgagcaacaagagagagaggacatagccgcacaaagggaaggataccctcgccaacctcgaagctagtccaaactagtgggaggttgagtgcagggatcgatcggggaagacgagacaagcttcttctgctgctgctgccgcccccgccagctctagttcaccagagttactacttactagccaatctgacaccgatccaccgccggcaccgaccgtccatggcgcggggcaaggtgcagcttcggcgcgtcgagaacccggtgcaccggcaggtgacattctgcaagcgccgcgcggggctgctcaagaaggcccgggagctctccgtcctctgcgacgccagcgtcggcatcatcgtcttctctgcgcacggcaagctctacgacctcgccaccaccgggaccatggaggagctgatcgagaggtacaaagctgccagcgccggagaagcgacgaccgacggctgcggcaggcacaacaggatggaccccaaacatgaaaccacggtgctgcaacaggaaatcaacctgcttcagaagggactgaggtacatctacgggaacagggcgaacgagcacatgaatgttgacgaactgaacgccctagagaggtacttggagatatggatgtacaacacccgctctgcaaagatgcagataatggctcaagagatccaagcactgaaaagcaaggcatgtcaaaaccctgtacatattaactctacgaagacccgaggctttcagcacccatttacctcactaaaagtgtctgcgtgtacgcaggaaggcatgttgaaagctgccaacgagattctccaggaaaagatagtagagcagagtagtttgcttgacgtaggcatggtggtagcggaccagcagaatgggcgttttagcacagtcccactggtagaagaggtgatcagtagtaacccactgactgtactgagtggctattctagctgtaggggttcagagatgggctactccttctgaccgtaataacaaacagcctgggggctccttctgttgattactactagtgtgtaatacatacagtcaataaagtctgtaatgggttggttgttctgctgctttggtgtatcatattcgattattcgtatcatgtaggccttagataagcccttcaggagtgcccctggtattgtgtcgtcgtgccttttacttctccagaatgaagaaatattgtctattgaggagatctgatgatgtgctatttcttccttatcaacggaaatatatctatgtttgtgttcatttctaagcattaaatctatcgggccaataggtttaaaactatggacacatagtttcagcttacagagatcaaggtgatacatttaaataaaaaatcatacatagccttatataattgcaacatccgtgcagttgagtacacgtctacccaaggggcaatgacagtacatacatagccttatataagaaacagatacaacaataattgcaacatgatcatggtattcttatttctgaggttataactactgacaggaaaatagtagtttgagaaaccataccttgaaaacggagaggatttgctgtttgcaccagattgaccataaacattgtaagtactaaggataaatgtcactactgacagagatgaaaaatacatcgtccagttggtttccacaaccgatacgcaccttattagagaaaaactaggaaacaaaacaaaacaataaggattacagataatagacatcaatgtttttgtcaaactggaatgctcaaataggcatcattcaattcaacatggttcagctcttctgtcctgttcatggaagggaaaaaaaggaagaattagaacaaacaagaaatccccaatcatgtacaccaaaaaggaaaaactgctagagagagcctactgcaatcaactgtattaacaagtagaaacgcgctgaagctaacacagctccaccctgtacttttaatagttttaacagttgtaatcccctatcgtgccattacatgggtaaaaccagaatcaatatgtaggatgacctaaaaaaggataatacaaacctgaaaaactaatgtaccagaatcatgcagttgcttgatttcaatcgtgtgtattggcaagtgaactcacgctgaaaatgacagaactgcatcctatactttaatattataaa

SEQ ID NO: 122229 - DNA, 1796 bp, Zea Mays
atgggactagcctgtaggcagagctgctggttggccaggccatatatatgcaccaggggcctgtggtggctgagcaacaagagagagaggacatagccgcacaaagggaaggataccctcgccaacctcgaagctagtccaaactagtgggaggttgagtgcagggatcgatcggggaagacgagacaagcttcttctgctgctgctgccgcccccgccagctctagttcaccagagttactacttactagccaatctgacaccgatccaccgccggcaccgaccgtccatggcgcggggcaaggtgcagcttcggcgcgtcgagaacccggtgcaccggcaggtgacattctgcaagcgccgcgcggggctgctcaagaaggcccgggagctctccgtcctctgcgacgccagcgtcggcatcatcgtcttctctgcgcacggcaagctctacgacctcgccaccaccgggaccatggaggagctgatcgagaggtacaaagctgccagcgccggagaagcgacgaccgacggctgcggcaggcacaacaggatggaccccaaacatgaaaccacggtgctgcaacaggaaatcaacctgcttcagaagggactgaggtacatctacgggaacagggcgaacgagcacatgaatgttgacgaactgaacgccctagagaggtacttggagatatggatgtacaacacccgctctgcaaagatgcagataatggctcaagagatccaagcactgaaaagcaaggaaggcatgttgaaagctgccaacgagattctccaggaaaagatagtagagcagagtagtttgcttgacgtaggcatggtggtagcggaccagcagaatgggcgttttagcacagtcccactggtagaagaggtgatcagtagtaacccactgactgtactgagtggctattctagctgtaggggttcagagatgggctactccttctgaccgtaataacaaacagcctgggggctccttctgttgattactactagtgtgtaatacatacagtcaataaagtctgtaatgggttggttgttctgctgctttggtgtatcatattcgattattcgtatcatgtaggccttagataagcccttcaggagtgcccctggtattgtgtcgtcgtgccttttacttctccagaatgaagaaatattgtctattgaggagatctgatgatgtgctatttcttccttatcaacggaaatatatctatgtttgtgttcatttctaagcattaaatctatcgggccaataggtttaaaactatggacacatagtttcagcttacagagatcaaggtgatacatttaaataaaaaatcatacatagccttatataattgcaacatccgtgcagttgagtacacgtctacccaaggggcaatgacagtacatacatagccttatataagaaacagatacaacaataattgcaacatgatcatggtattcttatttctgaggttataactactgacaggaaaatagtagtttgagaaaccataccttgaaaacggagaggatttgctgtttgcaccagattgaccataaacattgtaagtactaaggataaatgtcactactgacagagatgaaaaatacatcgtccagttggtttccacaaccgatacgcaccttattagagaaaaactaggaaacaaaacaaaacaataaggattacagataatagacatcaatgtttttgtcaaactggaatgctcaaataggcatcattcaattcaacatggttcagctcttctgtcctg

SEQ ID NO: 122230 - DNA, 1369 bp, Zea Mays
atgggactagcctgtaggcagagctgctggttggccaggccatatatatgcaccaggggcctgtggtggctgagcaacaagagagagaggacatagccgcacaaagggaaggataccctcgccaacctcgaagctagtccaaactagtgggaggttgagtgcagggatcgatcggggaagacgagacaagcttcttctgctgctgctgccgcccccgccagctctagttcaccagagttactacttactagccaatctgacaccgatccaccgccggcaccgaccgtccatggcgcggggcaaggtgcagcttcggcgcgtcgagaacccggtgcaccggcaggtgacattctgcaagcgccgcgcggggctgctcaagaaggcccgggagctctccgtcctctgcgacgccagcgtcggcatcatcgtcttctctgcgcacggcaagctctacgacctcgccaccaccgggaccatggaggagctgatcgagaggtacaaagctgccagcgccggagaagcgacgaccgacggctgcggcaggcacaacaggatggaccccaaacatgaaaccacggtgctgcaacaggaaatcaacctgcttcagaagggactgaggtacatctacgggaacagggcgaacgagcacatgaatgttgacgaactgaacgccctagagaggtacttggagatatggatgtacaacacccgctctgcaaagatgcagataatggctcaagagatccaagcactgaaaagcaaggcatgtcaaaaccctgtacatattaactctacgaagacccgaggctttcagcacccatttacctcactaaaagtgtctgcgtgtacgcaggaaggcatgttgaaagctgccaacgagattctccaggaaaaggtattttccaactgtcagctcactctgtggtacaaacttcaggtttcattcctatacatcatgataagcaactgtcagatttctgtcagttcactctgagctatgaacttcgttcaggtcttgtactgacgctatgaacctgatgcagatagtagagcagagtagtttgcttgacgtaggcatggtggtagcggaccagcagaatgggcgttttagcacagtcccactggtagaagaggtgatcagtagtaacccactgactgtactgagtggctattctagctgtaggggttcagagatgggctactccttctgaccgtaataacaaacagcctgggggctccttctgttgattactactagtgtgtaatacatacagtcaataaagtctgtaatgggttggttgttctgctgctttggtgtatcatattcgattattcgtatcatgtaggccttagataagcccttcaggag

SEQ ID NO: 122231 - DNA, 1785 bp, Zea Mays
ttttttgttttgaaaaggagaattttaggtgcgtgcatgccctgatgcgagccaaacaaacgttaaatggcaacaggtgtaaagcaggcaagagattcgtatgggatttgattattcttcttccatcaatccatgggactagcctgtaggcagagctgctggttggccaggccatatatatgcaccaggggcctgtggtggctgagcaacaagagagagaggacatagccgcacaaagggaaggataccctcgccaacctcgaagctagtccaaactagtgggaggttgagtgcagggatcgatcggggaagacgagacaagcttcttctgctgctgctgccgcccccgccagctctagttcaccagagttactacttactagccaatctgacaccgatccaccgccggcaccgaccgtccatggcgcggggcaaggtgcagcttcggcgcgtcgagaacccggtgcaccggcaggtgacattctgcaagcgccgcgcggggctgctcaagaaggcccgggagctctccgtcctctgcgacgccagcgtcggcatcatcgtcttctctgcgcacggcaagctctacgacctcgccaccaccgggtacgccgtccaacatgcattgcatgcatgtgctctgctctgctagtctgctggccgatgatgatgattgagctggcggtgcgtgcgtgcaggaccatggaggagctgatcgagaggtacaaagctgccagcgccggagaagcgacgaccgacggctgcggcaggcacaacaggatggtcagtagcggtagcccacccctcccaacttgccggccggcatcatgtcctctgctctcccctgccttcctaaaagctttggccatgtccatgtctgccaggaccccaaacatgaaaccacggtgctgcaacaggaaatcaacctgcttcagaagggactgaggtaaattgtttgttactcacagctttgactgaggaaatcaacctgcttcagaagaaaaagaaaacaattctgacaaggaagcattgttttgggtaggtacatctacgggaacagggcgaacgagcacatgaatgttgacgaactgaacgccctagagaggtacttggagatatggatgtacaacacccgctctgcaaaggtaattcaccagccaaatgcatctttttaaaaaaaaatgtttcaggcttcgctaaaactgtaccctgcctaccagatgcagataatggctcaagagatccaagcactgaaaagcaaggcatgtcaaaaccctgtacatattaactctacgaagacccgaggctttcagcacccatttacctcactaaaagtgtctgcgtgtacgcaggaaggcatgttgaaagctgccaacgagattctccaggaaaaggtattttccaactgtcagctcactctgtggtacaaacttcaggtttcattcctatacatcatgataagcaactgtcagatttctgtcagttcactctgagctatgaacttcgttcaggtcttgtactgacgctatgaacctgatgcagatagtagagcagagtagtttgcttgacgtaggcatggtggtagcggaccagcagaatgggcgttttagcacagtcccactggtagaagaggtgatcagtagtaacccactgactgtactgagtggctattctagctgtaggggttcagagatgggctactccttctgaccgtaataacaaacagcctgggggctccttctgttgattactactagtgtgtaatacatacagtcaataaagtctgta

SEQ ID NO: 122232 - DNA, 297 bp, Zea Mays
cagaaagtcctccagctcagaactagatgttaatcaactcaaaataacaaaccagtcaatgcacaaggagaagtatttgacagaagatacacaatcaacatgtgtcatgtaactaagtactggttgaaacacaggacagaaaccaccgacaaattcagaatcagctgtcagactatgcttcaatgctttcacatattcactactgacatcttaaacaaaattgaccatcttcagaaacatggttgtatttctatcaagcactcaaaaaggcagttaacagtttgctcaaatgaaaac

SEQ ID NO: 122233 - DNA, 430 bp, Zea Mays
tgatgtggtggttgttagcttgatgtcgtttaccctgttgttgttaggtattgcagtactgtgtgtgctatctgatgcgtttggtagtagttagttgtaggctttgcagtaccagcagctgttcttgtgcttcggcaaactggtgagatcatgagtttcagtttaacaagagaactgcttggatctttatgtcctgtgctttatctaaaaactgtctgctggatgccggttgcccaaagtatcagtagcaaatgcagaatctgtgttttttttctttcttggagctcaccagagtacaattgtctccttaaatatcttcctgcagctaatataacttttatatgacatatgtaaactaggaagaatatgtaatctggaattttatgtgagggcctgtgttgaagtctcctatgtagctaaatattttttc

SEQ ID NO: 122234 - DNA, 996 bp, Zea Mays
aataaatatctcaatatatatttacatgacataaaacaaccatatcaaagcaggacaaccggctagtctatgattacgtttgtggcgtgagactggtttatacggttataccacttcatcacaaagagctgagcttgagtgatatagatgccactctctctcaagtctcaactccatagccccaaatcaacaagggctaccaattatcagctgtaagtttctaaaactcagaattagttacgacaccacttactcacaatcactccgcaccacacatactaagccataaagactccaacaaagttcagttcaatgggtgtccttagagcttataccacttctcacacagcaggtcgagctggacaggaaagaagaggcccatgatctcgatatcaggaagcatcacataagagttttcactttccagcttgcttatgtcaaaaaacacatacatcctagatagtaaaggtgcggagggaagtaatagatctgagcacgttattttgtgctatgaagctacagtgtcgtaaatcgaaaagggaataaccgcaattttttttgattgtgtcggaaaacatatatctgctagcacttgcagctcaaaaccaagcatggcaatcgacaactacaggctatggctttgcaacgatgtggaaccagacaatgcaattctcagggctgcaaccgttgcgcttcagaaaccgtgctgatccgcacggcgaaattccttgaaacaagctgaaagactcattttctaagtgcgttcatcctgtccctcaggtaatacagcttagctctcctgactttcttcctgtccaataccttgatttctttgatgtttggcgagtaactgagcaaaaaaaaacggcggctgctccagaggtccagatcaccggcgtctccactctccagcgctagtgatcccctttgcccgaactcccgatcaccgggaactgctcgcctgctccagtcacatgcacctctctgcctgctcca

SEQ ID NO: 122235 - DNA, 1558 bp, Zea Mays
cctcatccggttgttgttttggggatttggaattttgtggaaaacattcacagctagggcagtagaatttatttggtttgacgcttgcgttgcggtcgggagctgtcgcgtgggttagttgggccgcaattggtgtttcggcccattaaccctcccaaaccctagccgtctcccccgcacttctccccccttgtgcagccgcccccccacttctttccccttggccgccccctgcccatctcctcctctctccattgttgcagccaccaaaccctagccccccctcaatcccctcctcccaaggtgccaatccttgccgctcggatcatcgtcgcgtggtgcgagtcttcaatcgttttggtggagggaagaagggaggaaggaaagggggagaatccaaggtggtggactcccagatcgttcttagggatttgcccaaacttccggtgaaggcaagtaaaactgtgatggttattccgtctgtcagatgaggagtcttatacttgtttatgttgtgctattatgttcaaattcatagtttcttttgagtaccatcatttgaaaatgttcatgtttcatgaatttcatatgttgagtttgatgtttgattatgttactcaagtggttattatgtggaatgggtggaagtaaatgcctagcacatttttatttgggaagaactcatgaggttgtcatgcataatgcactcatcatccattgcattgaagtttcgtcgcgatcttatggtccgaccgtaccggtacattgagcatcatatgttgcccgagaaggggtatggtgcagcttcatatccttagagatatggaggcagaagtcattattgcatttgtagccatgtgcattcatgggagaggtgttgaatctattatgtggatgtggataatttggacttgtgcatggtgattctacttggcgttgagcttttagttacttgtttacttgctgcaatttactgttcaaaagaaaagaaagaagtcctgaacacgtggttgtgtaagcacagttgatttacaatatcctatttgttgttgttatgtttacttgctgagatgtgttatctcacatcttgcattgtttgatgcaggcacctaatttctgctttgggaatagaggtatgtagcagcacggccactacacctttaataaaggaaccagcatttaataatgttgttaatcagagttggacaagtctagtgaattgctttgttcttggttgagcgtttattttggggtgggctgagtttcttatcccatttgttttgcttcagttgggtcataattaagttttgccactattgcatttcagtttctactatgtgaattatatgtctttatatcttgtatgagcttcatgattcccctccttgttatgctagttttcaaaggaggtgctgccggattttgctatatattctttctttattacttctcttgtgttgagtaagtttggtgggtggggtttgtggtattatccattgtgtgtgaccagtggggtgttacagattccatgacaggggtacacccggtttttcatgtc

SEQ ID NO: 122236 - DNA, 2507 bp, Zea Mays
cactttaaaaaaggacatccatgggctccatctcgtcaaaatctgggcggtgaaaccctcaaaccctaatcctttggcccctcaccatggcggacgctgacgacgcgccgccaacgccgcctcctgaggtagtagcccccgaggagcatcccgcggtcgccgaatccgccgttgccgcgcagcaggagggggcagcgacggcccaagtcgataacaagcggaagctcgaggaggctggcgccgacgcggaggcgaacggcaccggcgaggacgccaagcgcccgcgcgtggatggtgagcccgacgctgccacaggcattgagcagcagaacgatgggtcctccgtgaatgtctccgtgaatgtggaggaacccgcagctgcagaggaggataaggttgctcccaccgatggggcagcgacggatggtgataatgacacggccgctcctgctacggattcgcaggcgggttctgatgacaaaccgcttgaagcagcagctgaagctccacaaccggaaagtgatgcagcagctgttgcccaggagatctctcgtatgatcgaagtacccaacagcagggtcggtgtccttattggaaaagctggtgagacaatcaggaacttgcaaatgagctcgggtgcaaagatccaaatcaccaaggacgccgatgcggactcaaatgccctgactcgtccggttgaactagttggaacccttggaagcgttgataaagcagagctgcttattaagagtgtcatagctgaggctgaggctggcggttcccctgccttaatagctagaggatttggaagtggacagcctgggtcagagcaatttgagatgacagttcctgataacaaggttggtctcattatcggaaaaggtggtgatgcaattaaaggcatgcaaaccaaatctggtgctcgtattcagttaataccccaacatcctccagagggcgttacattgactgaaagaattgtacgtgttactgggaataagaagcagattgaacttgcgaaggatttgatcaagcaagctatgaatcagacattttcaaggcatacaaaccagtctggcggatatggtccacaaggttaccgccctcagggtcaaggtgccgcttctcagtggggaccacgttctcagaatcatggctatggatacccacctagaggtatgcctccacctcaaaactacaacacaccctacggcagctacccgccgcagcagggaccaccaagaggtggcatgggctgggaccagaggcagggccctccaccccatccttcgtaccagggtggtgcttctgattactacaagcagggatctcagccatatgatagccagccaccgagctaccctcctgggccagggaattacaacagttatggtcaatcacagggtcctaactatggccaacctcaatacccgcaacatgcgcctcagcagaactacagccatgggtatggtgatcctagatacaatgctccccctccgaaccagcagtactatggtcagccgccaatgggcccgcagcaaggctatcctcaacagccagatccctatgctaggcctccatacagtggacctggtcaatggcctcccaggggtgctccggctgcagatggctcttaccaggcgccagctgcatcttatgggccgccttctcagcacccttctgcttatgggcaaacgtacagtgcagcaactggatctgatggatatgctcaacagggttacccacagcagggtgggcaggcaccagctccatatggtcagagtgcaccagcagctccaggctatcctcagcagcaaggtggctatgcacagtacccacagacccaaccagcatatggtgagcaagcagctcaaaccaatgcgagctatgggtaccagggagctccagcagatcctaactatggaagtgcctacccacagccaggatatggtcctcctggtcaggctactggtcaggctggttatgcctcctcagcagccagccagcctgcgtatggccaggcaggatacacccagccgcctacaaatcctccaggttatgagcagtctgcggcaccagcaacaacccagagcggctatgctgcgcccccagcaaatccacagcagcctgctgcagcaaaaggggtctcgccacagcctggtggtggtgctgctgcatatggtgctggtgggcagtggacagcatgaccctcctcgaacctcaaacatggctcgctggtagcaatatcgtgctcaatatttgcaccttccggatgcatccttggttatcggaagagattgtgtaactccttgattagtgatacttggcatctctgtagtagcacctactagtagttcgttggttaactgtgactataaacatcctaattcctattcacttcgaatcaaacttcgcagcttgccaagtaatttttttggatttgtgtttattcatgtaaaatagttactggtttggctcacagaatgatgattctgtttctgcagttc

SEQ ID NO: 122237 - DNA, 2486 bp, Zea Mays
cactttaaaaaaggacatccatgggctccatctcgtcaaaatctgggcggtgaaaccctcaaaccctaatcctttggcccctcaccatggcggacgctgacgacgcgccgccaacgccgcctcctgaggtagtagcccccgaggagcatcccgcggtcgccgaatccgccgttgccgcgcagcaggagggggcagcgacggcccaagtcgataacaagcggaagctcgaggaggctggcgccgacgcggaggcgaacggcaccggcgaggacgccaagcgcccgcgcgtggatggcattgagcagcagaacgatgggtcctccgtgaatgtctccgtgaatgtggaggaacccgcagctgcagaggaggataaggttgctcccaccgatggggcagcgacggatggtgataatgacacggccgctcctgctacggattcgcaggcgggttctgatgacaaaccgcttgaagcagcagctgaagctccacaaccggaaagtgatgcagcagctgttgcccaggagatctctcgtatgatcgaagtacccaacagcagggtcggtgtccttattggaaaagctggtgagacaatcaggaacttgcaaatgagctcgggtgcaaagatccaaatcaccaaggacgccgatgcggactcaaatgccctgactcgtccggttgaactagttggaacccttggaagcgttgataaagcagagctgcttattaagagtgtcatagctgaggctgaggctggcggttcccctgccttaatagctagaggatttggaagtggacagcctgggtcagagcaatttgagatgacagttcctgataacaaggttggtctcattatcggaaaaggtggtgatgcaattaaaggcatgcaaaccaaatctggtgctcgtattcagttaataccccaacatcctccagagggcgttacattgactgaaagaattgtacgtgttactgggaataagaagcagattgaacttgcgaaggatttgatcaagcaagctatgaatcagacattttcaaggcatacaaaccagtctggcggatatggtccacaaggttaccgccctcagggtcaaggtgccgcttctcagtggggaccacgttctcagaatcatggctatggatacccacctagaggtatgcctccacctcaaaactacaacacaccctacggcagctacccgccgcagcagggaccaccaagaggtggcatgggctgggaccagaggcagggccctccaccccatccttcgtaccagggtggtgcttctgattactacaagcagggatctcagccatatgatagccagccaccgagctaccctcctgggccagggaattacaacagttatggtcaatcacagggtcctaactatggccaacctcaatacccgcaacatgcgcctcagcagaactacagccatgggtatggtgatcctagatacaatgctccccctccgaaccagcagtactatggtcagccgccaatgggcccgcagcaaggctatcctcaacagccagatccctatgctaggcctccatacagtggacctggtcaatggcctcccaggggtgctccggctgcagatggctcttaccaggcgccagctgcatcttatgggccgccttctcagcacccttctgcttatgggcaaacgtacagtgcagcaactggatctgatggatatgctcaacagggttacccacagcagggtgggcaggcaccagctccatatggtcagagtgcaccagcagctccaggctatcctcagcagcaaggtggctatgcacagtacccacagacccaaccagcatatggtgagcaagcagctcaaaccaatgcgagctatgggtaccagggagctccagcagatcctaactatggaagtgcctacccacagccaggatatggtcctcctggtcaggctactggtcaggctggttatgcctcctcagcagccagccagcctgcgtatggccaggcaggatacacccagccgcctacaaatcctccaggttatgagcagtctgcggcaccagcaacaacccagagcggctatgctgcgcccccagcaaatccacagcagcctgctgcagcaaaaggggtctcgccacagcctggtggtggtgctgctgcatatggtgctggtgggcagtggacagcatgaccctcctcgaacctcaaacatggctcgctggtagcaatatcgtgctcaatatttgcaccttccggatgcatccttggttatcggaagagattgtgtaactccttgattagtgatacttggcatctctgtagtagcacctactagtagttcgttggttaactgtgactataaacatcctaattcctattcacttcgaatcaaacttcgcagcttgccaagtaatttttttggatttgtgtttattcatgtaaaatagttactggtttggctcacagaatgatgattctgtttctgcagttc

SEQ ID NO: 122238 - DNA, 1122 bp, Zea Mays
aatgaaatggatgacagagatgcagaattggtggttgctatatgtgctgtagatgtttggggcaggaatatcagtcaggttcctagaagaacattggttgaaactggtattcaatgggtggagagaacgttggagaatagtaacgactgcttcgatatgtttcacatgcgacgaactgtgtttagacgattgcatgacacattggtggacaattatggtctgattccaagccggggtgtcagtactatggaagcacttggcattttcttgtgggcatgtgggggtccacagtcctttaggcaaatacaaaataagtttggtcactccttggaaacaattagtcgcaagtatagtgaagtccttgatgcactgtttaagatgtcatctgacatcattaagcccaaagacccatatttcaccgagattcatccgcgtttgcgagaggcgagattttggccacacttcaaggactgcataagagcaattgatggtagtcactttccagcggcagtcccggcctcagagcaagccaaatatattggacggcacggttacacatcgcagaatgtaatggccgtttgtgacttcgatatgaggttcacatttgttgtcacaggatggcctagatccgtacatgacactagagtagtacaagatactttgataacttatgcggacaggttcccccagccaccagaaggtaaatactatcttgtcgattcaggttatccaaatagaaagagctaccttgcaccttataagggtcagaagtaccacatttctgaatggcaaaatgcgaggcaacctattggtagcaaagaagtattcaactatgcacactcttcgctacgcaatgttatagagcgatcgtttggggtgcttaaaatgaagtggagagttctatttagtctcccttctttttcgcttaccaaacaatccaagataattattgcttgtatgacattgcataacttcattagagagagtgctctacacgatagagactttgatgaagtaggacctagtagcagcagtcatgatgtacctttaggtgagagtagtagtaccacatctgataagttagacatgagtgcttttcgagatgcaattgctaatgcttta

SEQ ID NO: 122239 - DNA, 2521 bp, Zea Mays
ggaggaggtatccttcccccccacacacagtcttacactttctactcttttgtagaaactccaggacataaatcatgagcacgtgtttgatctggttaaggaggttgccatggagcttgcagcgacaagcgcagtgagttctgtgaatctgctgaaactatcaagtttgttgagtctgtcaacgaacatggaattgtacacggaagctgtttcccttgagaatctcaaaacaagggcactacgatgcgagagtcgtgaagaactggatctagctgagcagatgattccactggtcaactatatgcatgaccatcttctcaaggaaaaacaacaacttagcatcaacggggtgcctattcctgctgatttttgctgtcccctttccttggagctgatgtccgatcctgttattgtagcgtctggacagacctatgagcgggtttatatcaagttgtggcttgatgagggttttactatctgcccgaaaacactccaaagacttggacactccaatttaatacctaattatactgtgaaggctctgatagctaactggtgtgaatcacatgacattaggcttcctgatcctatgaaatcattgaagttgaactttccttctgctgcctccttccttgaggatttgagtgctgcagatggcagccctctacatcctattgtcgtgtcaagggctaatattcctgggtccccagaagttgatgtgtatttgagaaacttgaatggagcatctcctccccatagtttggtcaatcagaattctcatgcgcatgcaaaccgtcatggtcatgaggtctcgacgagtcaaacttcagaaaaaacaaatggttctgtaccagatgtttcaagattatctcttgcaagttctgaagcaagagagtctagtttggaaggaaggcgtggtggttcgattgggcaaatatcagaacattctacggaggaagcattccaatcttctaatttggatagggatctgcaggacaacttagctaattcttctttgaatggtagccttccaaatagtggtcaacttgatggggaatgtgacaatggggtgacaagggttccaagcgataggacaaattacagtagcgatgcatctggcgaagttacaaatggtggtggtgcgcctgtagcctcctctgttcctcaaagggagcatttgatccctccaagactgggtatgggtactaaacaatttatcaggcgacaaccatcagacaggggtttcccaagaattatttcttcctcaacaatggatgcacgtagtgatctctctgccatcgagaatcaggttcggaagctgattgacgatttgaaaagtgattctatagatgttcagagatcagcagcatcagatcttcgtcttctgtctaagcacaacatggagaataggattgccattgcaaactgtggggctgtaaacttgctggttggtcgtcttcattcaccagatgccaaaacccaagaacatgctgtgacagctcttttgaatttgtcgatcaatgacaacaataaaattgctattgcaaatgctgacgctgttgatcctctcattcatgtcctcgagactgggaaccctgaagctaaagagaattcagcagcaactctattcagcctctcggttatcgaagaaaataaagtgaagattgggcgatctggtgccatcaagcctctagtagacttgctaggaaatggcacccctcgaggaaagagggatgcagctactgctttgtttaacttgtccatccttcatgagaataaagctcgtatcgtgcaagctgatgctgtgaatcacctagttgagcttatggatcctgctgctggaatggtcgacaaagctgtggctgtgttggcaaaccttgctacgattccagaaggaaggaatgcgattgggcaggcacgtggcattccagcccttgttgaagtcgttgagttgggttctgcaagagggaaggagaatgctgcggctgcgttgcttcagctctgtacaaacagcaacaggttttgcagtatagttcttcaagagggtgcagtgccccctctagtcgccctttcacagtcaggaacaccgcgggcaagagagaaggcacaagcgcttctgagctacttccgcagccaaagacatgggaattcagcaaggagatagccttctgttttttcccgttttttgttgtagtgtacattaagcgttgcattttatgcccatcatcgcgactgggctcctgtttactgttgttgattggcactggcagatgcgttggctggaattatgcagtgccctgtgctctgtttatagatggagattgttatgctcatctcatgtaagttttgtctgttgagatggtatctttccttttctcgtttttgaggtttttttttgtatagcttaaccattgataggaacttcgaacttacataatcaccgattttgccctgtatataagtatatttgattgtctgtgacctttggaattattatggttcgatggttgtacaaattatt

SEQ ID NO: 122240 - DNA, 702 bp, Zea Mays
atgaacgcattaagaactcttctttgtgtgattgcgaaggtgcattttttttttgcacccaagggttcgcttgagtttgaatgtgataacaagaacaaattgccaacctcctcatcattacaacaacaacaacaacaacaacaacaacaacaacaacaacaacaacaacaacaacaacaacaacaacaacaacaacaacttcatcaccgtcagttttgctcggcgtcgctaaaagtggtgttcgtcgttaccattttacaaaccggcgatggtgatctagacaggttgatggataatctctctccagccactctgctcaacagtatctcctgtcttggcgccctaacatctgatgtctctactgcgagacccaagcctattcacaagtattgcaaaaatgtatatgatatctcaagcatcgtgaccccccttcttgaagatctttgcaagtctcccgaagagcaactcgatgaggtcttaagagaccttgacaccgctgtcaatgaagcttcaggccttattggaaactggcaccagacaaccagcaaaatgtatttcggttggcgaattgaatcagtaatatcagatattcagggatgttcccttcagttgtgccagctggttaattcgctattaccttctctgactgctcgtgcctgcatgtgtattgagaaggataccctggctgcgggacatccttag

SEQ ID NO: 122241 - DNA, 501 bp, Zea Mays
atggccagagcctggcggtggaggagctcctcctccgcgggcgtcagcttgggcccgccgcgcgccgaccgcgcgctccccatccgcttgctgcgcgacaccgcggccgcgcctcgctgctccttgcgcggcatgcacgcgaacgcgttgcccattggtaacgaaatccgagaccgggaaaacgagtgcggaaagccgcgagacacgaacggaggagtgtggactgggcagcaagcaaatcggcgggcgcgagcaaagaaaccaaggcagaaggaagaaattttaagcaggagacgagcgctgcttcacggacaagcttctccactggaagcgaaagcggtggactcaggcgaggaggaatcaaaccagcgcgacccgagacgagattctcggggtgaaagaggagaaagaaataatctcctccaggaggaaatggaaactccgaccagaaaagtcaagaaactccgagcggcgagattggactccggcgacgacgcatga

SEQ ID NO: 122242 - DNA, 151 bp, Zea Mays
gtttttgaaatactacaatatactttagtcatgacaataccgcagtttacaataccacaattttggaaactgaggttcagacctaagtttagaataccttaaaacaactatagtatttgcaatacttcagttttaaaaacagagattttag

SEQ ID NO: 122243 - DNA, 2640 bp, Zea Mays
caagcaacggcaacctcgcgcgctcatgtcgtctcctccctccggatgccaatgtctagccatgcccacgccggccaccgccgtcttttcctcctgacgagcacgagcacgagtcttgctttcgtcgccgccgtcctcctcctgatcgtcgacgcgtgcgcggcgtcgcggcagttctccacggtcgccatctcccacgcgcccaacgccacgctcgtctgcgcgctcgtcaccagcgccgatgacgcgggagcggggccaccaggctcttccaagctgcgctgcacctcgctccccgacggccagcagttcgtctacccctccgctgacatcccctacaacgccatcgccgccgggaccgacttcctgtgcggcctcatggcgccgctcggcggccacgccgccatgcgctggtggtccttctccgaggagttcgcggccaaccgctcccgccccgtcggccgccgcctctactggggcccctcgcttcgctcgctcagcgccggcggctcccacgcctgcggcctctccgacgaccacggccccagctgctgggagtggccgcgcctcgccctcccgaaaggcctcgacttctcccgcatcgcgctgggccacgacttcctctgcggcatcgacaagctcgataacaccagcatgagctgcttcggcgccatgaccgcgccgtcgctggctcccgcccccgcggccttcgcgaccatcgccgccggccaccgccacgcctgcgccgtcgacgcagagggtggattcggctgctggggcgacgacgacggcgacgtccccaacgtgccggcacacgagctgccggccgacatgctggccatggcactcggcaacggctccacctgcatcctctccggcatcggcagggtccagtgctggggcgccgtccaggtgccggaccagtaccggaacgcggacttcctggccatcgaggccgacgggggcgcggtgtgcggcatcctcaggagcaactactccgtcgcgtgctgggggaggaccgacagattcggcaccggcggtagcctggtctacaacagcaccatgcccggcgcctgcacgcacaagaagagctgcccctgcgacatcatctccggctccggcgcgctctgtggcagcggcggctccgagggcggcgaggagctcgccgtctgccaagcctgcgcggtgcggctgaacgcttctaggctcctcatcaccaacggtagggagcgatcggcagccggagacgacgacagcgggaagaggaaggccaggaccctggccgtcgcgctcagcgtgggcggcgccggcgccgcggtgctcgcggcggctgcggtggcgctgtacctcgtgtcgtacaggaagcgggacaacaagaagacgctgacgctgcgtctcggggagtcgtcgtcccggcggctgtgccgcgatgtggaggccacggccatgccggcgccgccggtcccgccgctcggatgcgaggagttcacgcttcgtgacctgtcgcgcgtcaccgacggcttctcggaggagaagaagatcgggagcggcagcttcgggtcggtgtaccgcgccaggctccccgacgggcgcgaggtggcgatcaagcgcgcggagcgcagcggcagcggtgggcggcggcgccgccgcttcgacgcggagcgcgcgttccgtgcggagctgcggctgctgtcgcgggtgaaccaccgcaacctggtgcagctgctgggtttctgcgaggagcgcggcgagcgcatcctggtgttcgagttcatgccccacggcgcgctccacgaccacctccacggcagcgggcggcgcaacgacgtcggcgggtactcgccgctgttcgcgtcgtgggagacgcggctccgggtggcgctggacgcggcgcgcggcgtggagtacctgcattgctacgccgtgccagccatcatacaccgcgacgtgaagccctccaacatcctgctcgacggcgactggacggccaaggtgtccgacttcgggctgtccctggccagcggcggcacgggcgccgccgcgtcgccggcgtccgccacggccggcacggtggggtacatcgacccggagtactaccggctgcaggaactgacggagcgcagcgacgtgtacagcttcggcgtggtgctgctggagctggtcaccggccgcaaggccatccatcggacgaaccaggacggcagcgggtccccccggaacgtggtcgagttcgccgtgccggcggtcgaggcgggcagcgtcacaaagatcctggacgagcgcgtgccgccgccgcgcgggcacgaggtggaggcggtggcgcgcgtcgccaagatcgcctcggagtgcgtccgaccacgggggcgcgcgaggccgatcatgtctgaggtggtggcggagctggagtgggccgtcaccctgtgcgaggagtccgtcgtggccgccgccggacacaacagctcccggcacggcggctccgacctgtcgcgttcgcgttcgcgctccgagtccgacgacccgagcccgttccacacacgcgagctcggcttcggcttcggcttcggtctcggcctcggctcgagccgacccgtcacccatggcaggtctcactcaacgatgtaaaatatcacggggtttttt

SEQ ID NO: 122244 - DNA, 1088 bp, Zea Mays
ccgctcaatccatatggattgagagctaaccgaacaagcccttacttgataatatgctaggattagtacaggaaaaaaaaggttctatataagctatattgcttagtggttgggatcttttgattcacagtttgacttcattcctcatcttgtcctatgtctgctcgagtgtcacctgggcaatctggttttggtcccactgacatgccctgttgtcggtacacctgttagtggcttactgtctctgtgctgtttctctttgttatgacccgcacatcttatgtagtagtgccagaggcaacaactacagtgggcacaaagtcattgttgcatgccggctatgaatctatggaaaaaggtaaagctcagcttttgtgtcgtgtcatcacaggggcagacagagaccaccagccaagagattgaaatggaggactatcctattcagcaggagaaccctttattcctgcaactccgtgcgagcctcttccccagcaactggagcagcactttcagggggcgacattccctgttccgtccgcgacgccgagccccggtgaaggcgagccctctgcatgtagccatggcggcaataatgaagcggtaggtatttctgggagcctggtttttctgtgaagtgaagctccaggtaggtagcggcgctgactttggcaaaagctgtacccctcaagacatggaagcaggttggaatgctgaggctgattagtagtttatacatacatgtgggtgcgagattagtttgaggcgtgctcccatctctgtaggcggcatatggattcagaattctgtttgatttttattttattttattttatgtggggggtaattgtgatagccacatgttggtccatttgcttgccgccctggaatagggctcttggtctgacgaaacaccctcccatataatttgatgatctgaagggtttgtttattgtctgggcaaattcttctccccaactgcccacctgaccagagagaggaaaaagaaaagagatgctcttcgccccaacagaagatcagactgggatacatacatgattgatgattcggacttgaatatttgctctgac

SEQ ID NO: 122245 - DNA, 2804 bp, Zea Mays
gagaagaaacaaagacagtagaagtacaggcctgcaaggccaaacagcccagttataatagcggcctactcgctgacttgtgtcccttccggccgtctaccaccgagcgagcttgggctctccccggcctcctccgcctccgcctccgcctccacctccgcctccgcccgccgcgcccgttcccttcccgcgcaccgcgcgtccccgagctatccctggtgctgctggtgctggacgcgcgccagtccgagatcctcggggccctgggaccgaattgctcctcctcttctccggtaaggaaccctagctcttggcttcgcctgggtgtgtttgtccgccaggcgatccgtttcgtctcgttccgtggacttccgcgcttcccgggcgcaatctgagcccgaacacctgcttattcccccgtctatttgcaacgctgttcctttgccgcgtcggtcgattccagccgcgtctgctgcttggtcgccaccaaaacgtcaggagcacgatgaagcgcaagcacggccgcaagccggcggacaagaaggctgatccgtcggagtccacctcgccggaatccgcgtccagttccagcacggaggcgtcggacagcccgcgaaaccaggctgaggaggataacccgccgctcgtagatgctggggcagcagtgcctgaaccaccgtctcctcctcctgctcaaccttctgagccacctcggaagcccagtgccaccgcgccggctaatcctccagcggacataacgtacagcaggcccaaggtgggggctgtgtacggccgtgtcaaactgaagttcaagtcgtccaagacggtggactcgccgctgcgcccgcagcagcaggattctttggaagctcaagtgctgcctgctgatgctggtgcatcggagagcgctgctgtccctgaagtggtcaaaggagctgatgcggagaaggctacggttgtaatggatgggcagcaagcagaggggcaggggctggagtcgagtgacgcagataaggaaaaggtttcaaggaaagtaggaggcatcaagatcaagttggcggggctgccttctgtagaaagcaacactccggatcggaaatccgattcaacagatgagcgtcctccgagcaagcgggaagctcttttgggaagcaaaaaaatggaggatgcggtggagctgaggagctcacaggagtccgaagaaaaacagtctactccggaacatcagcgcaatgagaaagagctggctgctgcattagaagctattaagaaagttatgaagatggacgctgctgatccgttcaatgttccagtggatcctgttgcattagaaatacctgattattttgatgttattgagactcctatggattttggcacaatatgtcaaaacttggaacgtggtgacaagtatatgaattcagaggatgtatataaggatgtacagttcatatgggataactgtaccaagtacaatagtaaaggtgattacataattgagcttatgaaacgggtcaagaagggcttcatgaaatattggttggccgctggcttgtattctgatgtgctagacagtggcggcaatgacaaccctggcgatgaggatgcgaaaggccactcaaaaagcaaggttaagaacaaaaggcgacgcccagggaacgatcgccataaaagtgactgcatatgtgctgtttgtcaagttacaaggcgtaagaaagaaagggatgaaatagtggctgttatagataatgaaactgctgcaatggatagtaacccttctgagcagcatgacatggagggaaactctggtgctaataatattggtaatcatgacacttgctctagccaggagcagccgtcacaaacttatgtgtacaaagaggcatcagaagcaaacgattctgagattcagatggaagatgttggaaagttgtccgttgatcagacatctagtttggtgcttcttgactatgaagacgagggttccagacaatatttggtggaaaaaggacagactgagtatagagatatgaacagtaacgaagagcacacccccactggcattcagcctaacgagtactctgatgttgagcatcaccagcaaaaggggcagacagagaccaccagccaagagattgaaatggaggactatcctattcagcaggagaaccctttattcctgcaactccgtgcgagcctcttccccagcaactggagcagcactttcagggggcgacattccctgttccgtccgcgacgccgagccccggtgaaggcgagccctctgcatgtagccatggcggcaataatgaagcggtaggtatttctgggagcctggtttttctgtgaagtgaagctccaggtaggtagcggcgctgactttggcaaaagctgtacccctcaagacatggaagcaggttggaatgctgaggctgattagtagtttatacatacatgtgggtgcgagattagtttgaggcgtgctcccatctctgtaggcggcatatggattcagaattctgtttgatttttattttattttattttatgtggggggtaattgtgatagccacatgttggtccatttgcttgccgccctggaatagggctcttggtctgacgaaacaccctcccatataatttgatgatctgaagggtttgtttattgtctgggcaaattcttctccccaactgcccacctgaccagagagaggaaaaagaaaagagatgctcttcgccccaacagaagatcagactgggatacatacatgattgatgattcggacttgaatatttgctctgac

SEQ ID NO: 122246 - DNA, 2634 bp, Zea Mays
gagaagaaacaaagacagtagaagtacaggcctgcaaggccaaacagcccagttataatagcggcctactcgctgacttgtgtcccttccggccgtctaccaccgagcgagcttgggctctccccggcctcctccgcctccgcctccgcctccacctccgcctccgcccgccgcgcccgttcccttcccgcgcaccgcgcgtccccgagctatccctggtgctgctggtgctggacgcgcgccagtccgagatcctcggggccctgggaccgaattgctcctcctcttctccgccgcgtctgctgcttggtcgccaccaaaacgtcaggagcacgatgaagcgcaagcacggccgcaagccggcggacaagaaggctgatccgtcggagtccacctcgccggaatccgcgtccagttccagcacggaggcgtcggacagcccgcgaaaccaggctgaggaggataacccgccgctcgtagatgctggggcagcagtgcctgaaccaccgtctcctcctcctgctcaaccttctgagccacctcggaagcccagtgccaccgcgccggctaatcctccagcggacataacgtacagcaggcccaaggtgggggctgtgtacggccgtgtcaaactgaagttcaagtcgtccaagacggtggactcgccgctgcgcccgcagcagcaggattctttggaagctcaagtgctgcctgctgatgctggtgcatcggagagcgctgctgtccctgaagtggtcaaaggagctgatgcggagaaggctacggttgtaatggatgggcagcaagcagaggggcaggggctggagtcgagtgacgcagataaggaaaaggtttcaaggaaagtaggaggcatcaagatcaagttggcggggctgccttctgtagaaagcaacactccggatcggaaatccgattcaacagatgagcgtcctccgagcaagcgggaagctcttttgggaagcaaaaaaatggaggatgcggtggagctgaggagctcacaggagtccgaagaaaaacagtctactccggaacatcagcgcaatgagaaagagctggctgctgcattagaagctattaagaaagttatgaagatggacgctgctgatccgttcaatgttccagtggatcctgttgcattagaaatacctgattattttgatgttattgagactcctatggattttggcacaatatgtcaaaacttggaacgtggtgacaagtatatgaattcagaggatgtatataaggatgtacagttcatatgggataactgtaccaagtacaatagtaaaggtgattacataattgagcttatgaaacgggtcaagaagggcttcatgaaatattggttggccgctggcttgtattctgatgtgctagacagtggcggcaatgacaaccctggcgatgaggatgcgaaaggccactcaaaaagcaaggttaagaacaaaaggcgacgcccagggaacgatcgccataaaagtgactgcatatgtgctgtttgtcaagttacaaggcgtaagaaagaaagggatgaaatagtggctgttatagataatgaaactgctgcaatggatagtaacccttctgagcagcatgacatggagggaaactctggtgctaataatattggtaatcatgacacttgctctagccaggagcagccgtcacaaacttatgtgtacaaagaggcatcagaagcaaacgattctgagattcagatggaagatgttggaaagttgtccgttgatcagacatctagtttggtgcttcttgactatgaagacgagggttccagacaatatttggtggaaaaaggacagactgagtatagagatatgaacagtaacgaagagcacacccccactggcattcagcctaacgagtactctgatgttgagcatcaccagcaaaaggggcagacagagaccaccagccaagagattgaaatggaggactatcctattcagcaggagaaccctttattcctgcaactccgtgcgagcctcttccccagcaactggagcagcactttcagggggcgacattccctgttccgtccgcgacgccgagccccggtgaaggcgagccctctgcatgtagccatggcggcaataatgaagcggtaggtatttctgggagcctggtttttctgtgaagtgaagctccaggtaggtagcggcgctgactttggcaaaagctgtacccctcaagacatggaagcaggttggaatgctgaggctgattagtagtttatacatacatgtgggtgcgagattagtttgaggcgtgctcccatctctgtaggcggcatatggattcagaattctgtttgatttttattttattttattttatgtggggggtaattgtgatagccacatgttggtccatttgcttgccgccctggaatagggctcttggtctgacgaaacaccctcccatataatttgatgatctgaagggtttgtttattgtctgggcaaattcttctccccaactgcccacctgaccagagagaggaaaaagaaaagagatgctcttcgccccaacagaagatcagactgggatacatacatgattgatgattcggacttgaatatttgctctgac

SEQ ID NO: 122247 - DNA, 1064 bp, Zea Mays
aaacactcgcctgctctgcacacacaccacacacacagacacactgacacacccacacactagttgtatgtgctagagctgcagttggcttggcatcagaggccatgaaactgaaacaggagcaagcagacgacgactgcagcaagatgcagggaggtcgtggcctgatgagcagccttgagctcaggctgggcatgtcttcagacaatggcgacgccagctgcggcggtgatccgtggcttggcgttggagtgcacccctggagccttgcctccagacaagcagagaaggtagccctggagcaagaccaccagcagcgttctccgccgcagccggtgggatggccaccggtgggcgcgttccgcaggagccacctgcaggtttcttcgaagaccgtggaggaaccggcgggcaaggtgaagtccggcggcgagaggctggcgccggcggccaccatgttcgtgaaggtgaacatggagggctgcgccgtcgggaggaaggtggacctgctggcgcaccgcgggtacgcgtcgctgtcgcgcgcgctgcaggccatgttccgtggcttcctgtcaggtcaggaactcaggacacagcacgaacccctcgtatcgcttgtgcacatgctccatggtcagtggaggatcgttggcagtgaggacgacgccgacgacgacaacgagcagcagccggagccgacgaagaaggggggcagtaagagcaacaagaaggcgtacattcttctgtacgaggacaacgagggcgaccggatgctcgtcggcgacgtgccgtgggagctgttcatggcttcggtgaagaggctctacatcgcacaggacccaaggaagacgaagaattagctaattaagctagttagggcctggctaggagaaacgttgctggctgccttattatttctacaaatagctccaagtcgaagcagatagctaagctagcactcccttcttcgatcctgtaatcctgtcgagcatcagttcatatacagcgcgtgtagtcggcatctctagtccaatattaatatataggaaattttgccttggact

SEQ ID NO: 122248 - DNA, 1010 bp, Zea Mays
aaacactcgcctgctctgcacacacaccacacacacagacacactgacacacccacacactagttgtatgtgctagagctgcagttggcttggcatcagaggccatgaaactgaaacaggagcaagcagacgacgactgcagcaagatgcagggaggtcgtggcctgatgagcagccttgagctcaggctgggcatgtcttcagacaatggcgacgccagctgcggcggtgatccgtggcttggcgttggagtgcacccctggagccttgcctccagacaagcagagaaggtagccctggagcaagaccaccagcagcgttctccgccgcagccggtgggatggccaccggtgggcgcgttccgcaggagccacctgcaggtttcttcgaagaccgtggaggaaccggcgggcaaggtgaagtccggcggcgagaggctggcgccggcggccaccatgttcgtgaaggtgaacatggagggctgcgccgtcgggaggaaggtggacctgctggcgcaccgcgggtacgcgtcgctgtcgcgcgcgctgcaggccatgttccgtggcttcctgtcagatggtcagtggaggatcgttggcagtgaggacgacgccgacgacgacaacgagcagcagccggagccgacgaagaaggggggcagtaagagcaacaagaaggcgtacattcttctgtacgaggacaacgagggcgaccggatgctcgtcggcgacgtgccgtgggagctgttcatggcttcggtgaagaggctctacatcgcacaggacccaaggaagacgaagaattagctaattaagctagttagggcctggctaggagaaacgttgctggctgccttattatttctacaaatagctccaagtcgaagcagatagctaagctagcactcccttcttcgatcctgtaatcctgtcgagcatcagttcatatacagcgcgtgtagtcggcatctctagtccaatattaatatataggaaattttgccttggact

SEQ ID NO: 122249 - DNA, 1582 bp, Zea Mays
cggaagctttgcttcggttgactgcactgcactgcacctgctgcctgctgccgagttcagttggtccagggccatggccatgtcctcgtcgcgcgccctcctccgccgccgtagggtaccacgtcgcgggcgggcccagctacatgcgcggcgccgtgttctgggagcccgggcgcccgctcacgctggaggagttccacatgccgcgacccaaggccggcgagctcctcatcaagaccaaagcctgcggggtgtgccactccgacctccacgtcctgaaaggcgagctccctttctccagcccctgcgtcgtgggccacgagatcaccggcgaggtcgtcgaccatggcacgcacacccccgcggagatcatcagcaggttcccagtaggaagccacgtcgtcggcgcgttcataatgccatgtgggaactgcttctactgcgttaagggccaagaggacctgtgcgagtccttcttcgcgtacaaccgcgccaaagggacgctctacgacggcgagacgcggctgttcctacggggcaacgggaagccggtgtacatgtacagcatgggaggccttgcggagtactgcgtggtgccagccaacgcgctggcggtcctccccgcctcgctgccgtacacggagtcggcgatcctggggtgcgcggtgttcaccgcgtacggcgccctgaggcacgccgccgagatgcgggcgggcgactcggtggccgtgatcggagtcggaggggtcggatcgagctgtctgcagatagcaaaggcctttggagcttccgaggtcatcgcggtggacgttctcgacgagaagctccggaacgccacaacgctcggcgcgacgcacactgtgaacgcggcgaaagaggacgccgttgagaggataaaggagatcactggcggtaggggtgtcgacgtggctgtcgaggcgctcggtaaggcgctcacgttttcccagtgcgccaggagcgtgcgcgacggaggcaaggcggtgatgatcgggctcgcggcgacgaatgtggtgggggaggtcgacataacccgcctcgtccggcgacaggtgaagatcatcggctcgtacggcgcgagggccaggcaggaccttccgcagatagtgaagctggcggagagcggcgccttcagcctccggaacaccgtatcgaggaagtgcaggttcgaggaggcgaacggcgcctacgaggacctcgaccagggcaagatcgtcggccgagctgtggtcgagatcatggagtgaatgggtgacgacgatgggcgtgggcgaggtgatcagtcatgtggcgtggttccaggcccctgggccagacgataccaataaataaaagcgcgcagatttctcgcttggctttcgccgtgtctcctaaacgtttgtcaaatcgtcaagagtcatgaaccctgttcgtccacagcatgggcctttatcctgagtcctgactgaccaaacaaacaaagctgcagcaaagccatatgcaccctgacttcggcccatgagtcatgaacccttgggttcgcccgtgttgtttctggtttataatgaaaatttattactgtcgc

SEQ ID NO: 122250 - DNA, 1723 bp, Zea Mays
ggagcccatccaaatccaaacgacgctgggtgttaaaataagtaagtgtgccgggggcagttgcttctgagagtctgcacggaagctttgcttcggttgactgcactgcactgcacctgctgcctgctgccgagttcagttggtccagggccatggccatgtcctcgtcgcgcgccctcctccgccggatcgggggggctctccgccgccgctccttctccgacgccgcggccggccccgactccgccgccgtagggtaccacgtcgcgggcgggcccagctacatgcgcggcgccgtgttctgggagcccgggcgcccgctcacgctggaggagttccacatgccgcgacccaaggccggcgagctcctcatcaagaccaaagcctgcggggtgtgccactccgacctccacgtcctgaaaggcgagctccctttctccagcccctgcgtcgtgggccacgagatcaccggcgaggtcgtcgaccatggcacgcacacccccgcggagatcatcagcaggttcccagtaggaagccacgtcgtcggcgcgttcataatgccatgtgggaactgcttctactgcgttaagggccaagaggacctgtgcgagtccttcttcgcgtacaaccgcgccaaagggacgctctacgacggcgagacgcggctgttcctacggggcaacgggaagccggtgtacatgtacagcatgggaggccttgcggagtactgcgtggtgccagccaacgcgctggcggtcctccccgcctcgctgccgtacacggagtcggcgatcctggggtgcgcggtgttcaccgcgtacggcgccctgaggcacgccgccgagatgcgggcgggcgactcggtggccgtgatcggagtcggaggggtcggatcgagctgtctgcagatagcaaaggcctttggagcttccgaggtcatcgcggtggacgttctcgacgagaagctccggaacgccacaacgctcggcgcgacgcacactgtgaacgcggcgaaagaggacgccgttgagaggataaaggagatcactggcggtaggggtgtcgacgtggctgtcgaggcgctcggtaaggcgctcacgttttcccagtgcgccaggagcgtgcgcgacggaggcaaggcggtgatgatcgggctcgcggcgacgaatgtggtgggggaggtcgacataacccgcctcgtccggcgacaggtgaagatcatcggctcgtacggcgcgagggccaggcaggaccttccgcagatagtgaagctggcggagagcggcgccttcagcctccggaacaccgtatcgaggaagtgcaggttcgaggaggcgaacggcgcctacgaggacctcgaccagggcaagatcgtcggccgagctgtggtcgagatcatggagtgaatgggtgacgacgatgggcgtgggcgaggtgatcagtcatgtggcgtggttccaggcccctgggccagacgataccaataaataaaagcgcgcagatttctcgcttggctttcgccgtgtctcctaaacgtttgtcaaatcgtcaagagtcatgaaccctgttcgtccacagcatgggcctttatcctgagtcctgactgaccaaacaaacaaagctgcagcaaagccatatgcaccctgacttcggcccatgagtcatgaacccttgggttcgcccgtgttgtttctggtttataatgaaaatttattactgtcgc

SEQ ID NO: 122251 - DNA, 2091 bp, Zea Mays
acatgttttgacaaattcctctcccccgactgagatcactgatccagtgcgcgtgccgccggcgccatggccgcgccaccgccgtcgccagaccaaacctactagcagcgcgtcgggggtgcacctgcggccgatctaggttggtgcgcgctaccgcctccctccctctcccgtcgatgcgatcttctagctccagattgcatctccttcttcttcctccttcggccagggcagaatggctcctcgcgggctgcggttttgtgctcaaaggcgcgatctttacgctcgggatggcttcgttacaggagacagggatttcttctcgtcctgtcctgtggattattacgggcctggatttgcttgggagtgagaggagagagcgagtaatagggtgaaggagtcttggggagaagatggctgcggaaatggtgaaggcggcgacgagcgacaagctcaaggagatggactgggcaaagaacatcgaaatctgcgagctcgtggcgcaggatccggggaatgcgaaggatgtgatcaagtctataaagaagtctgtagggagcaagaacaagagcactcaacactttgctgttatgctattggagatgcttctgaataattgcggagagcctgtccataggcaggttgttgataatagccttcttccaatacttgtgaagatagtgaagaaaaaaacggatttaccagttcgagaaaaaatatttcttctgttagatgccacgcaaacatcccttggtggagctaaagcaaagtttcctcagtactatgaggcatactatgagctggtgtctgctggtgtgcaattttcaaatcgcccaaatgttgttgtcacacgagcagaagtgccagtcccagaaacgagaacagaaccaaataatgtgagtttatcggcccgattgcatgaagctcaacaggaagtgcacactcagcctgctctggatacaagtatagtccagaaagcctgtagtgtcatggaagtattgagggatgtgcttaattctatggatcctagacaccctgagggagcaacggatgaatttgtgttggatcttgtcgagcaatgtacgtttcagaagcaacggatgatgcaccttgttatgacatcaagggatgaaatggtggtgtcacaagctatagagctaaacgaagagctacataaggttctcgtccggcatgatgtgttgctctcagttcatccgacaacaacagtagcttctaatatcaatgaggaagagaatgctgaaagtctctatcggagactgcggaaggggaaagctctgtcacaggactacacagatgactcggtaccgtcgttccggtccatgcccgaggacaagctgcggcggccgctgaccatccaatcacctcaccctgacaagagactgggcgcgctgaacatccacttgccggacggtgaggagccaaggcatgatcccgctccgctgatcccgccgccgcccgcaaagcacgccgagagggagaggttcttccaggagaagagcatcgacgagcatcgacggcggagtggccagcctgccgggtcacctgaggggcctgtcgcagcacagccgggacagcagcagctcgtgtagcggcagcactgattatggcgactgaagggggagcagtggtacatataggggttcccttcttgggggttgttggtctcccacttggccaggcaggccatacattggtgttgcgccggagtttggcttggccgtgagcttcttcttcatgctgacctgtgtacacttggtagcattttgttcctccttttcacctttgccgtgacattattgggagaccgttgtgttggtggcggtgtgggttcttttctttcagatctatagatgattgtgatctacatctactgcatggggtatgcttgggtctgaagcattgctgtgactttaccccttttggcttcctgctcctgtgtgtgtggtgtagcgcttggaggtctgccagagctgtgtccttgggaaaagctactgttcaaagcatgcgagagccccaccttgggctgtctatacagatgaaattttgataaactatcgttttggacaaaaa

SEQ ID NO: 122252 - DNA, 1923 bp, Zea Mays
acatgttttgacaaattcctctcccccgactgagatcactgatccagtgcgcgtgccgccggcgccatggccgcgccaccgccgtcgccagaccaaacctactagcagcgcgtcgggggtgcacctgcggccgatctagggcagaatggctcctcgcgggctgcggttttgtgctcaaaggcgcgatctttacgctcgggatggcttcgttacaggagacagggatttcttctcgtcctgtcctgtggattattacgggcctggatttgcttgggagtgagaggagagagcgagtaatagggtgaaggagtcttggggagaagatggctgcggaaatggtgaaggcggcgacgagcgacaagctcaaggagatggactgggcaaagaacatcgaaatctgcgagctcgtggcgcaggatccggggaatgcgaaggatgtgatcaagtctataaagaagtctgtagggagcaagaacaagagcactcaacactttgctgttatgctattggagatgcttctgaataattgcggagagcctgtccataggcaggttgttgataatagccttcttccaatacttgtgaagatagtgaagaaaaaaacggatttaccagttcgagaaaaaatatttcttctgttagatgccacgcaaacatcccttggtggagctaaagcaaagtttcctcagtactatgaggcatactatgagctggtgtttttttggttgttgcagtgtttattatgatatatagctgaagcctatcatttatcttgcctccatagtctgctggtgtgcaattttcaaatcgcccaaatgttgttgtcacacgagcagaagtgccagtcccagaaacgagaacagaaccaaataatgtgagtttatcggcccgattgcatgaagctcaacaggaagtgcacactcagcctgctctggatacaagtccagaaagcctgtagtgtcatggaagtattgagggatgtgcttaattctatggatcctagacaccctgagggagcaacggatgaatttgtgttggatcttgtcgagcaatgtacgtttcagaagcaacggatgatgcaccttgttatgacatcaagggatgaaatggtggtgtcacaagctatagagctaaacgaagagctacataaggttctcgtccggcatgatgtgttgctctcagttcatccgacaacaacagtagcttctaatatcaatgaggaagagaatgctgaaagtctctatcggagactgcggaaggggaaagctctgtcacaggactacacagatgactcggtaccgtcgttccggtccatgcccgaggacaagctgcggcggccgctgaccatccaatcacctcaccctgacaagagactgggcgcgctgaacatccacttgccggacggtgaggagccaaggcatgatcccgctccgctgatcccgccgccgcccgcaaagcacgccgagagggagaggttcttccaggagaagagcatcgacgagcatcgacggcggagtggccagcctgccgggtcacctgaggggcctgtcgcagcacagccgggacagcagcagctcgtgtagcggcagcactgattatggcgactgaagggggagcagtggtacatataggggttcccttcttgggggttgttggtctcccacttggccaggcaggccatacattggtgttgcgccggagtttggcttggccgtgagcttcttcttcatgctgacctgtgtacacttggtagcattttgttcctccttttcacctttgccgtgacattattgggagaccgttgtgttggtggcggtgtgggttcttttctttcagatctatagatgattgtgatctacatctactgcatggggtatgcttgggtctgaagcattgctgtgactttaccccttttggcttcct

SEQ ID NO: 122253 - DNA, 1779 bp, Zea Mays
catcgacatgttttgacaaattcctctcccccgactgagatcactgatccagtgcgcgtgccgccggcgccatggccgcgccaccgccgtcgccagaccaaacctactagcagcgcgtcgggggtgcacctgcggccgatctaggagacagggatttcttctcgtcctgtcctgtggattattacgggcctggatttgcttgggagtgagaggagagagcgagtaatagggtgaaggagtcttggggagaagatggctgcggaaatggtgaaggcggcgacgagcgacaagctcaaggagatggactgggcaaagaacatcgaaatctgcgagctcgtggcgcaggatccggggaatgcgaaggatgtgatcaagtctataaagaagtctgtagggagcaagaacaagagcactcaacactttgctgttatgctattggagatgcttctgaataattgcggagagcctgtccataggcaggttgttgataatagccttcttccaatacttgtgaagatagtgaagaaaaaaacggatttaccagttcgagaaaaaatatttcttctgttagatgccacgcaaacatcccttggtggagctaaagcaaagtttcctcagtactatgaggcatactatgagctggtgtctgctggtgtgcaattttcaaatcgcccaaatgttgttgtcacacgagcagaagtgccagtcccagaaacgagaacagaaccaaataatgtgagtttatcggcccgattgcatgaagctcaacaggaagtgcacactcagcctgctctggatacaagaaagcctgtagtgtcatggaagtattgagggatgtgcttaattctatggatcctagacaccctgagggagcaacggatgaatttgtgttggatcttgtcgagcaatgtacgtttcagaagcaacggatgatgcaccttgttatgacatcaagggatgaaatggtggtgtcacaagctatagagctaaacgaagagctacataaggttctcgtccggcatgatgtgttgctctcagttcatccgacaacaacagtagcttctaatatcaatgaggaagagaatgctgaaagtctctatcggagactgcggaaggggaaagctctgtcacaggactacacagatgactcggtaccgtcgttccggtccatgcccgaggacaagctgcggcggccgctgaccatccaatcacctcaccctgacaagagactgggcgcgctgaacatccacttgccggacggtgaggagccaaggcatgatcccgctccgctgatcccgccgccgcccgcaaagcacgccgagagggagaggttcttccaggagaagagcatcgacgagcatcgacggcggagtggccagcctgccgggtcacctgaggggcctgtcgcagcacagccgggacagcagcagctcgtgtagcggcagcactgattatggcgactgaagggggagcagtggtacatataggggttcccttcttgggggttgttggtctcccacttggccaggcaggccatacattggtgttgcgccggagtttggcttggccgtgagcttcttcttcatgctgacctgtgtacacttggtagcattttgttcctccttttcacctttgccgtgacattattgggagaccgttgtgttggtggcggtgtgggttcttttctttcagatctatagatgattgtgatctacatctactgcatggggtatgcttgggtctgaagcattgctgtgactttaccccttttggcttcct

SEQ ID NO: 122254 - DNA, 1812 bp, Zea Mays
atattttgcagagcggcaacatacatcgacatgttttgacaaattcctctcccccgactgagatcactgatccagtgcgcgtgccgccggcgccatggccgcgccaccgccgtcgccagaccaaacctactagcagcgcgtcgggggtgcacctgcggccgatctaggagacagggatttcttctcgtcctgtcctgtggattattacgggcctggatttgcttgggagtgagaggagagagcgagtaatagggtgaaggagtcttggggagaagatggctgcggaaatggtgaaggcggcgacgagcgacaagctcaaggagatggactgggcaaagaacatcgaaatctgcgagctcgtggcgcaggatccggggaatgcgaaggatgtgatcaagtctataaagaagtctgtagggagcaagaacaagagcactcaacactttgctgttatgctattggagatgcttctgaataattgcggagagcctgtccataggcaggttgttgataatagccttcttccaatacttgtgaagatagtgaagaaaaaaacggatttaccagttcgagaaaaaatatttcttctgttagatgccacgcaaacatcccttggtggagctaaagcaaagtttcctcagtactatgaggcatactatgagctggtgtctgctggtgtgcaattttcaaatcgcccaaatgttgttgtcacacgagcagaagtgccagtcccagaaacgagaacagaaccaaataatgtgagtttatcggcccgattgcatgaagctcaacaggaagtgcacactcagcctgctctggatacaagtatagtccagaaagcctgtagtgtcatggaagtattgagggatgtgcttaattctatggatcctagacaccctgagggagcaacggatgaatttgtgttggatcttgtcgagcaatgtacgtttcagaagcaacggatgatgcaccttgttatgacatcaagggatgaaatggtggtgtcacaagctatagagctaaacgaagagctacataaggttctcgtccggcatgatgtgttgctctcagttcatccgacaacaacagtagcttctaatatcaatgaggaagagaatgctgaaagtctctatcggagactgcggaaggggaaagctctgtcacaggactacacagatgactcggtaccgtcgttccggtccatgcccgaggacaagctgcggcggccgctgaccatccaatcacctcaccctgacaagagactgggcgcgctgaacatccacttgccggacggtgaggagccaaggcatgatcccgctccgctgatcccgccgccgcccgcaaagcacgccgagagggagaggttcttccaggagaagagcatcgacgagcatcgacggcggagtggccagcctgccgggtcacctgaggggcctgtcgcagcacagccgggacagcagcagctcgtgtagcggcagcactgattatggcgactgaagggggagcagtggtacatataggggttcccttcttgggggttgttggtctcccacttggccaggcaggccatacattggtgttgcgccggagtttggcttggccgtgagcttcttcttcatgctgacctgtgtacacttggtagcattttgttcctccttttcacctttgccgtgacattattgggagaccgttgtgttggtggcggtgtgggttcttttctttcagatctatagatgattgtgatctacatctactgcatggggtatgcttgggtctgaagcattgctgtgactttaccccttttggcttcct

SEQ ID NO: 122255 - DNA, 1098 bp, Zea Mays
atgaacaacattacgcagcacaactcgagcagcagcagctcatgggatttggacatgagcctcggcacccatcaccaccctctcctcttcgacagccaccccaacccggggccgccgccgccgccattacccttccacccctcctcctcccaccaccctccgccgcatcctgcacaccaccatcccggcttgggtccttcgctgtcttcctccctcttcccacaaccaccgcaccaccaccatcatcggctccaccgcctcggcctcgacatcgacgacccttcctcccaatcccacggccaccgcgggaacgacgagctggaggaggagatgcggaagcagcacgaggcggcagccgagcacgtggacgaggagctcggcgccatgaaggagatgatgtaccggatcgcggccatgcagccggtggacatcgacccggccaccgtcaagaagccgcgccgccgcaacgtacgcatcagcgaggacccccagagcgtggtggcccggcaccggcgcgagcggattagcgagcgcgtccgcgtcctgcagcggctcgtgcccggcggcaccaagatggacaccgcctccatgctcgacgaggccatccgctacatcaagttcctcaagcgccaggtgcaggagctccagcacccggcgcccgcggccgccggagcaggagccgggcccagcgtctcggccgtgggcggcctgccgctcattgactgggccgggctcgtgaggcccgtcgacatccacgggccgacgtcgccatcgtcctcgtcgtccatgggcggcgccggcgcccacgccgcgctagggttcgggttcagcagcgccggcggccagagcagccatggaatgcactgagcgatcgagcgaggagaggaaattcgatagtggtaggagcttcctttcctttccttaatttgtaccggatcggattaactagctaggaatcaatatagtctgtctctatcgatcaatggtggcgtggtgtggtggtggatcgatggattggtggatggagatgatgaactatagagagatcagaggtaattttgatctgatcgaaatttaatcattctgggtagctagcta

SEQ ID NO: 122256 - DNA, 760 bp, Zea Mays
gatggatatttgcagattactctacacgagtcacgataggaggaagactggaagaggaggcgagcacgtttgcggtgcccaccctcaccgtccactccagaaccccaaatccagttccgttccaatcgccgagaagggcagcaaaggggagaaaaaaaaaggaaatctatggcggcggccggcggcgagaacagcggcgctggcgagggcgagggcgagttctacctgcgctactacgtgggacacaagggcaagttcgggcacgagttcctcgagttcgagttccgccccgacggcaagctccgctacgccaacaactccaactacaagaacgacaccatgatccgcaaggaggtcttcgtctcgccctccgtcctccgcgaggccaggaggatcatccaggagtccgacatcatgaaggaggacgacagcaactggcccgagcccgaccgcatcggccgccaggagctcgagatcgtcatgggcaacgagcacatttcattcaccacttccaagatcggctccctcgtcgatgtccagtccagcaaggacccggagggcctccggatcttctactaccttgtccaggttccccctcaaccatgacaaatacagatattgtttgtttcctgtggccctccagaattttcatggttctaagctctacctgacaatgtattaataacaagcacatgatcagtatgatagatattttttccgtgtctgataacttgacgctagcactaaataccttgcttgt

SEQ ID NO: 122257 - DNA, 2195 bp, Zea Mays
ttctcccgccctccgctcaaaccaaacctccacaaaaacacgaaatttgggcgagggcggcgccactccaatccgcagatcggatcgctcgctcgccggaggaggcctggcccggacacgggaggagacgagcgagcgagatgccgatcgagatgcctcggggtctgccattcgcggtggacacgtggaccccggcgtcggcgctgaagcgccaccgcttcctcacccacgcccaccgcgaccacctcgccggcatcaccgctacgtccgccgtctccgcttcctcctccccggtctacgcctcccgcctcaccatcctcatcgccctccgcatcttcccgcagctcgaccgcgccgccttcgtcgagctggacgtcggccagccgccgctgcgcgtcccggaccccgacggcgacttcaccgtcaccgcggtcgacgccaaccactgcccaggcgccgtgatgttcctgttcgagggccccttcggcgacgtcctgcacaccggcgactgccgcctgacgcccgactgcctcagcgccctgacgtcccacctcgcccgccgcatcgactacctcttcctcgactgcaccttcgcgcggtgctccctgcgcttccccgccacgcaggactccatccgccaggtgatcgactgcgtctggaagcacccgagcgcgccggtggtgtacctcgtgtgcgacatgctggggcaggaggacgtcctcgtcgaggtgtccaaggcgttcgggtccaagatctacgtcgacagggagaagaactccgattgccaccagaggctggcgcacgtcgcgccggagatcctcgccgccgacgacgccgcgccctccacccgcttccacgtcctgccgttcccgcggctgtcggagcgggccacggagatcctcgcgcaggcgcgcgccgcgcgccagccggagcccctcatcatcaggccctcctcgcagtggtacgcgtactacgacccaccgccaccggaggaggcgtcgacgcagcagcagcagaaaccggtgctgacggaggcgatgcgcgacgagttcggggtctggcacgtctgcttgtcgatgcactcctcccgggaggagttggagcaggcgctggggatcctcaagcccaaatgggtcgtctccaccacgccgccgtgcatggcggtggacctcagctatgtgaggaagcactgctccctgtcccggttcggacctgacgatcccatctggaagttgctcgggatatctgatggaatgtctaccgttaccagctcggcccaggcagtgctgctgacagtagaagccgtcgagaagcgcgaggaagtgttcagcgcttgtgctccctctgatgatatcagccaagcaccggaggagggtgcagaagcagcagtggttgatttcgaggtcagagtcgagccacctgtcacgcttttcggaagcgcaaggttcggattaccacaacacgaacctgaactgtggaactatgagtatgagagtgccgagatcattggtgacgatgagcttgaagccaaggattctgcaactgagcttgagttttgtagacatagtaagcctattcaagtggttgggttaactgaagctgcaacaagggagcacaatccgatctgtgatgaatctgagctgctgaacgacatcaaatctgatgacggagtagaagtagttgatctaactgaaggtggaaagaaaggtgtagagactgaacatgacagagggaacacagcggctgaactgggggcgcaagaacaaaacctgaatgctcgtgctcgtttgacggcgggagtttgcaggcataagatgactactgacgaaggtacggaagcgactgaagggatggtctcagctgcgcatgttctagaggatggcaccaccgctacaccaggaactgggaggagcactgatcatcagtactctgaaagggcgagcgattcttcaaccgttgtcggatcatcgaagggcctcaacgcgagcctgaggaggctgtacaggtcgatgaacgtgccggtgccgcgccccctgccatcgcttgtccagctgatggcggcttccaagcggcccagagtctctcaaactgcgcagctgtaggttcagtcttttgctgctgcaaaatgaaattgttgcgagtttgtgcactgtggcctggcaacggattcgtattgatttgttatgtgaagaggc

SEQ ID NO: 122258 - DNA, 1983 bp, Zea Mays
ggcattccgaagagaagcggggggaggcgaaggcaacaggttcgccgttccgagtcgtccgtcgcctgcccgctgcccgttccgggcgcctccgccccgtttcgtcgaccacctctccggcgccgccgtcctgagccgtcgcacgcgccacgggggcgcctcccgcgcgcgctccctacgccggctccgccccgccccgccgccatgggctccagagtccttcacttagacgttcctgcaaattctgaggcctatcttatgagaaatgtaccagggagtgtaagtagccctcccatgaatggtgaaaagggtctctttcgaaatcagaatgcggggttcactgcacttgcaagtcctgtgaggagagaaatcggaaacagatcgtcgacaaggtccttctgtgttgatgacaatgacttggaagatggtaaggcctcaaaagaaagggagagttctgcacagtcactcaggctcccaaagattcagaatcaggctctcttatctggtctggcttactgcatatcatcatgcagcatgatcttagtcaacaaatttgttctatctagctatggtttcagtgctccagtatttttgatgctttaccagaacattgtatcagtgaccatagtttctacactatccctgtccggtgctgttccaactgaaccattgacatggaatttaatcaaagtttggttgcctgtaaatatcatctttgttggaatgctgatcacaagcatgtttagtttgaagtacattaatgttgccatgctgactatattgaagaatgtcgccaatgtcctgactgcttctggggaaacttattttttcaagaagcagcatggtactcaagtttgggttgctcttatgttgatgataatctctgcagttgcgggaggaataacggatctgtcattccatgctgttggatatatctggcagaccttaaactgtgttctgacggcggcatattcgcttacattgcgacatgtaatggacagtgctaagcaagtcaccaagtctgggaatttgaatgagctttcgatggtgttgctgaataatgttctttcactgccattgggaattatcctcgttcttggtttgaatgaaatggagtaccttttgcagacatcactcttaaggatgcccgagttttggctggtcatcactgccagtggagttttggggcttggaatcagctttacatcgatgtggtttctccatcagacgagtgcaacaacatatagccttgtgggctccttgaacaagatccctctttccatcgctgggatcgtcctcttcaacgttcgtacaagcgtgcagaactctttgagcattctgtttggtctattagcaggagtattcttcgccagggccaaattgcgagataactcaccgaccttgtgatcaccgtgcaggctttatagtttgtagatcatcaatcagctcagaaacactctctggatttgtgcagatgcaatggttgtttcccacctgactatgcagagagacaacacatgcacccggattgggctgggactctccagttctccttctcttccccacaagctgacttgacccacagtggttagtcttctggtggtatacgtcttcgttcttgctgtaaaatagtacccaaaaagaaaattgatggacgcaactgattctcaggcagtttgtgatggaaaggcgggttgattgtagtttgtaaagacacggttgctggatggaaggggatgtaatggtaataggttccgtgcatgggaaatattaatacgaagtatctagatcaggattcaggcgacggaaaaagtaaaaaaatgaattggtttgtttatttcaaacaagatgggcctgaagaagcagagaagtgcaagctaagattcaaatggcaacgggcaatgccggtaggtacacagctatttgtataaaaaagacaatgaaatcgaagttttaaacgggtaaagtataaaaaattcaaag

SEQ ID NO: 122259 - DNA, 1987 bp, Zea Mays
ggcattccgaagagaagcggggggaggcgaaggcaacaggttcgccgttccgagtcgtccgtcgcctgcccgctgcccgttccgggcgcctccgccccgtttcgtcgaccacctctccggcgccgccgtcctgagccgtcgcacgcgccacgggggcgcctcccgcgcgcgctccctacgccggctccgccccgccccgccgccatgggctccagagtccttcacttagacgttcctgcaaattctgaggcctatcttatgagaaatgtaccagggagtgtaagtagccctcccatgaatggtgaaaagggtctctttcgaaatcagaatgcggggttcactgcacttgcaagtcctgtgaggagagaaatcggaaacaggcatatcgtcgacaaggtccttctgtgttgatgacaatgacttggaagatggtaaggcctcaaaagaaagggagagttctgcacagtcactcaggctcccaaagattcagaatcaggctctcttatctggtctggcttactgcatatcatcatgcagcatgatcttagtcaacaaatttgttctatctagctatggtttcagtgctccagtatttttgatgctttaccagaacattgtatcagtgaccatagtttctacactatccctgtccggtgctgttccaactgaaccattgacatggaatttaatcaaagtttggttgcctgtaaatatcatctttgttggaatgctgatcacaagcatgtttagtttgaagtacattaatgttgccatgctgactatattgaagaatgtcgccaatgtcctgactgcttctggggaaacttattttttcaagaagcagcatggtactcaagtttgggttgctcttatgttgatgataatctctgcagttgcgggaggaataacggatctgtcattccatgctgttggatatatctggcagaccttaaactgtgttctgacggcggcatattcgcttacattgcgacatgtaatggacagtgctaagcaagtcaccaagtctgggaatttgaatgagctttcgatggtgttgctgaataatgttctttcactgccattgggaattatcctcgttcttggtttgaatgaaatggagtaccttttgcagacatcactcttaaggatgcccgagttttggctggtcatcactgccagtggagttttggggcttggaatcagctttacatcgatgtggtttctccatcagacgagtgcaacaacatatagccttgtgggctccttgaacaagatccctctttccatcgctgggatcgtcctcttcaacgttcgtacaagcgtgcagaactctttgagcattctgtttggtctattagcaggagtattcttcgccagggccaaattgcgagataactcaccgaccttgtgatcaccgtgcaggctttatagtttgtagatcatcaatcagctcagaaacactctctggatttgtgcagatgcaatggttgtttcccacctgactatgcagagagacaacacatgcacccggattgggctgggactctccagttctccttctcttccccacaagctgacttgacccacagtggttagtcttctggtggtatacgtcttcgttcttgctgtaaaatagtacccaaaaagaaaattgatggacgcaactgattctcaggcagtttgtgatggaaaggcgggttgattgtagtttgtaaagacacggttgctggatggaaggggatgtaatggtaataggttccgtgcatgggaaatattaatacgaagtatctagatcaggattcaggcgacggaaaaagtaaaaaaatgaattggtttgtttatttcaaacaagatgggcctgaagaagcagagaagtgcaagctaagattcaaatggcaacgggcaatgccggtaggtacacagctatttgtataaaaaagacaatgaaatcgaagttttaaacgggtaaagtataaaaaattcaaag

SEQ ID NO: 122260 - DNA, 1833 bp, Zea Mays
atggcctgcaaccgccgccgcaagcttctctgcgcctgtttgctgctggcttgcgcagcccccgccgccgccgccgccgtcaacatctccgtctactggggccagaacagcaacgagggcagcctgggccagacatgcagcagcggccgctacgccttggttgccatggccttcctttccacgttcggcagcggccagacaccggtcctcaacttggccgggcactgcgaccccgcgtcgggcggctgcacagctctggccgcggacatcgcggcctgccaggcgagaggcgtcagggtgctcctcagcatcggcggcggtgctggaagctacaacctctcctccgcctcggacgccgagagctgcccgtacccggacgcctcgctcggcgcggcgctcgccacggggctgttcgaccacgtgtgggtgcagttctacaacaaccccgggtgcgagtaccagcagaaggacggagacggcgtggccaacctggcggcatcgtggaaggcgtggacgcagtcgctgccgtcgtcggcgtctgtgttccttggcctgccggcgtcgcctgctgcagcgggtagcgggtacgtacccccggacgaccttgtgtcgcgtgtgctgccggcggtgagcggctccgctaactacggcggcctcatgctgtggaaccgctactacgacaacagcaccggttacagtgcccggattctgagcagcaatatcatagcgggcaccgcaggcgtatccgggctgtgtgcaataatcgctctcgcagccttgatgtggtggtacaagagacgttatggcatggtaataccatggcgcagaggcgtatccggggtcgaatcctttctgcaaaagcaaggagctctactacacccgaaaggctacacttactcggaggtgaagaggatgaccaggtccttcgctcacaagctcgggcaaggcggctacggcgctgtctacaggggcagcatgcctgacggccgtgaggtggccgtcaagatgctgacgggcatgctggagggcgacggcgaggagttcatgaacgaggtggcgagcatcagcaggacgtctcacgtcaacatcgttactctggtagggtactgcctccagggtccaaagagagctctcctgtacgagtacatgcccaatggctccctcgagaggtacaccttcggcagcagcagtggagaagacgccttgagctgggacaggctgttcggtatcgtcgttggagtcgcgcgagggctggagtacctccacacgggctgcaacacccgcatcgtgcacttcgacatcaagccgcacaacatcctgctggaccaggacatgtgtcccaagatctcggacttcgggctggcgaagctgtgcgggcagaaggcgagcagggtgtccatcgccggggcgaggggcacggtagggtacatagcgcccgaagtcttctcgaggagctacgaggcagtgggcagcaaggctgatgtgtacagctacggcatggtggtccttgagatggtcggagcgaggaagaatgtccatgtcagtgctacagacgacggcggcaacagcagcagcagcaggtattttccgcaatggctgtatgaaaacttggaccagttctgtcgccccacaaccacgagcaacggcgagatccgcggtgacgacgacgacgccacggaagtgctgctcgtgaggaagatggtcgtagttggactgtggtgcatacagtccaaaccggacagtcggccgtccatgggccaagtccttgagatgctggagagcaacgccgccgacctgcagctgccgccaaaggccttgtgcaccgcttattaa

SEQ ID NO: 122261 - DNA, 880 bp, Zea Mays
gctggccactagacggcataactgtcaacccggaccggcatcgagccgattgtcaccacaccagctttgctcgtcttccggtcagcctccactaccttggaactgattttgaccttctgctcctcgccaccctcaggaactgcgctcccagagccactgactccatttagctgcttctccataccagctgtgctagtcttacggtcagcctccactgccttggagcttatcttgagagacccaagtttggcagtgaccctctgctgctcgccaccctctggaactggaactgtgctcgcagagccgctgactccatttagccgcttttcaggtgctttcagtgagccctgggcagcaccgctgtctgcatgctgctttggattttcgaccttcttccagtactgctgtttcccatccgcacctgccgccttcaagcttggacctggtggatggttggttgcagttttcgctgcatcctcttggttctgactgccgctgcaatgactttcctgtagttcattctctttctcagcctcactcgcctgcttatcagaggcacgcggctcctgaggattgatcaccttagcatcatgcggcttctcagacacattttgtatctcagatgttctgtctaccagcacactgctggacttcgtctgctcagtgcgctgggagacaggtacaaaatctggagcatcgtaactcagcttgcatcttctgtgcggcttcatttgcgcctcttctgcctcatatctcataaaatcatcaaacaggcagtccctcactttgatgtctttgaagatcttgatcacagatattccagggaggtatggtatctgcaaataagacattgcaacggatcatgacacgaggcttccac

SEQ ID NO: 122262 - DNA, 801 bp, Zea Mays
gctggccactagacggcataactgtcaacccggaccggcatcgagccgattgtcaccacaccagctttgctcgtcttccggtcagcctccactaccttggaactgattttgaccttctgctcctcgccaccctcaggaactgcgctcccagagccactgactccatttagctgcttctccataccagctgtgctagtcttacggtcagcctccactgccttggagcttatcttgagagacccaagtttggcagtgaccctctgctgctcgccaccctctggaactggaactgtgctcgcagagccgctgactccatttagccgcttttcaggtgctttcagtgagccctgggcagcaccgctgtctgcatgctgctttggattttcgaccttcttccagtactgctgtttcccatccgcacctgccgccttcaagcttggacctggtggatggttggttgcagttttcgctgcatcctcttggttctgactgccgctgcaatgactttcctgtagttcattctctttctcagcctcactcgcctgcttatcagaggcacgcggctcctgaggattgatcaccttagcatcatgcggcttctcagacacattttgtatctcagatgttctgtctaccagcacactgctggacttcgtctgctcagtgcgctgggagacaggtacaaaatctggagcatcgtaactcagcttgcatcttctgtgcggcttcatttgcgcctcttctgcctcatatctcataaaatcatcaaacaggcagtccctcactttgatgtctttgaag

SEQ ID NO: 122263 - DNA, 271 bp, Zea Mays
gatttgatcttcccggcagcagcagcagcaggggagtgacacgaggaaaaagatgagtcggcgcaggagagaggggactagaactaggaggaattagcgggcggttgacgcggatcgagttgggatggaaacgtcagctgccatgagaaaattgcagaggaggatttggaatggcaaggggggacgatatcccacacccgcagaaatcagaattgaaggtggtttggaatggaaggaaacaatcagaattgatcgaatgaatctctaattt

SEQ ID NO: 122264 - DNA, 754 bp, Zea Mays
tccatggttccctagccaactatagctgctaatagctgtagctgtacttgtgtagccgagagactccattatattatattgctcgatctctccatctgaacgtacacacagtccaacacacatggccgccgccgccgccgccctggtgagcagcaacagcctccgcgccccggcggccttctccgtcgtcgtccgcgcggcctcccggccggcgcctgtcgtcgcagtagtgacgccgctgcccgcggccaaggcggccgccgcccgcggcgccaggctgcgcgcgcaggccacccacaacgtcaagctcatcacgccggacggggaggtacagctcaagatgcccggcgacgtctacatcctggaccatgccgaggaacgagggttggacctgccctactcctgccgcgccggcgcctgctcctcctgcgtcggcaagatcgtctccggctccgtcaaccagttcgaccagagcttcctcgacgacgaccaggtcgccgagggctttgtgctcacctgcatcgcctaccccacctcggacctcgtcatccagacgcacaaggaggatgcactcgtcgagtcgtactagtatagtcagcaattaatgcaccacgtacgcacgctctccttgcattgcatgcatgtaataataataataacgacgccgccatgtaataataactaactatacatggtcctcatgcgtatgcataccagatgtatgagagcagtataacaacatgccgactaaata

SEQ ID NO: 122265 - DNA, 2444 bp, Zea Mays
gctcctccggtttggacaaccgcttgcagcggcttcgcttcgtcctcccaccctcccctcgtccctctccgctccggcgtgcttcggttgcccaccaagatctctaatttcccatcaaaccctagccctgtcgccgcctcctcactgccctgaccctctcctcctcacgcttcccgttccccatctcgccgccgtttctttggcctgggagacacgctctgctagctgtgtccgcgtatggcctccgacggtgcccccagaggccgccgtcccaagcgccccgcttcgggaggcctggtccaacccgacgtcctcacctacaagagacgacgccgcggcaccggcgccaacgccggccacagcgccgtcacgtcgggccccgaccccgatcccgtcaagaatcagatgagcgcggtggtgcacgccaccaattcccagcaaggtgggcgccaaacgctggacaggcactggagaagctggagggacacgctggagggcgtccttcgatccactgctgtgaaccagagcgccggagggattcagaactgcatccgagatgcgctcagatataatggttggcatcccacagaacatggaaacttagttgatgaccgaggaacagacgaagaggacgctactggagctctacattctgaagagagtagtggtgccttggttaagttagaagatggaacagttgcatctttggaagccaacaaggcgatgtgccacgacactctctttgacattctaatctccgagaagtttgccatgttgtgtgatctgctagctgcaacattccacggcagtaagccagacgacgttattggtttgcaaataattgatgccaagatgagaaatggggattatgcacagaaccctgcgctgtttgaccatgatattaagcagatatggaagaagtttgaacacgttggccaagaaatggctggtctggcaagcagtctcttactgatttcacaagcttctaatcaaaagcaggcttctgacatttcagaaattgatgtggctgaacacaagatagaggaaacaagtctggttggtgtcacccgcaaagccctaaggaagttcactcccccatgcgattctggctattctaccataccaagacgaactgggacatctggatcggatggaatttgcaaggattgtggtagaaaggcagacagcaaaggaagaattatctgtgacaggtgtgaagccgcgtaccatgtttcatgtctcaagcttgccattgatgaagaggccccagcaaaatggtactgtcccacctgcgtcgaaccagacgtacctttaaagagcaacaaccatggcagagcacatgaaggctgcgatgtatgcgagtggcttgaggtggagaagccagaagaacctgccgaagaacctgaattggccgtcaaaacacaggagagctcagtgtcaagcattgtcgaagacagtgaaccagacctctcgataaccgctctagcaaacttgtgcaagctttgtggcacgtgtgaagatgagaacaagaagttcgtggtatgcgggcatggctactgttctttcaagttctatcatgccctgtgcctgaaagaaagccagattgcaagcgagaagcagaggaatctaaaatgctggtactgcccgtcttgcctgtgcagacgctgcttcaagaacaaggacgacgagaaaatagtgttgtgtgatggctgtgacgaagcttaccacacttactgcatggatccgccgcgcagttctgtcccgagaggtaaatggttctgcacgccgtgtagtgcatggaggtcggcgaacgggatgcagaggtatgagaagtcgatcctgcagagcgtcaagcgtgttcctgatgccaaagggcccaaggtgcaggcagcagctgctgctccaggaaaataagcagcggcgctgtggatgcgagggtacaaaaagaaatgaaaggattcttgttcctctgaaggtgtatgcattactctgacagactgaatcgagtaatcggaggatgggctgtgtatacgtggggagaagacctgttggcttgtgaagacggagatggtggcatccgagtggacacgcacttttgtctctgtggatggagctgctgatgttggttccctgtcctgttatttccttcctggaattcttctgactaccccaagcgagtaggttgttgttgttgttgttgttctgttatgttgtgtctgccctttacctgatgctaagtggtaacactgacacccgcccatgttgacattgatatgtacatgcccgttacctgttttctttttgttggacaatccttatatactttctgcatggcatgtggtcgatgtctgtataagttcattacatatctgattgaacccataaggcagaaagcttgggtgatatctaaacaatgatgcatctccatgttttttctttctttc

SEQ ID NO: 122266 - DNA, 2030 bp, Zea Mays
atgctcgccgtcgccagggacggcgccgacctcatcctctccctcccggaggacgtgctggcgctcatctcggcgcacctccgaccccgcgacctcctcgcgctgtccgccgcgtcccgccgcctccgccgcgcgctctcggccgacaaggcgtggctggcgcagtgccgccgcctgctgccctcgcagccgcacctgctcgcgtggcgcgccgccgccgcgggctcctccctcgccgtctgccgcttcctccactccgccgcgccgctgctcggcctctgggcgcaccagaaccccgagctcggcaacctcgtcgctgctgtcccgggcttcctctccgtcgtcgccgcccgcgccataccgcaggagctctccccgcgcctccgctgggcgcccgtcttcgagctccttgccgacgcccacggccgccccgcgctcctcttcctccacggccaccaccacgcccacctcttcccaggcctgctcgcctccctgcagccccacgccaacgtcatctttctcgaggcgcacatcgccagggatccgttcgcttcctcctcctcctccagcccacaccgcttcgcccgcctctccttcggcgaccgccgccgcctgctcgactccctcgtcgccgcctgtcgggtcacgctgccgcccgacctcgtcgacgccccgctcttcgcgtgctccgaggacgacctcccgctgctcgccgcgcgccgggaggccatgctgcgcctgcacagggagtccgcggggggcatggtgcgcacgccggaggtccagggcctccttctggaagccaggaagaaggcgacaacgacgaccacgaccgacggtgggcacaggattcccctgcggaggagcctctctgccgtggcggggtatttcaggaacggcctgcgccagatggtcacacggtcagtgtctgcaaattccagggccgacaatgtggacgccaaacatctctccttgtctgacttcctacacgacggggagagtgtcgggctgagcctccgcggcgcaagaatgcggctgtccacttaccgtgcgtggccgagcatgcatgacaaccggttcgcgctctacaagctcagggtgcaggcgcccatgccgggaagggagtacgccggtctgtggggaggcacattcgggtggccaccggggcggccagacgatggatgcaagcccaagaaggctctcttctttctgctactctcatatgaagaggacagtgaggggaagcttcagctgatcgcgaccaaggtgttggagggaacacactatgttgtccatcccaatgggtcttcaatgtttataacgaggatgagtgagccatcaacagagccctttccgtggcagactgatggggagtttgatgtcgagaggagcttcgcaggcgagggcattgccaatgggtatggcttcagataccctagctcaaagcctggttcattgtttgtcctccagaatgggctacttgcatttgtttggagagaaaccggggccgtgcttaccttgcaaagactggatttggacgaactgctgaagaaaggggagcgtgtgcctgcattgcagccagtgccgaactttgcttacctgacaaagtcttactccaatgttttcaccagtttccctgtcggcgcggcttctcccaggtaaaaggtgtgagtggaggaggatgtatcaaatgatcacctgatgcagacaacggagaaacggtctccaggatcaagtttagctcttcttgcttgccatttgccaggtgatagtcacctggcgatgcttccataatacatactacctcgtggctgaaggagcatagcagcagccgtaatactttaggaattcaaatactttgtcatgaaggaaatagcaaccacaccccatattccttactacagctatttttcatgtttgtgctataaaatgaaaccaatctggagtgtaaatttgtatgagatctgtacatctcttcactataatgcaggcgatttatacgaagtctatactggaacagctttcaggtg

SEQ ID NO: 122267 - DNA, 105 bp, Zea Mays
gagcttggctatgtccctccctctctctagatctcttcttttagataatttacgtatctggacaatcgtcgtcaccaagcgatggcatcaaaaatctaaaaaaaa

SEQ ID NO: 122268 - DNA, 1481 bp, Zea Mays
gcatgcaacagataatcagcgctagctatcccctcatcgtcttctcttatcctcactcgcgtagtcgcctccctcctcttctcttccgcggcctggtgcaagaccaaggtgagtgattactgtcggtaatactttgtctacccttagcgcacgtagcgtgatgcatctcgctcccaattctctgcggctagggtgtcgttcattggcactctaattcgcgcgcgtgtcctgttcgatggaatctcagaaagagttccggtctttcgacagagggaggaggaggccacgatggccggcagcgtcagcaacggcagcgggaagagcctggcgcgctggctgcgggagaacgggttcgacgacgacgccgtggcgcgcatgtccaggcggtgcaggaacctgcacagcctcgacgccggcgaggccccgggcgtgtgggactacctcctgaccggcgtcaagatggagcggcggaagctgcggcacgtggtggccaagtgccccaagctgctcaccctgtccgtggacggcaagctcgcgcccacggtgcagtgcctcgccacgctgcaggccaggcccggggaggtggcgcaggccatcgccaagttcccccagatactgttccacagcgtcgaggagaagctctgcccgctcctcgccttcttccagacgctcggcgtctccgagaggcagctcgccaagctgctcatggtcaacccgcgcctcatcagctacagcatcgaggccaagttctcgcagaccgtcggcttcctcgccggcctcggcgtcgacagggaaggcatgatcggcaagatcctcaccaaggagccgtatatcatggggtacagcgtcgacaagcggttgcgccccactgccgagttcctcaagtcggaagtcgggttacaggggccagatctccagagggtggtcatgaccttccccgatatactgtcgcgagacgtggataagatcctgcggcccaatctggcgttcctacagagccgcggattcagcagggatcaggtcacggcactggtagctggttaccctcctgttctcatcaagagcatcaaacattgcctggagccaaggatcaagttcctggtcgaagagatggggcgggacatgggcgaggtggtaggttacccccagttctttcgccatggcctcaagaggagcctggagtaccgccacaaggtgcttaagcagatgaactcgagctgcagcctcagcgagatgctagactgtaaccacaagaagtttgccatgaaattcggtttggtcgcagcagtttaggtactcaacttttctctagtccaatccaaggtagtttgttttattctcaggtgaatctttccgtttgtaccgtcaggttgtgttgttcttttgaacatttgggcaatgataactaataattcaaggtcctttacaagtatcaactggtatctttgacaccctaagtacataaaatctctatgttctgt

SEQ ID NO: 122269 - DNA, 1305 bp, Zea Mays
gcatgcaacagataatcagcgctagctatcccctcatcgtcttctcttatcctcactcgcgtagtcgcctccctcctcttctcttccgcggcctggtgcaagaccaagagggaggaggaggccacgatggccggcagcgtcagcaacggcagcgggaagagcctggcgcgctggctgcgggagaacgggttcgacgacgacgccgtggcgcgcatgtccaggcggtgcaggaacctgcacagcctcgacgccggcgaggccccgggcgtgtgggactacctcctgaccggcgtcaagatggagcggcggaagctgcggcacgtggtggccaagtgccccaagctgctcaccctgtccgtggacggcaagctcgcgcccacggtgcagtgcctcgccacgctgcaggccaggcccggggaggtggcgcaggccatcgccaagttcccccagatactgttccacagcgtcgaggagaagctctgcccgctcctcgccttcttccagacgctcggcgtctccgagaggcagctcgccaagctgctcatggtcaacccgcgcctcatcagctacagcatcgaggccaagttctcgcagaccgtcggcttcctcgccggcctcggcgtcgacagggaaggcatgatcggcaagatcctcaccaaggagccgtatatcatggggtacagcgtcgacaagcggttgcgccccactgccgagttcctcaagtcggaagtcgggttacaggggccagatctccagagggtggtcatgaccttccccgatatactgtcgcgagacgtggataagatcctgcggcccaatctggcgttcctacagagccgcggattcagcagggatcaggtcacggcactggtagctggttaccctcctgttctcatcaagagcatcaaacattgcctggagccaaggatcaagttcctggtcgaagagatggggcgggacatgggcgaggtggtaggttacccccagttctttcgccatggcctcaagaggagcctggagtaccgccacaaggtgcttaagcagatgaactcgagctgcagcctcagcgagatgctagactgtaaccacaagaagtttgccatgaaattcggtttggtcgcagcagtttaggtactcaacttttctctagtccaatccaaggtagtttgttttattctcaggtgaatctttccgtttgtaccgtcaggttgtgttgttcttttgaacatttgggcaatgataactaataattcaaggtcctttacaagtatcaactggtatctttgacaccctaagtacataaaa

SEQ ID NO: 122270 - DNA, 2835 bp, Zea Mays
tcatcactccatgatctaatcgaacaacgcacgcacgcagcgccggcgtcgcccacggcacatccattgctcagtccactccgccgtccaccttgaagtcgtctttactcttcccgatccgtcagccaccgattggtcgtcaggaggcggcgatggcgtcccaggacgacgggtggggaggcggcgaggacggcagctcgctcttcgagggcatggtcctcttcgcgccagaacccgccgccgccgaggactcggtccctacccccgcccctgtccctgagctgacatccgccgctcgccccgacgccgacgcggcttcgtccgcgccgccgccgctcgacgaggacctcttttccgacctcaccctcctcgctccgcaggagccgctctcgctcgagcagccgcccccacccccgcaaggcgaggatcggagccacgcggcgcttgctcccgcgccgccagcagccgctgcggagctctcccggcagccgtcctcctcatcgctacgcaagaagaagcgggccgtgcgcatcgggtacggccgcttgccgcagcccgcgccgccttcccctcctgcctccgcagctgctgccgcgatctccgctagcagtatttccttcctggacgcttcgccgcatgcggccgtcactcgcatcctcgaccagctccctgatcggcaagtcgatgtctatgccaacggctacgaggcacacgcggaggcggtggccgtggataccagttcaccgcgtgtagaggcggtggcaactgaggacgatggtggtgggaaagaggatgaagacgctgcagttgtagccttgggggtcgaggagaggctggctctcctcagatcccaaatctccagcaagctcgactccatccagcagacggctgctgccgtggctgccaagaggaggcttttggctggacggcggaggaaggtggcggaggaggcggcctccgtggcatccgggcataaggatttggagagggagctggaggaggcctgcgaggccgaggactttgagagggcagagaggatcagcgactccctcgccacgctcgagaaggagaaggatcggctgtcgacggcgctgcgtggtgctgagcttgactatgattcagtggattcggagttgcaggaggtgcttgagtctcgcattgctgcagaggaggaagctgctgccctcatggagcaatttgcgaaggatgccactgaacacgctaattcagcgagcgagcacgcacaagaattatcctcgaaagaaatagaagagtggcaaacttcattggagttactagaaacaaagaagttagaaatggaagttgaaacacggttggttttagaagcacgttctgggttggaagggtcaatagagcatttggttgaagaagacaaactggagaaggatatgcttagtaaaaaaggagaaatcctcactaaggagttagctgagcttctagagttggtgaggttgaaagaagcagagatagctgaaaacaatgcccggatccatgaagttcaagaaagaatcagtgcagtggtctccagattccatggttctcagtcagatattgacttgaagctcagttccttgaaggaagaccaaagtaaagtggatctagagactgaagcacttttgttgaagaagaatgaaattgataagttcattactttaacagatcaaaaggattcagagttgagggacataattggtgcttgttcctctgaagcaaaagcttgtcgacaatcagttgaaataagaagaaagcttgcatcatcgatcttgaagtcaagagaggatagaattgggttgctaaaaatggaggaggaaattttgcaagtcattcaaatgcaaaggcaaaaaattaccgatgcaagaagtactcttcaggaggtatcttcaaggcgaacaagcatacagcaagaaacggaagcactgaagcagaagttgagtttcattgacaaaagaggccctgaactagaggctgaaaagaaagttgctgccgcctcaagaaactttaaggaagcaggaaggatagctgcagaggcaaaagctcttaactccgaaaaggacgagctgtatggtaagttggagaaagccgctactgatctagagacaatagaaaaggatattgtagcaaccacgaacaagatacaggaatgcgaagggcttattgaactcaaaggaagagagtcagcgttgacaagttacagaagactacggttagactgtgctgctgctagagcagaactgactgctgcagctgaaacagatgataacgaagaagctgagatactacgtaaggaggctgaagctgcagagtctaaagcaatggaactcaaaacatgctatgacctccaggtggtggatgatgagttcgtgtttcagcctgtagtccctatagcattcataacgaattcaacagggcagcacttggcagaaattgcgtcttcacttggcctatctcctcagaaatgaaatctggcagtggatttgtacagtgccaaggtctgtcggttgcactgcgattcaagtcctgccagtgccgtgcctgcgcgtattgaggggaagatctccttccaggatgtcctcctcaaggacccccctttatctcgcagcatttggaaattggaatctactcctaaacagagtaaagatcctagtgaggatttaagtgtaaagaatgtaattcttttgttgtgccagttttgattgaattgcagtgacatgccatcatcatcaaccagtacgtaatcatatttttgttttgagaaaaaaaaggatgtaatcagaagaaaatgtccaggaatgaagcttttcatgcatttgcctc

SEQ ID NO: 122271 - DNA, 384 bp, Zea Mays
cacataaacacaaaagcaccataattatatattcacaaaagcatcacaattataatatcattcacaactagatcatttacaggtagctagctagatcattcacaaaagctccagagatgatcaatcacaaaagcaccacagtgacatcactccagcttgaagcagttcaaaagcccacaactacatcactaatgtttcatatcactccagctattgttcaaaagcccacaactacatcactctagctgcttcagagttgatcagtcacaaaagcaccaaagctacactaatgcttcaagcagttcaaaagccttcagacaaccactccagcttcttgtatcctcctgttttaaggtacaagctttctttgtcgagaacacccta

SEQ ID NO: 122272 - DNA, 1539 bp, Zea Mays
ccgcatggccatttaagccaggaataaattagcttcccgttcatcatttttgtgatcttgcgcacatctttgagataacgcactttcttcaccagtacgttgcacgctttgtcagcagaagattgcaacaatctttcagaaggccgcgaatcccccgttttgtcgtggtaatgtatgcactttgtgttagacgggataggtttttaagatggaaaaactgcgggtaggaatcgtttttggtggtaaatcagcggaacatgaagtgtctctgcaatcggcaaaaaacattgtcgatgccattgataaaagtcgcttcgacgttgtgctgctgggcattgataaacaagggcaatggcacgtcagcgatgccagcaattatctgctaaatgcagacgatcctgcccatattgcgttgcgcccttcggcgaccagccttgcgcaggtgccaggtaaacatgagcatcagcttatcgacgcgcaaaacggtcagccgttgccgacggtggatgtcattttcccgattgtccacggtacgctgggcgaagatggttccttgcagggaatgctgcgggtcgccaatttaccgtttgtaggttctgatgttctggcttcagcagcctgtatggacaaagatgtcaccaaacgtctgctacgcgatgccgggctgaacattgcgccatttattaccctgacgcgcgccaatcgtcacaacattagttttgccgaagtggagtctaaactggggttaccactgtttgtaaaaccggctaatcagggctcttctgttggtgtcagcaaagtaaccagtgaagaacagtacgcaattgccgtcgatctggcgttcgagttcgatcataaagtgatcgttgagcaagggatcaaaggtcgtgagatcgaatgcgcagttctgggcaacgacaatccgcaagccagcacctgtggagagatcgtactcaccagcgatttctatgcctacgacaccaagtacattgacgaagatggcgcgaaagtggtagttccggcagccattgcgccagaaatcaacgataagatccgggcgattgccgttcaggcttatcaaacgttgggatgcgcaggcatggcgcgtgtagacgtgtttttaaccccagagaacgaagtggtgatcaacgagatcaacaccctgcctggcttcactaatatcagtatgtatccgaagctgtggcaagccagcggtctgggttacaccgatctgatcacacgtttgattgaactggcgctggagcgtcacgctgcggataacgcattgaaaaccacaatgtaatattttaacgcccgataatattcttattgggcgttttcagtttcttcatcgcgacgacgaataatcaaccccgccagccagaaactaatcacccacgtcaccagaccgacggcataggtctgccaaccttttgcttcaaatcccagtaaccccaccacgccattaagaatgaatataaggccaatgtcgaacgcatagtagtgccagtcacggcggatttttacaggcagattcat

SEQ ID NO: 122273 - DNA, 927 bp, Zea Mays
atgaaaataatacttctgtttttagcagccctggcaagttttaccgtacacgcacagcccccctcacagaccgtagaacaaacagtccggcatatttatcagaactataaatcagatgccactgccccttattttggtgaaaccggagagcgggcgataacttctgcgcgtattcaacaggcgcttaccctgaacgacaatcttacgctgccgggcaatattggctggctggattatgatccggtttgtgattgtcaggattttggcgatctggtgctagaaagcgttgcgataacccaaactgacgccgatcatgccgatgccgttgtgcgctttcgtatctttaaagatgataaagaaaagaccacgcagacactgaaaatggtggcggaaaatggtcgttgggtcattgacgatattgtcagcaatcatggcagcgtcttacaagcagttaatagcgagaatgaaaaaacgctggccgctttagcttcgttgcaaaaagaacagccggaagcctttgttgccgaactctttgaacatattgctgattatagctggccgtggacgtgggtggtttccgactcttaccgccaggcggttaatgccttctataaaaccaccttcaagacggccaataatcccgatgaagatatgcaaatagaacggcaatttatttacgacaatccgatctgttttggcgaagagtcgctattttcacgcgttgatgaaattcgagtcctggagaaaaccgccgattccgcccgcattcatgttcgttttacgctgaccaatggcaacaacgaagagcaagaactggttttacagcggcgcgaaggcaagtgggaaatcgctgattttatccgcccgaacagcggcagcctacttaagcagattgaggcaaaaactgccgccagattaaagcaatga

SEQ ID NO: 122274 - DNA, 264 bp, Zea Mays
ttagcgcaaggagggaaaggcgttttcgatcagaatgttattcgcgatctggcagataaatacggcaaaaccccggcgcagattgttatccgctggcatctggatagcggcctggtggtgatcccgaaatcggtcacaccttcacgtattgccgaaaactttgatgtctgggatttccgtctcgacaaagacgaactcggcgaaattgcaaaactcgatcagggcaagcgtctcggtcccgatcctgaccagttcggcggctaa

SEQ ID NO: 122275 - DNA, 119 bp, Zea Mays
cgcagtatttgaacaaacctgtaatttggaaacttattctgtcaaaatctaaacaactatgcttaggaaggaatcttattgcagtttggaagcaaacccaactaccctaattacaacag

SEQ ID NO: 122276 - DNA, 279 bp, Zea Mays
agcccgcccgtggcgctgagccccacgtccctggccccgcctcgaggcccctcgccggcggcgtcgttcctggggtcgccccagtccctgacaccgccggcctccaccagcacgggcccggcgccggacgcctcggcggcgacgaagttcatgaggatgtcctcgcagttgcgctcccggtccaccacggcgcgcgcggccgccagctccggcgagcacgagtacgcgcgcaggaggtcggtcccgaggaccatgagcttggtcagcaccatggagtag

SEQ ID NO: 122277 - DNA, 283 bp, Zea Mays
gaaaaaacaaaaaaaaaattgcaatggaaaaaatgtgggaagcttccaggaaaaatttttgcaaaaaaaacaaacaaaaaatttttttaatggacggggggtttggtttttttttaaaaaaaaacatttttttttgtaatttttttttttcaaaaaaagccccactttccccccccctcccccccaaaaaaaaaaaaaaaaccaaaaaaaaaaaaaaattttttttttttttttaaaaaaaaaaaaaaataaaaaaaaaaaaaaaataaaaaaaaaaaaaaaa

SEQ ID NO: 122278 - DNA, 1974 bp, Zea Mays
tacggcttccttttggtgcagcacaccttcatcgggccctcagcgaccgacgccgcctccgacgacagcccctggaaattggaagccaaacccagtggccatcgcaaaatctgaccgccggctactggcctctccgtgcgtgtgactgttcgtttgatttccaattggaagctggatcgatggagatcgtggatgagaggaggcgacggcgccctctctaccggttataaaggtggcaccgcagatgctccggtcggacccggcccaccagtcgaaacggagagaagggtgaagtcctccaaccaaacctgaaaacggcggcacgcgggtcgactggaaacaatacggacgactagtggcctacgccctgcgggatgctgtgccgcggccgacgccgtccggggctgtggcggtggccgacggcgctgcggcggctgtcccggctggcaccgcctgcgcctgcgcctgccgacccggtggtggttcgcgtcgacgccaacaacgtcgcgcgcttgggggcgcccaagccccggccgaggccgcggcagttgctctcactgccgccgttccccgcagggcaggaccctctcccaggaaggaaggtggcgccgcgacgcgtgacggcagtgagctgggtgaagcactatttcgccgacgtgccgcaggaggccgtgcaggctcatttcaacaggagaatggttttttctgagtgctatgaccacaaggtttcagctgacagcattcgaactcagaagcatcatctgaaaaagataaaacataatgatgctatggagcctggaatgaggattcaccttcctgtttcagtggctgagagtgacataaagaagcgttatgagaccattccgactgccacactgcatcctaataaagatgagatcgagtacctgaggaggctagtcatctacagggactctgctatattggtgcttaacaagccccccaaagtgcccatgaaaggacatttgccagtacataacagcatggacgtgcttgctgctgcagcactgtcatatggaagcgaggagggtccaaaattggtccatcgactggacagagaaagcagcggtctgattttgatgggcagaacaaaagaaagctttactcggctgcactggcttctcactagtgtaaacttagctagaacatcttctcagacatggaataaagcctgtgaagcatacgcacagaagtattgggcactagtcattggtactcctaaagaaagggaaggagttatatctgctcctatctcaaaggtactccttgatgacgggaaagccgaacgggtcattctggcacatccttctggcatagatggcgcgcaagaggcaataaccgagtaccgggtgatgggaccaaccattaatgggtgctcatggatcgagctacagccattgactgggcggaagcaccagctccgagtccactgtgctgaagccctaggcactcccattgtcggggattacaaatacggttggtttgtgcaccaaacgtggaagcaaaatccccagcctgacttcgaaccgttcactggagagccatacaagctgaggcggccagaaggcttggagattcagaagggcagtgtcctctcaaaagtccctttactacacctgcattgccgggagatggtcatccccaacattgcaaagttcctgagcagcactggaggatggcacgaaaacggcaccccatgggccaaggagaagcccaacctcctaagattcgtcgcgccaatgcctccgcacatgaaaatcagttggaacatcatgtcttcatacctggtgtaatttctgtattttttttcttccatacttctctagcttctcatgttaaccccaagttccatagagtgatttgtttgttcaagattctgagattgtagccaccatttctgaatcaatgcagaaaactacattttctgaatcaatgcacatctcatcgtctccactc

SEQ ID NO: 122279 - DNA, 1677 bp, Zea Mays
gtcgaaacggagagaagggtgaagtcctccaaccaaacctgaaaacggcggcacgcgggtcgactggaaacaatacggacgactagtggcctacgccctgcgggatgctgtgccgcggccgacgccgtccggggctgtggcggtggccgacggcgctgcggcggctgtcccggctggcaccgcctgcgcctgcgcctgccgacccggtggtggttcgcgtcgacgccaacaacgtcgcgcgcttgggggcgcccaagccccggccgaggccgcggcagttgctctcactgccgccgttccccgcagggcaggaccctctcccaggaaggaaggtggcgccgcgacgcgtgacggcagtgagctgggtgaagcactatttcgccgacgtgccgcaggaggccgtgcaggctcatttcaacaggagaatggttttttctgagtgctatgaccacaaggtttcagctgacagcattcgaactcagaagcatcatctgaaaaagttggttgcagataaaacataatgatgctatggagcctggaatgaggattcaccttcctgtttcagtggctgagagtgacataaagaagcgttatgagaccattccgactgccacactgcatcctaataaagatgagatcgagtacctgaggaggctagtcatctacagggactctgctatattggtgcttaacaagccccccaaagtgcccatgaaaggacatttgccagtacataacagcatggacgtgcttgctgctgcagcactgtcatatggaagcgaggagggtccaaaattggtccatcgactggacagagaaagcagcggtctgattttgatgggcagaacaaaagaaagctttactcggctgcactggcttctcactagtgtaaacttagctagaacatcttctcagacatggaataaagcctgtgaagcatacgcacagaagtattgggcactagtcattggtactcctaaagaaagggaaggagttatatctgctcctatctcaaaggtactccttgatgacgggaaagccgaacgggtcattctggcacatccttctggcatagatggcgcgcaagaggcaataaccgagtaccgggtgatgggaccaaccattaatgggtgctcatggatcgagctacagccattgactgggcggaagcaccagctccgagtccactgtgctgaagccctaggcactcccattgtcggggattacaaatacggttggtttgtgcaccaaacgtggaagcaaaatccccagcctgacttcgaaccgttcactggagagccatacaagctgaggcggccagaaggcttggagattcagaagggcagtgtcctctcaaaagtccctttactacacctgcattgccgggagatggtcatccccaacattgcaaagttcctgagcagcactggaggatggcacgaaaacggcaccccatgggccaaggagaagcccaacctcctaagattcgtcgcgccaatgcctccgcacatgaaaatcagttggaacatcatgtcttcatacctggtgtaatttctgtattttttttcttccatacttctctagcttctcatgttaaccccaagttccatagagtgatttgtttgttcaagattctgagattgtagccaccatttctgaatcaatgcagaaaactac

SEQ ID NO: 122280 - DNA, 333 bp, Zea Mays
agacatattgttgatctaggagcgcaggagtgctcatgtctggagtggcagtacactgggaagccttgtgaccatgccatagttgtcatcactagttttagaagtgaaaggatcgaaaactatgtgcatgatttttattcagtacaaaagtttagagaagcatactttagagtcatctatcctataagggattgttcacagtggcctcaagttgatatggaccctgttgtaaaaggacctttagcaaaacgaggtgttggtaggcaaaggaaattatgaatcaaaggttgtctgaaaggtgggagtaaacctaatacaaccactaaagaaggt

SEQ ID NO: 122281 - DNA, 181 bp, Zea Mays
atttttattttatttactttctgtgatcataattactgtattttaagtaggctaatcactgttcatgctatgggaaaataggaagtttaatttaaaattccgttatgctattgattcacgtagttaattgtttaccctgtgcaatgttgatcaactaaaagtgattaggtttccattagta

SEQ ID NO: 122282 - DNA, 3705 bp, Zea Mays
ccgtcgcccatcgtcttctccaccgagtcgccaaaagaaaaagggtaaaagcgtgcgtggcggagaggtggaggaggagcagcgaagcaaaagctcaccgagtgaagaagtgttgtccgaaggtgtggataaggccgacgcggttggaggctccggcgtcgcagaaagcgggacgcttgtcgccggcgtagctccaggcggcggaggaggactgctggtggacttgctcggctgcctagggtttcgggctgccagcctgccgtctcggaggccgcaagtgtaatggctactgagagtgctgtcagattaattggtggaacgggagctagggactggagtaagggatttggtgcattcgactcttcagtgggtgccctttcaggggaagacttgggatttgtagataatgatgctggggtttatgggggctggagcaaatctgttccaaatcgcagtggaagcgcgccacctagcatggaaggatctcttgctgctcttggccatctcattggccagcagagtgggagctttgaagctagtttggcaaccttggataacataactgacagttccaagtctgaggagcaagtacttgctgatccagcatattttgagtattatggctccaaggtgaatctgaatccaaggctccctcccccacttatttcaagggagagccgccgattaatgaaccgtgttggcaaggccaaagagtggagggtggtctctcaagataacagcaacaaagactctatatacattcctcgatccacattgtcaactcacaaagaagaacctgaggatgataaatctccaagattggatttaagttcagtggaggatgcccagattatctccagtgcatccaactttcagagccaggattttatgctggagagctttcgacagagtgctgcttctttgcctaacagttcatcttctaacccttcaaatatcaatactggtgattctatgcctgtatattctgacataaatttgtcagttgatgctgtcaagcaatcagacttgaactcctggacaccaaaaaggccactgaaaagtactgttagcaatgatgtttcatcgctgcccctttccagttcatcatcatattctggtagaaaacctggtatgcaaacttctcagcaagaaaaggcggctgtagacaccaaacatggaaatgttgtgcttggcagtggtgcagctgtttctgaacttgataatgtggactccagtatgaacaatttgatgataagtttggatggccatgcatcctcacctgtcaagcagaagtggcaggacaatgtcttgtggcagtatggctcctttctcccagcccaaggtgatcctactcaaggaatccatcttccccatgtaccttctattgataacctgtctcatgctcagctcaagttacctgctggtgacatgcaccagtttttaccgcagcctagtatgacaacacctttctatacaccaaattcgtttggaaacccttattatccgaatttgcaccctggtaatgcttttccaacctcaattggaactggagggtacgctgtaagtggttccattttgccaccttttgtggctggctttgctccccaaggtcctcttgctacacctctcgacagtcctatgactccaagctttagtggtaggccatctggattttctccagcagggaatcttacagggggaacagagtttatgcagtcatataaagtatacggacaacctggggctggtatgcagccatccattcccgattcgaactttattcatttctttcagcatccctctttatttcagtatactggtggaaatcaatacaatacaatgggtccaagatttactgttgtgaatccaactgaaagctttgatccacaaaagatgatacatcaagctgcatatccatctgatcagaggcttccacttccaagaactggctttcctaattctcctacatccagaagaggagggactgttccaaattatcaaggcatatcatcctatgttggagggccgatgacttatcctacaagtccagtgtttcagggacaaaccttgcctggagtattgcctcctgataggagaaatgaccctgttggatttcagtccccctcaagaaacatcaccgatagtcctgggattcaaaggcagcgagacagacagaagtttgatgaatcaaaaacttgctctttcttagaagagttgaagtccaacagagcccgcagggttgaactatctgacatcacaggtcgtataattgaatacagtgctgaccaacatggtagccgattcattcaacagaagttggaaaattgcactgccgaagagaaggcatatgtgtttgcagaggttcttcctcatgcttcatcactaatgactgacgttttcgggaattatgtgatccagaagttttttgaacatggaactcgtgagcaaaggagggatcttgctaccaagctcgttggtcatgttttgcctctgagtcttcagatgtatggctgccgtgtaatccagaaggctcttgaagttatggaacttgaccagaaaatagatctagttcatgagcttgatggacatgttatgagatgtgttcgtgatcaaaatggaaatcacgttatacaaaagtgcattgagtgtgtccctacagaacatattggttttgtagtatctgcttttcagggacaagttgctagcctttcaatgcacccatatggctgccgtgtaattcagagagttttggagcactgcggtggtacctcacaaagccagtgcatagtagatgagatattgcagtcggcgtgcgtccttgcgcaagatcagtatggcaactatgttacacagcatgttctagaaagaggaaatgctcatgagaggagccaaattattattaaattggctgggcaggttgttaccatgagccaaaataaatttgcatcaaatgtgatagagaagtgttttcaacatggtgatatggcggagcgggatctcttgatcaggcagattgtggagcagacagagggcaatgacaatttgctggcaatgatgaaggaccagtatgcgaattacgtggtccagaagatactcgaaacatgcaatgagaaccagcgggaactcctggtcagccgtgtcaagggccacatgcaagcattgaggaagtacacatacggcaagcacattgtaagccgagttgagcagctctgcggcgacggaaccgccgagccggattcttgaaatgaacccgcctaattcttcccaggccaggggtgtgagggtgtcttgttcttttgctcagtccatcagtggagaaagcagaacagatcaagtccacctctggtgcttccaaacagactaacaaaactgtcatcgaagattgtataggtgtgactcgcttcaggatagtcttgaggttctagaacaggaacttagtggtgtgcatcagtgtatctatgttagggtgtgcctatttacagaataacagtggttggctagctgtgtgcagaagggagtttagcgttatggtttgtatgtgatacatattatgcctggtaatgtatttgctttcttgcatcgccagttgtggggtaaatgcaatgttcacgcattgtcctgatatctcgttcagttcaagttgcgttttctacatggcaatggaggccagctgcatcattttttttggtttggtgaaaaaagaaa

SEQ ID NO: 122283 - DNA, 1944 bp, Zea Mays
ccgtcgcccatcgtcttctccaccgagtcgccaaaagaaaaagggtaaaagcgtgcgtggcggagaggtggaggaggagcagcgaagcaaaagctcaccgagtgaagaagtgttgtccgaaggtgtggataaggccgacgcggttggaggctccggcgtcgcagaaagcgggacgcttgtcgccggcgtagctccaggcggcggaggaggactgctggtggacttgctcggctgcctagggtttcgggctgccagcctgccgtctcggaggccgcaagtgtaatggctactgagagtgctgtcagattaattggtggaacgggagctagggactggagtaagggatttggtgcattcgactcttcagtgggtgccctttcaggggaagacttgggatttgtagataatgatgctggggtttatgggggctggagcaaatctgttccaaatcgcagtggaagcgcgccacctagcatggaaggatctcttgctgctcttggccatctcattggccagcagagtgggagctttgaagctagtttggcaaccttggataacataactgacagttccaagtctgaggagcaagtacttgctgatccagcatattttgagtattatggctccaaggtgaatctgaatccaaggctccctcccccacttatttcaagggagagccgccgattaatgaaccgtgttggcaaggccaaagagtggagggtggtctctcaagataacagcaacaaagactctatatacattcctcgatccacattgtcaactcacaaagaagaacctgaggatgataaatctccaagattggatttaagttcagtggaggatgcccagattatctccagtgcatccaactttcagagccaggattttatgctggctcttgaagttatggaacttgaccagaaaatagatctagttcatgagcttgatggacatgttatgagatgtgttcgtgatcaaaatggaaatcacgttatacaaaagtgcattgagtgtgtccctacagaacatattggttttgtagtatctgcttttcagggacaagttgctagcctttcaatgcacccatatggctgccgtgtaattcagagagttttggagcactgcggtggtacctcacaaagccagtgcatagtagatgagatattgcagtcggcgtgcgtccttgcgcaagatcagtatggcaactatgttacacagcatgttctagaaagaggaaatgctcatgagaggagccaaattattattaaattggctgggcaggttgttaccatgagccaaaataaatttgcatcaaatgtgatagagaagtgttttcaacatggtgatatggcggagcgggatctcttgatcaggcagattgtggagcagacagagggcaatgacaatttgctggcaatgatgaaggaccagtatgcgaattacgtggtccagaagatactcgaaacatgcaatgagaaccagcgggaactcctggtcagccgtgtcaagggccacatgcaagcattgaggaagtacacatacggcaagcacattgtaagccgagttgagcagctctgcggcgacggaaccgccgagccggattcttgaaatgaacccgcctaattcttcccaggccaggggtgtgagggtgtcttgttcttttgctcagtccatcagtggagaaagcagaacagatcaagtccacctctggtgcttccaaacagactaacaaaactgtcatcgaagattgtataggtgtgactcgcttcaggatagtcttgaggttctagaacaggaacttagtggtgtgcatcagtgtatctatgttagggtgtgcctatttacagaataacagtggttggctagctgtgtgcagaagggagtttagcgttatggtttgtatgtgatacatattatgcctggtaatgtatttgctttcttgca

SEQ ID NO: 122284 - DNA, 488 bp, Zea Mays
ggatccttgatgattacaggagttcattgaagccagcaacagttcaggctttggtgtgtgcttctagttggatacgcgggtctcgaagttcacctattcttgtaactggagaaggtgatgatggtgacatcgagtccgtggaatttccaaagtgtgtggttgcaagtaattaggcacatggtcacatactcacatggaggagatggaggagagggagacataggacctgggagaggagacatgagaggcacatggtcattacattttgttggctgtaactgtaaggctgtaactgtaagcctgttaattatttggttgcaacttgtaagttgcaactgttggctgttgctaacctgacatattttgttggctccctacaactttgtcctaaactcctgaactcctgtaaggctgcatcactgattcactgcatgtattttggttctagaattaaaactatgaaagtatggaattatggattatggaat

SEQ ID NO: 122285 - DNA, 2665 bp, Zea Mays
ggtttgctctcttctcatgttcgaagctcggagattatgacacaagcatgactggtccttgaaaactatacacggctttggagagatgggatgtgctgcttccaggttagaagatgaggaagccatcaagatgtgccgggacagaagggacttcatcaagcaggcactggagcagcgcaaccgatttgcatcttctcacattgcttacatcgagtccctgaagcgtgtttcaatggctctccaacggtttgttgctggagatgaccaccatgagctcatcttcgatacattcatctcccctgtcaagcaacagaagccagagacgctcagcctgccttatggttcatatgagaagagaaccattcatgtctcgagatacttgaggtcagggcctaacccatcagtgtcagttgaggagcacccacgaccggtggaaacagtccgtgttgagtcacattaccctatggacaatcacagtggcatggataggttcttacaatcgcactcctcaccggtggtatcgtcttcatactacccaccaccttataccaggccaagctacccatctccatcgtcccaggaaccagttatgaatacttctacctattacatgccttatgacaggccaagatatgcacctccatcaccccaggaggcaatgaggacttcttattatgcatcttatgacaggccaagctaccgaccaccatcatcccaggagccaccgaggaattcttatcatgtgccatatgacaggccaagcttcccacctccatcaccccaggagcaggaatcatcaccatgggactccttctggaacccattctcatcgctggacagctttggatatccccgccctcggagtagctatgacaacgtgaccaatgacgatgaactcgcgaggttacagcgggtacgagaggaggaaggaatcccagaacttgaagaggaagacgatgagtgtcaagagcatgtacaaatgcatagaaaagaagaacaagaagatcatgataatgcggatgatgatgatgaagacgatgaggaagatgacgatgacgaatgtgagcattcagatgagtatatggtttctgacgagggcacttgctctgtcaattttgatgctaatatgaagcaagaaacaaagggatttgaatccaaaggtattcagtgtactgaagcaccagaacctcgcaagacagtagaacttgagttaaaggcacacaagaaagaactgatgagaaacagagtagcaaatgcagaagaaactcctggtttcacagtatatctgaatcgaagaccagcaagcttggttgaggccatgaaggatatcgactgtcagttctcgggaatatgtgacgctgctcgggaaatctcagtaatgttggaggcaagtagagctcagtactcagcctcaaacgatctttctgcgaagatgctgaatccggttgcacttttgcgctctgtgtcgtcgcgttcatcgtcttctcgtttccttcttgctccctctagctcaatagatgatctctttgacaatgagactagcagctgttactctgaagaatcttgtagtaccatgtctggaagtcaccactctaccttagatagactctatacatgggagaagaaactgtacaaggaagtaaaggctggtgagcggttaagaatcgagtacgagaagaggttgacacatttgaggaaccaagatgtcaaaggcgaagaaccttcctctgttgataagacttgtgcagcattaagaagcttgcatactcggctgaaggtgtcaatacagacagttcagtcaatatcaacgaggattgaaattctaagggatgaggagctgcatcatcagcttatggagctgattcaagggctatcacggatgtggcgggccatggctgaacgccacaaagcccagaagcgcaccatcgaggacgccaagcttctcttcctccagcaccacccctcggccgccaccgccatctcccttggcccgctagaggctgcaggtcccccaccggctgccttggaattggagtccgagatccaggcgtggcgaggagcgctggaggcctggctgttcgcgcagcgcgcctacgcgcgcgcgctggccgcgtgggcgcgacggtgcctcggcatcagcaccgcggcgcggccaagtagccacgcgctgccgccggcgttcctggcgtgcatggagtgggggcgcgcggtcgacgcggccactgaggcgcgggtgatggacggtctggacttcttcgtcgccggcgtcgggtcggtgtgctcgggcgcggctgccgggatggagggcatggctgggcgcgtgctgtgtgctggcatggcagcggtcaccggcgccttggcggagttcgcggcggcgtctggcgacagctatgacgccgctgtcgcagctgtcgtcgccgcggcgcgtgcgccggagcgcgggaaagaggacggcgtgggacaagtgccggaacgctaggaaagtgctgcggcggttgctttgttggttgaccggcccccgtgacgtagagtggctctgctcaccttgtgatgacgatgggtagggtaggagatggaattaagcatgcagctacgtatgtagtcttgtgattgataagaatgctattacaaggctatctaattttgctagcgactgcttattata

SEQ ID NO: 122286 - DNA, 1307 bp, Zea Mays
gaccgttgcagtctctctctccctctgtccttccgttcccggccactcctctctccctctcttctctctctctgcagactgcacaaagccgccttcgtcttccactcgttcttgtttacacacacagcacagcacagcacagcagcctcccgggaaagagaaggcagttccctcactgtctctcaggattgtggtccaggtcatctccccgttcgctggcttcagcagcagagctcttgctggcaaacaagtgatctttctacagttttaggtaatttcaacagtgatggatgaacaacaatacctggctgaagctgaaactcttctgtaacattttgtcatttttcttctcacgtttagaagggcaggcctttgacactgggtttgctctcttctcatgttcgaagctcggagattatgaatacttctacctattacatgccttatgacaggccaagatatgcacctccatcaccccaggaggcaatgaggacttcttattatgcatcttatgacaggccaagctaccgaccaccatcatcccaggagccaccgaggaattcttatcatgtgccatatgacaggccaagcttcccacctccatcaccccaggagcaggaatcatcaccatgggactccttctggaacccattctcatcgctggacagctttggatatccccgccctcggagtagctatgacaacgtgaccaatgacgatgaactcgcgaggttacagcgggtacgagaggaggaaggaatcccagaacttgaagaggaagacgatgagtgtcaagagcatgtacaaatgcatagaaaagaagaacaagaagatcatgataatgcggatgatgatgatgaagacgatgaggaagatgacgatgacgaatgtgagcattcagatgagtatatggtttctgacgagggcacttgctctgtcaattttgatgctaatatgaagcaagaaacaaagggatttgaatccaaaggtattcagtgtactgaagcaccagaacctcgcaagacagtagaacttgagttaaaggcacacaagaaagaactgatgagaaacagagtagcaaatgcagaagaaactcctggtttcacagtatatctgaatcgaagaccagcaagcttggttgaggccatgaaggatatcgactgtcagttctcgggaatatgtgacgctgctcgggaaatctcagtaatgttggaggcaagtagagctcagtactcagcctcaaacgatctttctggtactgcttttatgatccaatgctgaaattactttaaagatccagatttgat

SEQ ID NO: 122287 - DNA, 108 bp, Zea Mays
ctccaacagataactcaaccaaaagctaggttctttcccaacgtccgcttcaagttttccccatataatctccatccggcgaatattaacaccgctcatccacatcag

SEQ ID NO: 122288 - DNA, 1987 bp, Zea Mays
tccagcatccagctcccgcacggccacaccgacgaggcgaacgggccagagtcggcgatcggcgtgtctccactctacaggcgacgacgaaaccagcagcctcagcgccgaccactccgggagcggggcctcacaccctcaggatcaacgggagatgccggtcgccgccgcctcaccctcgcactcgtgaactggcttcctctgcgacgagccggggcgggctcggattcggcggatcttgtgggtgcgtggcgtcgggctggtccggtgctagattgatcccgcattcgagctgcggcaagcgtctgggtagtcgcttctcccgagggaaaggaaaacaaagttgcttggccgactttgggatcaaggatcggcgaaaagaaagagaaaggagggatctttttgggaggttctgtttgagctttcagggtttatatcgtagccttgggcaactccgtgctgatggatttcttcaagattaagaagttcaggaaggggaataagagcgcccggggcgggggagaggtaatagaatccgacgacgacgccagcgctgggaatgtgacccctcggggcctggtggagcagaagcctggcatcggggaggggaacaatgccgaggtggcggtggatggtggaggcgcgggcaatggggtggttgaagaagaggaggacgacgacgatgatttcatcacgaatgaggtgaagcggaggctcaaggagctcaggaagaacagcttcatggtgctcatccccgaggacgagtgcgccgaggtcgaggaggatggcgacgaggaggaagggggcagccccacggagtggctggagtcgggtgtcggtgacggcttcccgctgtgtgggttggattcactgtatgataagtactgcgagagtatgctggtgtttcataagatgatcgcacagctcatgaaggatccagagtcactgaacatgtccaaaaagtctccaagatcagcatcaaaattggcgtctaccctgcgcaacctctcattcaaaagaaaagatgagctcccggaggattgtgaacaacttcaacaacagcaaagcggatatgatccttaccagacacttgagactgcatatgttgctcatattgcattaagctgggaggctctgcattgcacctatgtgcacctgagccttatcgttgcagcacaacctgataatcctacaacctataattctgctgctcaagcattccagcaattccaggtcctgctgcagagattcattgaaaatgagccatttgagcatggtacccgtgttgagatatatgcacggtctcggagcttgttgtcaaagttgcttcaggtccccacttttcaagtcgtagataggaaagacaacaccgacgatcagatggagccagcgatttcggcgcacgacctcatcaaactgttagaggaatctatcctaactttccgccttttcctgaagaaggacaagagaaagggtggtgtccttatgagtgctcatggccacactggaagctcgatccaacaggtgcagtcttcgctcgataagaaagaggcgaaggtgaaggagctgctgaagaagaggaaagggtggaagagcaagacctggccaggcacagtggaggaggtgcagctgctgctcgccctgatcgatgtcaaggtcgtgtcgcgggtgctccgggtggggaagctgagcagggagcagctgctgtggtgcgaggagaagctgagcaaggtgggcctcacggagaaccggctgcgccgcgacgggtccccgatcctcttcccctgttgaccgacgcagcatgtcatgccgcgccagagatctcccttgccattcacttcgtttaccttctgagatatgtacatgccttcaggttgaattgaggatgcacataccaaaccaaagtagggcttacacatgtgttgctgcacgctgatcactgagtttagtttatacagtgcagcatggggcaacatgcttcgtttca

SEQ ID NO: 122289 - DNA, 1804 bp, Zea Mays
tccagcatccagctcccgcacggccacaccgacgaggcgaacgggccagagtcggcgatcggcgtgtctccactctacaggcgacgacgaaaccagcagcctcagcgccgaccactccgggagcggggcctcacaccctcaggatcaacgggagatgccggtcgccgccgcctcaccctcgcactcgtgaactggcttcctctgcgacgagccggggcgggctcggattcggcggatcttgtgggtgcgtggcgtcgggctggtccggtgctagattgatcccgcattcgagctgcggcaagcgtctgggtagtcgcttctcccgagggaaaggaaaacaaagttgcttggccgactttgggatcaaggatcggcgaaaagaaagagaaaggagggatctttttgggaggttctgtttgagctttcagggtttatatcgtagccttgggcaactccgtgctgatggatttcttcaagattaagaagttcaggaaggggaataagagcgcccggggcgggggagaggtaatagaatccgacgacgacgccagcgctgggaatgtgacccctcggggcctggtggagcagaagcctggcatcggggaggggaacaatgccgaggtggcggtggatggtggaggcgcgggcaatggggtggttgaagaagaggaggacgacgacgatgatttcatcacgaatgaggtgaagcggaggctcaaggagctcaggaagaacagcttcatggtgctcatccccgaggacgagtgcgccgaggtcgaggaggatggcgacgaggaggaagggggcagccccacggagtggctggagtcgggtgtcggtgacggcttcccgctgtgtgggttggattcactgtatgataagtactgcgagagtatgctggtgtttcataagatgatcgcacagctcatgaaggatccagagtcactgaacatgtccaaaaagtctccaagatcagcatcaaaattggcgtctaccctgcgcaacctctcattcaaaagaaaagatgagctcccggaggattgtgaacaacttcaacaacagcaaagcggatatgatccttaccagacacttgagactgcatatgttgctcatattgcattaagctgggaggctctgcattgcacctatgtgcacctgagccttatcgttgcagcacaacctgataatcctacaacctataattctgctgctcaagcattccagcaattccaggtcctgctgcagagattcattgaaaatgagccatttgagcatggtacccgtgttgagatatatgcacggtctcggagcttgttgtcaaagttgcttcaggtccccacttttcaagcattcaaagccatggaattgaaatgtgtccaataccaaaactaggtgggaattgagcttaaatccaatgctagtgtttgggtggcatgagacgctgtttccaacgaatatggagggtcttggctcggaatcgtcgcaacgctgtgctcgttgggctgaataccacacgaaaacggaggaagtttctgaataacaaattcaaccaaacactggatttgggtctgccatttccatttccaaattttggccctgaatactgacatccaatcaaatggggtgtaagtgtagtgcagattacacctatggctattctaatttatgtgctgtactagcctagtactacaataaataggttcaattactgaatgctgcatatttcacgtggtacaatccaattcaatctgctgtacattggcattattaaggagcattcaacagtggtgtactgtgttgaata

SEQ ID NO: 122290 - DNA, 1335 bp, Zea Mays
ggcgaacgggccagagtcggcgatcggcgtgtctccactctacaggcgacgacgaaaccagcagcctcagcgccgaccactccgggagcggggcctcacaccctcaggatcaacgggagatgccggtcgccgccgcctcaccctcgcactcgtgaactggcttcctctgcgacgagccggggcgggctcggattcggcggatcttgtgggtgcgtggcgtcgggctggtccggtgctagattgatcccgcattcgagctgcggcaagcgtctgggtagtcgcttctcccgagggaaaggaaaacaaagttgcttggccgactttgggatcaaggatcggcgaaaagaaagagaaaggagggatctttttgggaggttctgtttgagctttcagggtttatatcgtagccttgggcaactccgtgctgatggatttcttcaagattaagaagttcaggaaggggaataagagcgcccggggcgggggagaggtaatagaatccgacgacgacgccagcgctgggaatgtgacccctcggggcctggtggagcagaagcctggcatcggggaggggaacaatgccgaggtggcggtggatggtggaggcgcgggcaatggggtggttgaagaagaggaggacgacgacgatgatttcatcacgaatgaggtgaagcggaggctcaaggagctcaggaagaacagcttcatggtgctcatccccgaggacgagtgcgccgaggtcgaggaggatggcgacgaggaggaagggggcagccccacggagtggctggagtcgggtgtcggtgacggcttcccgctgtgtgggttggattcactgtatgataagtactgcgagagtatgctggtgtttcataagatgatcgcacagctcatgaaggatccaggtaaaagatgtaactgactatggatcaatgttcttaaggcagtaaggcgaggcgttggaccaccgccttaacgcataggcgagcaaggcaactagaattattcgagcgcctggtcatctaggcgatgccttaaaaacactgctatggatgttctcctatatgcttggctgtagcttctcacatgcagttggttgtaatgtggattgtgatgtgtgtacatagtcttttttgtgtgcatgtgattatgcatgtatctagtctgatgctacaaaattatccatgtttgtctcgggtacttcttagttatcagggtccacctgttgctattctagtgttatagattgtgtggccaacatggggccttgttagcattttaaactgtggtcccaactcctgtaaagtggcttaatgaatacaagtgttctgtggt

SEQ ID NO: 122291 - DNA, 609 bp, Zea Mays
acaaccaccgccattaaccacagcctaaagcaggcggttgctccccccgcttaaaccctcgaaagattggattgcactatttgcagggactggctggattccagcatccagctcccgcacggccacaccgacgaggcgaacgggccagagtcggcgatcggcgtgtctccactctacaggcgacgacgaaaccagcagcctcagcgccgaccactccgggagcggggcctcacaccctcaggatcaacgggagatgccggtcgccgccgcctcaccctcgcactcgtgaactggcttcctctgcgacgagccggggcgggctcggattcggcggatcttgtgggtgcgtggcgtcgggctggtccggtgctagattgatcccgcattcgagctgcggcaagcgtctgggtagtcgcttctcccgaggtatttcggccgccgagcacggcacggcgcggcgcgagtccgcgatttcttagggtttgttttagatgtccatttcaggggcgtcacctccggcgcgctccccgtcttttatccgtccgctccctgatacctgtgctgtttgcagggaaaggaaaacaaagttgcttggccgactttgggatc

SEQ ID NO: 122292 - DNA, 1498 bp, Zea Mays
gttgttctttgacctgacgaatgcggaacgctgcatctgactctaatggaatgcgtatgtgatgcaggtggagtcggaggacgaggcggaggcggcgtgcgcggtcgtgctgacgccgccgctgtcgctggagggcggccttgcggcggagctccgcccggccaatctcgcccagcgggtgctcagcctcttcctcaacgtccgcccgggctctgacctctcccacttccagctgccggcgacgttcaacctgcccaagtcgcagctgcagctgtacggcgagggcgtgtactgcgccggcgaggacctgctggggcggtgcgcgcgggggcgcgacagcctggagcgcctggcgtgcgtggtggcgtggagcatctccacgacgcggccccccatcttcggcttcgcgccctacaacccggtgctaggggagacgcaccacgtctccaccacctccggctgcggcggcggcctcaacgtgctcctggagcaggtctcgcaccggccgcccgtgacagcgctgcacgccacggacgcccgcggggaggtgcggctggtgtggtgccagagccccgcgccgcggttccacggcgccagcgtggaggccgcggtgcgcggcgcgcgggagctccgcctgctccggcacgccgagacgtacgttatcgggtgccccggcctgctgatccgcctcttcccgtcgcccgcctgcgagtggtccggcgacgtccgcgtcgtctgcgccgagtccgggctcgaggcccagctcagctactgccggacccgccgctccttcctcggcttcggcggcggcgacgcccgctgcgtcaggggcaggatcttccgctcggctgagcccggagacaccctgtgcgagatcgacgggttctgggaccgccaggtcacgcgcagggacctcgccaccggcgaggtctccgtgctctacgacgcgcagcgcgccatcggtgacctcgccacgcccgtggtgcaagaccgaaagggcgtgtcggcctcggagtcggccgtggtctggggcgaggtgagcaacgcgatcctgaagaaggactgggagacagcccagcaggcgaagcggcgggtggaggacacggcgaggaggttcgccaaggagaggaacgacagaggggaggtgtggacgcccaagcacttctcgctgtcgcagaacaagagcggcgactgggagtgctggccgctggaggactccgtgccgccggctcctattgtcgtcccctcctcctcctcatcatcatgaaagatctatgaatccatagtacacacatacggtacagaagtgagagaaacaatgttcatggaacaaacgatgaacagcctgttttggtcgtcgtaatctatacgtaaacggatccagtctgtatctgtattctgtacatgtttccgtccccactgggcatgatggatggttttactaccgctgctacgcatggggactataccgtcaatgagtgaaccttacagtacaaga

SEQ ID NO: 122293 - DNA, 1642 bp, Zea Mays
gctagcccctgcccaggcataacacgtacggtgtggagctgccccaaaaagcaaagcgaaggaaaggaaaagaaaggagaggagaagagaggagggaggaaggggatgattggtagcgtcgtcgtccggccgcttgcccgccggtagctcgtgctcgctctctcaattctctcccgccggcgcgctcgaccgcccgcggctcgccctcatggtggagtcggaggacgaggcggaggcggcgtgcgcggtcgtgctgacgccgccgctgtcgctggagggcggccttgcggcggagctccgcccggccaatctcgcccagcgggtgctcagcctcttcctcaacgtccgcccgggctctgacctctcccacttccagctgccggcgacgttcaacctgcccaagtcgcagctgcagctgtacggcgagggcgtgtactgcgccggcgaggacctgctggggcggtgcgcgcgggggcgcgacagcctggagcgcctggcgtgcgtggtggcgtggagcatctccacgacgcggccccccatcttcggcttcgcgccctacaacccggtgctaggggagacgcaccacgtctccaccacctccggctgcggcggcggcctcaacgtgctcctggagcaggtctcgcaccggccgcccgtgacagcgctgcacgccacggacgcccgcggggaggtgcggctggtgtggtgccagagccccgcgccgcggttccacggcgccagcgtggaggccgcggtgcgcggcgcgcgggagctccgcctgctccggcacgccgagacgtacgttatcgggtgccccggcctgctgatccgcctcttcccgtcgcccgcctgcgagtggtccggcgacgtccgcgtcgtctgcgccgagtccgggctcgaggcccagctcagctactgccggacccgccgctccttcctcggcttcggcggcggcgacgcccgctgcgtcaggggcaggatcttccgctcggctgagcccggagacaccctgtgcgagatcgacgggttctgggaccgccaggtcacgcgcagggacctcgccaccggcgaggtctccgtgctctacgacgcgcagcgcgccatcggtgacctcgccacgcccgtggtgcaagaccgaaagggcgtgtcggcctcggagtcggccgtggtctggggcgaggtgagcaacgcgatcctgaagaaggactgggagacagcccagcaggcgaagcggcgggtggaggacacggcgaggaggttcgccaaggagaggaacgacagaggggaggtgtggacgcccaagcacttctcgctgtcgcagaacaagagcggcgactgggagtgctggccgctggaggactccgtgccgccggctcctattgtcgtcccctcctcctcctcatcatcatgaaagatctatgaatccatagtacacacatacggtacagaagtgagagaaacaatgttcatggaacaaacgatgaacagcctgttttggtcgtcgtaatctatacgtaaacggatccagtctgtatctgtattctgtacatgtttccgtccccactgggcatgatggatggttttactaccgctgctacgcatggggactataccgtcaatgagtgaaccttacagtacaaga

SEQ ID NO: 122294 - DNA, 2094 bp, Zea Mays
accggctacctcatccacccccaccaggtgcactgcactgcacacctcgctcgccgccggtcggtcgtctccttctctctctctctccgtccgactatacaatacaattccactgcgtggcagggtccagctccttatcctgtccccctcgcccctttcccttccccgcccgtctcctccccctccctgcctctccgcccacccacccactgacccacccacccatctcgctcgcgcgcgccgggatttctcgccttcgctcaatcgctccgcggctctcctcctgcgcgccggccggtcgatccgggcgccggggcccgaggtgcgccgcggcggaggctctgccgggccggattcgctgatcggtcggttggtaggttcggttgttaggtaggtaggtaggttggttggtcgcgggcatgtccacggcggtggcgcggccggcgcacggcggcttccggcagtcggggagcgggaagccggatccggaggacgcggacaggatgagggacgccaacgggtacttggtccaagaacgtgagaaggaagaggaagagcgtggcggtgaggcggcggcggcggggagggaggaagaggcgctgtcggaggcctcgtcgatcggcgcggcgtcgtccgacagctcctccatcggcgagaactccgcgtccgacaaggagggcagcgacggggaggaggaggaggtggaaggcaaggcgcaggggctcggcatgatggggctggccacgctccagtccttggacgatgccctgcccaccaagcggggcctgtccaacttctacgcgggcaagtccaagtcgttcacgagcctggcggaggcggctgcgacggcggccgccaaggagatcgcgaagccggagaacccgttcaacaagcggcggcgcgtgctgcgggcgtggtcgcggcggcgggcgtcgtgcagcgcgctggccaccgcgtacctgccgccgctgctggccccggaccacgcggtggtggaggaggacgacgaggagggcgcggacgacgaggacgaggacgagggccagcacgggcgcggcgggctcaggggcaggaggccgcccacgttcccgtccccgcggctgagcgcgcacgccaccgccggccagatggcgagggccgggtcgtttcggtccccgaggtccttctccatgacggacctccacagcgcggagtacgagtaggcagcgacagacagcagccacgattagagccagagcacctctggtctgtctccttcctcctctaggcgccagaagaggtgctgttgctggtgatgctgccactgctgttacatccattactgctatatggtcatcaagatgcatattatatatataagaaggaattccattgcttgtgcttgccatcgtgccggcctgaatctgaatgtcgcatgaaacatttctctgtctgaacaaaccagcagcaccaggattcaggtttcagggcttcgcgcaaagccagtggcagcatgccagcatgggatggatcatggatgccgaaaagaagaaagcgaggaggaatgggatgggtcatgcatgcatgccgaaaataatgttcaggagatgctggcgatgttgtgtttgcgttgctcctcttgcctctgcacctgctgctggtgactcgcgggagcagacaaacggtgggtgatgatgagtcctacgccgccggcctaatcccatcgaagacaaccctaatctaagcatgacattatcgacagcggcagggttcgtggagaaggcagcgacaaatccaagcatacagcacgagaagaaaaaaaaaagatcttttctcacaagtagggctgacaatgggctataaattttgcactataagatttaagtatcgaagcgggttaggatcagactctatttatagtcatttttgaactataatttatttaaggctttgacattttacgaagaactatttggatcacgatccattaccactcctactcacaaggcagccgtagcatagcagtggccagtgggtaggtctggtggcacagtccatggttgacttgtttgcaatgaaaggttgcttggtttgtacaataacagatgttaaaat

SEQ ID NO: 122295 - DNA, 1264 bp, Zea Mays
atcctgtccccctcgcccctttcccttccccgcccgtctcctccccctccctgcctctccgcccacccacccactgacccacccacccatctcgctcgcgcgcgccgggatttctcgccttcgctcaatcgctccgcggctctcctcctgcgcgccggccggtcgatccgggcgccggggcccgaggtgcgccgcggcggaggctctgccgggccggattcgctgatcggtcggttggtaggttcggttgttaggtaggtaggtaggttggttggtcgcgggcatgtccacggcggtggcgcggccggcgcacggcggcttccggcagtcggggagcgggaagccggatccggaggacgcggacaggatgagggacgccaacgggtacttggtccaagaacgtgagaaggaagaggaagagcgtggcggtgaggcggcggcggcggggagggaggaagaggcgctgtcggaggcctcgtcgatcggcgcggcgtcgtccgacagctcctccatcggcgagaactccgcgtccgacaaggagggcagcgacggggaggaggaggaggtggaaggcaaggcgcaggggctcggcatgatggggctggccacgctccagtccttggacgatgccctgcccaccaagcggggcctgtccaacttctacgcgggcaagtccaagtcgttcacgagcctggcggaggcggctgcgacggcggccgccaaggagatcgcgaagccggagaacccgttcaacaagcggcggcgcgtgctgcgggcgtggtcgcggcggcgggcgtcgtgcagcgcgctggccaccgcgtacctgccgccgctgctggccccggaccacgcggtggtggaggaggacgacgaggagggcgcggacgacgaggacgaggacgagggccagcacgggcgcggcgggctcaggggcaggaggccgcccacgttcccgtccccgcggctgagcgcgcacgccaccgccggccagatggcgagggccgggtcgtttcggtccccgaggtccttctccatgacggacctccacagcgcggagtacgagtaggcagcgacagacagcagccacgattagagccagagcacctctggtctgtctccttcctcctctaggcgccagaagaggtgctgttgctggtgatgctgccactgctgttacatccattactgctatatggtcatcaagatgcatattatatatataagaaggaattccattgcttgtgcttgccatcgtgccggcctg

SEQ ID NO: 122296 - DNA, 276 bp, Zea Mays
atggatattggtggtggtccagagctttctaatttctgttgtgattggtttgaggtactgaagcaattgaaggacaaagcactaaagagagcggggctgactgaagaaacattgcaagagcagattgagcagagaaacgttgcaaggaagaataaacagtttgagatatctgatggaatcaggaaaaaccttgctaccaagggcatcgccctgatggatgaaccttctggtacagtgtggagaccatgcgaaccagagggatctgaagagtcatga

SEQ ID NO: 122297 - DNA, 1132 bp, Zea Mays
atggcaactcgttgtcggtcttctggtttcatcgaaatcaaggtcgacttcgcaggatccatcagccgtcctgccatcgaccacaccgtccgctccgacgatttctcggcaggcgggcatatatggagtgtagaattccacctaacgggtgacacgactggtaatggcgtttacttctctctctccctgcagctcgtcaacgaatccaagtccaagagcgtcaaggccatcaccgacgctttcctgctcggcagaggtggcacaccgtcatcttcgcacggaaagcgttgggtgcatgtgtatccaacacccgatggttcgccatcatcgcggaattatctaaagttcgtgaaacggagcgttctagagtctggctactacgttacagacggctacatcacattcatggttggagtcatagttctcggcgtcggcgatagccccatacccgtaccatcctctgatattgccgaccatctcggccacctcctggatcacgccgacagttccaacgacgtgactttctctgtcggcctcaagaccttcggcgcgcacagggccgtgctcgccgcccgctcgccggtgttcaaagcgcagctcttcggctccatggcggacgccgagatgcgctgcatcacgctgcacggcatcaggccagagacgttccggatcctgctgcggttcatctacaccgatgcgttgactgcaggagacgactgcgatggagacgagatgcagagctcttccgacatcgacctgttccaggatctgcttgcggcagctgacatgtaccagctggaccggctgaagctcatgtgcgcccgcaagctatggggctgcgtatcggtggagactgttgccaagattctcggctgcgctgaactgtacaactgctcggagctgaagagcgagtgcctggacttctttcttctcgagaaaaacttcaagattgctgtactgacggatgggtggttccagctaatgcagagtttcccgtctgtcatcgatgagataagagcgcgggttcctcagacttaagtaagacatactgcgcgtccgagctacaattgtctgtagtttcctgaatatgtaagtcaagatgttgcttttgttagatctaattaagacatgg

SEQ ID NO: 122298 - DNA, 114 bp, Zea Mays
tttttttataagtttattttgttttgcatagtattttctctcttgctttatatatatgatttccaattccttaagtgcacctttgatttagattcaaattcccatctcagatga

SEQ ID NO: 122299 - DNA, 615 bp, Zea Mays
atgaacaagaagaagcggcggcggcggcggcagcagcagggtgggaggcctgtgctggtgacgttctacgtgacacagccaagggaccgcggcggctccacggcgtcgtcgtcgtcgcatcaccaccaccacaacaggcaggagcgtcacgatgaccaccaccgtcgctcgcatggcggtagtggtggtcgtcctggcatgcagcggcggcgacggaacgacggcaaagcccagagcggtgaccggcgggcggacctgctcgagtactcgcggcagctgagggcgttggcgcggcagacggcgtcggcgaccacgcctgccgctgttggtgttcatagcgaagagcagcagggagctccagctgtgaatcatcggctggggcgcgcgatgagccagcagcagcaggtccgcccgcgttgcttcggtggtgacggctggagctggaagaaggtgctcgtgctcgtcctcccttcccacagcgagagcaggcgtccaagaaggagcaaccgtgatgacagcgaaaagaacgtcaagatcaatcagacgggccgggcggctgcgtcgtcgttgctggtcggcaagctgacggtgggtacaaggcgcaataatatataa

SEQ ID NO: 122300 - DNA, 610 bp, Zea Mays
atcgaactccatccccacgcacgcctccttggacaccatccccgcgaggtccatccccacacacgtctcctccaccgccatctccgcgagcacctccgcctccttcccgcatgctccttttgatctcgacaaggtttgcgcggggtaggcaaaaccgcctagcaccagtcgagccctcccccctcctcctgcgagtcgcggcaacccacgagcgtgtctatccatcgactttctgtcagaaaaggccactcgcggtttgtcgtgcacgccgcgtccaggttggaatggttcgtttcttggactcgcgacttcagcctttggttactcacttactctcctagatatcatagtgccgcctgtggaatggtccgttgctggtgctacttgctcatggagttatggtggtaggcgtaggccacttcgtctgcctcctggatttctcactgctgcatcggctccgaaagcaaattaggtggctagaataattatgatttatgtaattcttttgttgttgtgtaggttatattatatggtcattaattgtgtcttgtgtcatttgaaaccaacaaatgattcaaatatagtataattaagatgttaggatcataga

SEQ ID NO: 122301 - DNA, 1368 bp, Zea Mays
atctgagctccaactacggacccaaaaatccgcaacccttctctttttcctgagtttctcgtttcccctccttgggctcggaggctacagttcctgccccacccgcaagactgcccccgcgcgcggccgcggccatgtccttcccgcggctcctcctggccgtcctcgccgccacggtggcggcggcgtacgcgcccgcgcgcgcggcgggcgccggcgccggtgcctgcgcggcggagaaattgtccagcaaccgcgtgttccagacgtgcgccgacctgccccgcctcggcgcgtcgctgcactggtcctacgacgccgcggcgtcgtccctgtcggtggcgttcctggcggccccgccgtccgccggcgggtgggtcgcctggggcctgaaccccaagggccagagcatggacggcacgcaggcgctggtggccgtccccagcggcggcggcggcgggggcagtatcctcaggaagaaaaatacgcacgggatcctgaacgccgtgagctggggcctcctgctgcccatgggcgccaccttcgctcggtacctcaagacgttcaggtccgccgacccggcctggttctacctccacgtggcgtgccagctggccgggtacggcgtcggggtgtccggctgggccaccggcatccacctcgggaacctgtccaaggggatcacctactcgctccaccggaacatcgggatcacggtcttcgccctcggcactctgcaggtctttgcgctgttcttgaggccgaagaaggagcacaagtaccgggtgtactggaacgcgtaccaccactcggtggggtacacggtgatcgtgctgggcgtcgtcaacgtcttcaagggcatggccatcctggacgtggagcggaggtggaggacgggctacgtcgccgccgtctccgtgctggccgccgtcgccgtggcgctggaggccgtcacgtggggcgtcgtgctgcggcgccggaagcaggaggaaaagacctccaacgccggccgcttgccgctgtctatgtaatatatatatatatacctcatcgtcgtcgtcgtcgggggcgtctcactatatatctatctgatctgatctgatcttcagagtagtaggccttacgatgggttgggttagctagctagtgtgtgtatcttcattgtatggtaggtgtctctgtgtgtgtgtgtatactgcacgttcgtatactggagatgagtgagtgtgataccggccggcggcattggtctttggctgttgcctttttgtttctgttcgttcgtgaatgctgatctgatcatgcacttgcgttctgggatcatgctattttggctgctgctccatctcgcaaagaggagaaaaaaaa

SEQ ID NO: 122302 - DNA, 1748 bp, Zea Mays
caatcgcaggcatccacctgtccaccgtcctctccggcctcgtgtcctcctccttattaaccgcgcccactgcccactgcagaatctgagctccaactacggacccaaaaatccgcaacccttctctttttcctgagtttctcgtttcccctccttgggctcggaggctacagttcctgccccacccgcaagactgcccccgcgcgcggccgcggccatgtccttcccgcggctcctcctggccgtcctcgccgccacggtggcggcggcgtacgcgcccgcgcgcgcggcgggcgccggcgccggtgcctgcgcggcggagaaattgtccagcaaccgcgtgttccagacgtgcgccgacctgccccgcctcggcgcgtcgctgcactggtcctacgacgccgcggcgtcgtccctgtcggtggcgttcctggcggccccgccgtccgccggcgggtgggtcgcctggggcctgaaccccaagggccagagcatggacggcacgcaggcgctggtggccgtccccagcggcggcggcggcggcggcggcgcgtacgaggtgcagacctacagcatctccggcacctcgctcggctccccgggggcccccctcgcctacccgacgtccgacctcgccgccgagctcggcggcgacggccgcgtccggatcttcggcacgctcaagctcccgaacggcacgggcggcgccgaggtcaaccaggtgtggcaggtggggccctactccggcgggatccagatacacgaaatgaaaggcgacaacatgaacgccaagggcacgctgaacctcctcaccggcgccaccgccgccgccagcggtgggggcagtatcctcaggaagaaaaatacgcacgggatcctgaacgccgtgagctggggcctcctgctgcccatgggcgccaccttcgctcggtacctcaagacgttcaggtccgccgacccggcctggttctacctccacgtggcgtgccagctggccgggtacggcgtcggggtgtccggctgggccaccggcatccacctcgggaacctgtccaaggggatcacctactcgctccaccggaacatcgggatcacggtcttcgccctcggcactctgcaggtctttgcgctgttcttgaggccgaagaaggagcacaagtaccgggtgtactggaacgcgtaccaccactcggtggggtacacggtgatcgtgctgggcgtcgtcaacgtcttcaagggcatggccatcctggacgtggagcggaggtggaggacgggctacgtcgccgccgtctccgtgctggccgccgtcgccgtggcgctggaggccgtcacgtggggcgtcgtgctgcggcgccggaagcaggaggaaaagacctccaacgccggccgcttgccgctgtctatgtaatatatatatatatacctcatcgtcgtcgtcgtcgggggcgtctcactatatatctatctgatctgatctgatcttcagagtagtaggccttacgatgggttgggttagctagctagtgtgtgtatcttcattgtatggtaggtgtctctgtgtgtgtgtgtatactgcacgttcgtatactggagatgagtgagtgtgataccggccggcggcattggtctttggctgttgcctttttgtttctgttcgttcgtgaatgctgatctgatcatgcacttgcgttctgggatcatgctattttggctgctgctccatctcgcaaagaggagaaaaaaaa

SEQ ID NO: 122303 - DNA, 121 bp, Zea Mays
caaaccctaaaatttcctcttctacttcaaagttctcacttcaaattcaaacatatgttttgaacttcaacttttccagtgtcaaaattaatactactgtgaatataaaccttactgttta

SEQ ID NO: 122304 - DNA, 447 bp, Zea Mays
atggcaacatccagttcgtcgttaagacaagaaaccagactactcgtcctcctggctgcggagcctagcaagcttgttcgtgaccacaatgtcgagctgcgcagcacgctccacgatctccttgcgcttcttagtggacacgttgtgagcaatttcagcgcagtaggtcctgttgtgcatcatgagcaactccagctcagaaacgttgtggaccacaaacttcttgaacttgttggggaggtagtgcctggtcgacttgtcagaaccataaccaatgttgggcatcaaggtgcatcccttgaacttcctcctgacacgggagtcaataccctttggcctgcgccagcttggcttaaggcacttgtagcggtcgaggtggggcctcttgaactgcttgacccgcttcttcacgatcttcttcgtcagcagcggcaccgccatctctgc

SEQ ID NO: 122305 - DNA, 405 bp, Zea Mays
atggcaacatccagttcgtcgttaagacaagaaaccagactactcgtcctcctggctgcggagcctagcaagcttgttcgtgaccacaatgtcgagctgcgcagcacgctccacgatctccttgcgcttcttagtggacacgttgtgagcaatttcagcgcagtaggtcctgttgtgcatcatgagcaactccagctcagaaacgttgtggaccacaaacttcttgaacttgttggggaggtagtgcctggtcgacttgtcagaaccataaccaatgttgggcatcaaggtgcatcccttgaacttcctcctgacacgggagtcaataccctttggcctgcgccagcttggctgtacaaagaatcaacaagtcagaacttagaattactctatggagggaaataa

SEQ ID NO: 122306 - DNA, 645 bp, Zea Mays
atgccagcagcgcaggcacaggcgagcggcggcgcctgcctcggcggggccgcacaggtggccaccgccctgaagagcgccctcagcgtggccttcctcctgtggtggacccccctgctgctgacgaccggcacgaccaccagttgcctgcccttgcccctcgtctcttcagcgtcgcggagggcgaggaggcgcttgtcgaggagccggcgcacggcggccagctcacgcgccggaggtgggactgggagttgcaaacgcgcagcgcgatggaggaggacgggggagctggcgagtcagaggacaggggggagcgaggttggaggtggggatcagcgctcccagctctgcgcgtctagggaaatagacaggggaggcaaggatcgcgagcgggactggggcgagcggcgccggagcgtggcggccgcgaacgtggaaggtgagcacgagatcggtggaaggggatctaggttgagcgcccgtcgatggaatgggggagcggtttccacctgcgcgatggctcttcatcctaggctggcccccgctggggagtttggggttggaggggagcgaggcgggccagtggggagggacgcgaccgacgcgtggggagcaggggcggcgagcatcgcggacgccggatag

SEQ ID NO: 122307 - DNA, 706 bp, Zea Mays
atggcagcagcacacggaagcaggcattgttgtgtagcgccgtgccgtctactcctcgtggttgtactactagtggtgacgactggtgatggtgccgtagtagctgatgctccaacagcaggctcgccgcgaaccgacgaagtagtagcagcccttcaggcagagcagctgctggtaattaatgaatttagaagcagatccggcagcgaagaagaagcgccgatgacgacgactgctgcagctgctggttggccggtgttgaacacggagcagcagcaggctattattaccggcgtcggcggcgggaggaggaagctggtcgggtccagggctccgacgacgtgcacctacaacgagtgccgaggctgccggcacaggtgcagcgtccaggaggtgcccatcgacgccagcgaccccatcaacagcgcctaccactacagatgcgtctgccatctataggccggccggccggccggccgacgtacggcatgcatttccatatcgcttgattttgtatttttggtttttggagatgccatcgaaagcgttgctgtgcatgcatgggcaacgtaaccgctcgtcctgaatgaataagctaagcgcggcagagaagagaacacccactactacttctggttgtaacgctagctgttctatttatctctacctacaagtgtgtgcttgttgtttagttatactaaaaaaa

SEQ ID NO: 122308 - DNA, 384 bp, Zea Mays
gtggctccaagctggtgcaggccgaagggcgtcgactcctgtgtcagaaggaagttcagaaggtcagctttgttgcccaacatcggttatggttctgacgagaaagaaggcattaccttcctaacatgttcaagaaatctggtgtccacaatgtctctgacctggatttgcgtacatagtaacgttctaccgcttttataacacgccgatgattgggttccctggaactcgatgttatcaagataactctgatgcttgcttcgatcaaccatgatcatgcttcaacttttttaaaacttacttcttatgaacgggtactgcgctgaaattgcttgccgtctatatacgtgagcggaaggaggcagtggggagcactggggcgtg

SEQ ID NO: 122309 - DNA, 1190 bp, Zea Mays
actcatgaggcctcacctcgacgactaagaatgccttgagttcttatccataattcttatctgaattctgaaatgatgcccgttgtatttgttgcagaccgtatcaatctgaatcttgattactgttttcatctgtcgttcgagtaattttaatggggatttagccttgttgagtaacttcttatggtttgaaatatagcgaagatggctgttaaactgtctatgcgaggaagcgttattgttcagtactcgtagtatctgttagtttttgttcttgcacgatacagtcgctggataaaagcactgtactcgtagtatctgtgtttgagtagagacaagtaattctaactatctacacatgtagcatacacatgcacagtcaaatttgctgtggacacctggtgttttcatgaacgaaccttgcatgcaatagagttaggaactttaattgcagacttttattcagttaaccttttttatcgataattgtttctgaaagaaaaggatatgatggctcagtaaaaggtctgaggtagaaaacatgtttcttaagtgagcatcgggataaaggaagagggccctagcccttgcgtaagtatagcactgtggctctcgcaaactcttctacatcaattgcttcatggcttcatgaagtgggtcggattaaaaaggcgtgggcttcattcagagcatgaatgcttgcctagacttctcccaacatttttagcccgacgctcgcttaagaaaaccatggtttctgcatgatcacatcattatggctgatcctttctcggaaacaacttgttttgctttcaaagcaactttcttgaggtagcatttctttagtggcactatgttgcactagatttcacattttgctttcgatgaaactttgcaacgatatgatagttgctttcctgcatgatcaactgatttttttgccagtaccgtatagctatttattcatgctaaacagccatttaaacgggctaaacagacgtggtaagtcactgtgtggtgtgtacacgaacaacatttttttttgcttatccttgcatgatcaatacactactgcaatattactgctttattattgcttttgtttcatgaaaatttgcaaggatgacatcacccgttatatgtactttttaaactgttaacaccaactaatacatttgacagcatctgtc

SEQ ID NO: 122310 - DNA, 350 bp, Zea Mays
caaatcaataccatacatacctggtatattactatttatcagtcaacatttagaaaattagggagctcatcattcaaaattgtaaacgattggtaaaatttattactatttagtagtagtctggaccgctacacctaaaggttgtgctctgcaggaatggagagtagtaggcggaacagctgcacctggtggttgtgctcccgcgtcgccaccgcatcgcccacctttctttgtcgctgcgacctagagatgcaagtcaaactttggcaacctttgtcttggcacaaagcaggtctagcaaaacaatatacaagtcagtatcagttagcaagaacatgcattaaaaaata

SEQ ID NO: 122311 - DNA, 1022 bp, Zea Mays
gaggagagacagacagagagagcgagcgactgagaccgacagggttcggttcgacccgatgcttccggcgctgcggcctcgccgccggctcccggtggcatccctcctccgccgcctcctctccgactccaccccctcctcctctggcactggagagagtgatctgatggccgcggccgcagcgaaggcccgggcggaggcggcagcgcgggctcgggtggaggcgtacaagcaagtccaaaacttcgactggagcagcggcgccgactggaagaccgccgccaacatcctcttcacggtgccccctaagcgcaaggagttcgggcttgatttccaccttgtgcagctcttctttgtctgcatgccatcgctagctgtctatttagtggcccaatatgcacggagggagatcaaaaggatggaaggggaagcagaagagaaaaggaaaaaagacgaggaacttgagaaacaaaaacaggtcgaggaagaatctgccaaggaggatgctgattcaaagctttcgaaggtattagacaggctagatacactagagggtgtcgttaaggagattgtggatgacaaaaggaaactttcttcccctgatttaccgaccaaagaggaggttgcaaagaaaaatgaagcatctccggctaaggcttctgattcgagaagctatggtcagccagtggtggctgccaatagtaaggacaccaactatgcttcaaatgctccagcaaatactgcaaaaccaaacaataaggggattggtgataaggcatttccagttgagtccgaaagttgataaatcatttgagtttttttcttctgaaaacacaaaattggtgtttagctatgtagtcgtgtcctcgatgctaagcgaatgaaaagatgtaatttccacaccttaggatatgatgcgtcttaggaaaaaaaatacagtgagctaacgttttgtactacatagccccttcgatagttgaggctgtgatcttggataatgattaccacaaaatctttctgct

SEQ ID NO: 122312 - DNA, 883 bp, Zea Mays
gaggagagacagacagagagagcgagcgactgagaccgacagggttcggttcgacccgatgcttccggcgctgcggcctcgccgccggctcccggtggcatccctcctccgccgcctcctctccgactccaccccctcctcctctggcactggagagagtgatctgatggccgcggccgcagcgaaggcccgggcggaggcggcagcgcgggctcgggtggaggcgtacaagcaagtccaaaacttcgactggagcagcggcgccgactggaagaccgccgccaacatcctcttcacggtgccccctaagcgcaaggagttcgggtgagcatcaagaggcaaccatgttcctctcttagggtttacggattttgtagtctcggtaccaattacgtcggcgaggtgagatggatcattgaatgggagtaggataggggcaacgcgatgagatggagctgactaatgtcattttcatgtcgctgggaatgtctcctgttgctttctttttgcttcgtgatacgagttacagtcctgataattatttatagcattggctgaggagtttcacaagtatgtcagtttagttttgcacgtattataaggttattcagaaatttcttttgaatagattgctaggagcatttccaccactccagattagctaggaatgagtaaaaatgcatgtatagatttgttagggattttttttaactctttttatttctgatgtgccaaatagcccagaaaacctctgcaaaaaactgatttgtccccacccccaaagagtagtaactctcaatttatggaaaatccagtcaggaataatatcgtccagagacctagggcttgcgtccaagttcactctgctttgatgcaaggaaac

SEQ ID NO: 122313 - DNA, 1692 bp, Zea Mays
gctgggcggtgtgcctgcccgggcggtagataggagaggtcaagaactacggcacgaccgccgacgtagcagagggatctgttcgcctcccgtaccgagacccccctaccctttcgtcgacgactaggcttgcggcgaccgcccttggcttcgccgtcggcgagcatcaccagggactgacgattggcgggggagcgaatgcggagatgggctgatcagaactgcgacaaggtccggttttctctctaaaccgcggtctctggaggtgggtttgctttttccgtagtcacagatggacgacgacgacggcagcctgggcattcggaactggggcttctatgacaccgtgaaaggcagcctcggcctgcagctcatgtcgcccatgccacctgatcgggacacgaagccactgctcccgagagctggtttcttgcagcagcatgggcatcacaatgccccacaccagctccacgcacagcagccgcagcattaccgtgactccgctggtggcggagtctctggtggcacacctgccgagcagcaccctatccacatggacttctcgcgcaatgaagcttggctgcacccatcacaccaccagcatccccatgaacagaaggtccttcattctcgccctatcggaccagctgggcatgttgggcatccaggccatgttgcccatcctgtgcatgccgtgcatgttgtgcatcaccatcctactggctatgggatgatatcagatgcacaacatactcttcagatgatgcaaccacagcttgagtcacagcttcaggagcctcctccttgcaaggaagacgaagcaccacctccactggttgaggatcactccgtggttagtaccgggccacccgtgaagaagaggcagcggggccagaagcagagctgtcagcctaagtcaccaaagcctaagaagcctaagaagtctgctgtcccaccggagggtgggacaattaatgggcacgcgacccggaggaggggacctaagaagaatgtggggatgatgattaacggtattgagttggaccttgccaacataccaacaccagtgtgctcgtgcaccggagctccccagcagtgctaccggtggggtgcaggtgggtggcagtctgcatgctgcacgacttctatttcaacgtatccactgccaatgaacacaaagcgccggggcgcacgtattgctggaaggaagatgagccaaggtgcattcaaaaaggtgcttgagaagcttgctggtgaagggtacaatcttgttaatccaattgacttgaagacgttttgggctaagcatggtacaaataagtttgtaacgatcagataaagaagccgtgctatgtttgtcgctttgtaggttgtagagctgcagttaggcctgatttattgtttgtatgcctatgtgccagtctgcagacatttgtagtagtagtttttagccatgtttagtttcgttgtcttaattgtcatgtctatctcgagctttggatatcgaccaactgaagtccttgtatcctcactttgcaaattgtactgtacccataatagtctctaatttagggcatcaagatcaatgctttagttaattgtgtgtggaagtaagcattatgtggaggttttctctggtggagggcattaaccagcacattttggataatgagataactgtgaattttctgt

SEQ ID NO: 122314 - DNA, 1768 bp, Zea Mays
gctgggcggtgtgcctgcccgggcggtagataggagaggtcaagaactacggcacgaccgccgacgtagcagagggatctgttcgcctcccgtaccgagacccccctaccctttcgtcgacgactaggcttgcggcgaccgcccttggcttcgccgtcggcgagcatcaccaggtccggccaccgcttcccttgcatttttatccggatctgcctccttcactgcacgcatgtattacgcccactggctcggattcgattcggcatctagggtttgggtacggcaccctggggtctgcttctgtcagaacctcgatgctctatgcctctatccgattgacagaatggatgtgtagggactgacgattggcgggggagcgaatgcggagatgggctgatcagaactgcgacaaggtccggttttctctctaaaccgcggtctctggaggtgggtttgctttttccgtagtcacagatggacgacgacgacggcagcctgggcattcggaactggggcttctatgacaccgtgaaaggcagcctcggcctgcagctcatgtcgcccatgccacctgatcgggacacgaagccactgctcccgagagctggtttcttgcagcagcatgggcatcacaatgccccacaccagctccacgcacagcagccgcagcattaccgtgactccgctggtggcggagtctctggtggcacacctgccgagcagcaccctatccacatggacttctcgcgcaatgaagcttggctgcacccatcacaccaccagcatccccatgaacagaaggtccttcattctcgccctatcggaccagctgggcatgttgggcatccaggccatgttgcccatcctgtgcatgccgtgcatgttgtgcatcaccatcctactggctatgggatgatatcagatgcacaacatactcttcagatgatgcaaccacagcttgagtcacagcttcaggagcctcctccttgcaaggaagacgaagcaccacctccactggttgaggatcactccgtggttagtaccgggccacccgtgaagaagaggcagcggggccagaagcagagctgtcagcctaagtcaccaaagcctaagaagcctaagaagtctgctgtcccaccggagggtgggacaattaatgggcacgcgacccggaggaggggacctaagaagaatgtggggatgatgattaacggtattgagttggaccttgccaacataccaacaccagtgtgctcgtgcaccggagctccccagcagtgctaccggtggggtgcaggtgggtggcagtctgcatgctgcacgacttctatttcaacgtatccactgccaatgaacacaaagcgccggggcgcacgtattgctggaaggaagatgagccaaggtgcattcaaaaaggtgcttgagaagcttgctggtgaagggtacaatcttgttaatccaattgacttgaagacgttttgggctaagcatggtacaaataagtttgtaacgatcagataaagaagccgtgctatgtttgtcgctttgtaggttgtagagctgcagttaggcctgatttattgtttgtatgcctatgtgccagtctgcagacatttgtagtagtagtttttagccatgtttagtttcgttgtcttaattgtcatgtctatctcgagctttggatatcgaccaactgaagtccttgtatcctcactttgcaaattgtactgtacccataatagtctctaatttagggcatcaagatcaa

SEQ ID NO: 122315 - DNA, 429 bp, Zea Mays
atgagccagcaccctcgatcggggcgaagggcccagtatggcccagtattgcctgagcaataccttggcctggcccaaatagagattagttcatcagcgatcgagcgtcgtccgcctgcacccgtagccgcagaccgctactccgcgtctccgcttgcgcacagcgccgcagcccgcagcccttaccgtgcacagctccacgctgcgccgcagcgccgctccgcctccacggatttaaagagctatttcagtcaagcttcaagtggaagtagaccaagcactcgtgctagtggagtttgcaatgaccccataatacaagttgaagttcaagagaataatagtgaagatgccaatggtgaagtcgaagattttattcgctatatggcagttggttgtaaatggattgtaatcaagatgactattaaataa

SEQ ID NO: 122316 - DNA, 1068 bp, Zea Mays
atgacgaggagcaagggggtgtcacaacatacgaagggcgacacgaagatattgggcactgactatgacgtgtgtgcagattcctgggactcgacaagctgggcagagcagagagctaaccccgcgttgcgtcaacggcagcgcgactctagcgagaccctatgttcgtacgggtcgacagcatggacgaacagacacgacacggaggtgcgagtccaccaaggacgcgaacttgaagggcggcgcttagaacgaaaccttgctgagcgaagaacgacgaccggcaaggcgaagcctgacgacgaggtcgagcaggggatagcgagcgcgagcgcacgcaacagcgacgatagtcgaactggtaatagaacgttggcgaacttggccgacgcgaccatgaacgcgtgctggcgcggacaaaacaacagtggcggacgagctcgcgacggtgccaagattggaggcagaaaagacggccaggacggagcacagatcggtgcgacagaaacgaaaaccgggcgcagggacgcgcaccatttccctgggcacgacggtggcctgggccagaaccgtccacggccaggaggcatgcacagccaccatggccggccaagcgagcagaaaaccgcggcgccggaggagcaaggcgagcagggtgatccgggctggggaaaaatggaggctgggcgggttctgcaggggcaaacacgccgaacagagggccaagccgagctggggcagacagccatgggaggcaggggagttcgcggctgcgctcacagggagaacggaacgcgcgcgacgagccagaaactgaaccagggcgcggcacagagacccgagagagaacgcggcgagctgagaagccgcggcgcaggaacgttcggccggacgcggcaagcggagagaggaacgcgtgtcggcgagcagagcagacgcgcgactgggctgggcgaaatttggaggacggccgagctgggcgagctcgaagctaagcccgtcgagcaggaggccgggaggatacgacgactggagaaacgaagctccacgacggcgaccggtacatga

SEQ ID NO: 122317 - DNA, 492 bp, Zea Mays
atgtccagcgtgaagttctccaccaccacgctgccaggccctctgctcctgctggacccgaccctcggcggcattagcgactgttgcgcaccaccagaggtatcctgttcgttcctgtggcggcgccggcgacaccacaggaccagcgcgaactgcaatgccatgaagaagacgaggtgccaccggcgacaccacaggaccagcgcgaactgcaatgccacgaagaagacgaggaaagcgacaggggcagccgggagaggtgagaggcagaacatggtgcacggatggtctacattagaggcttatagagtagtaaagattaaagcactagtttcaatggtcgtcttgcgtcatatttttacagaaaaccccttgccatcttttcaaatcaacacgcacttcagcccatgcactatacccactacccaacaaacccccgcgagacgcgcgcaagggctcgacacaacacccgccttggctgcatcggcctag

SEQ ID NO: 122318 - DNA, 2203 bp, Zea Mays
cacactcgctccccacttcgcatcgccgaagcaccaccacttcacgcactccactgtccgctccagtactccactccaccgaagcgcacgctccccgccaggagcagaggaggaggggatgccgggcggcgtggtggacgcggccgccaagggcgtgagaatggagcggcacgcggcgctgctgcggcgcgcggcgggggccaagcagctggtgtcggcgtcgtcacagctgctcttccgcgccaccgtgctcgccacgctggcgctagtcgtcctcttcgccgtgcactacccgtccatgctctcccgctcattcagcctctccgcagcgcccgcgtccggcgcctcgtcctcgcggtcgcggcactcgcaccggagcctgctgggctcgaggccggcgtcgcgctggagcgccgcgtgggagcgggaggtgcggcgcagcgccgcgccgcggcgggacggggcgctgtcggtgctggtcacgggcgcggcgggcttcgtgggcgcgcactgctcgctggcgctccgcgcgcgcggcgacggcgtcgtcggcctcgacaacttcaacgcctactacgacccgtccctgaagcgcgcgcggcagcggctgctggcgtcccgcggcgtggcggtggtggacggcgacgtcaacgacgcggcgctgctggagcggctgctcgcgtcggtgcgcttcacgcacgtgctgcacctggccgcgcaggccggcgtgcggcacgcgatgcgggcgccgcaggcgtacgtggcctccaacgtggccggcctcgtcgccctcttcgaggccgcggcaaggcacgccgacccgcagccggcggtcgtgtgggcgtcgtcgtcgtcggtgtacgggctcaacacccaggcgcccttctccgaggagcaccgcacggaccgccccgcgtcgctgtacgcggccaccaagaaggccggcgaggccatcgcgcacgcgtacaaccacatctacgggctctccatcaccggcctccgcttcttcaccgtgtacgggccgtggggccgccccgacatggcctacttctccttcgcccgcagcatcgtcgccggcgagcccgtcacgctgttccgcgccgccgacggctccgacgcgcgccgcgacttcacctacatcgacgacgtcgtcaggggctgcctcggcgcgctcgacacggccggcaggagcacgggctccaggtccggccgcaagcgcgggcccgcgccgctccgcgtgtacaacctcggcaacacctcgccggtgcccgtcacccgcatggtcgccatcctcgagaagctcctgggcaagaaggcgatcaagcgcgtcgtcacgatgccagccaacggggacgtgccgttcacgcacgccaatgtcagccacgccgcgcgcgacttcggctaccgccccgccacctcgctcgaggccggcctccgccatttcgtcgactggttcgtcaggtactacaaggtcgacgtcaggggcgggaatgtcctcgccggcaagaccgccaagaggaaatccatggccatgtcctcagcatcgtgaggagccgccgccgctgtgtgtaattttgctcatgggagcagcaggctccttgctcataagatatggtctcattgtttaagccttgctgcttttgcttcttcatgatgctaccatactactaccatagcagtgcttagtgccatggaaaagggtccatagataaactaagcttaactgcttgagaaaaagaaaaaggtagagaaaaaaaagatgtgggtatagatatacagcagagcaaagcaaaggagccatgtctgaacaaagacgtggtcactgccgtccttatgattcagaccattctgcttaaactattaatgtttttttttttggtcagataatatactagtacactatctcattcgtgctcactgtgagcctgtgacctatacgactcctgccaggaactcaaagatgccctgctcatgatgcaagtccaagaagccgcaggctgccaaaacggcattgtttaggtttcggcagtggatttgatgcatgcagctcctgcatcttccccacatctatttatttatttaaacctgtgcgaaattgggcgatgcatttgcctctttccggtggttctctgaaacagggtattttaggatgtgtttggctgaatagcaaattggaatgaccggctctattctattttctaat

SEQ ID NO: 122319 - DNA, 1331 bp, Zea Mays
gccccgcggaaaccaaaccacgcccatttccgcccccaaatcagcgatccgccctccgcacgcgagatccagagagacgagccgaaacggaacccccacgcatagcaaggaccaaggaggcaacgatcttcttcggctgctgcccgcccgtgcagtgctctacttgcttgggggcgtgcgtcagcgaggcggcgaccgacttgcttggcgtcgggggtgatggaggggcggttgctgcggcctgcggcgcagcgcgacgctggcggaccagctcgccgcggtcgcggaaggtcgggctccgcactgcgctgcgccacgttctggaagtgggtttcgtgaatctgcccggtgctttcagttcagctctacattacagatggtggttgaaggcaagaggggaacggatcaaatatcatcgtccagattgtagctgtacagtacatcatggtttagcaataagcagcgacagcggccgttcgcttcacttggagagcaggccgaagtaggggttctccaaggccgacgcgatctcgacgccggcggcggtgagcagagccacgtcgaccttgtccctcggcatcaccaggtacccgatgccgctgaacctgcggaacccgcacagctccaggaactccacgccgcctcgcacgctgcccaccctgtcctgcttgcatagatgtggggtgagatggtgtagcgcgagttgcgctgcatgccggtctctgctgctttaccttgaacacagggttgctgagccggatcctcctgaacttctcctcccctgggttcttcgctacgttgccaacaatcttgagcaacacctggtacgctcttgccactgcagcagggtcatcctacagcagcagcagaagaagaagaaaatgaattactaagatcaaaacgaaccagaaacagcatctgcgagggggttcttcagttttattaccctgtggttcttcttcacggttcgcaggcagtctctcagctgctctgacgcaacgacggcgcgtccagcaggctttacctgcgcggtcaagaaacgcgtgcgtgtgagcgatgcgcctggaggtttcgctcgtcattatcagaagatgctgtagaaaccaggaagaaatgcatttcgacgacctttgcaggcgtcatggttgcggcgggatccctaggatcatcctgcggcagaccaagccgtctcctcctctctgcctgcacaggaggatgtagcatttcatctgactctcaacagaacatagagtgacattttgcgtgtgtgtgggggaaatccaaggtaataacaaaaaaaaaatgacaaaaatgaaggatttgttactgga

SEQ ID NO: 122320 - DNA, 848 bp, Zea Mays
aattaatgtgaccaaactttagttcagaagaattttggttggaggcgacgacgatttgtttcttgctctcgtggtttcggacttctggtctggaggtcccccagcagcccaggctccacctctccacggcagcaccaacgctccattctgtcagccacagcccacgccgctgaacggccggagatcgccccccactccctctcgccggacggttgcagatcaggtctaccagatccgtctcagattaggtggcaggagaggaggaattcgggtctgaatctgatcgatatgcggcagcagcggggcggggccggggccgggaggagggcggacgacccggggctcctcaagagggccttcgacagggtgttccgcttcgtccgcctcgccgagttcgagatcttcttcgtcctcttcttcctcatcgccttcttcctcttcaaggacctcatggcacggcctcaatacaatcagctgtttgtcaagaagcctgatctagatgattcctggccttagtacccaaataacctggtatttttctttgagctgtgttgccagtacattctttgaaggcctgcgtggccggctggtcacccccctttgttgtcaggagcatgttttatgattacctagagtattctcttcagtgacgatgaatatatttagccagtcattttcttcagttaaagaggaagattttcatgtcaatactggtatgcggcggcgatactgtggttggtgccagccgttattgtttgcactgtttatgtgttgtgaagccccatgagttcgaggtgagatgaccatatgattaagtgcagttctttttaatggcatctagtgtttct

SEQ ID NO: 122321 - DNA, 3149 bp, Zea Mays
attaatattataaattatagcatcatactagagctgtaatctagagccattccaaacacctctggatatcgcagagattaaactttagcaaggtcacacggtggagtatcgcatttcagtcctcaaaatagaaaccaggggtcaatcaaggtggcagcaataatcacacaggacattgacaaatgacatgagcacaagcacactgtgtcacgttcggtgtgtgaggccacgactcccgtccccttcgagattccgcacgaaacgagtccacttcgtatcgccgcccggtggtccgccgccgctcgccggagtagcagcagcagccgtagcaaggagtaggcaagagacaccggatggggatcctgggcaaaggctcggggtggtgcttctgctcccgcggggccaagctggagcggatcaagtccagcctcctcgccgcaaagggcgccgccatagctgccgtatccttccccagtggcggcggcggaggaggagctggaggcaaaggcgggagcgggttcctcatccaccgcagcctcctgctcaccacgcacggcaccatcccttcggccgccgcggcgggcgccgccgaggttcggctcagccacggccgcctcctagctcgcctggtgccgcaaaggttctttattaccagttctatacttgaccttacaatagttggccttgatgtcgtggatgatgacctgagttcacatgggcaacagcctcattttttgaaaacttgcttgaaccccagcttggaccttggcagtacggttttgctactgggccacaacagaaatgatttggctgtaggtgaggggaaggttgtaatagctacagacaaccttataaagttctcgattgatgaagtcttgtggcatcctggatctgctgggtttgatatgcacggcaacctagcttttatggtctgtgatcccatgaagattgcaccttctacacccaatgggtatgcttctgcatcatcaactgccatttgtacatcaaaaaaggatgtgcccacacagtttgggatccctatccctgcagtatgtgaatggttaaaacaacattggaatggttgcttggaagatgctagcaagccgatgatgactcctgcacgattgacaacctgtggagaacgaagtgggtgttcttcccttggtcgtcttcgttatattaagactgcagaggttgaaggtggtgatgtcttgtcatcatcacagatgccaccaagaccaacatggcagcatggagcatgcagttcagcatctgccaagatttcacatggcgaaaatgattcgattggctcacattctttccatgggcaacatgagcagagctcaaaaatttgcaaacctcataaagagcaagctacttcacttgtggatcattcaagatctattcgcctaccccttcccttaaagcaaatgctgcctgatgataacaaggatgaggcgaacagtcaagctccgcacagaacagaaccatctaatgtgcaaatgaactgtggcactcttcacaatgttgcttaccatgaaaattgctggagtgaggtgcagtccagttcttctccagttgtgatatcggaaataggagatgggagggacggttttagcagcggtgaggagacaatgtactctgctgaaacaagggaaagccggaacattccaagtccaaaggaaaagaaaaccgggatggttggtagatcacagagtcttgtgaaccgtagcaaatgggactcgcctaaaagcgttgaatcttcgagagggtttccctcgaagtcacagaccttcattccgttaaggaaaccgcacctgcaggccgcatccatttcacagaagagccaagattatttcagcccgaccgtctcgtcgaacatgaagaagaggaacctgtcccaaactcccatgaaacccaggcagcgtgctcaagtcacctcaaagtggattacttgatgcattcgcctgccccaggaatcatacaaagataacatgttcttgggttcacccggtcccatgctgcatttctttttcttttcatttatcccttttagatgcatttgtaaatgcattctagtcatggactattctagtcattctttatttagggtacgttaggaaatgctgctctttaccctgcaattctctactgaagggttagacaggttgccatcacaaaatacaacgttttccctcctcctgactcccgcagctgggcggatacaagcctgggccaacctgtccatgtcccgggatatgattcatatatctctagttatatttattatttctagatcaaaatatattagaagaatattatatccaatagaccgatccgggcgtgatcggatcctaaattggcctctaaggagaggtgagaagtgtgggacctggtcttctccagtcttcactcccaagtgtcagctcaagggataattcacaggaatggtttgcccttgctggattgctcctgagtcctgaagctctctgcaaggctgtgctgcccttttgttgaggtgaataaggtgacagctctgcaactgtgttgtttccctttctgtgttggaaggtgaataaggtggcgtcttatgctttaacaaccatcaccagtccaagtcggagacctccacccctgggccctggcggcggagccacaggacgaggagagctagcaccggacggtcatcaggaagacgacaaaccgctgaggcgcagtcgatgccgacggtacaggtggtctctcaggtaggccaagccgccagggcttcgcatgcagtatcccagaaggctagaaacatagtttttcacttgatcgtgcagcgatgcaggtgtaaaatgtaagcatgaaacagttggttcaaaaaaaattaagtgatagagccctcctaacatgtcaaactaacaacacttaaagataggagtgttacaatctctctatgcagtgtggatgaagtctttccatgggaaatttcaaaacccaagtgatggccattgctttgaaagacaataataactactatgtttagggtacaagttttacttataattggtaaactgtaagctgatgtatgcaagaacagttgtacctttgttcctgaatatttatcatctggttcatatttgaactaaaacacgacaaataaaaaa

SEQ ID NO: 122322 - DNA, 230 bp, Zea Mays
gactttttaatggttggtctttccacaaaggacatgccagtgaccaaagccgattcaatagatgttttatgtgattatatcatggcaatagaagacgatacgacactagagtaagtgctcattgatttatttattttatgtatatcgactacttagattcttgatatagagtttcatcatgctacattacaggagaacatgggtgcgaagtttcaatccttttaagatag

SEQ ID NO: 122323 - DNA, 1743 bp, Zea Mays
cacagccacccagctacgtaccgcgtgcacctgcaccatcggccgccggcgaccgccaccgccaccgtacgtactagcagctagctgcgccatgggcactactgccgcgcatcgtcgtcgaccgggcagtatcgtcgtcctctcaccatccgccgtcgcgctcgcgctgctgttcttgtcgacgacccttcgcctcgccgccgccgtccagccgtacggcggcggcggaccctgcgcgctggccgtggcgccgctcggctacccttgtgaagagcaccaggtgacgacggcggacgggtacatcctgagcctgcaaaggatcccgagtggcgggcgtggcgggcacggcggcggtgccggtgccggtgcctcgtcctcgcgcgcggggcagccggtgctcctgcagcacggggtcctcgtggacggcatgtcatggttgctggcctcgccggaggagtcgctgccgttcatcctcgccgaccgcggcttcgacgtctggatcgccaacaacaggggcacgcgctggagccgccgccacgtctcgctcgacccctccagccggctctactggaactggtcctgggatgacctggtagtcaacgacctgccggccatggtcgacttcgtcgtcaaacagaccggccagaagcctcactacgtcggacactccatggggacgctggtggcgctggcggccttctcggagggccgggtggtgagccagctgaaatccgcggcgctgctcacgccggtggcctacctcgcccacatcaccacccccatcggcatcctgctggccaaggcgttcgtcggcgaggtgctctcggacttcctcggcatggccgagttcgacccgctagcgccgccggtgacgaacctcatcagggcgttctgccgccgcccgggcatgagctgctacgacctcgtcggctccatcaccggcaagaactactgcctcaacagctccgccgtcgacgtcttcctcaagtacgagccccagccgacctccaccaaaaccatggtccacttcgctcaaaccgtgcgcgacggcgtgctgaccaagtacgactacgtgctgccggagcggaacatcgccagctacggccaggccgagccgccggtgtaccggatgtccggcatcccgccgagcttcccgctcttcctcagctacggcggccgggactcgctcgccgaccccgccgacgtgcgcctcctcctgcaggacctccggggccacgaccaggacaagctcacggtgcagtacctggacaagttcgcgcacctcgacttcatcatcggcgtctgcgccaaggactacgtctacaaggacatgatcgacttcctaaaccgcttcaactagtactagcatatatatttgcttcaatcggtgtcgtcttcagccccagcaggattagacaaaaaaagggggggacactgcagctcgtaaacgttgtccatacagattatcagaggtgaaaaccatacatgatgtaatttagcattagatagttaaaacatggagctgcctcagtatggaggattgtcaactactctccatcacagcagtaggtgtgatgtagaagagtgattgtcacactgtgtgtgttgcaaatttgcaacacagtgattactaatataaaaaatactcttgagttaacctttgacaaaaaactctctgtggctgaggtgctccgggcaaacttttcaaatttaaggtttcgaaggagattatttggagacaca

SEQ ID NO: 122324 - DNA, 1853 bp, Zea Mays
cacagccacccagctacgtaccgcgtgcacctgcaccatcggccgccggcgaccgccaccgccaccgtacgtactagcagctagctgcgccatgggcactactgccgcgcatcgtcgtcgaccgggcagtatcgtcgtcctctcaccatccgccgtcgcgctcgcgctgctgttcttgtcgacgacccttcgcctcgccgccgccgtccagccgtacggcggcggcggaccctgcgcgctggccgtggcgccgctcggctacccttgtgaagagcaccaggtgacgacggcggacgggtacatcctgagcctgcaaaggatcccgagtggcgggcgtggcgggcacggcggcggtgccggtgccggtgcctcgtcctcgcgcgcggggcagccggtgctcctgcagcacggggtcctcgtggacagcaggacggcatgtcatggttgctggcctcgccggaggagtcgctgccgttcatcctcgccgaccgcggcttcgacgtctggatcgccaacaacaggggcacgcgctggagccgccgccacgtctcgctcgacccctccagccgggtaagtaaactaaacctaaaccctcgctcgctcgctctggcactcatctcacttcatcagaactagctattagccgcttcctcctgcacgcttcgttttcagctctactggaactggtcctgggatgacctggtagtcaacgacctgccggccatggtcgacttcgtcgtcaaacagaccggccagaagcctcactacgtcggacactccatggggacgctggtggcgctggcggccttctcggagggccgggtggtgagccagctgaaatccgcggcgctgctcacgccggtggcctacctcgcccacatcaccacccccatcggcatcctgctggccaaggcgttcgtcggcgaggtgctctcggacttcctcggcatggccgagttcgacccgctagcgccgccggtgacgaacctcatcagggcgttctgccgccgcccgggcatgagctgctacgacctcgtcggctccatcaccggcaagaactactgcctcaacagctccgccgtcgacgtcttcctcaagtacgagccccagccgacctccaccaaaaccatggtccacttcgctcaaaccgtgcgcgacggcgtgctgaccaagtacgactacgtgctgccggagcggaacatcgccagctacggccaggccgagccgccggtgtaccggatgtccggcatcccgccgagcttcccgctcttcctcagctacggcggccgggactcgctcgccgaccccgccgacgtgcgcctcctcctgcaggacctccggggccacgaccaggacaagctcacggtgcagtacctggacaagttcgcgcacctcgacttcatcatcggcgtctgcgccaaggactacgtctacaaggacatgatcgacttcctaaaccgcttcaactagtactagcatatatatttgcttcaatcggtgtcgtcttcagccccagcaggattagacaaaaaaagggggggacactgcagctcgtaaacgttgtccatacagattatcagaggtgaaaaccatacatgatgtaatttagcattagatagttaaaacatggagctgcctcagtatggaggattgtcaactactctccatcacagcagtaggtgtgatgtagaagagtgattgtcacactgtgtgtgttgcaaatttgcaacacagtgattactaatataaaaaatactcttgagttaacctttgacaaaaaactctctgtggctgaggtgctccgggcaaacttttcaaatttaaggtttcgaaggagattatttggagacaca

SEQ ID NO: 122325 - DNA, 1015 bp, Zea Mays
gatcagcaagcccatccgggcccctctagagcgcattagcactagggtttcccatctcttaaggctgccaccgccagcgccgccccctcggtgcatcctcagtgcgtactgtctgtgcgaaggcgaccattccttcttcgctccttcgccgccgctatggttaagtactcgcaggagccgggcaaccctaccaaatcggccaaggccatgggaagggacctgagggtccacttcaagaacacaagggagacagcttttgcgcttcgcaagctgcctttgaccaaggctaagcgataccttgaggatgttattgctcacaagcaggcaattcccttccggagatactgtggaggtgttggtcgcaccgcacaagcaaagtctcgccactccaatgggcagggtcgctggcctgttaagtcagccaggttcatattggatttgctgaagaatgctgagagtaacgctgatgtgaaaggcttggacgtggacaacctctatgtttcacacatccaggtgaaccaagcccagaagcagaggcgccgcacctaccgtgctcacggacgcattaacccttacatgtcctccccttgccacattgagctgattctgtcagagaaggaagagcctgtgaagaaagaggctgacaacattgtcgcggcaaggaagcagtgaagtatgttagcctgctgataatggcatcctttcgaagcattatagccgtagctcttttatgtaccttttcaggctggtaccgataccgtggatctggatttgctatgttttgtactgtgctcgagtgtaaggtcagttcgtaatacaatcaatctgcgtggaacaatttgatatccttgaatatgttagtgagatcatttcgacaatgaaagttgagaacagaagttacaatgtcagtgcccatttttttttgttttgttattagatgctaacgccgtgccacaaatcagctcgtgaatttgaacccagattttcaaatacagaaatttaagtgattttgaga

SEQ ID NO: 122326 - DNA, 971 bp, Zea Mays
atgttggtctaccttgctatggcagttgacattccaaaatggggtctggatgcaattgataaaattcgcaggggctttctttggaggggctggaaggaggcgagaggaggtcattgtcttgtagcctggggtcgtgtttgccgaccactgcagcttggaggtcttggcatatctagttttcaagaattatgttgggcccttcgaatgtgttggctctggctacagaagactgatcctactcgaccttggtctgatctccacataaaagtacctggaaaagctagagctttcttcatggaggtggtcattactgaggtgggggatggcacaaatacaaagttttggagggataagtggttatatggtaagcgaattaaagatcttactccaagtttatataatattatacccaagaggattatcaatagcaggacagtctatgaggcaattacagacagaaaatggatctctgatattaaaggtcctctgacagtgggagtcttaacagagtatcttcagttgtgggacatgacttcagattggcagctgcagcctgaggttgaggataaacatgttttcagtattgctcctaatggcatctactcagcaaagattgcttacgagggcttctttttcgggtctgtaattttccctcattacaagaaaatttggaaaacttgggccttgccaaaatgtcgtttcttcatctggctggttgcacaaaatcgtctctggacaacggatagacttgctaaaagagggctgagtcatcctgagaagtgtcccttttgtgatcaagaagatgaaactattgatcatctccttgttacctgttccttctccagggaattctggtacctgttgttacggaattttggcctgcattctttggctcctcaacttgatgttggatcatatctaggctggtgggagtcggtggagaatattgctgctgggctcactagaaaagg

SEQ ID NO: 122327 - DNA, 908 bp, Zea Mays
ggcagacttctgttttatcctcattggagattgaacagcttctgttatttcccaacacgccctgcatacctctgttcctaactctttttgtgtgcatatctttttcagcagggaagttctctaaggcaggcagttgaactttggcagaaacttggttgctccagatggatgtggagccaggacttgtattgaagcttctgcttgatggacggctgaagcttgtgttggcccttgacattattgaattctcgtgcctctttacaagtagagtctgtatctttttgttctcctataaagaaatgttcatgaaatcaatgtcattctgactggtagtaggtctctattcttagattctgtttggataagggggatggaatccaaatccttaggatttagttcaactttgaactaaatttctagagcaacccccttatttgagcacccatgtatgagccagattatgtgattccctgtaccatcaaccagttgactaataaatactcacctgttgcctgtatttctcttctttttctttgagtttgaacatgtagtctttcaacattgccagaagcgggagctgtaaaagcttatgttagtagttttgttcaagaaattaagactttctatcatttggaatcagcacttgatagtcaatctagctgacttccatgtctatttggttttttaatgaaatatttcagtttatggttccaatacaagaaatttgctgcaaaggttgtttttacaggtacagactaaatagttaaccatgcaaatacagacatcagtatttttttgttaggccgtttgtgcaatgtttacttatgaatttaaactgcatatgttaatttatttaccagtactacttcgtggtgtctcgtgtgattatttgtagaatattaattttc

SEQ ID NO: 122328 - DNA, 865 bp, Zea Mays
agtcatgttgacgagggtgatcagggggtaaatgccacacagtggctgcataacgaacctgtacttgttactgtaagtggtgatggcagtgttggaatgtgggacgttactttaggtcaaccttgtgtcagacatatcgttgcccatactcgatgtgctaatgcggttgctgtggcccctaatgacaaatacctctgcacaggaggaagcgatcagaaagttgttttatatcataacagaagtgggcgtacacatcttaattggcgtctttcacatcctctgcaaggaaatgattgatatgctgccagaaatcatagaattgttccgctaacatgcagggaagttctctaaggcaggcagttgaactttggcagaaacttggttgctccagatggatgtggagccaggacttgtattgaagcttctgcttgatggacggctgaagcttgtgttggcccttgacattattgaattctcgtgcctctttacaagtagagtctgtatctttttgttctcctataaagaaatgttcatgaaatcaatgtcattctgactggtagtaggtctctattcttagattctgtttggataagggggatggaatccaaatccttaggatttagttcaactttgaactaaatttctagagcaacccccttatttgagcacccatgtatgagccagattatgtgattccctgtaccatcaaccagttgactaataaatactcacctgttgcctgtatttctcttctttttctttgagtttgaacatgtagtctttcaacattgccagaagcgggagctgtaaaagcttatgttagtagttttgttcaagaaattaagactttctatcatttggaatc

SEQ ID NO: 122329 - DNA, 173 bp, Zea Mays
tgggatctcctctattgcagccatgagcccatgatgaactgcatttttatctttacttccaatatgcaggttctggcgatgggactattggcttatttgacatccgtacttgttctgcaattagccacttgtcagtgggatctagttgtgaggttacatctgtttcatttagc

SEQ ID NO: 122330 - DNA, 2445 bp, Zea Mays
atgccggagccccaggccatcctcccgctgcgcgctctcccgccggacgcgccgctgcccttccccgtccccgcgccgttccacccccaagcccccggccccggtgggaccgccccggccacgcccccgaacccgacccctccgcaaccgttaacccccgccgcgccgccttcctcctcttcgacgcggccgccgcacccatgggagatctccgcgcgagcatggctagagtccttccccgacggacggccgcccaccgagcccgaggtcgacgcctacatcgacgtgcaccgccccgagctcccttccctcccccgctcccagctacaccagcgcctcctcgccctccgcggcgaccaggttctggatgcagaccagagcgcattcccgtacaggttccagcgtactgatctatggaagcctgtgtaccagtggttggaatctcttgagctggactcactagttgctacacagcagatatcagactggcttacatcgaacccaaagataatggacagaatggttgagaaacattcaaaataccatttgattcactacacccagaggatgcacttgaagatgctaaaaaagaagggaaagttgccaaagactctgcaactttctgcggctagagccacagttcgaccaattgctgctccgttcactccagaagaaaacattgtgccgttacagaaaactataactccagtgacagggagacaacagagcggtaccacaggcagattttccagtgccagttcagggagacaacagagctgtaccccaggcagatttcaaggtggaaatgcaactcttagggacaagaagacgtcattgtccaaaaagaaagaagctttgctcaaatacgaacttttgacagacttacagaaccaattgactgctgtgctgttaaagcaatgccgtactgttgccattaaagaaacagattcatcatatgtggaatctccaaatccagagactaacatgagtatacaagggaccactactgcaaatgcttcagccccttcagaggcaaagaatgtgtttatcaatgaacagtcagttccagcaggagccacagaaagtgaacctgggcataagaggaagagaaaccctatcatcgttacacctgcatggtgttatagtgaagcatcagcaggaaccttgcagaatgaaataaatcctagctcaaatagtgatgtttcaagaaatttcaatatttggagaggacatgctaatccactagtttcacatagagatactaagaaaaatatattattctgtcttgagggacgcgaaactggtgtcagctgctctcaagctgcttcttatggaggttatgctggacgaaattgtgaaagatggactccatttcttgaaggatggaattcacctgcattccagtttgaagggcctgctgtacatgttgttagaaaaagttacctatcttggtgtccaacatcatgtgcttatacgtcaagtgcaccttctgctcagcctcatggcaggcaaggtatccgcaaagttcttgatgtaaaatttcatccagaagggttgcctcagcttgtttctagctctaatgaggcacccaatgaattactgctattcaatctgctttctggaagggcaattcagcttagaggccacaatactaagatccagtctatcgcctttgcagtcaaaggagcaagtgtagtgtcttgtgcttctaatttattaaaggtatgggactgcattactgggtcttgcctctatacgctgggtggcgatgatcaaaattcagtggggcatactcagaaaataaatgctatggcagtgaataaatggcaatcctgtcttgttgtcaccagtggagcaaaaggtgatgggaagcttctactatggaatgctttaagaggtgaacttgcttctgatctaaattcgaacttgaggtctcaggatatgatctatccctcagttgatacaatggagttctatagtgagaatcatctggcatgtggaagtgattgtgactatggtggctcagctgtggtacaattatgggatattgattctccagagtcttatttatctttctctgcaagtgactcttacattacttcccttaaagtcaaccctgctggcaacactctcattactggttctggcgatgggactattggcttatttgacatccgtacttgttctgcaattagccacttgtcagtgggatctagttgtgaggtattgttgcatagaagttggaattgagagttgtatagtttgaattgataatgtggaaattatttcattgctattgtagattatcatctactccctccgttttaaattataagacgttttgacctttctagatatattatttttattatgtattagacatagtgtatctaagtgtattgcaaaagctatgtatctagaaaagccaaaatgtcttgtaatttt

SEQ ID NO: 122331 - DNA, 210 bp, Zea Mays
atgattactggatcaagtatccattcatcctccgatagatatttgacacttgtgcatatcaaaggttcatcaagattttgcaatattgcctggcagatgggatcatctggaattcggacgccaacctgcctcctttttgcataccttgtggaagaaccatgctttatacattgtttaggaaactgcttgcttgcaggtaaaataaatgtg

SEQ ID NO: 122332 - DNA, 249 bp, Zea Mays
tatatgcatattggcagtatgtgtatgctcattcatacacaagtttgtgaacatatattaagcatatttgaattgttctatttacttgcataattagtttacactcctgttcattatatataaatacatacagatactgttatttaagcaaatgttatttaaatattcatgttatttgagctaaatgtttttattactatgaaccagttattaaaatatgttgtatagttagttgatgcaaaaaggctc

SEQ ID NO: 122333 - DNA, 114 bp, Zea Mays
atttgacatatggatcgattacactctgggtaaggcaagccaaaagagggacgaaaaagatagaagagtataaaaataatttatgtgctatttaattaaaggtgtggttgtgac

SEQ ID NO: 122334 - DNA, 549 bp, Zea Mays
gatgacggctgaggggagcacgccatggggatgaggaggtgcgtcggccagtgatcggatgctgagcgcagaggccgagttcgacgcgaggttggagcacgggacgtggtggccaacaccccgcgcgtggcccggcaacaaggagtggcaacgacgacgtgatgggactgggctacggcgcacagcgcacgcgcttccatcgctgggttccctaggcggcggccctaggttcggctcccaaatccggtgtgttcaaattgccagcatagctgtggaggagtcgaggccacatgcacgagctacccgcggccccgcatggtggtagtgagacgagatggcatcagtgtctacgctaaggcaacgtcccgagcggccgcgcgaagggatcacctgtcgctcagcgcaagaataggaacaaacaggatcgcagtcgttgagccccccatgcgttcgattatggtgaggatcgactttgaagacgaccagccaaggacggcccacaggtcagcgatccaagagtaccattgcgcgcaccctggtttgcttgca

SEQ ID NO: 122335 - DNA, 1767 bp, Zea Mays
atggattgggatctcaaggcggtgggcgcgtgggacctcgcggagctggagcaggaccacgcggccgccacggcagcagcggggccgtccgagggccacgccaccgatactgccgcggcgggcacgggcacggggacggggacggagagccgcccgcccggagcaggggcacccgccgagtgctctgtggacttgaagctgggcgggatgggcgagtgcgagctcggcgcgggcgcggcgacggcctgcagggagagggaggccgcggcgggggcgacgaagcggccgcgccccgccgggcagcagcagcagcagtgcccgtcgtgcgcggtggatgggtgcagagcggacctgagcaagtgccgcgactaccaccggcggcacaaggtgtgcgaggcgcactccaagacccccgtcgtcgtcgtggccggccgcgagatgcgcttctgccagcagtgcagcagcgctgttacgcttttccgttccctgcggtcgctgctcctgcagtccccacacagcaaactgctcagcagcgtttccttcactcttctctctgacgccctgatgcgaattaaacatctgctgccattgccaaagtctgggctctggagacggggcggatccacggacacacttcgtagctttctttatccgtatggagaacgaaactgctgtacagtataccatcgtgtggtccaagaattatccaaattcaaagaatcctgtggccataattcattggttcatggccatatgactgtgagagtggcacactacacctactgccaccaaatgtgcaaaacactgctaagaaataataaccatgggcttgttcatttcgatgggtttaaatccataccaagtcaaaatcttttaaatttttcaatcccatcgaatacacgtgaggtaggaagtcctataagattccatttacttgcggagttcgacgccgacaagcgcagctgcagaaagcgtctggacggccataatcgccgccgcaggaagccacagccagacaccatggcttctgctagctctatcacaagccagcaaggcacacgattctcaccatttgcgcctccaagactggaggcgagctggccgggggtgatgaaaaccgaggagagtccatatcgcatcactcaccaaatccatctgggctccagcagcagcagcaggcagcagcatttcgtgggagccgccacgtctgcctacgccaaagaaggcccgcgcttccctttcctgcaggagggcgagataagcttcgccaccggcgtggtgttggagccgccggcggcggctccagcgtgccagccgctcctcaagtcgggagcaccaccacccgagagcagcagcgccggcggcgggaagatgttctccgatcaggggctgactcgcgtgctcgactcggactgtgctctctctcttctgtcagcgccggccaactactccggcatcgacgtcagcaggatggtccgcccgactgaacacgtccccatggcccagcagctcgtggtctcgggcctgcagttcggcagcgcgtcgtggttcccgcgcccccaggcttccacgggcggctccttcgtctcatcctgccccgccgtgcaggtggagggcgagcagcagctgaacgccgtgctgggccccaacgacagcgaggtgagcatgaactacggcgggatgttccacgtcggcggcggcagcggcggcggcgagggctcctcggacggcggcacctcgtcgtcgatgcccttctcgtggcagtag

SEQ ID NO: 122336 - DNA, 642 bp, Zea Mays
atggcggtgggacccggcccactgttcctccttccgaatacctgtcaggaatggaaagtaccaaattttcaaggagcttcgtctgagaatgatcctaacaataccactatatttgttggtgggcttgaccccaatgtcactgaaaatgtcctaaaacaagctttttctccttatggcgaagtcatccatgttaagatccctgttgggaagagacatggttttgttcagtttgttaccagcctcagcatgaatccatgcaatggggtgcgggtgtggctgctagtgttggtgattactatggtggctatggacaaggttatgaggcttatggcagtgggtctgcacaatctcagaaccctaacatgtatggttatggcgcttatgttggttatcccaattagcaatggcaaccagctgcacatcagccacaacaacaacaggtacacaatgtttgctaacgtcatcgactcgagccaggtgaaggttcagcgtggagcaactagcacaggcccaagggatacacatctcggcgcccccacctcccgttcattatccttggtcttcacctccacctacacctacatctccatctaccgaacatcagttgttgatatatttgttatgttatggaatgtggtgtaa

SEQ ID NO: 122337 - DNA, 883 bp, Zea Mays
attctgtcgcgttctttcgacgccaaccccgacccgcggccccaccacccagggccaaattcccctgcgatcctctgtgtccacctctcctttctcacacctcgacgcctctctctctttccccgagctctcgaaaccctaggtgcgtgccgaccggcggcggcggcgaggtgatggcgatggacccggacgcggtggcgaaagccttcgtggagcactactaccggacgttcgacaccaaccgcgcggcgctggtggggctgtatcaggagacctccatgctcaccttcgagggccagaagttccagggcccatccgccattgccggcaagctcggatctcttcccttccaggcctgcgagcaccagatcgtcaccgtcgactgccagccgtcggggccccagggaggcatgctcgtcttcgtctccggttccatccgcaccggccccgaggagcaccccatcaagttctctcaggcattccatttgctgccggcagctgggtccttcttcgtgcagaatgacatgttccgcctgaactatggctaaaagacagccgaaaactcttgtgatgaacgaatttgttaagggcttcatgttgagacgatgaataccgactgtcgccgctactctcatctcctttgtatctcctctgttggctgattaactgttattacaagaaattgctggacttgttttttccagttgttttgaatcatgtattatggttgcatgggcaccatttcttcgtgggatgtgaattgaaacagtccaaatcaattggtgtggcagatatctggtttgcccttctacaaaacgaattgtacctggttgatatgcagtgcagttcgtcaccacagcaggcattcgagttcccggtgctt

SEQ ID NO: 122338 - DNA, 800 bp, Zea Mays
gtatttgtatttaggttctgttgtgcagtttgtgatttcgaacactggattggcatttgttcccgttagaaattataattaccactttgataggacaattctttggccgttaactactctactagtatgccatttatgtgatgcagaatgatactcataaagtcatgaggagttattttcagtattaccaatcaaataacaccaattttatattacaaagatcatgcattggtaaagaaattgttggacaaaaggcttgtatagtttgtgtaaagtatgattgaattttgatagcaaccccatgcttgtccaattcgtggtttgtagaactgtaagttgctcgtagtgcatcctttttacgcacagggtgcacatcttggcttatgttggttctttatgttcctcctccagcacaagtattctgcgtttccatgatatgatactctgtctctgtaggcattccatttgctgccggcagctgggtccttcttcgtgcagaatgacatgttccgcctgaactatggctaaaagacagccgaaaactcttgtgatgaacgaatttgttaagggcttcatgttgagacgatgaataccgactgtcgccgctactctcatctcctttgtatctcctctgttggctgattaactgttattacaagaaattgctggacttgttttttccagttgttttgaatcatgtattatggttgcatgggcaccatttcttcgtgggatgtgaattgaaacagtccaaatcaattggtgtggcagatatctggtttgcccttctacaaaacgaa

SEQ ID NO: 122339 - DNA, 971 bp, Zea Mays
agattctgtcgcgttctttcgacgccaaccccgacccgcggccccaccacccagggccaaattcccctgcgatcctctgtgtccacctctcctttctcacacctcgacgcctctctctctttccccgagctctcgaaaccctaggtgcgtgccgaccggcggcggcggcgaggtgatggcgatggacccggacgcggtggcgaaagccttcgtggagcactactaccggacgttcgacaccaaccgcgcggcgctggtggggctgtatcaggagacctccatgctcaccttcgagggccagaagttccagggcccatccgccattgccggcaagctcggatctcttcccttccaggcctgcgagcaccagatcgtcaccgtcgactgccagccgtcggggccccagggaggcatgctcgtcttcgtctccggttccatccgcaccggccccgaggagcaccccatcaagttctctcaggtatgcacccccgctttggcctcgatctgccgccttccaacttgtagcagcaaggcttattttattgttgtgtggtctgcgatgacttgtcacatgatctgatcagttgtcactcctgtgattcctagttaggtttggccctgatctcatgatagcctgtagaaggcccttgctttgtttgttattttgattgaatggcgccaatcatctgtgcttactgttgtgttgtattgattcgtctcatggttatcttcttagtataaatgtctggtccattgtccttgagatgaagttgtcaactgtgccagtcgatattcgtttggagcatttgtttttctactaggcagcttcatttgtttagatctatatgtaattgtttatgctcgtccttgttctatccatttttcaattctgttttaattgatgtgatatggtggccttttgtctatacattctgttggtcctttcgaccctcaagatattcgttccgttg

SEQ ID NO: 122340 - DNA, 868 bp, Zea Mays
atgcccagctctgccttgcctctgcgccgtccttcatgtgatgcttccctccgtgcagcaactgctccccctcacgtctcctgcaaggctgtgatccacccgcccctgcgaggcctacactgcaacacgcttcgcgcttccccctcaggccgaggcgatgaccgacgggcccggcgagcaggtggggatccggaaccggaagggcacgggtaccggaaccagttcctagatctagcgcggctgggggcggtggcggaggccttcttttgcagcgagatccaccggcggctagccgtcactatcgtgctcatcgtgctcagccgcgtggggtacttcatcccgctccccgggttcagtcgccgccgccgcctcatcccagactcttaccttagcttctccacgctcccagcaggaagcaatgtcgaggcagctaagtgatgctacaatggaacaatccaataacaatgattcgtctgttggcaagaggcccatatagcctcgaaagaatatgaaccccctacctcggtaaaggcaaagaccacagctcaaaaaataacattttcacggtcctaaatggattgatggcagcattcctttatgcacttcctgataaactcacaaaaataagcaagatcgctgctagcaagaccaagatttatatggtacttcagcttgtcaataggggcgacctgttcgacaggatcagtaccaagaaggtcgtgcccgatgacaagatcgctgagttcgcactcctcgaccccaagccaccaagaggtgagcaggcgctatcctaaaattgagaagagccaggctactagaaaaagaagaagaacattatcatacaataagcgggattatatatggacgg

SEQ ID NO: 122341 - DNA, 1045 bp, Zea Mays
atccaactcacaccgccccccggcttcaatgcgcgcccgccgcacgccgcccccggccagcctataaccgccggctgggctgggcacgccgccctcgtttccatttccctcctgctgctcctcctgacctcctcctcctcatcatctggcacgagcatccaagcaaataaaaatttagcggccaccgacgaccggccggccgtgcacccttcgcactactactgcgcccgcggacggcgtcagaggagcagcacccagcagcatggcctgcaccaggaggcagttgtggtgggcatgcctgctggcggcgtggtgctgcgccggcgccgccgcggccgcccagccgccggcggcggacgcggacccgctgcagagcaggtgccagggggactttgggaagctgacggactgcatggactacgcgacggggcacgcggcgtcgccctcgtccacctgctgcggcgacgccggcggcacgcagaaggcgcgcccggagtgcctctgctacatcatccagcaggtgcacgcggggcgcgaccaggtgcagtcgctcggcctgcgcttcgaccgcctcctggcgctccccgccgcctgcagcctccccaacgccaacgtctcgctctgcatcaacctgctgaacctgaagccgggctcgccagactacgcgctgttcgccaacgcctccaagatcacgccatcagccggaggcagcccggcgagcgacaccgccgccggcagcgccgttatcaggctccaggctggggtccgaggcagcgtcgcgctcgccgtggtctctgcgatcgtctcgtcagtcttctgatccgaccgatctcctcagaggactagaggagaagcagcggttcttacactccgtgtggattcgtcgttctcatgttgcgttccactcgtcgatgtctattttgtatttgtaccccacataaaaaaaatagatccagatgatacttgtttcccccgtccctgtggctttaactgtaacctcggatgtttgaattagctaattatgtataactctcatcgcgtcaat

SEQ ID NO: 122342 - DNA, 753 bp, Zea Mays
tggtggtttatgggcaggtgtggtgaacaaatgacatcgatatcatgaaagagtagcttaacaggacttgtaagttagaaaatgtcttcgatcgatttttatgtaggaatttaaggtaaaagctgtactgaatttctgttgtggtgagctaaacaagccccatgcttttgtgggacctggtaaggacattacagtttctcttttttctgttttgcttgcttttatttttttgtaacgacgcccctatcctcagtatctgttcccaagcctccttcctagctgggttttatctaagctgctattaagctttgccaagctggtatcgtcccaagatctgcgagctaaccatctctccttctatggcagtgaacgagaacatgagcaggagggcagtccacaaggcactcttcgagtcggcggcactgatcgtggccagcgtcatccaggtctatctcctgcgccggctcttcgagcgcaagctggggacgtctagggtataaggctccactggtatccaactctcccttgtagtagccaccatgatcgtatcgacataaccgttaatggtcgctagatcagctaatactgcttccttgtgggctttagttacatgtaatcttttgtggtgccacagatgagaactcttcggatttaaaccgtcaatctttcagccttcattttgtctctcgtgaacaacaaggctctctgtacagaataggagattttcttcgccgtctctgttttcagggacca

SEQ ID NO: 122343 - DNA, 1193 bp, Zea Mays
atggactgtttttcttctaatttcggcccccaagcagcccataggcccgtccggatagtgccaggactgccagcccgatctcgcgtcgaacgatgtgaaagaactcctttcttctacgcggacggattcctctcgtctcgatcagctcgcttcgtgacttctctctcctctcgatcgattgcttcctccaccgaggcgggggaaagcgccgcccagatcgccgtaggcaagcggcgatcactccagctttgagcataagtttctgcagggaggctcgtgaagtcagtagtcgtatctggcagtggcagcacagcgcaccatggaatggctgagctggagaacggtgtgttgtttatcagtgctgtgcaccgtgctgttcttgcgcccggtcgagggcattcgctttgtgatcgatagagaagagtgcttctcgcataacgtggagtatgagggggatactgtccatgtatccttcgtcgtcatcaaggctgacaccccgtggcattacagcgaagaaggcgttgatcttgtggttaaggatcctaatggcgctcaagtccgtgattctcgagataagactagtgataagtttgagttcatagttcagaagagaggcgtccatcgcttctgcttcacgaataaatccccgtaccacgaaactatagacttcgacgtgcatgttggccatttttcatacttcgagcagcatgccaaagatgagcattttgcaccacttttcgagcaaatagccaagttagatgaggcactttacaatatccagtttgaacagcactggctagaggcccaaactgaccgtcaagcaatattgaacgagaacatgagcaggagggcagtccacaaggcactcttcgagtcggcggcactgatcgtggccagcgtcatccaggtctatctcctgcgccggctcttcgagcgcaagctggggacgtctagggtataaggctccactggtatccaactctcccttgtagtagccaccatgatcgtatcgacataaccgttaatggtcgctagatcagctaatactgcttccttgtgggctttagttacatgtaatcttttgtggtgccacagatgagaactcttcggatttaaaccgtcaatctttcagccttcattttgtctctcgtgaacaacaaggctctctgtacagaataggagattttcttcgc

SEQ ID NO: 122344 - DNA, 1494 bp, Zea Mays
atggactgtttttcttctaatttcggcccccaagcagcccataggcccgtccggatagtgccaggactgccagcccgatctcgcgtcgaacgatgtgaaagaactcctttcttctacgcggacggattcctctcgtctcgatcagctcgcttcgtgacttctctctcctctcgatcgattgcttcctccaccgaggcgggggaaagcgccgcccagatcgccgtaggcaagcggcgatcactccagctttgagcataaggtaacgggccgccgcccctcttcctctccgtcccaacccgattggcgatttcttccgtaggacttgcggccccggtcagatcttgctccggtactcgctgctggcccgatcgaaacctggagttgcagggtgggagcgaacgccatccaatagagtcttcccctacggcgacggttggcggggcgctttacccgtccagactatcccgttcctcccccgattcagcccttccgaaccgtgtttcgcccctgatccacctgatccgctcgctctgttcctatgaccctgctgacagcttggggatttagtttctgcagggaggctcgtgaagtcagtagtcgtatctggcagtggcagcacagcgcaccatggaatggctgagctggagaacggtgtgttgtttatcagtgctgtgcaccgtgctgttcttgcgcccggtcgagggcattcgctttgtgatcgatagagaagagtgcttctcgcataacgtggagtatgagggggatactgtccatgtatccttcgtcgtcatcaaggctgacaccccgtggcattacagcgaagaaggcgttgatcttgtggttaaggatcctaatggcgctcaagtccgtgattctcgagataagactagtgataagtttgagttcatagttcagaagagaggcgtccatcgcttctgcttcacgaataaatccccgtaccacgaaactatagacttcgacgtgcatgttggccatttttcatacttcgagcagcatgccaaagatgagcattttgcaccacttttcgagcaaatagccaagttagatgaggcactttacaatatccagtttgaacagcactggctagaggcccaaactgaccgtcaagcaatattgaacgagaacatgagcaggagggcagtccacaaggcactcttcgagtcggcggcactgatcgtggccagcgtcatccaggtctatctcctgcgccggctcttcgagcgcaagctggggacgtctagggtataaggctccactggtatccaactctcccttgtagtagccaccatgatcgtatcgacataaccgttaatggtcgctagatcagctaatactgcttccttgtgggctttagttacatgtaatcttttgtggtgccacagatgagaactcttcggatttaaaccgtcaatctttcagccttcattttgtctctcgtgaacaacaaggctctctgtacagaataggagattt

SEQ ID NO: 122345 - DNA, 1434 bp, Zea Mays
atggactgtttttcttctaatttcggcccccaagcagcccataggcccgtccggatagtgccaggactgccagcccgatctcgcgtcgaacgatgtgaaagaactcctttcttctacgcggacggattcctctcgtctcgatcagctcgcttcgtgacttctctctcctctcgatcgattgcttcctccaccgaggcgggggaaagcgccgcccagatcgccgtaggcaagcggcgatcactccagctttgagcataaggacttgcggccccggtcagatcttgctccggtactcgctgctggcccgatcgaaacctggagttgcagggtgggagcgaacgccatccaatagagtcttcccctacggcgacggttggcggggcgctttacccgtccagactatcccgttcctcccccgattcagcccttccgaaccgtgtttcgcccctgatccacctgatccgctcgctctgttcctatgaccctgctgacagcttggggatttagtttctgcagggaggctcgtgaagtcagtagtcgtatctggcagtggcagcacagcgcaccatggaatggctgagctggagaacggtgtgttgtttatcagtgctgtgcaccgtgctgttcttgcgcccggtcgagggcattcgctttgtgatcgatagagaagagtgcttctcgcataacgtggagtatgagggggatactgtccatgtatccttcgtcgtcatcaaggctgacaccccgtggcattacagcgaagaaggcgttgatcttgtggttaaggatcctaatggcgctcaagtccgtgattctcgagataagactagtgataagtttgagttcatagttcagaagagaggcgtccatcgcttctgcttcacgaataaatccccgtaccacgaaactatagacttcgacgtgcatgttggccatttttcatacttcgagcagcatgccaaagatgagcattttgcaccacttttcgagcaaatagccaagttagatgaggcactttacaatatccagtttgaacagcactggctagaggcccaaactgaccgtcaagcaatattgaacgagaacatgagcaggagggcagtccacaaggcactcttcgagtcggcggcactgatcgtggccagcgtcatccaggtctatctcctgcgccggctcttcgagcgcaagctggggacgtctagggtataaggctccactggtatccaactctcccttgtagtagccaccatgatcgtatcgacataaccgttaatggtcgctagatcagctaatactgcttccttgtgggctttagttacatgtaatcttttgtggtgccacagatgagaactcttcggatttaaaccgtcaatctttcagccttcattttgtctctcgtgaacaacaaggctctctgtacagaataggagattt

SEQ ID NO: 122346 - DNA, 1366 bp, Zea Mays
atggactgtttttcttctaatttcggcccccaagcagcccataggcccgtccggatagtgccaggactgccagcccgatctcgcgtcgaacgatgtgaaagaactcctttcttctacgcggacggattcctctcgtctcgatcagctcgcttcgtgacttctctctcctctcgatcgattgcttcctccaccgaggcgggggaaagcgccgcccagatcgccgtaggcaagcggcgatcactccagctttgagcataagggtgggagcgaacgccatccaatagagtcttcccctacggcgacggttggcggggcgctttacccgtccagactatcccgttcctcccccgattcagcccttccgaaccgtgtttcgcccctgatccacctgatccgctcgctctgttcctatgaccctgctgacagcttggggatttagtttctgcagggaggctcgtgaagtcagtagtcgtatctggcagtggcagcacagcgcaccatggaatggctgagctggagaacggtgtgttgtttatcagtgctgtgcaccgtgctgttcttgcgcccggtcgagggcattcgctttgtgatcgatagagaagagtgcttctcgcataacgtggagtatgagggggatactgtccatgtatccttcgtcgtcatcaaggctgacaccccgtggcattacagcgaagaaggcgttgatcttgtggttaaggatcctaatggcgctcaagtccgtgattctcgagataagactagtgataagtttgagttcatagttcagaagagaggcgtccatcgcttctgcttcacgaataaatccccgtaccacgaaactatagacttcgacgtgcatgttggccatttttcatacttcgagcagcatgccaaagatgagcattttgcaccacttttcgagcaaatagccaagttagatgaggcactttacaatatccagtttgaacagcactggctagaggcccaaactgaccgtcaagcaatattgaacgagaacatgagcaggagggcagtccacaaggcactcttcgagtcggcggcactgatcgtggccagcgtcatccaggtctatctcctgcgccggctcttcgagcgcaagctggggacgtctagggtataaggctccactggtatccaactctcccttgtagtagccaccatgatcgtatcgacataaccgttaatggtcgctagatcagctaatactgcttccttgtgggctttagttacatgtaatcttttgtggtgccacagatgagaactcttcggatttaaaccgtcaatctttcagccttcattttgtctctcgtgaacaacaaggctctctgtacagaataggagattt

SEQ ID NO: 122347 - DNA, 1177 bp, Zea Mays
atggactgtttttcttctaatttcggcccccaagcagcccataggcccgtccggatagtgccaggactgccagcccgatctcgcgtcgaacgatgtgaaagaactcctttcttctacgcggacggattcctctcgtctcgatcagctcgcttcgtgacttctctctcctctcgatcgattgcttcctccaccgaggcgggggaaagcgccgcccagatcgccgtaggcaagcggcgatcactccagctttgagcataagggaggctcgtgaagtcagtagtcgtatctggcagtggcagcacagcgcaccatggaatggctgagctggagaacggtgtgttgtttatcagtgctgtgcaccgtgctgttcttgcgcccggtcgagggcattcgctttgtgatcgatagagaagagtgcttctcgcataacgtggagtatgagggggatactgtccatgtatccttcgtcgtcatcaaggctgacaccccgtggcattacagcgaagaaggcgttgatcttgtggttaaggatcctaatggcgctcaagtccgtgattctcgagataagactagtgataagtttgagttcatagttcagaagagaggcgtccatcgcttctgcttcacgaataaatccccgtaccacgaaactatagacttcgacgtgcatgttggccatttttcatacttcgagcagcatgccaaagatgagcattttgcaccacttttcgagcaaatagccaagttagatgaggcactttacaatatccagtttgaacagcactggctagaggcccaaactgaccgtcaagcaatattgaacgagaacatgagcaggagggcagtccacaaggcactcttcgagtcggcggcactgatcgtggccagcgtcatccaggtctatctcctgcgccggctcttcgagcgcaagctggggacgtctagggtataaggctccactggtatccaactctcccttgtagtagccaccatgatcgtatcgacataaccgttaatggtcgctagatcagctaatactgcttccttgtgggctttagttacatgtaatcttttgtggtgccacagatgagaactcttcggatttaaaccgtcaatctttcagccttcattttgtctctcgtgaacaacaaggctctctgtacagaataggagattt

SEQ ID NO: 122348 - DNA, 374 bp, Zea Mays
atgaagcaagttggacaagctgatgacgttcttgccaacaatgaagcagatgcccacgatgaagctgatgttcggacattggactcaggcactcctgccaatattaagaggaggcggtactatcctcctgatatgaaaagaatcatatcgttcatgcaattcagaaaaattaggatgaccttatcctctatggcaagccagggcagcgtctccacggggctgcctccatgcgaatgtcgcgcctccctacgagcgctgcgccgccgcctccctgcgagcgctggcaaagattcagtgccatattccactgcattgcagatccatgggaggtacgagatgaatgaacggctttcgacggagtagcagcccgccag

SEQ ID NO: 122349 - DNA, 1064 bp, Zea Mays
taccccttctggttctgcgcgttctatcggcaatcaacgatggcgcgtctcgacggtactgctaattagcctcctagccagcctccgcctggaggtccatccccgaccttgacgcttcccggccaaacgcggatgcccctcaccctcggcgcagcgccgcggtgctccatacccatccctctccatggtcggcgcctgcatcccccggcatcgcggtgctggatcccctccctctctcgcgttatgctagagttcgagaaggggaaaagcgatgtagggttcggcaacgacacctctgtgtcccctcctccctcgcgcactcattttccttcgtcccgttgctactcagagtgtgttccatccgagcggtgatgtgagatgtgtcccccctgttcttcatcggtttgcttgcaatgattgagatagatgtgctcatttgccttgcagaaaatgaaaaataaagatatctttgtgcccagattcagagatggtttgactacctaatcatatatgcatggtacaacagccataaaactgaatattatttggctagaacctaaaatggcggaaactcttaggaatcatggtgcaaccgtgcatggatcacttgtctaaactagttacatcgttgtgattaagaataaggattacctgatggttgtctcctattttctgttgtagtgcaaaccgtctaaagctgactgttggatggggttggcgaaggtgtgcttgaataaggatcacctgaaggcgtggagtccctagctgctggttgttgtgtgtcctagcgggcggcagtttgagtcccctgcaggcagtggcggctgtaatatgtactagtataggcatgcggacaacaattggaaattgtatgattcatgtgatcattttccttgtattcttttctattgttggttatatatcagattttagaagaatattgtgatccttttccttgtattcttttctattgttggttatatatcatattttagaagattcttgtgatcattttccttgtattcttttctattgttggttatatatcagattttagaagattc

SEQ ID NO: 122350 - DNA, 493 bp, Zea Mays
caagcaaaccgatgaagaataggggggacacatctcacatcaccgctcggatggaacgcactttgccaggcgaccaagaggaattcggagagtaagaagaggcatgcaaaaataaaagccctagcagctaggaaacgtagattggagagtgtgtcaaacctctgagtagcaacgagacgaaggaaaatgagtgcgcgagggaggaggggacacagaggtgtcgttgccgaaccctacgtcgcttttccccttctcgaactctagcgtaacgcgagagagggaggggatccagcaccgcgatgccgggggatgcaggcgccgaccatggagggggatgggtatggagcaccgcgacgctgcggcgctgcgccgagggtgaggggcgtcggcgtttggccgggaagcgtcgaggtcggggatggacctccaggcggaggctggctaggaggctaattagcagtaccgtcgagacgcgccgtcgttgattgcagat

SEQ ID NO: 122351 - DNA, 570 bp, Zea Mays
aaaatcttaaataaataatttatttagtttatgtaataatatcaacccaatggtttggtgccacaaaataaccatagaaaaaatattgtcttgctaacatgagcaccaggtgagctcttttgaaatataattcatcatcagaggctgattagatgctgagtgtggtcttataggtggtgccggccttgaaatcagcggggatgacgtcgtcagcgatgcggtagccaccggacttgacagcaaagcggatgcaaagggggtacttgagcggggccttggtgtcgagcgtccaggtgccggtcgggccctccttgagcgtaaaggagaagtcatcgcccccgtgctctttgatctccacgtcggatatggttgcaacattgggggtgaggatcaggtggccaggcttggatcccttgccaacctggaaggtgagcggggtggtgcacaaaccaaccgcaaacagcgcagccagcatcgacgttgcaagtaggatggaggacctggaggccattgttggtagcgaggtatttgttcttgtgtgcctgtttctttgatggatgtgtgtgtgtg

SEQ ID NO: 122352 - DNA, 600 bp, Zea Mays
aaaatcttaaataaataatttatttagtttatgtaataatatcaacccaacacaacaaggcatcagaagggacatgtagcatcacatatttcttgggtggtttggtgccacaaaataaccatagaaaaaatattgtcttgctaacatgagcaccaggtgagctcttttgaaatataattcatcatcagaggctgattagatgctgagtgtggtcttataggtggtgccggccttgaaatcagcggggatgacgtcgtcagcgatgcggtagccaccggacttgacagcaaagcggatgcaaagggggtacttgagcggggccttggtgtcgagcgtccaggtgccggtcgggccctccttgagcgtaaaggagaagtcatcgcccccgtgctctttgatctccacgtcggatatggttgcaacattgggggtgaggatcaggtggccaggcttggatcccttgccaacctggaaggtgagcggggtggtgcacaaaccaaccgcaaacagcgcagccagcatcgacgttgcaagtaggatggaggacctggaggccattgttggtagcgaggtatttgttcttgtgtgcctgtttctttg

SEQ ID NO: 122353 - DNA, 720 bp, Zea Mays
aacagcacattggacgactcgaggttgcagcggactaacctcggattgcactaaaaaatacgagtgcctcaagctgcctcagcacgtcgaggagacagggccggagtccggcgcaggggcctgggcgctggcgaggtccgctgccggcgatgagaggcgaggagctgggcatccatggcagagcgaggtcgacggcgctcggtcttgggcgcgatggaggagtccggcggcttggcgacttcggacccggcgagcagaggaggggcatggtgccaacgccggttcttggacagggtcgacggcgagctcgcggcagagcacggcgaggcgaggtttgaggtacggcggtgcacggtccggcgacagcacgtctaggctaagggagggaggagcaggggacagccggtcccgcggtcaccatggcgcggtgcagggaggccgagtggaggacggcgttgcagccatggggatgacggtcgggcgaatcggcggcacggatgtcagagcatggagctcgcggcggcgcacccatggaggacgagcgggaggaaggcgaggagcggcctggcgactggctagggttctcggccggtccaggacgacggcaagctccatgggcagggagagacgagggcgaccaccagggcgcggtgcttggggatggaggccgagcgcgtggaagggggaggcagccggcgtttgaagacgtggtgagtcgat

SEQ ID NO: 122354 - DNA, 138 bp, Zea Mays
atgctctaccacccttgcagaaacggctacacaatacgccagaaatgcatacaacaggtcataatatatttagctttcatacaaccaaaggcagcagggagtctggcagtgaattttctcaccaatcccagatcgtag

SEQ ID NO: 122355 - DNA, 109 bp, Zea Mays
atacttcttattacttacttatagaagggtagtttgcttaaatcaaggtgttgtcaccagattcaattcttccgaattcaaatccttctatggttctaacttaaaaatt

SEQ ID NO: 122356 - DNA, 2043 bp, Zea Mays
aaaccagcgaagggacaccaaccaagcaccactgcctgcccacaaaaccacacacagacacaagcacagccacttgcacacagcacgcaccccactccccagagagagaaaaagagaatgcatacacaaatccacgagttggcatgccgctactgctgtcctctcccccctcccaaccccgtgaggccacgaacgcagaggccatggccaagatatatatataatcactaggactagctgagagcttcgcttcttcagagctcaggagaacccacggggccgcggggacggagagagacactagcgcctgtgcaagcaagcaagcaagcaaagcgagcgaggtttgcacagcgatggcgtgtgggtcgcgaagtcgtcgaaccagcgagacggtcgacgagtacgagaagctggttctcagaatgaaccctccaagggtcaccgtggacaacgactccgacatgactgccaccttggtgaaggtggacagcgccaacaagtacgggaccttgctggaggtggtgcaggtgctgaccgacctcaagctgaccatcaaccgggcctacatttcctccgacggcgagtggttcatggacgtgttccatgtcgtggatcaggatgggaataaactttacgacggccaagtcatcgacagaattgagcagtctctgggagcggggtcgctcagcttccggggcccgccggagcggctggtggccgtggaggcggaggcggaggaggcgcagaccaccatcgagctggtgggcagggaccggccgggcctgctgtcggaggtgttcgcggtgctggccgacctcaggtgcaacgtggtggcgtcggaggtttggacgcacgacggccgcgtggcggcgctggtgcacgtgacggacgccgacaccctcggcgccatcgacgacccggcgcgtctggacacggtcaagcgcttgctccgccacgtcctgcgcgggagcagccgcgacaagaaggccgcccgcgccgccgtatcgtcggcgcgcgtggagcacgcgccgcgccgcctgcaccagatgatgcaggctgaccggagcgcccgccgcgagggcgggggcgacggcgacggcgaggaggagcgcgagcgcggcgaggcgtcgggcaacggcaacggcgtgccggtggtcgcggtggaggactgcgccgagcgcgggtacacgctcgtcaacgtgcggtgccgcgaccggcccaagctgctgttcgacacggtgtgcacgctcaccgacatgcagtacgtggtcttccacggcaccgttatcgccgagggctccgaggcgtaccaggagtactacatccggcacctcgacgacagctccggcgaggaccgcgaccgcctctgccgcggcctcgaagccgccatccaacgccgatgcaccgaggggcttcggctggagctgtgctgcgaggaccgcgtggggctgctgtccgacgtgacgcgcatcttccgggagcacgggctgtcggtgacgcacgcggaggtggagacgcgcggggcgcgagcggccaacgtgttctacgtggtggacgcgtcgggggagcccgtgcaggcgcaggcggccgtggacgccgtgcgcgccgagattggcgagcaggtgctcctcctcgtcagggagcagcagcaggacgccgccggcgggccgaagtcgccggcgggtgccggcggcaggcgctcgctcggcaacatgatccggtcccgctccgagaagttcctctacaacctagggctcatcaggtcctgctcgtagccgccgcgccgccggccgtgctatgccacgtactagctataaattaagctagcattggcatctgctagagagggggaaaaaaggtcttttaatttggctcccatcaacgccccgttgatcgatccatgctcgaagctcatggacgaacctgtgcaggcagttaggcaggaggaaccttgttgatcgaaatcagatgtcctgctagctgtgtaaatattctgctcttcgaatcgtctcgctcgctccttttgccctgacttctctcatc

SEQ ID NO: 122357 - DNA, 782 bp, Zea Mays
tgcatgccccgtgagtccgacgaggacgcctccttgccttccccggacgtggtgcggcgtagcctgccgcaggagcgcatggtcctcctgcagcgggagccctcgctgccgccgttgcaggccgtcgacggcgacgacgatgacgacctagacgccatcatgcagaagacgagcccggctccggctgctacccctccagctccagctcccgctcccgccgcgcaccatcagcaacgcacgctgccgagggcctgggacccgtcggtcggcgccgaggagatgaaccagcggttcgacgacttcatcaagaagaaccgcaactccttcggccggcaataggcgacctctgttacgatccgaccaccccggccacctccccgccatacgatgcgtatatacagtacaaggacacatgcatctttggttttccatcttggtgtgccgccagagctagcggagggaggcgggtcattcgattcgccatgcttaggattggagaatcactagagtaatagtatatacatggatgaattattggagatgtagagagcagctagatgtccttaatgcgctgaaatgatagttcgagttggtgcccggctgttagcttctccttttcagttgttgcccttgccggcctggcatttgttcaacctttcctttctctctctttctgctacagtcattattgtaggtgtggctgtgatcatgcataaactaactgttgttgccacatggatcggagagggagatcgatccacagggattttggtgcttatgtc

SEQ ID NO: 122358 - DNA, 116 bp, Zea Mays
atgcaccatgttggttctttgtttgttgcactagtatttgggatttctaaattaagcacatatttgttttcaaatttgaaattgaaataggaaatataaatagagaactaaaacag

SEQ ID NO: 122359 - DNA, 609 bp, Zea Mays
ttattgttttgttgtgtgtatgggtccgaaacacaaaatatgtcatttccttcaaaataacaggaccagcatcaaaaacaaaaaataaggactgttgtgtataacactgaaccatggaaaaaaaatctacactccaataccaagtagtggaaccaaatgattgtacaaccaactataatggatatatatcccacaccaatattaacaccgtggtcacacctgaactcctgaaccaatgattaaccttttcacgactgggtgcaccgcaggacaaaccaaaagcatgtacagcaaaacagcgaacagggtgaaaaatcgcaatatctcccctgtggcttgtgctagcaacccacagccaacccttcttttggggcagaggtgacgcactcttttgtagtagtagaggtcacacgaagaatggcttgggcacttaatgcggagagcttggactggcagaaagcctcccatgattcagcatctggcgaggcagaggcctcgacctcgtgttcgtcagaagttgaggcctgagacttctcatagaatgcttgcagttccagtgccaggttgcgagcagcctcccttgattcaggaagctggtcgctaagttgg

SEQ ID NO: 122360 - DNA, 164 bp, Zea Mays
cgcgctttggggatttagaatttatggaaaacattcaccagtatagcagtagagtggttggtcgggagctgtcgtgcaagcgagttgggccgcgaatcgcaatccggcccactaacccttccctaaccctagccgccgccccctttttcccccttgggttgttg

SEQ ID NO: 122361 - DNA, 159 bp, Zea Mays
atggcgtattacggtgtcgccaacgcggacgagagcggaaccatgcgcggaggacacggcgccgagggcgacggtggtggtgcgggcctctctcaggcggcgggcatcgatgcggacggactcacccaggtggcgctccaggaaggccaccgggaatag

SEQ ID NO: 122362 - DNA, 2186 bp, Zea Mays
caggcgctgaggcgcagacgagccgagccaagccgcgagacgggacacacacgagcgcacgtcccgaggccaactcgagagcgtggagagtcgagagcccaccacccgcgacctaacccggtgacctctctcccctcccaggctctcccacccacctttctcctctccttcattcctccccgtcccgcgtcgcgtcccacgccgccgcacctccgcggcagcgctactcctcgccgtgacgtcggggaggcctcgctcgggggagggctgcctgcctgcctggctgggtgtcagtcggccgtagaggaggaggggggcggaggagcttgatctggggcacctgccccccctcccctgcgccgtcgggatgtacatgccgccgccgccgcccaccggcggcgccggcgagcagcctaggctttaccaggtctggcggggaagcaacgaattcttcttgcagggaagattcatatttgggcctgatgtgagatctgtgtttctcactatgatcctcatcatcgcaccagtggttgtcttctgtctgtttgttgcaaggcatctcataaatgatttccccgatagctggggaatctcagtgatggtagtagtggttgtcttcactatttatgatttgacgttgcttctttgtacctctggtagagatcctggtataataccccggaattctcatcctcctgaacctgaatccattgatgggatcaacgacacgggtgttcagactccacaacaatttcgtttgcctcgcacaaaggaagtacttgtaaatgggatcagtgtacgggtcaaatactgtgatacttgcatgctgtaccgaccacctcgatgctcacactgttccatttgcaataactgtgtggaacggtttgatcatcactgtccatgggtcggccagtgcataggactgcgtaattatcggttcttctatatgtttgtattctcgacgacattgctctgcctctatgtatttgccttctgttgggtgtatgtgatcaagattagagctgctgagcaatcgtcagtttggaaggccttgctgaagacaccagcatcagttgctctgattatctactgttttctctgtgtatggtttgtgggtggtttatctgtcttccatttatacctgatgagcactaaccagacaacatatgagaatttcagatatcgctatgatcggcgcgataacccatataacaaaggtgttctgaacaattttctagagatattctgcactgctatccccccttcgaagaacaatttccgggcaagggtgacagcggggcaagggctgcagcaaacgcgctcacagtccaggggtttcatgagccccagcatgggcaagcccattggagatcttgaaatggacaggaagccagtagcaccttgggacgagccaaggacggcggctgatatcagggacttggaagcagggcttggggtcatgttcgatgagaaagagggcagggtagctcatgcatccccagatctgagcagagaccttccagcagagttcgtggaaggccgatctggtatgcactcgaggcagtcaagctgggttcagagaggagacgcaatcgaagcgtcggcggtgcaaatggctaatgcgcgcaccacggaagctagcaacaatgttgcctggagcggtacacattaacccaaaaaatgataaaaagaaaaggaggaactatggtgtgttggcgatgtctccaagtgaacccccgtgtgtttgttgccacgtgtgctgctccgggtaaggccctggatcattctgtaatgtataaatcctaagcacaagcttgctgctattgtttcatccctggtagcgtaccaggtccctgcggctgctgctgctgtcttgtgtgtgtttgtttgggtgacaaattgatgaagtggccgacgagcttaagctcccgccaggttcggatgatgtatacaaaattgttgtcaggttccaacggatgctgtgcttggtttgccacaccagcgctgcgtgctttgggtactcgcaagtggcatctgggcaccccgctcccatgcaaacttgttcttggtgtaagcctggaaatctgctctgtatggttggcattgttgtatttgcagatgtggacatggtacttgctagtgtagaagaatgacattgctgagaaattggcttggaactttttgca

SEQ ID NO: 122363 - DNA, 670 bp, Zea Mays
attagtgggttgagttgggtccaaggtttttatcgtcacgcgtcatcacaagcatactccatccagtacaatactgttggtctagccggcggcggccgcgtccctcatccagtcatcccctttccgcgatcaaaaccgagctagggttttaggtgcgggggagagggtgaggagcggacggaggcgcgccatggacaaccccgagatgcagcggttccttcagcaaaaggcgatgatgaacgagatggttggcaagctaacgagcgtgtgctgggacaagtgcatcactagcgctcccgggagcaagttcagttccggggaatcaacctgcctgaccaactgcgcccagaggtttctcgacatgagcgtgatgattgccaaacgctttgagatgaagtgaggcgtcgacgccgaaagctgttacctagtcaatcaccctgagttttttaaccctttgatttgaggttccattgagcacttcgaacgattcaacagagtttaatgtactttctatattgtatctactgcctcgttgggcaacgtgttgaagtgtgatttgagccggttgaaactggattatgtacactttctgtcctgagtttaactaaagtttagcccgtgtcacgtaaattgtttgaatatcaatatgggttaaatatagtattaatta

SEQ ID NO: 122364 - DNA, 679 bp, Zea Mays
attagtgggttgagttgggtccaaggtttttatcgtcacgcgtcatcacaagcatactccatccagtacaatactgttggtctagccggcggcggccgcgtccctcatccagtcatcccctttccgcgatcaaaaccgagctagggttttaggtgcgggggagagggtgaggagcggacggaggcgcgccatggacaaccccgagatgcagcggttccttcagcaagagcagcaaaaggcgatgatgaacgagatggttggcaagctaacgagcgtgtgctgggacaagtgcatcactagcgctcccgggagcaagttcagttccggggaatcaacctgcctgaccaactgcgcccagaggtttctcgacatgagcgtgatgattgccaaacgctttgagatgaagtgaggcgtcgacgccgaaagctgttacctagtcaatcaccctgagttttttaaccctttgatttgaggttccattgagcacttcgaacgattcaacagagtttaatgtactttctatattgtatctactgcctcgttgggcaacgtgttgaagtgtgatttgagccggttgaaactggattatgtacactttctgtcctgagtttaactaaagtttagcccgtgtcacgtaaattgtttgaatatcaatatgggttaaatatagtattaatta

SEQ ID NO: 122365 - DNA, 1308 bp, Zea Mays
attagtgggttgagttgggtccaaggtttttatcgtcacgcgtcatcacaagcatactccatccagtacaatactgttggtctagccggcggcggccgcgtccctcatccagtcatcccctttccgcgatcaaaaccgagctagggttttaggtgcgggggagagggtgaggagcggacggaggcgcgccatggacaaccccgagatgcagcggttccttcaggtgagaaccggttcctcgcgccttggcggtctggtgcgccgctgaagtttttctgtgtagtagcttcatgcgcagtgtagggggatgggcgggtggtcgatttgtcagtagatgtcgaactgtctcgttttgcgatcagtgttggatctgaagcctctcaagaggcagcatgaagggttgacggggcgagatgatttcacttggtcgtagggcgaggtgatttcacttggttctgactgttcagctggtgtgatagcctgctagtgctagatgatgactagaggtagatttgagattttaccttgcggtcggatctggctagctgcatagggtttgttgcttgttagctcacggaatcagatgctcatttgtgtcctccgtttaactagcggttcaaaatgtggttactgtgttaggtattataaggtgttcatcatccatagagtttgtcagtggatcgtgttactataataatactagtgatacttgaagcagaggcacttattctgagtgaacttcgaaaattgaacacaactctgatcttatctgccagagaacatgccctctttggttttgcccgttgtttgtaccctgcgacctaggaacttgaagttaggttatgttttcccttggtttttagtgggccagatttttcttggttgttggatcattaacataattttgattggatcagtttgctgtagttttgttagttaagtcaatattattagcttgcacatataagcaaaatttaggagctgagaacctagcttttctagtttacggggcttagctgtggcaatcatgcaagcttagaggccaactatgaaatttgctaggcattctccatgtagtttgcatagtttggtttatagcgatcaccgatcagatgtgttgactaaaataacaattaaagcaaatgtctaccaggtgttacctaattaggggatgtcgtaattagtcacttcacctcttagagaatagtcttagacctgcaatttaggttatgctactaagctttcacctacttggcatcttgacctgcgccactcttgtctcactagacatgttcctcttgatccctc

SEQ ID NO: 122366 - DNA, 4631 bp, Zea Mays
cagccgtccctcctctatctaccctctgcgcgcttcatctccctggccagagcttccctgcacgcgcgcctgctcccatgccgcgcgcccctcccctgctcactcctcttcttctcccacgcgcataggctcctccatttgcgcatctccctacgtccggccgagttctccacaccgtgctccactgctcggccaaccactgcccaagtccggccagccgaagtgctccatctcccagccaagctccgtgcacgcgcattctccctgcgcccagccgctcctctacttccctctctactcgccgtggagcttcctctgccggcgctctcttcctctcatttatctgtggctcgccggcgtcgagtccctgctcatcttcctccacgtgacgcgcgcccacccgagcagctccctggcgcgcgcccagatctttttcctccctgtgcccctctctctggctgctctctgcgccggatctccttctctggtgctcaccgactccttggctcaccccctcatctcgccgctcaccgagctccttgcgcgccatggccgccttgcttgctccctggccggcgtttggcttcaggctcgcccacgatgcccggcgtcctgcctgctctgctcgccgcgcccatgtcgagctcccctgcgcgctggtcgccgagtcctctccctgcttttcccctggtcgtcgcatcgctgtgcgcagcggaagcgtggtgggttttggtcgcgggcatggtcgtgcgacgcgggatctgggcatgccgttgtggactccccattgatgcgcctcctgtcctaactggaccatcctagcctgcgcacgtcatcgaatcgtcggattccatcccccatggcgcttccatttcctcgccattccacgtcgccagcttcgttccagttcactggccatctttctctccacgtcgtagttctgttaagggaaacgatgttgcttgagtagtggttaggatgtgtgtggagatgagcttgaagatgggactgtggatagggaagacagtgaagttccgtatgtcactcatcagatgttcgacgaaaaccccgaaccaaaaaaaatcatcggcgttcttgcaaatttgaaccgggtatagttcgggagaagtctaaggatgttaattggtaaagaagcgaggcccgtgtgcatcgctcatcaagtgctcggtcgaagacatcaatcgaaggtcgtcatcattcgtgtgatgatcgagtcaaattgcaatatggtacgataattaatcgtgtgatgcggaagacgacccaagtcgaccccaagatgatgtaacggctggattaatttcaaggtaatgcggatgatgatcctgaagatggatgacccgaacaagtgtcagaccaaaagctaatcgtcaagtgatcgacgtctaacaacactaacgtagtgttatccaggcaagccccggtacatttgccacctccttgctgttttaaaatctttatcacctgtttgatgcattaggtgataggagttgtgtgctaaacaattgatgcatttccttccatggaaaattgcttacccttccttgattcccttttatgaaaaggatttttatgatgcttagtcgtgctttagaaaaacaaaatgttttattttaaaacaaaaagtgatgcttcaaattggatgggaatttttacaaagaaaaacttgtgatggtggatccatcagggccttgatgggttcaatatcagaaaagatgtacctctgccatgtaccaaactttgggtttaaataataaagctgagacctggcgggtgacttgcacgagaaggaagtctcggtgtagtgtctccgtccgagtcaattaaggaccgtaccgatgtaggcttgatgatcgaggaccttttaactagtcacatgcctcatcatgggtaagctttgcctcgggcagactaataccagaaaggccaacatgcaatgggagtggagagatggcgagagtagcgtgtaccctccgtggcaagaggttggacggtggtgtatctgtgctctcggttggtgtgaacccggtatggtcttaagaaacccagtggcgagttgacatttgcaagggttaagggcgtgtttggtacctggcctaagccgccgccaccagccacacttttcccgccgcagttgtggcggccgatttggtcgccgcaacttaagtgtggcgtggcgtgcggcaccacacaccaaacacgccctaagtgctacatatgtcatgtgattggagatccccagctgggtattaatcgattcagattgccgttacttctcggatatgaagacttggtcactgacttacacgtagcaatccagtgaactgatgggatgataaaagacagctagtataggcgaagtgcttgaactaggatagaaagaactctagaggcaggtaactttacttaacctgacaagtaaaaatggatttttaaggatccactcatagtaagcttttctgcaaacagagtccttgattcttgataagccttaccttgaatccctttaaaactagcatacccttgagagtcttttctttagtcgggtaagtcttgctgagtacttgcgtacttagggttttattcccattgttgctgcaggttacgagtcactttgattgtgattggtgttaagcgctggtgggcacgaccttcttataagtctaagtacttcttctatacttcttattgaggactgtcactgagccagcatatatttcaaacttataaataatttataacagttcaaagtttattctttgaaccacttttgtaaccactccgataaatataatgtaaatttgttgtaacttgtaaaatttggtaataagatttccgctgcaaattgttggtgtgtgatttgtgtttacttaatcctgtggtcctagttgtaagtggtttatccggggtccatgggacactcgaacatatcctgttaagttatctggtgcacatgcatagccatctgaggtctttgagacaagggcaggtgcatatgggcccaattacttgggaggttctgccacacgatccacatggatcactcagggggctgcatttaacggatgcgctcgcgcgcaccggaagtcctgaacaacaacaaagtacagaattgcaacaggctagtgctctaagcgcgtcgaccatcgtaggaagggtccgctcctaaactgcactcccgccgagtggaccccatgcgacccacatggtttactcaggggcatggggacaacatccaacagcagcgcttgcgcgcacccaagatcccaaccacaggaggaagccaagaaattatggacccacgatcagcgcatggcgacaatcgcaggaggggtctgtccccaaactactccgtcactgagcaaacccccaacaatccttatggatcactcgggggctcaggggctacttctagcagatgcacttgcatgcaactaagcgtatagggcaccgagcataagcctccgtgcaactccaaggattcgcccaatggctcgggggctgttgtcggatacctaggaatggggtacccaaggtaaggcccataacctctttccggcccatttgtcgagcaagtctgcgaggcggacgaccaagtctccgtcaagcaagtccacgaggcggagcggacgaccaagaccccgcggagcaagtccgcgaggcaaggcgaacgacggagttcccaccgagtggacccacaaggaaggaaccccatcctgacgctgctggcccacgtcggctacgacaggacacaccatccttaggccacacccgggtaaatgtgcggcgcaccaaagtctagccgagcgaacgccatcagaacatgaactgtgcgcccctgcatacagacttaggcatgccatctctgtgttgttgggccagtcaagcccagccgtcgattgatctcagtaccaaaatcccaacaatgacccgaacacctggaaggtcattagctttcttatgctaatatcagatatcatcaaatctttatgacaaaaaagatacatctaaaatggcctttgtatatccaagctttattggtttatttgagtggggtgtcatgacttttgggctaaaaatgagagcgcaacttatcaaagggctatgaatttgattttaaatgagatattaggagacattgtcgaggtctactgttgggggcctttgtcttccgaaggtcctcaaaaacatgattaacaatgtttcccaagtgtaatatatgtacaggaaccttcagactcggaatgaagctatacacaatatgaaaaagcatggtcgggatgaaggttgaaccagctccgaagctacgcgcaaggaagcttcggatcagtagcagaaaaaggagccgacttaaagaggaaaaggctatctagtccttgatagattgtccttaagtcaatagtaaacatgaaggacatgaatgtaattttacacaggctacgccctgtgcctataaatagatgaacagtaccctcgtactgttcacgctgacttgtattcactcgtgcgtcacgcttggacttttgccttctgtcaagccgaatgtacaaatgtaattcaatattgttcatgttcattcatgatgatataaaaaagatatattagtaatg

SEQ ID NO: 122367 - DNA, 777 bp, Zea Mays
atgagccgagccctcaaggaacatgcccaggtagtagccgcgggtggtgtgggtgggcagctcgtgcaacgacagactgtgcctcctaccgatgaactcgctcaccttgctgtcgctgtcgcaggtgaggttcgagaggaccccatcagagacagtttttgcacaagattgcccagaacacctgtgtattacacttcaaatagagcagtgtgtgacgaaaatgacaataaacctgtggggctggcgaccgaggccgaggccaccacgccggaggtacgcctggcccggcacacgcccgcgggggactccacgacgaagctggcgaacggcgcgacgagatcatcgaacgcctccttgagtagctcgaccttctcaggtgggaggtcaacggtcgactctgcgccaaccaggaggccctccacctgcggcggcagatccagcacgacgacgcggaggcacacagaaagctccggcgagatggcgctcaacctggcaacgttcctcggcgtggacacgaaggttatgaaggccattttgaagactcctccaagtgtggtgaagaaaagcgccttggttgccgagaaggatgttgaagcagctttaactgtcgaggcaggtgaagaagccaaagacagaggaggtcccttcaggaccactatggctgcgattgagaggataattgtggaatcaacttctatggagcctgacaaagctactgaagagacaactattgtggctaagattacaaagctaaaaaagttatggcgaaggcactag

SEQ ID NO: 122368 - DNA, 291 bp, Zea Mays
tgtgctaagaaaccacactgcattggcataggtgactattgaagaccatcctcacttattggctgggaagcatgcatcagtgcacccatgcaaacatgcagctgtgatgaaaaagatcatcgacgttccaatgtcggggggagtggaaccagaagttgacaagtaccttttcatatttttgaaattcatagcgacagtcataccaactatcgagtacgattatacaatggacgtcgaccttggcagtacaagctgattattggttggcttgaaggtaaagcatgagctctt

SEQ ID NO: 122369 - DNA, 381 bp, Zea Mays
atggggctgcacacaacacaaagctccatacaaccatttcatcgaacacctagagcgctccgaacgggatggacgacgtcgtgggacggggctgctgctgttgcagcagaggaagggcgagctcaccatggtgaagctgcaggcggccatgggaagaggtggagcagtgagaggcgacttgaggtgagggcgccatggcagtgcaggggagggcgtcaagctgcagcagggagggacggccatgggagatggggcgaaatccagggcagggaagagagggcgctgaccagccatccagagaggaggcgtccatggggaagagcagggcgaccggttgtaggagatggggagggctggtcattggaggcctggagaggatga

SEQ ID NO: 122370 - DNA, 267 bp, Zea Mays
tctctatccattttttggcaccataaacgagccaatcgtatcaaaaattttatccaaagcaatctaaagccacctctcgagtgcagggatgtcaaggtttgcaagttttccacgctcaccactttaaatttcattgatattatatatggattagctggttcatattttcattgctacaatgttattgctactacttatccacttcatcatacgaaaaataaaataattaactacgaatctgagaatcatcaaccaaaaagaaaaaaa

SEQ ID NO: 122371 - DNA, 940 bp, Zea Mays
atgtgtgctgactgtggtgcttcagaacctgattgggcatcattaaaccttggcgcacttctatgcatagagtgttctggggtgcacagaaatcttggagtgcatatatcaaaggttagatctctgacacttgatgtcagagtttggggagccatctgtaatcaatctctttcagtcattaggcaacatgtttgtcaacagtatttgggaagagacgctgccagatgataattcaagtgctgatggatcagacacatcacagtacctctctgttagcaagcctaaacacaaagatgtattctctgccaaggagaagtttattcatgccaagtatgtaaacaaagaattcttacggaaccgtagcatggatgagaatcagctagctcagcagatgtggaatagtgtagctgcaaatgacaagaaagcagcatacagtctcattgtgagatcacgcgccaatgtaaatttagttcatggagagatacattctagcccatttttgactctcggaaaagcacttcagcaagagcaaccggcttcaccacctgttggaagtcctagatttttcgattgcaactcgcatgacaagatttctcgagagcccctttcccctgctagcacgagttcatgcagagatggcatggaggacggttgcgaaggtctctccttgctccatcttgcatgccgtgttgcagatgttgggatggttgaattacttttgcagtatggtgctagtgtaaacatgaatgattctatgggtcggacaccccttcatcactgcattctgaaaggaagacatcggcatgcaaagcttctcctctccagaggtgctgattcacaagccatggatcgagatggtaggacagcattacagtatgcaatcaatggcggaacaagtgacgaagacattcttgcgttattacaggatcatagtagataa

SEQ ID NO: 122372 - DNA, 1576 bp, Zea Mays
aaaacgacacggacgtatttccgcttccacctgcgccgagatctcggaagaggattcagaagaagcaggcttccgctgctgcttcccccactcgaatccaagcaaccacgcccccacgcccagtccaaccccaacccgcgaagctggcgcgcgaggcggccgacgcgagcgcccgcaagcgcaaggcgggggacggcggcgaggtccccgacgccaccgcctcggcagaggtggccgcagcgccgacccccggagaggacgcggccatgggcgacgttccacaggcgccgcacgctgcgggaggtggagaagagtgggcggggccggaccctaaccctagcccgagcctcggcggctgctcggaccccgtgtcggtggagctctccatgggcggggactactaccgcgcctgctgcggcgagcccgatcccgacatccccgaggggcccaagctgccgtgcgttggggacaaggaacctctctcctctttagcagctgagtttcagtctggcagccccattttacaagagaaaattaagttgcttggcgagcaatatggtgctttaagacgtacacgtggagatggaaactgcttttatcgaagctttatgttttcctacctggaacacatcctagagacacaagacaaagctgaggctgatcgcatcatggtaaaaattgaggaatgcaagaaaacactcctctctcttggatatattgagttcacttttgaggacttcttttcgatattcattgaactgctggaaagtgttctgcagggacatgaaactcctatagggcctgaagagcttctagaaagaaccagagatccacaagtttctgattatgttgtcatgttctttaggtttgtcacttctggtgaaattcaaaggaggtctgacttctttgaaccgttcatatctggcttgacaaattcaaccgtggttcagttctgcaaggcttctgtggaacctatgggtgaggaaagtgaccatgtgcacataattgccctatcagatgcactaggcgtaccaatccgtgttatgtacctagaccgaagctcgtgtgacactggcaacctgagcgtgaatcaccacgatttcatcccgtcggccaatgattcggagggtgatgcggccacgacacctgctcctgccacagagaaaccgtacatcactttgctctaccgtcctggccactacgatattctctacccaaagtgaattttgcgcatggttagtttcacgacttcggttgagaaagcacactgcccagaaaactcgtcatgtttcgcctgtgtgctgccaaaggtggcaaacttgcttttgagtgcttaatgccaatgccctcgttcaatctagatgttctctacctgctgtaagtcttactctggtacaaggatttaacattgtgttgactgcagagaagttcccgtggatatttgctactcatcagttattcgttcatgttttttttttcttttaccttgatctgtcgttgcaaaccaagttcataaagtttaaacctcgttgaggaatgctagtctttcatcgatgcatgaatacctgtcaaaaca

SEQ ID NO: 122373 - DNA, 1069 bp, Zea Mays
gttctaattatcatggtcgtttccatgctaattattatgcatcttgtaaatgttgcaggaacctctctcctctttagcagctgagtttcagtctggcagccccattttacaagagaaaattaagttgcttggcgagcaatatggtgctttaagacgtacacgtggagatggaaactgcttttatcgaagctttatgttttcctacctggaacacatcctagagacacaagacaaagctgaggctgatcgcatcatggtaaaaattgaggaatgcaagaaaacactcctctctcttggatatattgagttcacttttgaggacttcttttcgatattcattgaactgctggaaagtgttctgcagggacatgaaactcctatagggcctgaagagcttctagaaagaaccagagatccacaagtttctgattatgttgtcatgttctttaggtttgtcacttctggtgaaattcaaaggaggtctgacttctttgaaccgttcatatctggcttgacaaattcaaccgtggttcagttctgcaaggcttctgtggaacctatgggtgaggaaagtgaccatgtgcacataattgccctatcagatgcactaggcgtaccaatccgtgttatgtacctagaccgaagctcgtgtgacactggcaacctgagcgtgaatcaccacgatttcatcccgtcggccaatgattcggagggtgatgcggccacgacacctgctcctgccacagagaaaccgtacatcactttgctctaccgtcctggccactacgatattctctacccaaagtgaattttgcgcatggttagtttcacgacttcggttgagaaagcacactgcccagaaaactcgtcatgtttcgcctgtgtgctgccaaaggtggcaaacttgcttttgagtgcttaatgccaatgccctcgttcaatctagatgttctctacctgctgtaagtcttactctggtacaaggatttaacattgtgttgactgcagagaagttcccgtggatatttgctactcatcagttattcgttcatgttttttttttctttta

SEQ ID NO: 122374 - DNA, 1418 bp, Zea Mays
aaaacgacacggacgtatttccgcttccacctgcgccgagatctcggaagaggattcagaagaagcaggcttccgctgctgcttcccccactcgaatccaagcaaccacgcccccacgcccagtccaaccccaacccgcgaagctggcgcgcgaggcggccgacgcgagcgcccgcaagcgcaaggcgggggacggcggcgaggtccccgacgccaccgcctcggcagaggtggccgcagcgccgacccccggagaggacgcggccatgggcgacgttccacaggcgccgcacgctgcgggaggtggagaagagtgggcggggccggaccctaaccctagcccgagcctcggcggctgctcggaccccgtgtcggtggagctctccatgggcggggactactaccgcgcctgctgcggcgagcccgatcccgacatccccgaggggcccaagctgccgtgcgttggggacaaggaacctctctcctctttagcagctgagtttcagtctggcagccccattttacaagagaaaattaagttgcttggcgagcaatatggtgctttaagacgtacacgtggagatggaaactgcttttatcgaagctttatgttttcctacctggaacacatcctagagacacaagacaaagctgaggctgatcgcatcatggtaaaaattgaggaatgcaagaaaacactcctctctcttggatatattgagttcacttttgaggacttcttttcgatattcattgaactgctggaaagtgttctgcagggacatgaaactcctatagggtttgtcacttctggtgaaattcaaaggaggtctgacttctttgaaccgttcatatctggcttgacaaattcaaccgtggttcagttctgcaaggcttctgtggaacctatgggtgaggaaagtgaccatgtgcacataattgccctatcagatgcactaggcgtaccaatccgtgttatgtacctagaccgaagctcgtgtgacactggcaacctgagcgtgaatcaccacgatttcatcccgtcggccaatgattcggagggtgatgcggccacgacacctgctcctgccacagagaaaccgtacatcactttgctctaccgtcctggccactacgatattctctacccaaagtgaattttgcgcatggttagtttcacgacttcggttgagaaagcacactgcccagaaaactcgtcatgtttcgcctgtgtgctgccaaaggtggcaaacttgcttttgagtgcttaatgccaatgccctcgttcaatctagatgttctctacctgctgtaagtcttactctggtacaaggatttaacattgtgttgactgcagagaagttcccgtggatatttgctactcatcagttattcgttcatgttttttttttctttta

SEQ ID NO: 122375 - DNA, 1431 bp, Zea Mays
aaaacgacacggacgtatttccgcttccacctgcgccgagatctcggaagaggattcagaagaagcaggcttccgctgctgcttcccccactcgaatccaagcaaccacgcccccacgcccagtccaaccccaacccgcgaagctggcgcgcgaggcggccgacgcgagcgcccgcaagcgcaaggcgggggacggcggcgaggtccccgacgccaccgcctcggcagaggtggccgcagcgccgacccccggagaggacgcggccatgggcgacgttccacaggcgccgcacgctgcgggaggtggagaagagtgggcggggccggaccctaaccctagcccgagcctcggcggctgctcggaccccgtgtcggtggagctctccatgggcggggactactaccgcgcctgctgcggcgagcccgatcccgacatccccgaggggcccaagctgccgtgcgttggggacaaggaacctctctcctctttagcagctgagtttcagtctggcagccccattttacaagagaaaattaagttgcttggcgagcaatatggtgctttaagacgtacacgtggagatggaaactgcttttatcgaagctttatgttttcctacctggaacacatcctagagacacaagacaaagctgaggctgatcgcatcatggtaaaaattgaggaatgcaagaaaacactcctctctcttggatatattgagttcacttttgaggacttcttttcggcctgaagagcttctagaaagaaccagagatccacaagtttctgattatgttgtcatgttctttaggtttgtcacttctggtgaaattcaaaggaggtctgacttctttgaaccgttcatatctggcttgacaaattcaaccgtggttcagttctgcaaggcttctgtggaacctatgggtgaggaaagtgaccatgtgcacataattgccctatcagatgcactaggcgtaccaatccgtgttatgtacctagaccgaagctcgtgtgacactggcaacctgagcgtgaatcaccacgatttcatcccgtcggccaatgattcggagggtgatgcggccacgacacctgctcctgccacagagaaaccgtacatcactttgctctaccgtcctggccactacgatattctctacccaaagtgaattttgcgcatggttagtttcacgacttcggttgagaaagcacactgcccagaaaactcgtcatgtttcgcctgtgtgctgccaaaggtggcaaacttgcttttgagtgcttaatgccaatgccctcgttcaatctagatgttctctacctgctgtaagtcttactctggtacaaggatttaacattgtgttgactgcagagaagttcccgtggatatttgctactcatcagttattcgttcatgttttttttttctttta

SEQ ID NO: 122376 - DNA, 1648 bp, Zea Mays
aaaacgacacggacgtatttccgcttccacctgcgccgagatctcggaagaggattcagaagaagcaggcttccgctgctgcttcccccactcgaatccaagcaaccacgcccccacgcccagtccaaccccaacccgcgaagctggcgcgcgaggcggccgacgcgagcgcccgcaagcgcaaggcgggggacggcggcgaggtccccgacgccaccgcctcggcagaggtggccgcagcgccgacccccggagaggacgcggccatgggcgacgttccacaggcgccgcacgctgcgggaggtggagaagagtgggcggggccggaccctaaccctagcccgagcctcggcggctgctcggaccccgtgtcggtggagctctccatgggcggggactactaccgcgcctgctgcggcgagcccgatcccgacatccccgaggggcccaagctgccgtgcgttggggacaaggaacctctctcctctttagcagctgagtttcagtctggcagccccattttacaagagaaaattaagttgcttggcgagcaatatggtgctttaagacgtacacgtggagatggaaactgcttttatcgaagctttatgttttcctacctggtagtatctgcagtgtacttttcacaagtatattatatcttgcatttctcagtacggtgttcataattgtggcgacaatcctatcttatgctgtcttcagcagcttacccattctatctcccatttcatcttctatttcaaactccactcggtgaacaatacagtctatagtgcaaaatagtgttttgcacaccatatgcacgatctactgaagacggccttatatttgcttccaggaacacatcctagagacacaagacaaagctgaggctgatcgcatcatggtaaaaattgaggaatgcaagaaaacactcctctctcttggatatattgagttcacttttgaggacttcttttcggcctgaagagcttctagaaagaaccagagatccacaagtttctgattatgttgtcatgttctttaggtttgtcacttctggtgaaattcaaaggaggtctgacttctttgaaccgttcatatctggcttgacaaattcaaccgtggttcagttctgcaaggcttctgtggaacctatgggtgaggaaagtgaccatgtgcacataattgccctatcagatgcactaggcgtaccaatccgtgttatgtacctagaccgaagctcgtgtgacactggcaacctgagcgtgaatcaccacgatttcatcccgtcggccaatgattcggagggtgatgcggccacgacacctgctcctgccacagagaaaccgtacatcactttgctctaccgtcctggccactacgatattctctacccaaagtgaattttgcgcatggttagtttcacgacttcggttgagaaagcacactgcccagaaaactcgtcatgtttcgcctgtgtgctgccaaaggtggcaaacttgcttttgagtgcttaatgccaatgccctcgttcaatctagatgttctctacctgctgtaagtcttactctggtacaaggatttaacattgtgttgactgcagagaagttcccgtggatatttgctactcatcagttattcgttc

SEQ ID NO: 122377 - DNA, 622 bp, Zea Mays
gcaaaacgacacggacgtatttccgcttccacctgcgccgagatctcggaagaggattcagaagaagcaggcttccgctgctgcttcccccactcgaatccaagcaaccacgcccccacgcccagtccaaccccaacccgcgaagctggcgcgcgaggcggccgacgcgagcgcccgcaagcgcaaggcgggggacggcggcgaggtccccgacgccaccgcctcggcagaggtggccgcagcgccgacccccggagaggacgcggccatgggcgacgttccacaggcgccgcacgctgcgggaggtggagaagagtgggcggggccggaccctaaccctagcccgagcctcggcggctgctcggaccccgtgtcggtggagctctccatgggcggggactactaccgcgcctgctgcggcgagcccgatcccgacatccccgaggggcccaagctgccgtgcgttggggacaaggtgagagagggagggagagcgagccctctgtctcccaccatcctcacatgtccgcgatcgggtattggttagcccgccgtatggtgggatgggtctccatcacgctttagtgttttacaggcctgcacctgatctagtggaaatatg

SEQ ID NO: 122378 - DNA, 118 bp, Zea Mays
ggtctcggtgaaattgtttaaaggttgtgtgtggctaatcgcagctagccgtcaatcgccattcgtcgcgcacgcgcgttcgatacaagaccggtcgggtgaaccacgtgcttgcata

SEQ ID NO: 122379 - DNA, 1017 bp, Zea Mays
atggccgcaagcaccgcgcggtggcaactgctggccggccaggtgaaacggcaagcgtcggggttcctgcaggacaagtacaagcaggcgaggctggcgctgggcgacgtgacgccggcagagctgctggcccaggaggcaaccaacaacgagccctgcgtccccgacgccaagaccctggcgtgcatcgccgactcggccttcgacatggacgacttctggaggatcgccaaggtgctgcaccagaggctgagccgcgctgccgactggaaggagtggcgccccgtgtacaaggcgctggtggtcctcgagttcctgctcacccacggccccgaggacgtgccctccgagttcctagctgacatgcgcgccatgcacgacctccgcagcttcaactacgtcgacgacaagggcttcaactggggcacctgcatgcagcgccggaccgacagcgtcctgttgctgctcacagacgccgaccgtctcagagaggcgcggcgcagggccattagagtctcccacgaggtgcgcggtggcggcgttggcggcggcagcccgacgtcgtcgtcctccccgtcctcggcctcgtcctccgcctcctccaggacctcgcgcacctggtccttcggcgggtcctcccactactccgatggccctgccatgtgcctcacctgtgcctccgacgccgactaccgccacgacaagaaatgcgacgcgtacacagccgacgacgactgctgggcctcgtcgaatcacaagagcagcaggtgggcggccaggttggacgaaagcgacggcgaggaccagcaccagggcctcatggacgacgcctgggacgcccacttggtggaggacagcaccagcacttggtccgccaggttgctcggttccttgtccttgagcaccagcagggcgtcaggcttccagagtctgtcgcaaccggagcagcgaaggtcatccaagaagctgcaggggcagctccagcgccagctttccgccgattacacacgtccttga

SEQ ID NO: 122380 - DNA, 1087 bp, Zea Mays
ctgcccggtcagaatcattgattgatgtgtttgttggattagtcaagatctctcactgattcgcagcatccccctctgtttctccatgatctgttccttctcctggctgttctccagttgacttgctccatcgcctctccacgactagaggagggaggaggggagctctgatcgattcacccaagatgtctgaggtggtggcgatggcggggcaggcctacatgaagcagctgcaggcccacccgctgcgcaccaaggctatcacctccggcgtcctggccggctgcagcgacgccgtcgctcagaagatctccggtgtttccaagctccaactcaggaggctcctcctcatcgcgctatatggatttgcatacgcgggaccgtttggacatttcctccacaagctcatggataggtttttcaagggaaagaaaggaaaagaaactacagccaagaaggtcttagtagagcagctgaccgcatctccatggaacaacatgatgtttatgatgtattttggtctggtggttgaagggagaccatttggacaagtaaagaacaaggtgaagaaggattatgcatctgtccaactcacagcttggaggttctggccaattgtaagttggatcaactatgagtacatgccactccagctccgagttcttttccacagctttgtcgcctcctgctgggcggtgtttttgaacctcaaggcagcaagatcgatcgcaaatactaagaaggcatagaggcagctatctataccaggagcggaagtcatgatttgagttgaaaaccagtatatattctagacttccgttgtaacacctgaattcttttccagcaggagaggaaccgagtcgtattgtttgccatgaaaagtttgctccttttcatttccatagctgctgttctctcttcatttcgaaaaaaaatgttgtttgctcgcctcgtcgaagtgatcacgtgtacttctagttctagtggaacttagtttgtgcagaaagaatatgtactcgctaacttgtatctaaagcatatatgtttttcacatcgaataactggattgcattcagcccgattcaaa

SEQ ID NO: 122381 - DNA, 901 bp, Zea Mays
ggtcagaatcattgattgatgtgtttgttggattagtcaagatctctcactgattcgcagcatccccctctgtttctccatgatctgttccttctcctggctgttctccagttgacttgctccatcgcctctccacgactagaggagggaggaggggagctctgatcgattcacccaagatgtctgaggtggtggcgatggcggggcaggcctacatgaagcagctgcaggcccacccgctgcgcaccaaggctatcacctccggcgtcctggccggctgcagcgacgccgtcgctcagaagatctccggtgtttccaagctccaactcaggaggctcctcctcatcgcgctatatggatttgcatacgcgggaccgtttggacatttcctccacaagctcatggataggtttttcaagggaaagaaaggaaaagaaactacagccaagaaggtcttagtagagcagctgaccgcatctccatggaacaacatgatgtttatgatgtattttggtctggtggttgaagggagaccatttggacaagtaaagaacaaggtgaagaaggattatgcatctgtccaactcacagcttggagggtatgctttttctgttggggaatcgatgcatcaatccatggtttattttctagtgactttgggggttttttttgttttttgtttttttgtgcagttctggccaattgtaagttggatcaactatgagtacatgccactccagctccgagttcttttccacagctttgtcgcctcctgctggtaacacctactatatgtttagcagttagcatcttgtcgtgccgttttggcttgtgagaattatgcttgacttttgtttgaattttctattacagggcggtgtttttgaacctcaaggcagc

SEQ ID NO: 122382 - DNA, 1351 bp, Zea Mays
acctttttctcaaccccgtctctctcgcgtctgtctattccttggagccgtccgccgccagccgcccccgccgcccacgccaccggccacccccgccgcccccgtccgccgcggacgccccagccccttccgtcgcggccgcgaccgcccctgcctcggcccgcctaccagaggtcctcctccttcggggacgatgtcgtcgtcgtcgcataagcgcattccagaaagcacatgattgtcttctgcccatgggaattacttctaaaaatattgcccatcgatatggtgtaaccaggcaagagcaagatcagaccgccgcaattccagtcaagtgagtgatggtgctggagctgttcttctcatgaaaagatctgtggctcttaagaaagggctgcccattcttggtgttttcaggttgcccaatctgccctatcatgattagtccacgttgtgtttgtcgtcgattttcagacacattttgctcaattcctttttacatttaacgctgcttggcatcgtatattaggagctttgccgctgttggagtggatccagctgatatgggcgttggtcctgctgtggccattcctgctgctgtgaagtttgcaggccttgaaattggagacattgatttgtttgaactgaatgagccctttgcctctcagtttgtctattgctgcaacaagttgggactggaccgttctaaagtaaatgtaaatggaggcgcgattgcccttggacaccctctggatgcaacaggtgcccgatgcatggctactcttctaaatgaaatgaagcgccagggcatagactgcagatttggtgttgtcaccatgtgtatcgattagtcttacttatcagttatcacatactaacgtgtataggcaaagcatgtcaacgcatagatgtaatttgatcttctgtagttgaccatgatgcgtcgtaacaattgcaggatctggaatgggggcagcagctgtgttcgagctgtgttcagcccgactggaggtatcgaccatcacttatcaccgtaacccgatggtgatcggcgaccgtgagcttccatgttattgtgttctgatacttgagacttttattatgactatgtatgagatattgtctcttattagtactggatgatgagatgtgtcttattatgactatggatgagacttttgtgatgtaattgatgagacaatggatgggacttttgtgatgtaattgatgagactatggatttaaatattgttatgtgattgtgtgtgatatgttttatgtgaaaatatgttgtgctatatagctgttgatatatttgttatgttgtggaatgtggtgtaaaataaaaataaac

SEQ ID NO: 122383 - DNA, 1016 bp, Zea Mays
acctttttctcaaccccgtctctctcgcgtctgtctattccttggagccgtccgccgccagccgcccccgccgcccacgccaccggccacccccgccgcccccgtccgccgcggacgccccagccccttccgtcgcggccgcgaccgcccctgcctcggcccgcctaccagaggtcctcctccttcggggacgatgtcgtcgtcgtcgcataagcgcattccagaaagcacatgattgtcttctgcccatgggaattacttctaaaaatattgcccatcgatatggtgtaaccaggcaagagcaagatcagaccgccgtgagttcctcattaagcatcaactgcaattccagtcaagtgagtgatggtgctggagctgttcttctcatgaaaagatctgtggctcttaagaaagggctgcccattcttggtgttttcaggagctttgccgctgttggagtggatccagctgatatgggcgttggtcctgctgtggccattcctgctgctgtgaagtttgcaggccttgaaattggagacattgatttgtttgaactgaatgagccctttgcctctcagtttgtctattgctgcaacaagttgggactggaccgttctaaagtaaatgtaaatggaggcgcgattgcccttggacaccctctggatgcaacaggtgcccgatgcatggctactcttctaaatgaaatgaagcgccagggcatagactgcagatttggtgttgtcaccatgtgatctggaatgggggcagcagctgtgttcgagctgtgttcagcccgactggaggtatcgaccatcacttatcaccgtaacccgatggtgatcggcgaccgtgagcttccatgttattgtgttctgatacttgagacttttattatgactatgtatgagatattgtctcttattagtactggatgatgagatgtgtcttattatgactatggatgagacttttgtgatgtaattgatgagacaatggatgggacttttgtgatgtaa

SEQ ID NO: 122384 - DNA, 892 bp, Zea Mays
ctaaccacccgaccaattcccctagcttcagctgcgcgcttctcttttctctcctatacgttctaggttcgttgctgttcgagcggggtaagcttagccagcctctagcaagagcaagagcaagggcaaagggcatggcggcggctgtctccttctcccgggtgcgagctctcccgacgtggtccagctcggtttccggcgacgaccaccacgcctactccgtgttggcgacgtcgtcggtgtcagccagacctcggtctggcgcgcgaccgctgcggtcgccggcgcagatgatgggcaacgtgaacgatggcaaggggctgttcgcaccgctcgtcgtggtggcgcgcaacatcattgggccgcaaacgcttcaaccagctgagggggaaagcaatcgcgctgcactcgcaggtcatcaacgagttctgcaagaccatcggcgccgactctaagcagcggcagggcctcatccgcctcgccaagaagaacggagagaagctcggattccttgcctgatctgatgatcgacgcccacgatgacgatgctaatatatatatatatatatatatatatatatatataacaatactaatataagtacaccatcttcaagtagtgacgaacaatgatacctttcttgcttatcccaaattctcttttaagtggtagctatagtacgttccttgatgtaacgatgcttcaattcagcctcagatgtttgtttgtcgatcagctctcagctatctgctttctgcttgcttgcttcattattcatgcggaaattcagtttcagacgattggtttgtcttgtcaactgaatgaccatgcatctcaaaatgttggcaagagcactgtcatgtcatataaagagagagaagcggtcttagt

SEQ ID NO: 122385 - DNA, 510 bp, Zea Mays
atggcggcggctgtctccttctcccgggtgcgagctctcccgacgtggtccagctcggtttccggcgacgaccaccacgcctactccgtgttggcgacgtcgtcggtgtcagccagacctcggtctggcgcgcgaccgctgcggtcgccggcgcagatgatgggcaacgtgaacgatggcaaggggctgttcgcaccgctcgtcgtggtggcgcgcaacatcattgggccgcaaacgcttcaaccagctgagggggaaagcaatcgcgctgcactcgcaggtcatcaacgagttctgcaagaccatcggcgccgactctaagcagcggcagggcctcatccgcctcgccaagaagaacggagagaagctcggattccttgcctgatctgatgatcgacgcccacgatgacgatgctaatatatatatatatatatatatatatatatatataacaatactaatataagtacaccatcttcaagtagtgacgaacaatgatacctttcttg

SEQ ID NO: 122386 - DNA, 1670 bp, Zea Mays
ccttggccagatcgtctcgccaaccgaccatatcgcaggagcattcaatgcaaggatcacctgacaccttatcctgacgcacgttcctcagtcgacagggccgaagtgaccgcagtcacttcacccctccactgactggcctgacaggaaaacagcgtcgcctgccctactccgactgtcgtgccacccgccagggtgaggctgacagcagccgagtccagcctcaggcgccataggaagctccgcctcgcccggccccggggctcggccccataagcgctaacttaagggttgtggtattacgcctgatatgatttaacgtgccgatgaattactctcacgataactggtcagcaattctggcccatattggtaagcccgaagaactggatacttcggcacgtaatgccggggctctaacccgccgccgcgaaattcgtgatgctgcaactctgctacgtctggggctggcttacggccccggggggatgtcattacgtgaagtcactgcatgggctcagctccatgacgttgcaacattatctgacgtggctctcctgaagcggctgcggaatgccgccgactggtttggcatacttgccgcacaaacacttgctgtacgcgccgcagttacgggttgtacaagcggaaagagattgcgtcttgtcgatggaacagcaatcagtgcgcccgggggcggcagcgctgaatggcgactacatatgggatatgatcctcatacctgtcagttcactgattttgagctaaccgacagcagagacgctgaacggctggaccgatttgcgcaaacggcagacgagatacgcattgctgaccggggattcggttcgcgtcccgaatgtatccgctcacttgcttttggagaagctgattatatcgtccgggttcactggcgaggattgcgctggttaactgcagaaggaatgcgctttgacatgatgggttttctgcgcgggctggattgcggtaagaacggtgaaaccactgtaatgataggcaattcaggtaataaaaaagccggagctccctttccggcacgtctcattgccgtatcacttcctcccgaaaaagcattaatcagtaaaacccgactgctcagcgagaatcgtcgaaaaggacgagtagttcaggcggaaacgctggaagcagcgggccatgtgctattgctaacatcattaccggaagatgaatattcagcagagcaagtggctgattgttaccgtctgcgatggcaaattgaactggcttttaagcggctcaaaagtttgctgcacctggatgctttgcgtgcaaaggaacctgaactcgcgaaagcgtggatatttgctaatctactcgccgcatttttaattgacgacataatccagccatcgctggatttcccccccagaagtgccggatccgaaaagaagaactaactcgttgtggagaataacaaaaatggtcatctggagcttacaggtggccattcgtgggacagtatccctgacagcctacaaaacgcaattgaagaacgcgaggcatcgtcttaacgaggcaccgaggcgtcgcattcttcagatggttcaacccttaagttagcgcttatgggctcggcccccgcctcggcctcggaaggtgatctctacctcgcccgaccccaaggcttg

SEQ ID NO: 122387 - DNA, 729 bp, Zea Mays
cttgctctttttttgttgtaaatattttgccataatttgtgtatttgttgtctgctgtccactacggttttggtaatgaacatatgctatgactagatgctatgatgcgaatttagttcagatccctgttgaagttgagacgcctgatcatcattattaccatctggcatttttcacgaacaagaaagtagaggcatttgaagagctaacatgggattatggcattggttttgatgatacggaagggcccagtaaaccattcagatgcatgtgtggaagtagatattgccgcgatccgaataatctgaggaggatggctagagcagctgcaaagcggaagtaggcggggaagctgaacttggttggagattagcacatcaacttttgctgtggtatttggttccgtatttgatgtgcagcagcatcacatcagttagtacttagtattagtgtagatagatggagatgagggcggatgttttggacccttgcccgtggctgagcaacacgattgcgaccttaacctacggcatattggcatgtaaattagcctgggattgagtaggcgtagaaagaacgcgtaatagtacttagttatgtcatgtcatcttggtagagggcaagttaaattacatgccatgtcgttgcatcatctatgccatgctgggttggatgcttgtgctgaatgatttgttgaagcgactagcctaggcacttgtttttggcggt

SEQ ID NO: 122388 - DNA, 2946 bp, Zea Mays
cttgttgccttcctttgttgttggttggggggacctgggaagaagagagaaaccccagcagacgccagaggaagagagaaaaccccaagtcctcctcgcctcttccgcctttcctcttcccccttcctagtatagacaatcatcaatctgtgagattggcgagcgaatcacgcatacaactgtaggatggagcggggaatgaatgcctcccctgattgcagttaatccttcccattccagtccgttcctcgtccactggagtccgttgaagtacaggctgcagtaggacagggagcaaccgccaccatagctgttcgccatttcttccatcaacaccaacatgagcagcaacaaggaaagggccaagaaggcattgaacgccatgaagctgcttggtttctctaagaagcaggccaccccagtactcaaggaactcctcaacatcttcaacaacaactgggagcccattgaggatgagtgctatcgtgccctcgctgatgccatcctcgataggcaagacaacaaacaaacccctccctcccaacagggcaaccaagcagcacatgcgcactcggagcacgatcggcaacaatatgtttctgctattcacgatgacagaggcgaagatgataatgaaacgcccctggtgaagaggcccaggatgggcacggctaatttcagggcagagttgcagccatttgagtctggaccacagcaacccactgtttcaacccaaggtgctctgtctgtttcgccacaaaacagtcgtggagtaactaggtccttgactgtagtgctgcaagatgctgggtgtgaatatcctttagctgtcgatgattctttcatcgtgaaagaacccaaaccagaaccacaaattgatatagcagaaatcaacattggtgaccatttaactgaaccacaagttgatatagcagaaatcagtgtcggtgaccatttaactgatcgagattttctgactggtcctgatgccatacagctcagtgatggatcttcaggttctggtgcaagaggcagcatggtcaaacaagctcaaagtctgggtaggagcaagcaaaaagccccattgtgcaagaatggggtagggtctatgattcaaaatactcaggagacatcgtttgtggaggtggatgttgcttcttccgccaatggcgaggtgaagatgtcattgaaatgcagcttggaatcttcgaatttcagcattagtatggaggaggttttcaaaatggttgaggagaaatgccttcactcatacaaggtgctacctccagatttttctattggcaagctgatgagtgaggtatgccaatctgttgtgcagttgggcactatgcattctgaggttaatagggacagtggcagcttgcataatgaagtagttgctccttttgtgaagccaattgcttgtgaggctgctgtggacataaatgataatgtggctggtggatcatcagtgcttgattcctcagaaccttgtttgcaaaattcgcttgttgcttgggatcctgagtttgctcattgtaagcaaaaaacaacccatgataccactgatatatccaaaggggaagagcgggtaagaatacctatagtaaatgaatttggcagcgagaaatgtcctccatccttttattacgtaccaagaaatcttgtcttccaaaatgcttatgtcaacatctcgattgctcggattggtgatgaagattgttgtgctgattgttctggcaactgtttgtcatccttagttccatgtggctgtgcaagagtgacggggggcgaattcccctatacaccagagggcctgcttaagacagaattccttgatgaatgcacctcagttaatcatttcccacaagagcatcataggttctactgtacagtttgccctcttgaaagatctaagaataaagcctcacctggtccgtgtaaaggccatcttatgagaaaattcattaaagaatgctggagtaaatgtggatgtggcatgcagtgtggaaatcgtgtgattcagcgtggtataacatgcaaattgcaggtgttctttacacgcgagggcaaaggctggggagtacgcacagtagaggatctcccaaaaggttcctttgtctgtgaatatgttggagaggtactaacaagttctgaattgcacgaaagagcaattgaaaatgcaagaaatggtaaacataagcatcaagtactcctggatgctggttggggttcaggtgtattgagggatgaagatgcccttagccttgatggttcattttatgggaacgttgggcgatttatcaaccacagatgctatgatgcgaatttagttcagatccctgttgaagttgagacgcctgatcatcattattaccatctggcatttttcacgaacaagaaagtagaggcatttgaagagctaacatgggattatggcattggttttgatgatacggaagggcccagtaaaccattcagatgcatgtgtggaagtagatattgccgcgatccgaataatctgaggaggatggctagagcagctgcaaagcggaagtaggcggggaagctgaacttggttggagattagcacatcaacttttgctgtggtatttggttccgtatttgatgtgcagcagcatcacatcagttagtacttagtattagtgtagatagatggagatgagggcggatgttttggacccttgcccgtggctgagcaacacgattgcgaccttaacctacggcatattggcatgtaaattagcctgggattgagtaggcgtagaaagaacgcgtaatagtacttagttatgtcatgtcatcttggtagagggcaagttaaattacatgccatgtcgttgcatcatctatgccatgctgggttggatgcttgtgctgaatgatttgttgaagcgactagcctaggcacttgtttttggcggt

SEQ ID NO: 122389 - DNA, 520 bp, Zea Mays
ttttttttgttattcctaccattaaattgggcattcaatacctgttcattatctttatgcttatgcaatccaataatgatggaaaataactgacttggctgctctcttgagttgtggcaacggaagttctaggccccgttgcagcactacactgcgctaatggaccttcaggtaagcccatcagacatatccaagggaaactatgtgctcacaaagtcagttgcagctagctagattgttatttcagtcaagagtgtttttgttttgttgaatgctgcattttcccaggacagaaatgagaagctattttacaagctcctgattgacaatgtcgaagagctgctgtcctataatgtatacaccaacagcgggggaagccttttgtttccagccctttaaatcagagtattttacaagagctgcttcctattttacaagagttgcttcctattttacaagagctgcttcctataatgtatacacatccttactgaatcactagattcagtaccctctgcac

SEQ ID NO: 122390 - DNA, 1948 bp, Zea Mays
aactaatcttctgcttagctttttttggatattcaatcgggtatcctgtctattcaatttgcaggagtggggagttgatcctaccaaagagatacctccaagtgcagctacaaccaaatatactgatttcctacttgcaactgcggctggaaaagttgatggcacaaaaggttctgacaaaatggttactccatttgagaagactaaaattgctgcatacactgttggggccatgactccatgcatgaggctttatgcatatctaggcaaagaactcatggttttccttaaacaagatgaaaatcatccatacaagaaatggattaacacatatgcatccagtgattttgaggacaccacactccaaatagaagaattgctagacaaactaagtgtctcattaactggtgaggaacttgagattattggcaagctctaccagcaagctatgaaactggaagtggagttcttttcttctcagcttatagaccaacctgttgtagctccactttcaagatactgtgatccaaaatataaactcttgatcttttctgattttgatttgacgtgcactattgttgattcatctgccattttggcggagattgcaattttgtcattccaaaaggcaaatcaaagtgggattgataataacctcgaccgtgcaaaatcgggagacctgagaagttcgtggaacatgctctctaagcaatacatggaagagtatgagaaatgcatggaaagactacttcctccagaagaatcgaagtcactagattatgataaactgtataaaggcctggaggtgctagctgagtttgagaagcttgcaaattctagggttgtcgactctggtgtgctgaggggaatgaatttggaagacatcaggaaagctggtgagcgtcttattcttcaaggtggctgtaaaaatttctttcagaagattgtaaaaacaagggagaacctcaatttggatgtccatattctttcctattgctggtgtgcagaacttataagatcagccttctcatcagccggttgtctagatggtttgaacatacattcaaatgagtttgcctttgaggattctgtttcaactggtgagatcgacagaaagatgcagtctccgctagacaaagttgaaaagttcaagagcatcagaagtgacgtggacagtacagtgccattcctatctgtttatattggagactcggttggagatttgctctgcttattggaggctgatattggtatagtcattgggtcaaccacaagtttgcgtagggtgggcaaacagtttggtgtttcttttgtcccattgttccctggtctagtagagaagcagaggcaactggcggaggaagatgcatccgtattcaaggcacggtctggagtcctctatacggtttctagctggtcagaaatacacgccttcgtactgggaagtgatttcagctgatggatgtgctgcttcttttcttccattttttttccgcttgagaagcaaaattgccggccgatgctgatgcacatgatacgtgaatcctcaatgtggtcattttatgaaagccacatgtcaattctggctaccagtatgtatgaatgaataccgataccagtttgtggtgtggaatgggttgagtttgtacccttgaattgtgatcaatgtttcattgattcgtctgtccttgttccattcggggctaatttctgggtggttgctggcattatactgcaccaacaacaacagtataaacatagtggtatatatcccaagtccaagtgtaacgacgactgcataaatgtagagatgtttgtttttaattggcaataaatgaaatgtgatgagactgttgcgcgtttgcttgttgtctgactgctacatgacctttatattatcagagagagagagatgtgtgtatgcttactttgaacgatgaattacagc

SEQ ID NO: 122391 - DNA, 1436 bp, Zea Mays
aactaatcttctgcttagctttttttggatattcaatcgggtatcctgtctattcaatttgcaggagtggggagttgatcctaccaaagagatacctccaagtgcagctacaaccaaatatactgatttcctacttgcaactgcggctggaaaagttgatggcacaaaaggttctgacaaaatggttactccatttgagaagactaaaattgctgcatacactgttggggccatgactccatgcatgaggctttatgcatatctaggcaaagaactcatggttttccttaaacaagatgaaaatcatccatacaagaaatggattaacacatatgcatccagtgattttgaggacaccacactccaaatagaagaattgctagacaaactaagtgtctcattaactggtgaggaacttgagattattggcaagctctaccagcaagctatgaaactggaagtggagttcttttcttctcagcttatagaccaacctgttgtagctccactttcaagatactgtgatccaaaatataaactcttgatcttttctgattttgatttgacgtgcactattgttgattcatctgccattttggcggagattgcaattttgtcattccaaaaggcaaatcaaagtgggattgataataacctcgaccgtgcaaaatcgggagacctgagaagttcgtggaacatgctctctaagcaatacatggaagagtatgagaaatgcatggaaagactacttcctccagaagaatcgaagtcactagattatgataaactgtataaaggcctggaggtgctagctgagtttgagaagcttgcaaattctagggttgtcgactctggtgtgctgaggggaatgaatttggaagacatcaggaaagctggtgagcgtcttattcttcaaggtggctgtaaaaatttctttcagaagattgtaaaaacaagggagaacctcaatttggatgtccatattctttcctattgctggtgtgcagaacttataagatcagccttctcatcagccggttgtctagatggtttgaacatacattcaaatgagtttgcctttgaggattctgtttcaactggtgagatcgacagaaagatgcagtctccgctagacaaagttgaaaagttcaagagcatcagaagtgacgtggacagtacagtgccattcctatctgtttatattggagactcggttggagatttgctctatacggtttctagctggtcagaaatacacgccttcgtactgggaagtgatttcagctgatggatgtgctgcttcttttcttccattttttttccgcttgagaagcaaaattgccggccgatgctgatgcacatgatacgtgaatcctcaatgtggtcattttatgaaagccacatgtcaattctggctaccagtatgtatgaatgaa

SEQ ID NO: 122392 - DNA, 623 bp, Zea Mays
gccactttctgcccgcttggagtccccgtcttcgtcgtcttgtagtagcactgagtgcgggagtactggccggccggcggcgaggctcctccactttctctgcacccatacatacgtatatgcttgttctccgccgtctccgcctccgcctcccactgccacgccctcttctcgtctcctccttctcctccacctccccctcctcctcaccctcgacctctagctcctcctcctgttggtcgtcgacaggcgaaagtagaagggccatggcgtcatctccttctcccgattcggccgcggtcgttgccgagggctccgcggctcgccgcttctggatcgctgcctccacgcgcgaggccgccttcgccgcatacacgcccttcctcctctccctcgccgccggcaatctgcggctcaacgtgtttcgccactacatcgcgcaggacgcgcacttccttcacgccttcgctcgcgcgtacgaaatggccgaggactgcgctgatgatgacgacgacatggccaccatagccgccctcaggaaggccatcctccaagagctcaacctccactcctccgttctgaaggtcctttcctccccacctatatgtttcccctagaatccc

SEQ ID NO: 122393 - DNA, 1607 bp, Zea Mays
gatatcgccgtctgcccgtctctactgggaagggaagggagcacctgcctgctcctgcgcggcggcggttggtaagccccacctccggtcccagcctggccagacttctgcccttctcctccgcctctctaatggtgattcgcagttactcttctttccactgtgggttgctgatttccagagcggcgtggaggaggcactacccgttcttctgggctgtcaggccttccgtaccgccgccgccgtcgccactcccactcccacagccgcgcacgcgcttctcctcctcctcctcactgcgctccaccaagagatccgccgcaaagacgtcaatggactcgtcttcagtcggtgaacccttctacgtcgtccgcaagggggacgtcatcggcatctacaaaaccctcagcgaatgccaagctcaagtcagcaattcggttcgcgacccttctgtcaccgtcttcaaaggctactcgctgcgtaaagacaccgaggaatacctcgccgcgcgcgggttaaggaacgctctctacgccattgatgcaacagatgcacgagatgaattgttcgacgatctagttccctgccctttccaggtaacacgaacaatgctctctgctcgtaagttccagctgcttcaggtaatttagagttcgataaggttgctggtgatttctggacatgaaattcagttttatactacctgacttttgccgtaacattaacatctcatggtgtgctcattgtgcaacttatggtttcagcaacctgatggagctgcatcgtctactctgaaaagatcacaggagattgaaatcggaccatcaaagaagcatcccaaagttgatgagcaggaaatccagggaaagccggtgctggagcaataataaggcaggtagatggttccgtgattgctcaactacgtgagggtctgggcattgcaaccaacaatgctgctgaatatcgtgcattgatcctagggctaacatatgcagccaagaaagggttcaagtatattcgtgctcaaggcgactctaagcttgtttgtaaccaggtccaagatatctggcgtgttaagaatgataatatggctagcttctgcaagaaagtgaaggagctaaagggaacatttcatttatttcaaatcagacatgttttgagggaatataattcggctgctgatgctcaagctaactttgcagtagaacttcctgttggtgaagttcaagagcagtcgaacttcccatgctagcagttgtgttgtggtcaagtgtggtttgtgcatcgctaaggttctgggactgaagctatgtcacatttgttcagttctcattgacacaaaaggaagagacgaaacaacagttgtattggaagtggtagtgggtctgatatatctgcggagtattgaacagacagatgcaatattgagtagattcttaggaaatttaatcgtctcaaacttctagatagtgcgagttgatttgtccaggaccagtgtttgctgatatacgatgtttgtattcagaacagtattagtaccggaaactttaattgctcctttctctatgttggttacttggttaaggttgagtgttgcttttaataaa

SEQ ID NO: 122394 - DNA, 1399 bp, Zea Mays
tctatcttcgtcgatatcgccgtctgcccgtctctactgggaagggaagggagcacctgcctgctcctgcgcggcggcggttgagcggcgtggaggaggcactacccgttcttctgggctgtcaggccttccgtaccgccgccgccgtcgccactcccactcccacagccgcgcacgcgcttctcctcctcctcctcactgcgctccaccaagagatccgccgcaaagacgtcaatggactcgtcttcagtcggtgaacccttctacgtcgtccgcaagggggacgtcatcggcatctacaaaaccctcagcgaatgccaagctcaagtcagcaattcggttcgcgacccttctgtcaccgtcttcaaaggctactcgctgcgtaaagacaccgaggaatacctcgccgcgcgcgggttaaggaacgctctctacgccattgatgcaacagatgcacgagatgaattgttcgacgatctagttccctgccctttccagcaacctgatggagctgcatcgtctactctgaaaagatcacaggagattgaaatcggaccatcaaagaagcatcccaaagttgatgagcaggtaccattacctgatagtcatctctcttgtattcttgaatttgatggtgcctctaaaggaaatccagggaaagccggtgctggagcaataataaggcaggtagatggttccgtgattgctcaactacgtgagggtctgggcattgcaaccaacaatgctgctgaatatcgtgcattgatcctagggctaacatatgcagccaagaaagggttcaagtatattcgtgctcaaggcgactctaagcttgtttgtaaccaggtccaagatatctggcgtgttaagaatgataatatggctagcttctgcaagaaagtgaaggagctaaagggaacatttcatttatttcaaatcagacatgttttgagggaatataattcggctgctgatgctcaagctaactttgcagtagaacttcctgttggtgaagttcaagagcagtcgaacttcccatgctagcagttgtgttgtggtcaagtgtggtttgtgcatcgctaaggttctgggactgaagctatgtcacatttgttcagttctcattgacacaaaaggaagagacgaaacaacagttgtattggaagtggtagtgggtctgatatatctgcggagtattgaacagacagatgcaatattgagtagattcttaggaaatttaatcgtctcaaacttctagatagtgcgagttgatttgtccaggaccagtgtttgctgatatacgatgtttgtattcagaacagtattagtaccggaaactttaattgctcctttctctatgttggttacttggttaaggttgagtgttgcttttaataaa

SEQ ID NO: 122395 - DNA, 1642 bp, Zea Mays
ctactgggaagggaagggagcacctgcctgctcctgcgcggcggcggttggtaagccccacctccggtcccagcctggccagacttctgcccttctcctccgcctctctaatggtgattcgcagttactcttctttccactgtgggttgctgatttccagagcggcgtggaggaggcactacccgttcttctgggctgtcaggccttccgtaccgccgccgccgtcgccactcccactcccacagccgcgcacgcgcttctcctcctcctcctcactgcgctccaccaagagatccgccgcaaagacgtcaatggactcgtcttcagtcggtgaacccttctacgtcgtccgcaagggggacgtcatcggcatctacaaaaccctcagcgaatgccaagctcaagtcagcaattcggttcgcgacccttctgtcaccgtcttcaaaggctactcgctgcgtaaagacaccgaggaatacctcgccgcgcgcgggttaaggaacgctctctacgccattgatgcaacagatgcacgagatgaattgttcgacgatctagttccctgccctttccaggtaacacgaacaatgctctctgctcgtaagttccagctgcttcaggtaatttagagttcgataaggttgctggtgatttctggacatgaaattcagttttatactacctgacttttgccgtaacattaacatctcatggtgtgctcattgtgcaacttatggtttcagcaacctgatggagctgcatcgtctactctgaaaagatcacaggagattgaaatcggaccatcaaagaagcatcccaaagttgatgagcaggtaccattacctgatagtcatctctcttgtattcttgaatttgatggtgcctctaaaggaaatccagggaaagccggtgctggagcaataataaggcaggtagatggttccgtgattgctcaactacgtgagggtctgggcattgcaaccaacaatgctgctgaatatcgtgcattgatcctagggctaacatatgcagccaagaaagggttcaagtatattcgtgctcaaggcgactctaagcttgtttgtaaccaggtccaagatatctggcgtgttaagaatgataatatggctagcttctgcaagaaagtgaaggagctaaagggaacatttcatttatttcaaatcagacatgttttgagggaatataattcggctgctgatgctcaagctaactttgcagtagaacttcctgttggtgaagttcaagagcagtcgaacttcccatgctagcagttgtgttgtggtcaagtgtggtttgtgcatcgctaaggttctgggactgaagctatgtcacatttgttcagttctcattgacacaaaaggaagagacgaaacaacagttgtattggaagtggtagtgggtctgatatatctgcggagtattgaacagacagatgcaatattgagtagattcttaggaaatttaatcgtctcaaacttctagatagtgcgagttgatttgtccaggaccagtgtttgctgatatacgatgtttgtattcagaacagtattagtaccggaaactttaattgctcctttctctatgttggttacttggttaaggttgagtgttgcttttaata

SEQ ID NO: 122396 - DNA, 1495 bp, Zea Mays
gatatcgccgtctgcccgtctctactgggaagggaagggagcacctgcctgctcctgcgcggcggcggttggtaagccccacctccggtcccagcctggccagacttctgcccttctcctccgcctctctaatggtgattcgcagttactcttctttccactgtgggttgctgatttccagagcggcgtggaggaggcactacccgttcttctgggctgtcaggccttccgtaccgccgccgccgtcgccactcccactcccacagccgcgcacgcgcttctcctcctcctcctcactgcgctccaccaagagatccgccgcaaagacgtcaatggactcgtcttcagtcggtgaacccttctacgtcgtccgcaagggggacgtcatcggcatctacaaaaccctcagcgaatgccaagctcaagtcagcaattcggttcgcgacccttctgtcaccgtcttcaaaggctactcgctgcgtaaagacaccgaggaatacctcgccgcgcgcgggttaaggaacgctctctacgccattgatgcaacagatgcacgagatgaattgttcgacgatctagttccctgccctttccagcaacctgatggagctgcatcgtctactctgaaaagatcacaggagattgaaatcggaccatcaaagaagcatcccaaagttgatgagcaggtaccattacctgatagtcatctctcttgtattcttgaatttgatggtgcctctaaaggaaatccagggaaagccggtgctggagcaataataaggcaggtagatggttccgtgattgctcaactacgtgagggtctgggcattgcaaccaacaatgctgctgaatatcgtgcattgatcctagggctaacatatgcagccaagaaagggttcaagtatattcgtgctcaaggcgactctaagcttgtttgtaaccaggtccaagatatctggcgtgttaagaatgataatatggctagcttctgcaagaaagtgaaggagctaaagggaacatttcatttatttcaaatcagacatgttttgagggaatataattcggctgctgatgctcaagctaactttgcagtagaacttcctgttggtgaagttcaagagcagtcgaacttcccatgctagcagttgtgttgtggtcaagtgtggtttgtgcatcgctaaggttctgggactgaagctatgtcacatttgttcagttctcattgacacaaaaggaagagacgaaacaacagttgtattggaagtggtagtgggtctgatatatctgcggagtattgaacagacagatgcaatattgagtagattcttaggaaatttaatcgtctcaaacttctagatagtgcgagttgatttgtccaggaccagtgtttgctgatatacgatgtttgtattcagaacagtattagtaccggaaactttaattgctcctttctctatgttggttacttggttaaggttgagtgttgcttttaata

SEQ ID NO: 122397 - DNA, 1482 bp, Zea Mays
tctatcttcgtcgatatcgccgtctgcccgtctctactgggaagggaagggagcacctgcctgctcctgcgcggcggcggttgagcggcgtggaggaggcactacccgttcttctgggctgtcaggccttccgtaccgccgccgccgtcgccactcccactcccacagccgcgcacgcgcttctcctcctcctcctcactgcgctccaccaagagatccgccgcaaagacgtcaatggactcgtcttcagtcggtgaacccttctacgtcgtccgcaagggggacgtcatcggcatctacaaaaccctcagcgaatgccaagctcaagtcagcaattcggttcgcgacccttctgtcaccgtcttcaaaggctactcgctgcgtaaagacaccgaggaatacctcgccgcgcgcgggttaaggaacgctctctacgccattgatgcaacagatgcacgagatgaattgttcgacgatctagttccctgccctttccagcaacctgatggagctgcatcgtctactctgaaaagatcacaggagattgaaatcggaccatcaaagaagcatcccaaagttgatgagcaggtaccattacctgatagtcatctctcttgtattcttgaatttgatggtgcctctaaaggaaatccagggaaagccggtgctggagcaataataaggcaggtagatggttccgtgattgctcaactacgtgagggtctgggcattgcaaccaacaatgctgctgaatatcgtgcattgatcctagggctaacatatgcagccaagaaagggttcaagtatattcgtgctcaaggcgactctaagcttgtttgtaaccaggtataatacctcgaatgtgatttggccatacaattttcttcattcttgtatcacggaaggttgttgcttcattcaacatgccaaagtccaagatatctggcgtgttaagaatgataatatggctagcttctgcaagaaagtgaaggagctaaagggaacatttcatttatttcaaatcagacatgttttgagggaatataattcggctgctgatgctcaagctaactttgcagtagaacttcctgttggtgaagttcaagagcagtcgaacttcccatgctagcagttgtgttgtggtcaagtgtggtttgtgcatcgctaaggttctgggactgaagctatgtcacatttgttcagttctcattgacacaaaaggaagagacgaaacaacagttgtattggaagtggtagtgggtctgatatatctgcggagtattgaacagacagatgcaatattgagtagattcttaggaaatttaatcgtctcaaacttctagatagtgcgagttgatttgtccaggaccagtgtttgctgatatacgatgtttgtattcagaacagtattagtaccggaaactttaattgctcctttctctatgttggttacttggttaaggttgagtgttgcttttaata

SEQ ID NO: 122398 - DNA, 1469 bp, Zea Mays
cgaagagaatccatcccaatagtctgcccggtccattctatcttcgtcgatatcgccgtctgcccgtctctactgggaagggaagggagcacctgcctgctcctgcgcggcggcggttgttactcttctttccactgtgggttgctgatttccagagcggcgtggaggaggcactacccgttcttctgggctgtcaggccttccgtaccgccgccgccgtcgccactcccactcccacagccgcgcacgcgcttctcctcctcctcctcactgcgctccaccaagagatccgccgcaaagacgtcaatggactcgtcttcagtcggtgaacccttctacgtcgtccgcaagggggacgtcatcggcatctacaaaaccctcagcgaatgccaagctcaagtcagcaattcggttcgcgacccttctgtcaccgtcttcaaaggctactcgctgcgtaaagacaccgaggaatacctcgccgcgcgcgggttaaggaacgctctctacgccattgatgcaacagatgcacgagatgaattgttcgacgatctagttccctgccctttccagcaacctgatggagctgcatcgtctactctgaaaagatcacaggagattgaaatcggaccatcaaagaagcatcccaaagttgatgagcaggtaccattacctgatagtcatctctcttgtattcttgaatttgatggtgcctctaaaggaaatccagggaaagccggtgctggagcaataataaggcaggtagatggttccgtgattgctcaactacgtgagggtctgggcattgcaaccaacaatgctgctgaatatcgtgcattgatcctagggctaacatatgcagccaagaaagggttcaagtatattcgtgctcaaggcgactctaagcttgtttgtaaccaggtccaagatatctggcgtgttaagaatgataatatggctagcttctgcaagaaagtgaaggagctaaagggaacatttcatttatttcaaatcagacatgttttgagggaatataattcggctgctgatgctcaagctaactttgcagtagaacttcctgttggtgaagttcaagagcagtcgaacttcccatgctagcagttgtgttgtggtcaagtgtggtttgtgcatcgctaaggttctgggactgaagctatgtcacatttgttcagttctcattgacacaaaaggaagagacgaaacaacagttgtattggaagtggtagtgggtctgatatatctgcggagtattgaacagacagatgcaatattgagtagattcttaggaaatttaatcgtctcaaacttctagatagtgcgagttgatttgtccaggaccagtgtttgctgatatacgatgtttgtattcagaacagtattagtaccggaaactttaattgctcctttctctatgttggttacttggttaaggttgagtgttgcttttaata

SEQ ID NO: 122399 - DNA, 1448 bp, Zea Mays
cgaagagaatccatcccaatagtctgcccggtccattctatcttcgtcgatatcgccgtctgcccgtctctactgggaagggaagggagcacctgcctgctcctgcgcggcggcggttgttactcttctttccactgtgggttgctgatttccagagcggcgtggaggaggcactacccgttcttctgggctgtcaggccttccgtaccgccgccgccgtcgccactcccactcccacagccgcgcacgcgcttctcctcctcctcctcactgcgctccaccaagagatccgccgcaaagacgtcaatggactcgtcttcagtcggtgaacccttctacgtcgtccgcaagggggacgtcatcggcatctacaaaaccctcagcgaatgccaagctcaagtcagcaattcggttcgcgacccttctgtcaccgtcttcaaaggctactcgctgcgtaaagacaccgaggaatacctcgccgcgcgcgggttaaggaacgctctctacgccattgatgcaacagatgcacgagatgaattgttcgacgatctagttccctgccctttccagcaacctgatggagctgcatcgtctactctgaaaagatcacaggagattgaaatcggaccatcaaagaagcatcccaaagttgatgagcagctctcttgtattcttgaatttgatggtgcctctaaaggaaatccagggaaagccggtgctggagcaataataaggcaggtagatggttccgtgattgctcaactacgtgagggtctgggcattgcaaccaacaatgctgctgaatatcgtgcattgatcctagggctaacatatgcagccaagaaagggttcaagtatattcgtgctcaaggcgactctaagcttgtttgtaaccaggtccaagatatctggcgtgttaagaatgataatatggctagcttctgcaagaaagtgaaggagctaaagggaacatttcatttatttcaaatcagacatgttttgagggaatataattcggctgctgatgctcaagctaactttgcagtagaacttcctgttggtgaagttcaagagcagtcgaacttcccatgctagcagttgtgttgtggtcaagtgtggtttgtgcatcgctaaggttctgggactgaagctatgtcacatttgttcagttctcattgacacaaaaggaagagacgaaacaacagttgtattggaagtggtagtgggtctgatatatctgcggagtattgaacagacagatgcaatattgagtagattcttaggaaatttaatcgtctcaaacttctagatagtgcgagttgatttgtccaggaccagtgtttgctgatatacgatgtttgtattcagaacagtattagtaccggaaactttaattgctcctttctctatgttggttacttggttaaggttgagtgttgcttttaata

SEQ ID NO: 122400 - DNA, 1560 bp, Zea Mays
cgaagagaatccatcccaatagtctgcccggtccattctatcttcgtcgatatcgccgtctgcccgtctctactgggaagggaagggagcacctgcctgctcctgcgcggcggcggttgttactcttctttccactgtgggttgctgatttccagagcggcgtggaggaggcactacccgttcttctgggctgtcaggccttccgtaccgccgccgccgtcgccactcccactcccacagccgcgcacgcgcttctcctcctcctcctcactgcgctccaccaagagatccgccgcaaagacgtcaatggactcgtcttcagtcggtgaacccttctacgtcgtccgcaagggggacgtcatcggcatctacaaaaccctcagcgaatgccaagctcaagtcagcaattcggttcgcgacccttctgtcaccgtcttcaaaggctactcgctgcgtaaagacaccgaggaatacctcgccgcgcgcgggttaaggaacgctctctacgccattgatgcaacagatgcacgagatgaattgttcgacgatctagttccctgccctttccagcaacctgatggagctgcatcgtctactctgaaaagatcacaggagattgaaatcggaccatcaaagaagcatcccaaagttgatgagcaggtaccattacctgatagtcatctctcttgtattcttgaatttgatggtgcctctaaaggaaatccagggaaagccggtgctggagcaataataaggcaggtagatggttccgtggtatgtagccaactggtaactaaactgatgtgttctatttataccgagttatcatacctagctggttaccgtgttatgatctttactgaagattgctcaactacgtgagggtctgggcattgcaaccaacaatgctgctgaatatcgtgcattgatcctagggctaacatatgcagccaagaaagggttcaagtatattcgtgctcaaggcgactctaagcttgtttgtaaccaggtccaagatatctggcgtgttaagaatgataatatggctagcttctgcaagaaagtgaaggagctaaagggaacatttcatttatttcaaatcagacatgttttgagggaatataattcggctgctgatgctcaagctaactttgcagtagaacttcctgttggtgaagttcaagagcagtcgaacttcccatgctagcagttgtgttgtggtcaagtgtggtttgtgcatcgctaaggttctgggactgaagctatgtcacatttgttcagttctcattgacacaaaaggaagagacgaaacaacagttgtattggaagtggtagtgggtctgatatatctgcggagtattgaacagacagatgcaatattgagtagattcttaggaaatttaatcgtctcaaacttctagatagtgcgagttgatttgtccaggaccagtgtttgctgatatacgatgtttgtattcagaacagtattagtaccggaaactttaattgctcctttctctatgttggttacttggttaaggttgagtgttgcttttaata

SEQ ID NO: 122401 - DNA, 246 bp, Zea Mays
atgtacaaggtgatggatgactggtgcttccttggaagtaggtgttcaaggaaaaaacagagcaagtggattcaggttttgcttgggcctaatggaccaccaggactaagatggcgattgaaaaatccttccctagagctccaactgaatgtcatctacgttgcattatcgttcatgaaaaattgggatttcttacataaggagatgaacagggagggcatctaccagatgaaaggagatatatga

SEQ ID NO: 122402 - DNA, 966 bp, Zea Mays
aaaagcacaacccaaccacccattccatccaaaagatcgacgccgtccgacgcgaatcgaacgtccccatagcgactacacaaaaccctagcagcacaccagctatattgtctttccgtcgactaccaccagccgcctccactagctctcccacacagaaaaccctagccgccgccaccaaagtggcctcccaggtaagcaggagcgtccatcctgccgccgccatgaagcgcaatccccgcgtcacgagctcccgccggaagtgccgcaaggcgcacttcacggccccgtcctccgtccgccgcgttctcatgtccgccgggctgtcgacggagctccgccacaagtacaacatgcgctccatcccgatccgcaaggacgacgaggtgcaggtcgtgcgcggaaccttcaagggccgtgaggggaaggttgtgcaggtgtaccgccgctgctggatcatccacgtcgagcggatcacccgtgagaaggtgaacggctccaccgtgaacgtgggtatccacccctccaaggtgatcgtcaccaagctgaagctcgacaaggaccataaggcgctcctcgaccgcaaggccggggccgcgccgccgacaaagctaagggcaagtttactgccgacgacgtcgccgcggccgccgctggcaccgccgccaccggcgcctctctccaggagatcgactaggctcttcacggtcatctgatggttgtcgtaccaccttttcctcatctctttagtttttgctaccaatgattatgcgatagaggttttatgttatttgaaaactgctctgtgcctggatgagagttttggaacataatgtgaacctgtgtgtctgtgatctgagctttgaagatctgattatgtggttaatgtctccttgtagtatcttctaaatggttgttgtgatttgtcttcactctattgcctgtctgatgcatgtagtgtttttt

SEQ ID NO: 122403 - DNA, 2335 bp, Zea Mays
ggacatgaagagttaagttgatgttcgccttcccctgtcagcttcccgttaccacaatcctagtcttgtggtggtgtgctgtgctgtcgtctctctccgatcttcccgattcttcttaccccttcttcgtcaagccgcagccgtcgcctcccttgctcaccaccatggtgtcggacgccagcaagaagaaggccgcgcagaagaaggcggccgccgccgccaagaggggagccaaggtcccgaccccttcatcttcgtcctctgccgacgctaaatccatcggtgccgtggccgcgctcaagctctccgatcgcacctgcaccggcgtcctcgcctcccacccgctctccagagatatccacatagagtctctttcattaacgtttcatggccatgacctcattgtagattctgagttggagctcaactatgggaggcgttatggtttgcttggccttaatggctgtggaaaatctactcttctcactgcgataggctgcagagaactccctatacctgaacacatggacatataccatctcacccatgagatcgaggcttcagacatgtctgcactacaagctgttgtctgttgtgatgaagaaagaatgaagttggaaaaggaagcagagattttggctgcacaggatgacggtggtggtgatgctttggatcgtgtatatgagcgtctagaagctattgatgcatcaactgctgaaaagcgtgctgctgagatattatatggtttaggttttaacaagcaaatgcaagctaagaaaactcgagatttttctggtggttggcgtatgaggattgctttggctagagcactcttcatgaatccaacaatccttttgcttgatgagcctacgaatcatcttgatcttgaggcatgtgtctggttggaagagacgctaaagaaatttgaccgcatactggttgtcatatcgcactcccaggactttctgaatggtgtgtgcactaacatcatccatatgcagaacaagaagctaaagttatatactgggaattatgaccaatacattcagacacgctccgagcttgaagaaaatcagatgaagcagttcaggtgggagcaggagcagattgcatcaatgaaggagtacattgcacggtttggccatgggtctgcaaagcttgcacgtcaggctcagagcaaggagaaaactctggcaaagatggagcgtggtgggctcaccgagaaggttgttagggacaaaatactggtcttccgcttcacaaatgttggcaaacttccaccaccagtgcttcagtttgttgaggtcacgtttgggtacacaccagataatctcttgtacaagaagcttgactttggtgttgacctggactctaggattgcattggttggtcccaatggcgcagggaagagcactcttctgaagctgatgacaggtgagctggttccattggacggtatggtgagacggcacaatcacctgcgcatcgcacagttccaccagcatctggcagagaagctggacctggacatgtcggccctgcaatacatgatgaaggaataccctgggaacgaagaagagcggatgagagccgcagttggtaagtttgggctgtcagggaaggctcaggtgatgccgatgaggaatctgtctgacgggcagaggagccgtgtcatctttgcgtggctggcatacaggcagccgcagctattgctgctggacgagccgacgaaccatcttgatatcgagaccatcgactccctagcggaggcgctgaacgagtgggacggcggtctggtcctggtgagccatgacttcaggctgatcaaccaggttgctcatgagatctgggtttgtgagaatcaggcagtgacaaggtgggaaggcgatatcatggatttcaaggagcacttgagaagcaaggcttgtctatcggattaagggaaggccttggctttccttaccttctctttggagatgtattatcccttgtataattatgtattattataggccctccaagttttactagtagctagctgatcatctgagcaagtacctctgtatctgtatcctgctgagtctcataataagaagcgaaagttttgtagtactaacgtaattgtcacggcaggaagtgccatggagagcaaggatgcgggagaagagaggctgggagactgaagaagcaggaagtgcgtggtgtgcgtgctgttgggctcaatgtgtgtgggcgtgagtttggtgggttcggcccatgtaagtgacctataattctgtagcgaactgagaataaggcagacaagaaatagaaccagagaaaagttcccaaccgt

SEQ ID NO: 122404 - DNA, 2302 bp, Zea Mays
ggacatgaagagttaagttgatgttcgccttcccctgtcagcttcccgttaccacaatcctagtcttgtggtggtgtgctgtgctgtcgtctctctccgatcttcccgattcttcttaccccttcttcgtcaagccgcagccgtcgcctcccttgctcaccaccatggtgtcggacgccgccgccgccaagaggggagccaaggtcccgaccccttcatcttcgtcctctgccgacgctaaatccatcggtgccgtggccgcgctcaagctctccgatcgcacctgcaccggcgtcctcgcctcccacccgctctccagagatatccacatagagtctctttcattaacgtttcatggccatgacctcattgtagattctgagttggagctcaactatgggaggcgttatggtttgcttggccttaatggctgtggaaaatctactcttctcactgcgataggctgcagagaactccctatacctgaacacatggacatataccatctcacccatgagatcgaggcttcagacatgtctgcactacaagctgttgtctgttgtgatgaagaaagaatgaagttggaaaaggaagcagagattttggctgcacaggatgacggtggtggtgatgctttggatcgtgtatatgagcgtctagaagctattgatgcatcaactgctgaaaagcgtgctgctgagatattatatggtttaggttttaacaagcaaatgcaagctaagaaaactcgagatttttctggtggttggcgtatgaggattgctttggctagagcactcttcatgaatccaacaatccttttgcttgatgagcctacgaatcatcttgatcttgaggcatgtgtctggttggaagagacgctaaagaaatttgaccgcatactggttgtcatatcgcactcccaggactttctgaatggtgtgtgcactaacatcatccatatgcagaacaagaagctaaagttatatactgggaattatgaccaatacattcagacacgctccgagcttgaagaaaatcagatgaagcagttcaggtgggagcaggagcagattgcatcaatgaaggagtacattgcacggtttggccatgggtctgcaaagcttgcacgtcaggctcagagcaaggagaaaactctggcaaagatggagcgtggtgggctcaccgagaaggttgttagggacaaaatactggtcttccgcttcacaaatgttggcaaacttccaccaccagtgcttcagtttgttgaggtcacgtttgggtacacaccagataatctcttgtacaagaagcttgactttggtgttgacctggactctaggattgcattggttggtcccaatggcgcagggaagagcactcttctgaagctgatgacaggtgagctggttccattggacggtatggtgagacggcacaatcacctgcgcatcgcacagttccaccagcatctggcagagaagctggacctggacatgtcggccctgcaatacatgatgaaggaataccctgggaacgaagaagagcggatgagagccgcagttggtaagtttgggctgtcagggaaggctcaggtgatgccgatgaggaatctgtctgacgggcagaggagccgtgtcatctttgcgtggctggcatacaggcagccgcagctattgctgctggacgagccgacgaaccatcttgatatcgagaccatcgactccctagcggaggcgctgaacgagtgggacggcggtctggtcctggtgagccatgacttcaggctgatcaaccaggttgctcatgagatctgggtttgtgagaatcaggcagtgacaaggtgggaaggcgatatcatggatttcaaggagcacttgagaagcaaggcttgtctatcggattaagggaaggccttggctttccttaccttctctttggagatgtattatcccttgtataattatgtattattataggccctccaagttttactagtagctagctgatcatctgagcaagtacctctgtatctgtatcctgctgagtctcataataagaagcgaaagttttgtagtactaacgtaattgtcacggcaggaagtgccatggagagcaaggatgcgggagaagagaggctgggagactgaagaagcaggaagtgcgtggtgtgcgtgctgttgggctcaatgtgtgtgggcgtgagtttggtgggttcggcccatgtaagtgacctataattctgtagcgaactgagaataaggcagacaagaaatagaaccagagaaaagttcccaaccgt

SEQ ID NO: 122405 - DNA, 396 bp, Zea Mays
atggccgcagccgtgacggacacgctcaacggtggcgtcgcggaagaagagcaggtccccatcgcccagatcaccgcgaagtcctacgcttgtcctcagaccgcacctcccacttctgtgttctacgcccgcgtcctagctccctcgttggcgtcgatttgcttgctggtggccacgttgtggagttgccatcattcttttccacgccgtaggtacaacaacgttgtcgttcactccatggaactcgtcgtcgactttgtctcctggagactgatcctgaagttggatgaaaatgtgagacatgttcgtccagcatctgccggaggctcgaccaaatgtctaaattggaaaaccgtcatcgcccttgctgttatcgattcgattcggtcttggtaa

SEQ ID NO: 122406 - DNA, 910 bp, Zea Mays
aaaaaataagaataaaacatgcaagttgactgcttgcaaccatacctgaatgagatcactcatttgaagatagcctctatccaaagcaccagggatctccacagaagcaaggggaacctcagggtcagcagcagcaacaccctccactggaagcaaaccatcatctgtgtcatcctcctcccattcctcctcaacgaaaggcgctccatactgtgcgccattctgaggacctggtccagctttctggaagatccggcacaccacaaatgaatatacctgcggtatccctgcggcgtcatcgccctcgaggcggtattcgtgcatgacccagttggtgcgttcgcccttgggggcgcgtcccgcgtggaagacgagcgtcttcttcatcccgacaagtctgggcccatggcgcacctccctgtccttcccggtggtcttccagtaccctcccgacgtggcgcggttggtgcgggcgcggttggcgtgcttgcggtcgaggcggctgaagaaataccactgggagtcgcgggagcggaggcgggagcgggcgggcaggtcccagggctcgagcttgtaaaggtccacatcggcgatggcatcaaccttgagcgggcggccgaggaccttgcgcttgaggtagtaggagacgagctcctcatcggtggggtggaagcggaagcccggcgcgagggaggtggcctcggccgccaccgccggggctggcggcggctgggcggaggacgacgacgaggacggatggttcatgtatgcgcaccacccgagcagggctggcggcggcgtggatagggttgggagagggggggcaggagatgggattggggaaagtttcgagagaggtgagaggaggaagaaggaagtggcttgggctataagaaaggccaggggcctt

SEQ ID NO: 122407 - DNA, 367 bp, Zea Mays
aagaccaagaatgctcaacagattcttcagctcggttcatttttcagttctcactcaagacctcactctgtcggttgttgtgcaaccctttgccatctacaactagaagaaagcacatacctgctcaacacagacaaaggatgccctgccactctcacccacccctagcagaacaacacgtcaacacaggcacaagaatacttgccgcctgtttatggtgctttgtgcttcagacggcaacacacaacatagatacatgcatgtatactccgaatcgaaagacaagaaaattcagagccagatactatcgtttcacgttcagacttcagaaacatgccactgaggatcaaataattcagagccaaac

SEQ ID NO: 122408 - DNA, 279 bp, Zea Mays
atggccctagtagagagaatgcggagagagagagagccgcgagtgtacgggttctggcggagctgcggcttcaagcaaggtgccgtgcaaagtcgctggggagtacgcgcgaagcattgccacacggcaacctggaagcaagggtctcggcgtaattatactgcagtggggatttcacagcgcacgccaggcggacgaaccgtggatgggcgcggtcggcatttcaccggaccgggccttcatcgccaaatcgagccgagcgtcgggaattctagtgag

SEQ ID NO: 122409 - DNA, 1615 bp, Zea Mays
atatgaactgcctgcgtatgtgcgtgcgtgcccggcccctgctgcaggaaagacaggccgcagctgaccctcaacttcgtcgtccagtttttctttctcgcgctctgcggcatcacggcgaaccaagggttttacctcctgggcctggacaacacgtcgccgacgttcgcgtccgccatccagaactcggtcccggccatcaccttcgccatggccgcggcgctgcggatcgagaaggtccggctggaccgccgcgacggcgtagccaaggtggcgggcacgctggcgtgcgtggcgggggcatccgtcatcacgctctacaagggccccaccatcttcggtcccggcggcggcggcggcctcgagctggcgtcaaccagcaaggcggtggccggcgacaagaactggacgctgggttgcgtgtacctgatcgggcactgcctgtcgtggtccggctggctggtgctgcaggctcccgtgctgaagaagtacccggcacggctgtccgtcacctcctacacctgcttcttcggcgtcatccagttcctcatcatcgccgccttcatggagagggacgccgacgcatggaagttccactccggatccgagctcttcaccatcctatatgccgggttcatcgcgtccggggtggcgttcgcggtgcagatctggtgcatcgaccgcgggggcccggtgttcgtggcggtataccagccggtgcagacgctggtggtggccatcatggcgtcgctcaccatgggcgagaagttctacctgggcggcatcatcggcgccgtgctcatcatcgccggcctgtacctcgtgctctggggcaagagcgaggagagggcgcgcttcgccagggacgccgccaccctcgtctccggcagcggcgaccgcgaggggctccttccggccggcggcggtggcatccggagcgccagcaaggcggcagcgtcggccgccacgcagcctctcttgctgccgtcctccacctccaccgacaatgtctgatcggtcgacctatgaatccttcgtcgtcatccattgaccatggtgcgtggagataagagactgcatgcgtacgatccatgaggcgctgccatgcatgctgcgcgctctggtgcactcatggattggagcagtatgatccgatccagcagtaataattatcatcagctagtcttttttttgtggtttttccttgttgatttcacgcatgtatgtatgctgcaacctacatatatgcattactatggtgtgtgtgtggtgagagcagacgacggcaaggtttattttaacttcgatcacgacctgcttgctgttcaagtatattaattctcgttgtacaatactacgtatgtacgtagccagaattgtttggaccgagcgagagcatgcatatatgcatgatcgttagtgtgtacgtcaatttctatctatatatctatctcttcttgatctattatattaaaacaccagtttcttgtgtttcttcaaaatcaacccatggtctcagatcatatcccatcctatcttatttgttcacacaacaacgttctcgcagccgtcgctttagcaacaaatcccgtccatttcgcaacaacctccaccc

SEQ ID NO: 122410 - DNA, 1796 bp, Zea Mays
actccccactcttggtgctcttgcttgaatatagtccccctcctctctctctcacacacctgttcttcgatctcggcctagctagctagctagcgagcaagctatagcttagctcggctagccgggtgtgtcgccggtcggctaggcaacgccgctagcgatcgcaaaatggcagatgcgggggaggggcggcgggtgtgcggcatgccggagaaggcgcagctgcacgttgcgatgctggcgctgcagttcggctacgcgggcttccacgtggtgtcgcggctggcgctcaacatgggcatcagcaagctcgtcttccccgtctaccgcaacatcatcgcgctctgcctcctcgtgcccttcgcctactttctagagaagaaagacaggccgcagctgaccctcaacttcgtcgtccagtttttctttctcgcgctctgcggcatcacggcgaaccaagggttttacctcctgggcctggacaacacgtcgccgacgttcgcgtccgccatccagaactcggtcccggccatcaccttcgccatggccgcggcgctgcggatcgagaaggtccggctggaccgccgcgacggcgtagccaaggtggcgggcacgctggcgtgcgtggcgggggcatccgtcatcacgctctacaagggccccaccatcttcggtcccggcggcggcggcggcctcgagctggcgtcaaccagcaaggcggtggccggcgacaagaactggacgctgggttgcgtgtacctgatcgggcactgcctgtcgtggtccggctggctggtgctgcaggctcccgtgctgaagaagtacccggcacggctgtccgtcacctcctacacctgcttcttcggcgtcatccagttcctcatcatcgccgccttcatggagagggacgccgacgcatggaagttccactccggatccgagctcttcaccatcctatatgccgggttcatcgcgtccggggtggcgttcgcggtgcagatctggtgcatcgaccgcgggggcccggtgttcgtggcggtataccagccggtgcagacgctggtggtggccatcatggcgtcgctcaccatgggcgagaagttctacctgggcggcatcatcggcgccgtgctcatcatcgccggcctgtacctcgtgctctggggcaagagcgaggagagggcgcgcttcgccagggacgccgccaccctcgtctccggcagcggcgaccgcgaggggctccttccggccggcggcggtggcatccggagcgccagcaaggcggcagcgtcggccgccacgcagcctctcttgctgccgtcctccacctccaccgacaatgtctgatcggtcgacctatgaatccttcgtcgtcatccattgaccatggtgcgtggagataagagactgcatgcgtacgatccatgaggcgctgccatgcatgctgcgcgctctggtgcactcatggattggagcagtatgatccgatccagcagtaataattatcatcagctagtcttttttttgtggtttttccttgttgatttcacgcatgtatgtatgctgcaacctacatatatgcattactatggtgtgtgtgtggtgagagcagacgacggcaaggtttattttaacttcgatcacgacctgcttgctgttcaagtatattaattctcgttgtacaatactacgtatgtacgtagccagaattgtttggaccgagcgagagcatgcatatatgcatgatcgttagtgtgtacgtcaatttctatctatatatctatctcttcttgatc

SEQ ID NO: 122411 - DNA, 730 bp, Zea Mays
atgcatagaagagcacgaccgagctaggagaagcacgaacgcgtgcacgcgctgacgccgacgtcaaggtgtacggtaactcggagcgtcatcggagagagagacccgccaccgccacgcttgaccgtaatccgtggagagtgagtgcccggccgggctaccagctaagacacgacggtccatccagccatcggtggcccagcagattccacaatggcggcaacggcggacatggagcggatcttcaagcggttcgacaccaacggggacggcaagatctcgctgtcggagctgacggaggctctgcggactctggggtccacctccgccgacgaggtgcagcgcatgatggccgagatcgacaccgacggcgacggctgcatcgacttcaacgagttcatcaccttcagtaacgccaacccggggctcatgaaggacgtcgcaaaggtcttctgaaacatcacatcatcatcaataggataccatcgatgatcatgcccccaacgtgtcatttcatctggcctgcctcgccggtcttattgctgtcgttcacctccttataagtactactagtaggattttgttttgttttattttatattttcatggtcaccaatcaaatatatatgtggacttccatttatttattttttctgtgtttcctcgatcggataagtgtatacctgccagtccagctttaatttccatgtatttaatttttactggagat

SEQ ID NO: 122412 - DNA, 1148 bp, Zea Mays
caacccggttggcacggggttcagctacgtggacggcggcgacaagagcctgatggcgtccacctcgccggcgtcgccctcggggatagctggatctcgccgctcgacttcgtgttgtcgtgggggccgttgctgtaccaggtgtcccgggtggacgagaagggcctgcagcagtgcaacagcgtggcggccaagatcaaggagcagctggagaaggggcagttcgcggacgccgaggcctcgtggtcggagctggagggcgtcgtcctcgccagctccaactccgtcaacttctacaactttctcaaggacgaggcgtcgggggacgccaccgccactgccacagcggcggtgtcgacactggcgtccttcaggcgccggggcggctactcgggctacctcagctccatggcggcgtcttcgtcgtcgtcagcaggcggcttcgacgggctcatgaacacggtcatcaagaagaagctcggcatcatcccaaaggatctcaagtggggagagcagtcagacgacgtgttcgatgctctggctggagacttcatgaagcccaggatacaggaggtggaccagctcctcaagctggcgtcaatgtcaccatctacagcggacagctcgacctcatctgcgcgaccaaaggcaccatggactgggttcagaagctcaagtgggacgacctcaacagtttcctgagctctcctagaacgcccatctactgcgacaaggaggggcagtccggcacccaggccttcgtcaagtcctacaagaacctcaatttctactggatactcgaagccggacacatggtacccctggacaacccttgccctgcgctcaagatgctggctgacattacgcgatctcctgccgagtagcaggaggaagaaaacaaggcgacggaatggaacggcctgacaccagttcttcaagattcttctcttttcatacagtcagagaaaaataagtcattggtggtagcattcatacatgcaacaataaacacaaaggaaaaggtagtgataggatcagacagatatttaattcggcagatattattgtgtagcaccgctatagagcttgcagctgaatttccaacatgatgatctgattgacagtgcttctcctgtctcaactcaaca

SEQ ID NO: 122413 - DNA, 1943 bp, Zea Mays
gtgtccatcactccatccatatgagagaggagaatatgcgccatgctcccggagtccctgtagcacaatactgtcagtacatactcctatatagatatgcaggcttccccgtaagacaagccgctcttcacctcggattgcgccttcaattcgttcgtccttccatgtcgattgattcttgattgattgggagtgggggaaaaggagagccggggagggaaaggcaaagcagagcccgtagcgtccttgtcacagacagacagacagatagatagattgttggctatggcgtcgtcgagggggcctctcgccgcgctgctactgctggccgcctgcgccgccttcttccctgccgccggagccgccggcacgccggacgggtcggaggagtggggctacgtggaagtccggcccaaggcgcacatgttctggtggctgtaccacagcccacagcgcgtggacaacggcaagacgccatggccgacagtgctgtggctacagggagggccgggcgcgtccggcgtcgggtacggcaacttcatggagatcgggccgctggacgagaagcttaagccccgcgcaaccacatggctcgccaaggccgacctcctcttcgtggacaacccggttggcacggggttcagctacgtggacggcggcgacaagagcctgatggcgcacacggacgccgaggcggcgcgcgacctcgtcacgctgctctgcgcgctgtaccgcgacagcccgcggctccgtgccagcccgctctacatcgtcgccgagtcctacggcggcaagttcgcggtcaccacggcgctcgcggcgctcagggccgtcgaccagggccgcctcggcgtccacctcgccggcgtcgccctcggggatagctggatctcgccgctcgacttcgtgttgtcgtgggggccgttgctgtaccaggtgtcccgggtggacgagaagggcctgcagcagtgcaacagcgtggcggccaagatcaaggagcagctggagaaggggcagttcgcggacgccgaggcctcgtggtcggagctggagggcgtcgtcctcgccagctccaactccgtcaacttctacaactttctcaaggacgaggcgtcgggggacgccaccgccactgccacagcggcggtgtcgacactggcgtccttcaggcgccggggcggctactcgggctacctcagctccatggcggcgtcttcgtcgtcgtcagcaggcggcttcgacgggctcatgaacacggtcatcaagaagaagctcggcatcatcccaaaggatctcaagtggggagagcagtcagacgacgtgttcgatgctctggctggagacttcatgaagcccaggatacaggaggtggaccagctcctcaagctggcgtcaatgtcaccatctacagcggacagctcgacctcatctgcgcgaccaaaggcaccatggactgggttcagaagctcaagtgggacgacctcaacagtttcctgagctctcctagaacgcccatctactgcgacaaggaggggcagtccggcacccaggccttcgtcaagtcctacaagaacctcaatttctactggatactcgaagccggacacatggtacccctggacaacccttgccctgcgctcaagatgctggctgacattacgcgatctcctgccgagtagcaggaggaagaaaacaaggcgacggaatggaacggcctgacaccagttcttcaagattcttctcttttcatacagtcagagaaaaataagtcattggtggtagcattcatacatgcaacaataaacacaaaggaaaaggtagtgataggatcagacagatatttaattcggcagatattattgtgtagcaccgctatagagcttgcagctgaatttccaacatgatgatctgattgacagtgcttctcctgtctcaactcaaca

SEQ ID NO: 122414 - DNA, 1541 bp, Zea Mays
cctaactaatcgtcatggcgcctcctccgcatgcgctcgtcatcccctacccggcgcagggccacgtgatacccctactggagctcgcccacgcgctggtcgaccggggcttcaccgtcaccttcgccaactccgagttcaatcaccgccgcgtcgtggccgccgccgccatgtcggagtcgtcgacgctgctgggacggggggtccggctggtggcggtgccggacggcatggagcccggggaggaccggaacaacctcgtcaggctgaccctgctcatggcggagcatatggcgcctcgggtggaggacctcatcaggcgcagcagcgacgacggcggcgcggagggtgggcccatcacctgcgtagtggcggactacaacgtcggggcgtgggcgctcgacgtggcgcggaggaccggcgtcaggtcggccgccatctggccagcctcagccgccgtgttggcgagccttctcagcatcgacaagctggtccaggacaagatcatcgacccacaagatgggtctgcactggcccaaggcacgttccagctgtccgtggacatgccggtgatgcagacgtcccaactcgcgtggaactgcataggcaaccacgacgggcaggaagcgctcttccggtacctcgtcggcggcatccgcgcggtggacaaatgcgacttcgtcctctgcaactccttccacggcgccgagccggcgacattcgcgcgcttcccgcggatcgtccccgtcgggcctctcctcacgggcgagcgccgtggcagtggcagcaagacggcggtggtggggcacttctggcggcccgaggacgacgcgtgcatgtcctggctcgacgcgcaggcggcgatgtccgtcgtgtacgtcgccttcggcagcttcaccatgttcgacacgcgccagttccgggagctcgccctagggctggagctctccggccggccgttcctctgggtcgtgcgcccagacatcgtcctcggcggcgacgtccacgactaccccgacggcttcctcgaccgtgtccgtgcaactggccgcggcatggtggtcgcatggtcgccgcagcagagggtgctgtcgcacccttcggtcgcgtgcttcgtctcgcactgcggctggaactcgaccatggagggcgtccggaacggggtgcccttcctcgcctggccctacttcgctgaccagttcgtcaaccaggggtacatatgcgacgtctggaaggtcgggctccgggccgaggccgacggatcgggtgtcatcaccaaggagcacatcgccggcagggtggaggagctgatgagcgacgccagcatgagggagagggtggaggccatgaaaaaggctgcgcttgagagcatcaaccgtgggggctcgtcgctcagcaacttcgacatgtttgttgatgccatgaaggcgtgaatcatatatatgtgcttactgttgttttttttttctttctacatgttgtttaggtttggttattataagagcatgtgcaacaattttcagaaccccactctcgatccc

SEQ ID NO: 122415 - DNA, 1614 bp, Zea Mays
accacacgaattgcacatctccacagctcacgattccaacactagctacatatatatgtagctttctaggctactatatacactcaccaccaagtgtgaagtgtgtatatatagtgacagctactgcaatatatacatacgcgtcacctatatattagccaagctagctatatgagcttggttgcggcgccaatggcgatcgtcgacgtggccaacgcccagctgcagcaagcagcagcagcagctgccaagaaagacgaggacggccatgagcagcaggagtcgtcctacgactacggcgcgctgatgaaaggcgtgaggcacctgtcggacagcggcattaccaggctgcccgacaggtacgtcctgcccgcgtccgaccgccccggcgtccttgccgtctcgtcgtccgtggcgggcagcggcagggtcaagctccctgtcgtcaacctcgccggcctccgcgacccctgccagcgcgccgccgtgctggccacgctcgacgccgcgtgccgggagtacggcttctttcaggtggtaaaccacgggttcgggagcgacgtgagcggcgggatgctggacgtggcgcagcgcttcttcgagctgccgctggccgagcgagcgcggcacatgtcggcggacgtgcgggcgccggtgcgctacggcaccagcttcaaccaggccaaggacgacgtgctctgctggcgcgacttcctcaagctcgtctgccagccgctgcaggcggtgctcccgtactggccccagcagccggcggacctcagggacgtggccaccaggtacgccacggcgagccaccggctgttcatggaggtcatggaggcggcgctggaggccctgggcatccccacggccggcggcgtgctcggggagctggcagcgtcgtcgtcgcacatgatgacggtgaactgctacccggcgtgcccgcagcctgagctcacgctggggatgccctcgcactcggactacggcctcttcacgttcgtcctgcaggaccacgtcgagggcctccaggtcatgcacgacggccgctggctcaccatcgaccccatcccgggatcgttcgtcgtcaacgtcggcgaccacctagagatctacagcaacgggcggtacaagagcgcgctgcaccgggtgcacgtgaactccacgcggccgcgcatctcggtggcgtcgttccacagcctgccggcggagcgagtgatcgggccggcgccggagctggtggacgacgaggccggcaacccgcggcggtacatggacaccgacttcgctaccttcctcgcctacctcgcatccgcggacggcaagaacaagaccttcctccagtcaaggaagctgcctgctgctgctcctccatgcctctagctaactagatagctgcttattaatctgacagaataaaattaatcagttcagcgcacaattccacaagcgaaaacaaacctggatttgttttaattagctctgcccttcattattacattcaagctagctcttggtcaacgcatgcacacaagcttgagcattgactggtcccttttcaatcggttgcattgtactccctccgtaccaaaattggttgtcgctatagtattt

SEQ ID NO: 122416 - DNA, 760 bp, Zea Mays
accacacgaattgcacatctccacagctcacgattccaacactagctacatatatatgtagctttctaggctactatatacactcaccaccaagtgtgaagtgtgtatatatagtgacagctactgcaatatatacatacgcgtcacctatatattagccaagctagctatatgagcttggttgcggcgccaatggcgatcgtcgacgtggccaacgcccagctgcagcaagcagcagcagcagctgccaagaaagacgaggacggccatgagcagcaggagtcgtcctacgactacggcgcgctgatgaaaggcgtgaggcacctgtcggacagcggcattaccaggctgcccgacaggtacgtcctgcccgcgtccgaccgccccggcgtccttgccgtctcgtcgtccgtggcgggcagcggcagggtcaagctccctgtcgtcaacctcgccggcctccgcgacccctgccagcgcgccgccgtgctggccacgctcgacgccgcgtgccgggagtacggcttctttcaggtacgtacgtgcgtacagtagcatcacctgtcaccaggctattgctgctcatacatacgaatacgacacggctgcatgcgtgcacgcatgacgtcagcctgttcagtgaccacccacccacccacgcacaccagtagctgacatcctgcgccgcaggtggtaaaccacgggttcgggagcgacgtgagcggcgggatgctggacgtggcgcagcgcttcttcgagc

SEQ ID NO: 122417 - DNA, 2374 bp, Zea Mays
gcagcactacacagccatgcagaaaggtgtgagatagagtcaaaagtgtgtgtcattgatccttctctgcttccagctctagatgatttattgcaggacatctatgaatcattgcaaccacagccagtggactatgaacaccgaaaccttatggttaatgttttcaacaaaattgttggagaaatttttggtaaaaataatgagcttccaattgtggaaccatttggatctttcacaatggatctatttactcctcaaagtgacctggacctctctgtgaacttcaatactgatgcaaatgatcagtatcctcgcaagaacaagatttctgctattaggaagcttgcacatgttctattttctcatcagcgtcatggtcgctgttatggtgtttcacctattgtgactgctagagttcctgtactgaaggttattgataagggaactggtgtagagtgtgatatttcagtagaaaacaaagacggcatgtcaagatcagccatatttaaatttatttcatcaattgataaaagattccggatactttgttatctgatgaagttctgggctaaggtacatgatgtgaactgccccaaagatcgaacaatgagctctatggcaattatttctttagtttcttttcatttacagactcggtgtcctccaatattacctgcattttctgccgtattgaaagatggtacagattttgcaagtattgagaagaatgtatcactattccagggttttgggcacagcaataaagagtctattgctgaactttttgtatcactaatgagtaaactagtgtcagtggagggtttatgggagcaagggctctgtgctagcaattttgaagggacatggatatcgaagacctgggcgaagggtgttggcaacttgaatgttgaggacttcttggaccgatctcagaattttgccagatcggtaggggtgaaggagatgcagaaaatatgtgaatgcctaagggctagcgtttctgatttgagcaagttttctaagggtgaaattgctgcgcccaagctaaaggccctgttgtttaagcctttgaaccaggttaacccagtcattaaaccccatcagaaaactattaagaggaagcgtactaatccaaataagaccagaactaaccctattcagaaaaatgctaagaaaaagaaggcccttgagcaggataaattagccatttctcctggtcagaaagatggtaagaagacccttgatcaagagaagtcagttagttctcccattcagaaaggtgctaagaagaccaaaccccttaaccaggataagttagtcatttctcccggccaggaagatgacaagaagccccttgtgcaggatgagccaatagtagtgtctcccatccagaagaataacaataagtatgttgatcaggagaagtcccttcagcaggagaagcaaatcatctctcccggacagaaagatgataagaagagcagcaaggtgggacctgactcagcatgtaatcatgtgcaacagaagaaagtgaaggctactgtatctaccggccgtgctgctaatactcatgtttctagttccaggcctcgctctgtttttatcccccaagcacattggcccagccagccaattgttgatcggtttgcgcatatacctgagcacctgatcagcccttctgcttttagttatgggttgccacaaccacttatgcatccagcctatcctcatcctcattctcatcagggattggtaggtcaaggacagggtaatttccttcatttcaatcctggtattgagctgcagcatcaaggccaggctttcttcggtcctccagctgtctaccaccccatggtgaatgggtttcacccattcggtatcaatggtgctcagcaagtgcagtacatcgacaataggatggtgcagaggccaccatatggttttggcccaggtttctggggatgatggttgcagcctgaggaaaggttggttgctaactagtgggggtttgaggtgaaagttgtcagttcaaagaaaaaaaagctgttgtgtctaatatactcaaagatttagctttaaataggggccagtggaaaatagctaaccatgtgtctgaaccttgatttgtggtttttgttcggtttcagctctagcttaccttagaagtaaaatgttctgttgatgttggattttaactctagcctatcctgggattaaaaggttttgttgttgttgttgtaagttgtaattgtaactgttaggtttgtactctagtctgatttaaaagtaaaaaggctatattgttgttgttgtatctagacctgtacaaggagaaataatcaaataaggaaaaaaacacaatgtgggaaagaaa

SEQ ID NO: 122418 - DNA, 727 bp, Zea Mays
gcattcttatgacaaatcattttattgctctgatggtttcaacagggaaaggtagtagtgatccgaggagaaggaccaaaaggcgggccagggatgcccgaaatgttgactccaacaagcgcaataatgggtgctggtcttggaaaggagtgcgccctgctgacagatggtagattttctggagggtcacatggatttgttgtcggtcacatatgccctgaagcacaggaaggtggtccaattggccttgtccagagtggtgatataatcaccatcgatgtaagtaagagggtaatcgatgttgaccttaccgaacagcagctcgaagaaaggcggaggaaatggaccccaccgccatacaagtcgaccagtggagctctttggaagtacatcaagcttgtggctccagcgtccagaggatgcgtcactgatgagtaggctgtgttacattctgttaggttgtgcacatgatgtgttttcaatcaaaggctgtttgccaggaacaaccatcctgttagagtgattcatgatagtgcggtttgcgtatggcaggtataataataaaatgccggtttctattagcttagcaatgctacagaagctgctgaataatcgagcgtaatatgtctgtttaagcttgtgagcaatcacatccttttcagtctctcacttgttttgtttgtcccattgtttctactaccttgttcacagagatgatcaattggat

SEQ ID NO: 122419 - DNA, 2458 bp, Zea Mays
gcgaggactcagaaacaactaaagaaagagctaaaaagtcttaaatacttggaaaacatccaaaagcctagaaacgattagagaaagagataaaaagttcaggttttctacgcaatttagataaaataataaaaagcgtctcgattttctaaaagttgggtataattatatgagatcgaggcaaaaacaggggcgcgccaccctgtccagttctcaacccggctgtgctgtctcgtcgccttcctcccctcctgccggctgctgccgccgccagccgctgcaggcacgcttgccctctgctccctgtccatccactcatcattccccgtcatccaccaattcacaacccaaaaccctaaacccatttacctcaacgccaccgccgccgccgcgatgcagtccatggcgcccacctctccctcactcccggtggcaggccccgttccccgccgccgcctccagcgcgtccgcgccgccgcggtctccgacgagcccaaactcaacaagtacagcgcgcgcatcacggagcccaagtcgcagggcgcctcgcaggccgtgctctacggggttggcctcaccgacgccgacctccgcaagccgcaggtcggcgtctcttcggtgtggtacgaagggaacacctgcaacatgcacctgctccgcctcgccgaggccgtccgcgacggcgtccgtgaggccggcatggtcggcttccgattcaacaccgtcggtgtcagcgacgccatctccatgggcacccggggcatgtgctacagcctccagtcccgcgacctcatcgccgacagcatcgagaccgtcatgggcgcgcaacactacgacgccaacatctccatacctgggtgcgacaagaacatgccaggtacaataatggcaatgggacggcttaatcgacctagtatcatgatatatggtggaactattaagcctggtcactttcagggcaattcctacgatatagtttctgctttccagtgctatggagaatatgttagtggttcaatcactgatgagcaaagaaagaatgtgctccgcaattcatgtccaggggcaggtgcctgtggtggtatgtacacagcaaacactatggcatctgctattgagacattgggcatgagccttccatacagttcttcgacacctgctgaagacccgctaaagctagaagagtgccgtcttgctgggaagtatcttctagagttgctaaagatggatttgaagcccaaggacattataactgagaagtcattgcgaaatgcaatggttatcgttatggcacttggtggttcgactaatgctgttctgcatttgattgccattgctcggtccgtaggtctgcatttgactcttgatgatttccagaaggttagtgaccaagttcctttccttgcagacctcaagcccagtggcaaatatgtcatggaagatctacataagattggtgggacaccggcagtcattcattatcttctggagcaaggtcttcttgatggtgattgcatgactgttactgcaaaaactctagctgagaatgccaaaattttccctcctttgtctgaagggcagcaaataattcgaccacttgacaatcctatcaaaccaactggccatattcaaatactttatggcaatcttgcaccagaaggttctgtagcaaaaataactggcaaagagggactatacttctcaggtcctgcattagtttttgagggtgaagagtccatgattacagctatctcagaaaacccagcaaatttcaagggaaaggtagtagtgatccgaggagaaggaccaaaaggcgggccagggatgcccgaaatgttgactccaacaagcgcaataatgggtgctggtcttggaaaggagtgcgccctgctgacagatggtagattttctggagggtcacatggatttgttgtcggtcacatatgccctgaagcacaggaaggtggtccaattggccttgtccagagtggtgatataatcaccatcgatgtaagtaagagggtaatcgatgttgaccttaccgaacagcagctcgaagaaaggcggaggaaatggaccccaccgccatacaagtcgaccagtggagctctttggaagtacatcaagcttgtggctccagcgtccagaggatgcgtcactgatgagtaggctgtgttacattctgttaggttgtgcacatgatgtgttttcaatcaaaggctgtttgccaggaacaaccatcctgttagagtgattcatgatagtgcggtttgcgtatggcaggtataataataaaatgccggtttctattagcttagcaatgctacagaagctgctgaataatcgagcgtaatatgtctgtttaagcttgtgagcaatcacatccttttcagtctctcacttgttttgtttgtcccattgtttctactaccttgttcacagagatgatcaattggat

SEQ ID NO: 122420 - DNA, 324 bp, Zea Mays
atggcgagggaggagctcgaccagggatggagcaaggcgaatccagtgaagagtagtgccggggcgtgcgtcaacctaggagcaaaggcacaacagcgtcgccaccatggccagacagcgagctccgatgagggaggagcacgacagaacgcgacgcatatcggagttgagggaagaaggggcgtcgagcagaattcgagccagggcgcggcacagagactcgagagagagagagggcgtggattgggaagaggagcagcgcgtgtggagaattggaaggaggaaagaggagcgaccggcgcacggaaattgggcgcgccatag

SEQ ID NO: 122421 - DNA, 751 bp, Zea Mays
gcgctcacttgccccccaccggccattggacccaactgcctgtcgcgctaactttttcgtgtatatccttgcaggccccgaagaaggacaaggccccgccgccgtcgtcgaagccggccaagtccggtggtggcaagcaaaagaagaagaagtggagcaagggaaagctaaaggagaaggtaaacaacgcggtgctgttcgaccaggctacctacgacaagctgctctcggaggtgcccaagtacaagcaaatcaccccttccatcctctccgagcgtctgaggatcaacggctcccttgctcggagggccatcaaggacttgatggcgcgtggcctcattcggatggtctcggtccactcaagccagcagatctacaccagggcaaccaatacataaggatggggaagaggtctaaaatgcattgtctgccctctctgcaggaggagctcgtctttagaacagttgccatctttgtcaagagttgccaatgttatgttactggtgatgagttccaggtgacggcaacattttagagattttgagtatttctattagttggtactatggtttgccaattataagttacttggcctaaatggtttttgttttatggatctatggtattttacatgatttaaatcaattctagggcgtagaggcaaagtaagattagccaagagattagtcagctttcgctcgataatgtcgaacttctattaaacacattaacaaaaagattgagtggtaaa

SEQ ID NO: 122422 - DNA, 751 bp, Zea Mays
aaaacctagcgctggcgccgcagacccctccccttcgcttccttccctagcgccgacgcccaccagacgagatggccccgaagaaggacaaggccccgccgccgtcgtcgaagccggccaagtccggtggtggcaagcaaaagaagaagaagtggagcaagggaaagctaaaggagaaggtaaacaacgcggtgctgttcgaccaggctacctacgacaagctgctctcggaggtgcccaagtacaagcaaatcaccccttccatcctctccgagcgtctgaggatcaacggctcccttgctcggagggccatcaaggacttgatggcgcgtggcctcattcggatggtctcggtccactcaagccagcagatctacaccagggcaaccaatacataaggatggggaagaggtctaaaatgcattgtctgccctctctgcaggaggagctcgtctttagaacagttgccatctttgtcaagagttgccaatgttatgttactggtgatgagttccaggtgacggcaacattttagagattttgagtatttctattagttggtactatggtttgccaattataagttacttggcctaaatggtttttgttttatggatctatggtattttacatgatttaaatcaattctagggcgtagaggcaaagtaagattagccaagagattagtcagctttcgctcgataatgtcgaacttctattaaacacattaacaaaaagattgagtggtaaa

SEQ ID NO: 122423 - DNA, 1266 bp, Zea Mays
aaaacctagcgctggcgccgcagacccctccccttcgcttccttccctagcgccgacgcccaccagacgagatggccccgaagaaggacaaggccccgccgccgtcgtcgaagccggccaagtccggtggtggcaagcaaaagaagaagaagtggagcaagggaaagctaaaggagaaggtaaacaacgcggtgctgttcgaccaggctacctacgacaagctgctctcggaggtgcccaagtacaagcaaatcaccccttccatcctctccgagcgtctgagggtaatcactcgttccagatctgtgttgcatccaaaccttgtgcacagccgcaacgttgattaaattaaattgctatgagtgtctattatctgtaatgccatcgtacttggccaactgcatgtaagattagtagcctggaattttgtaatgagtcatgattaattcattgaagctccatctgatggctagcttaatggctccaagtttatttgaattggcaggtatgaaaggtgccgcatgtatgctaggcattgtgtgagttgtttttgagtagtaatttgaattggcagttgttgctacgatttttatcttgaatatgtgacatccatgtgtcattttaatagcaaactattttgttgcataccttccagtgatgcacatcagagtgtgctcctgctatcaattagcatgactattgtagcatgtccatgtgttcagtatgcatcaggaatcaaattctgtacctgtattaggtgttgttttgtaatagcttaacttgttctgttgacttgcagatcaacggctcccttgctcggagggccatcaaggacttgatggcgcgtggcctcattcggatggtctcggtccactcaagccagcagatctacaccagggcaaccaatacataaggatggggaagaggtctaaaatgcattgtctgccctctctgcaggaggagctcgtctttagaacagttgccatctttgtcaagagttgccaatgttatgttactggtgatgagttccaggtgacggcaacattttagagattttgagtatttctattagttggtactatggtttgccaattataagttacttggcctaaatggtttttgttttatggatctatggtattttacatgatttaaatcaattctagggcgtagaggcaaagtaagattagccaagagattagtcagctttcgctcgataatgtcgaacttctattaaacacattaacaaaaagattgagtggtaaa

SEQ ID NO: 122424 - DNA, 1974 bp, Zea Mays
cgttttcatccctatctgtgtggacggtaaaggtggcgggggcaacggtgccacaagattgtgggccctcttagattggcccacatgtcagccactggctaacccatggccggttgtcgttatccatttaaccgaccaggcccatggccatccactccactagtccacttgcacttgcgacagtgcagtcaatcgcttcgtctccgcgtctcgcgcgccccgccgcataggcgccagtcctccacagaaattcccacacctccacgccgtacggccagagtcgcggtccccgtcgaatccattccatggctccacccgccgcccccaccgcaccgcaccaccgcactcctctctttctcccccgccgcgccgccgccaccgcgcgcgctgccagggccgcttccctcgccgtcagggcccagccgaacaccgccgccgcctccacctccgcccccgagccgccggagaagttcaagccgcctccagggttcaaggtgcccgagcccaagaggttcgagatcaagtccggccagcagagcagtgtcctcggcgctttgctcgccatccccctccgcctcggcaccggcgtcttcgtcctcgggtactcgccatcacttgtttctccatcagagataccatcggaccaatatgcgcttgaattcggagcttggaaggtgaaggaggaatcaaaaataggacagtgcaaacgaccggaaaagccgatcgagatatatgaatttgaaggttgtccattttgtcgaaaggttagagagatggtatcagtcttggacctagatgtactattttacccctgtcctcgaaaaggcccaacattccgacctaaagtccttgaaatgggtggaaagaaacagtttccttacatggtggatccaaacactggggtcgccatgtatgaatcagatgacatcataaaatacctagctgacacatatggtgatggaagtgttccaattatgctatcgcttggtctgttgacagcaattacagcagggcttgctactcttggtcgtattggaaagggaaattcctatactgcttcaagaatcccaccgcagcctatagagatatgggcattcgaggtctgaagcacatgagctctcttcttagtatacaggtcatggatgtgatttattgcagcatagtgttagtcctggagtctgaatggctgatgatctattttctcagggatctcccttctgtagattagtacgagagacgcttgttgagttggaattgccacatctgctacacaggtatccaaaatactttaaaaccacaagtcaacgaatggcattataacagcgtggaagctgttgctaaacatcaccttagtagaattacacattagtttggttattctggattgagatatgtgctcgacaagagtgttagtaactgaaaattattcctgcagctgcgcacgtggcagcctcaaacgacaagaagttttcaagaaaaagggagttttccaggcgccttacatcgaagatcctaacacgggagtccagatgttcgaaagcgcagaaatcatagactacctgaaggcaacatatgtcctgtaccaaagctcatagtgacgttatctccaatagtcattgtaaagttgcatggaccgtgtaaattcaattctttccggtaataaaaggaaaagataaagtaaaccacaagttctgtatgatgcacagccgatttttatctatgcaagtctgaactttgaagttacttcaaactccgttctcctggttaatctagtgaatgagtgagttcccttgtgctggagaagttcggatcttggactggtgttgattgtagactcgactgttctgttcccttgtagttcggatcgtgaaattcgtcatcagtgtttggccatctcttggaagttcaactcggagcgtggcaaatcaaactgttggttcacgaatcaacgtcaagactcaagactcaagagtc

SEQ ID NO: 122425 - DNA, 1813 bp, Zea Mays
cgttttcatccctatctgtgtggacggtaaaggtggcgggggcaacggtgccacaagattgtgggccctcttagattggcccacatgtcagccactggctaacccatggccggttgtcgttatccatttaaccgaccaggcccatggccatccactccactagtccacttgcacttgcgacagtgcagtcaatcgcttcgtctccgcgtctcgcgcgccccgccgcataggcgccagtcctccacagaaattcccacacctccacgccgtacggccagagtcgcggtccccgtcgaatccattccatggctccacccgccgcccccaccgcaccgcaccaccgcactcctctctttctcccccgccgcgccgccgccaccgcgcgcgctgccagggccgcttccctcgccgtcagggcccagccgaacaccgccgccgcctccacctccgcccccgagccgccggagaagttcaagccgcctccagggttcaaggtgcccgagcccaagaggttcgagatcaagtccggccagcagagcagtgtcctcggcgctttgctcgccatccccctccgcctcggcaccggcgtcttcgtcctcgggtactcgccatcacttgtttctccatcagagataccatcggaccaatatgcgcttgaattcggagcttggaaggtgaaggaggaatcaaaaataggacagtgcaaacgaccggaaaagccgatcgagatatatgaatttgaaggttgtccattttgtcgaaaggttagagagatggtatcagtcttggacctagatgtactattttacccctgtcctcgaaaaggcccaacattccgacctaaagtccttgaaatgggtggaaagaaacagtttccttacatggtggatccaaacactggggtcgccatgtatgaatcagatgacatcataaaatacctagctgacacatatggtgatggaagtgttccaattatgctatcgcttggtctgttgacagcaattacagcagggcttgctactcttggtcgtattggaaagggaaattcctatactgcttcaagaatcccaccgcagcctatagagatatgggcattcgaggtctgaagcacatgagctctcttcttagtatacaggtcatggatgtgatttattgcagcatagtgttagtcctggagtctgaatggctgatgatctattttctcagggatctcccttctgtagattagtacgagagacgcttgttgagttggaattgccacatctgctacacagctgcgcacgtggcagcctcaaacgacaagaagttttcaagaaaaagggagttttccaggcgccttacatcgaagatcctaacacgggagtccagatgttcgaaagcgcagaaatcatagactacctgaaggcaacatatgtcctgtaccaaagctcatagtgacgttatctccaatagtcattgtaaagttgcatggaccgtgtaaattcaattctttccggtaataaaaggaaaagataaagtaaaccacaagttctgtatgatgcacagccgatttttatctatgcaagtctgaactttgaagttacttcaaactccgttctcctggttaatctagtgaatgagtgagttcccttgtgctggagaagttcggatcttggactggtgttgattgtagactcgactgttctgttcccttgtagttcggatcgtgaaattcgtcatcagtgtttggccatctcttggaagttcaactcggagcgtggcaaatcaaactgttggttcacgaatcaacgtcaagactcaagactcaagagtc

SEQ ID NO: 122426 - DNA, 1737 bp, Zea Mays
cgttttcatccctatctgtgtggacggtaaaggtggcgggggcaacggtgccacaagattgtgggccctcttagattggcccacatgtcagccactggctaacccatggccggttgtcgttatccatttaaccgaccaggcccatggccatccactccactagtccacttgcacttgcgacagtgcagtcaatcgcttcgtctccgcgtctcgcgcgccccgccgcataggcgccagtcctccacagaaattcccacacctccacgccgtacggccagagtcgcggtccccgtcgaatccattccatggctccacccgccgcccccaccgcaccgcaccaccgcactcctctctttctcccccgccgcgccgccgccaccgcgcgcgctgccagggccgcttccctcgccgtcagggcccagccgaacaccgccgccgcctccacctccgcccccgagccgccggagaagttcaagccgcctccagggttcaaggtgcccgagcccaagaggttcgagatcaagtccggccagcagagcagtgtcctcggcgctttgctcgccatccccctccgcctcggcaccggcgtcttcgtcctcgggtacgcaccgcgccgcgccttctctcaccatccgcgcgtctacgtcgtctacaactctacacctgctgacctgcacgtgtcacatcgatgtgcagcttggaaggtgaaggaggaatcaaaaataggacagtgcaaacgaccggaaaagccgatcgagatatatgaatttgaaggttgtccattttgtcgaaaggttagagagatggtatcagtcttggacctagatgtactattttacccctgtcctcgaaaaggcccaacattccgacctaaagtccttgaaatgggtggaaagaaacagtttccttacatggtggatccaaacactggggtcgccatgtatgaatcagatgacatcataaaatacctagctgacacatatggtgatggaagtgttccaattatgctatcgcttggtctgttgacagcaattacagcagggcttgctactcttggtcgtattggaaagggaaattcctatactgcttcaagaatcccaccgcagcctatagagatatgggcattcgagggatctcccttctgtagattagtacgagagacgcttgttgagttggaattgccacatctgctacacagctgcgcacgtggcagcctcaaacgacaagaagttttcaagaaaaagggagttttccaggcgccttacatcgaagatcctaacacgggagtccagatgttcgaaagcgcagaaatcatagactacctgaaggcaacatatgtcctgtaccaaagctcatagtgacgttatctccaatagtcattgtaaagttgcatggaccgtgtaaattcaattctttccggtaataaaaggaaaagataaagtaaaccacaagttctgtatgatgcacagccgatttttatctatgcaagtctgaactttgaagttacttcaaactccgttctcctggttaatctagtgaatgagtgagttcccttgtgctggagaagttcggatcttggactggtgttgattgtagactcgactgttctgttcccttgtagttcggatcgtgaaattcgtcatcagtgtttggccatctcttggaagttcaactcggagcgtggcaaatcaaactgttggttcacgaatcaacgtcaagactcaagactcaagagtc

SEQ ID NO: 122427 - DNA, 2290 bp, Zea Mays
cgttttcatccctatctgtgtggacggtaaaggtggcgggggcaacggtgccacaagattgtgggccctcttagattggcccacatgtcagccactggctaacccatggccggttgtcgttatccatttaaccgaccaggcccatggccatccactccactagtccacttgcacttgcgacagtgcagtcaatcgcttcgtctccgcgtctcgcgcgccccgccgcataggcgccagtcctccacagaaattcccacacctccacgccgtacggccagagtcgcggtccccgtcgaatccattccatggctccacccgccgcccccaccgcaccgcaccaccgcactcctctctttctcccccgccgcgccgccgccaccgcgcgcgctgccagggccgcttccctcgccgtcagggcccagccgaacaccgccgccgcctccacctccgcccccgagccgccggagaagttcaagccgcctccagggttcaaggtgcccgagcccaagaggttcgagatcaagtccggccagcagagcagtgtcctcggcgctttgctcgccatccccctccgcctcggcaccggcgtcttcgtcctcgggtactcgccatcacttgtttctccatcagagataccatcggaccaatatgcgcttgaattcggagcttggaaggtgaaggaggaatcaaaaataggacagtgcaaacgaccggaaaagccgatcgagatatatgaatttgaagggtacaacctctattgcctctgcctcctgtttatctctaactgtacctacatttgttgcaccaaaccctaataatttttgctgaacaatcatgctgacttattcctcttcttcattgtttgtgtattcttccaaatcttcagttgtccattttgtcgaaaggtgaatacgtccagcttcctgcaagtctgcaactgcattttgaagctgtcattcttcatgcacatgaacagttttgttgtttgtgttcaccatgaaaacattgcaggttagagagatggtatcagtcttggacctagatgtactattttacccctgtcctcgaaaaggcccaacattccgacctaaagtccttgaaatgggtggaaagaaacagtttccttacatggtatgcaaccatcctacataagttccttacctaaagtcattcggttgatagcgcccccacagccatgtctatgaaatacggaaatgtggcgtatgaattatattgataaataagcgtcctcatatgatgaccattgagtataaactgtgggcctctggcaagatggattaacttacccattatatttgataaacaaactttgatgtgcatctcataattttctgttggggaaaatacgggtgtcatctgagatttcccgagaaataaattgcgtgatgaaagcaaatcagttgccagtctgtgttaacagttatataagatacatgtctattgcaggtggatccaaacactggggtcgccatgtatgaatcagatgacatcataaaatacctagctgacacatatggtgatggaagtgttccaattatgctatcgcttggtctgttgacagcaattacagcagggcttgctactcttggtcgtattggaaagggaaattcctatactgcttcaagaatcccaccgcagcctatagagatatgggcattcgagggatctcccttctgtagattagtacgagagacgcttgttgagttggaattgccacatctgctacacagctgcgcacgtggcagcctcaaacgacaagaagttttcaagaaaaagggagttttccaggcgccttacatcgaagatcctaacacgggagtccagatgttcgaaagcgcagaaatcatagactacctgaaggcaacatatgtcctgtaccaaagctcatagtgacgttatctccaatagtcattgtaaagttgcatggaccgtgtaaattcaattctttccggtaataaaaggaaaagataaagtaaaccacaagttctgtatgatgcacagccgatttttatctatgcaagtctgaactttgaagttacttcaaactccgttctcctggttaatctagtgaatgagtgagttcccttgtgctggagaagttcggatcttggactggtgttgattgtagactcgactgttctgttcccttgtagttcggatcgtgaaattcgtcatcagtgtttggccatctcttggaagttcaactcggagcgtggcaaatcaaactgttggttcacgaatcaacgtcaagactcaagactcaagagtc

SEQ ID NO: 122428 - DNA, 1519 bp, Zea Mays
cgttttcatccctatctgtgtggacggtaaaggtggcgggggcaacggtgccacaagattgtgggccctcttagattggcccacatgtcagccactggctaacccatggccggttgtcgttatccatttaaccgaccaggcccatggccatccactccactagtccacttgcacttgcgacagtgcagtcaatcgcttcgtctccgcgtctcgcgcgccccgccgcataggcgccagtcctccacagaaattcccacacctccacgccgtacggccagagtcgcggtccccgtcgaatccattccatggctccacccgccgcccccaccgcaccgcaccaccgcactcctctctttctcccccgccgcgccgccgccaccgcgcgcgctgccagggccgcttccctcgccgtcagggcccagccgaacaccgccgccgcctccacctccgcccccgagccgccggagaagttcaagccgcctccagggttcaaggtgcccgagcccaagaggttcgagatcaagtccggccagcagagcagtgtcctcggcgctttgctcgccatccccctccgcctcggcaccggcgtcttcgtcctcgggtacgcaccgcgccgcgccttctctcaccatccgcgcgtctacgtcgtctacaactctacacctgctgacctgcacgtgtcacatcgatgtgcagcttggaaggtgaaggaggaatcaaaaataggacagtgcaaacgaccggaaaagccgatcgagatatatgaatttgaaggttgtccattttgtcgaaaggtgaatacgtccagcttcctgcaagtctgcaactgcattttgaagctgtcattcttcatgcacatgaacagttttgttgtttgtgttcaccatgaaaacattgcaggttagagagatggtatcagtcttggacctagatgtactattttacccctgtcctcgaaaaggcccaacattccgacctaaagtccttgaaatgggtggaaagaaacagtttccttacatggtatgcaaccatcctacataagttccttacctaaagtcattcggttgatagcgcccccacagccatgtctatgaaatacggaaatgtggcgtatgaattatattgataaataagcgtcctcatatgatgaccattgagtataaactgtgggcctctggcaagatggattaacttacccattatatttgataaacaaactttgatgtgcatctcataattttctgttggggaaaatacgggtgtcatctgagatttcccgagaaataaattgcgtgatgaaagcaaatcagttgccagtctgtgttaacagttatataagatacatgtctattgcaggtggatccaaacactggggtcgccatgtatgaatcagatgacatcataaaatacctagctgacacatatggtgatggaagtgttccaattatgctatcgcttggtctgttgacagtaagtaaataagtaccaagtaattcaaaagtatatgatatgttttaac

SEQ ID NO: 122429 - DNA, 1304 bp, Zea Mays
ataagctcatataacaacatccgtcgccgccgtttccatcccattttctctcctctctccgtcgccgcctcgggccaaaccctacgcagggagttgattgatcgattgcagccatgagtaagttgcattccgagcttctcaaggattgcatctcccagatagttcaggatgccaagaagaataggaagttcactgagactgttgagcttcagattagtctgaagaattatgatccacaaaaggacaagcgtttcagtggctctgttaagttgcctcacatccctcgtccaaagatgaaggtgtgcatgcttggtgatgcccagcacgttgaggaggctgagaagatgggacttgactacatggatgttgaggccctcaagaaaatgaacaagaacaagaagcttgttaagaagcttgccaagaagtaccatgcttttttggcatcagagaccatcatcaagcaaattccccgtctccttggtcctggtctcaacaaggcaggcaagttccccactctggtcactcaccaggaatccctggaatccaaggtgaatgagacgaaggctacagtcaagtttcaactgaagaaagtcctttgcatgggtgtcgcggtcggtaacctgtctatggaggagaagcagatccaacagaacatccagatgagcatcaacttcctcgtgtctcttctgaagaagaactggcagaatgtaagatgtctctacatcaagagcaccatggggaaaccattcaggattttctaagtctgtttttttgtgaagtctgctctttatgatatttggtttttgaaccgaggttgtcttgaactaaaactcttgttagatcatgtttggttggtaggatatttgagtctgggcaggtgtcttactcttgcgccatgtctttgtaatctctctatataagttttttgagaggctcagtataatatgcgtattatacgttatacccaatcgtttctgttactgtggaaaatgagtttccgccattgctgctgcgcccttgggtagcgcccctctacttacgggatagagccttgtaggaagtttttggtcactaatctggctgctattactagacattttgtgtaaagcgcaggcctagtgtcttaggttcttacgtgagttgggttaggagaagggattaacctggtgcttttgagtccaggtgctaggatttgaagggtcagtgaggtttggatagcctagtgtctgatggctatacatactatatttataaaaatattgtgtgatgactatacaaagtatctctataaaaatattaaaaaa

SEQ ID NO: 122430 - DNA, 831 bp, Zea Mays
tgcaagtgcccttcctatctggatcaacttttctccacacaaaccattttactgcattctcaggctgagaagatgggacttgactacatggatgttgaggccctcaagaaaatgaacaagaacaagaagcttgttaagaagcttgccaagaagtaccatgcttttttggcatcagagaccatcatcaagcaaattccccgtctccttggtcctggtctcaacaaggcaggcaagttccccactctggtcactcaccaggaatccctggaatccaaggtgaatgagacgaaggctacagtcaagtttcaactgaagaaagtcctttgcatgggtgtcgcggtcggtaacctgtctatggaggagaagcagatccaacagaacatccagatgagcatcaacttcctcgtgtctcttctgaagaagaactggcagaatgtaagatgtctctacatcaagagcaccatggggaaaccattcaggattttctaagtctgtttttttgtgaagtctgctctttatgatatttggtttttgaaccgaggttgtcttgaactaaaactcttgttagatcatgtttggttggtaggatatttgagtctgggcaggtgtcttactcttgcgccatgtctttgtaatctctctatataagttttttgagaggctcagtataatatgcgtattatacgttatacccaatcgtttctgttactgtggaaaatgagtttccgccattgctgctgcgcccttgggtagcgcccctctacttacgggatagagccttgtaggaagtttttggtcactaatctggctgctattactagacattttgtg

SEQ ID NO: 122431 - DNA, 525 bp, Zea Mays
ataagctcatataacaacatccgtcgccgccgtttccatcccattttctctcctctctccgtcgccgcctcgggccaaaccctacgcagggagttgattgatcgattgcagccatgagtaagttgcattccgagcttctcaaggattgcatctcccagatagttcaggatgccaagaagaataggaagttcactgagactgttgagcttcagattagtctgaagaattatgatccacaaaaggacaagcgtttcagtggctctgttaagttgcctcacatccctcgtccaaagatgaaggtgtgcatgcttggtgatgcccagcacgttgaggaggtaaacaggcagttgatgatgcacttgaaaatgtacttatttatatgttgaacatgcttgcagtagtaaatctgcaaaaacaccaatgcttcgagttactcaactgtggctggcatgtattagtcagtccaagcccgcacttgattccatttgcaattaaatctgcttatacaaatcctgctcaactgca

SEQ ID NO: 122432 - DNA, 240 bp, Zea Mays
atgacggcgatgacgcagagtgcggagacacgctacaaggatttgaagctgttggccacgacgaagttaaagccggacgaggagccgatggcgttgcggcctgaaggtgaggccgagggcgagtggccgggccaccagcaagctacgcgagctgaggggcgcggcgaccaagagattgaaggcgaggaaggagcgagctggagcactggcagctcggcggaggtggactcgcagccatga

SEQ ID NO: 122433 - DNA, 226 bp, Zea Mays
cggaggatgcttcccatagggcacacagagtcgtgacctctgcacacggtaagggataggttggcgatggattccggcaagaggtcaacatgctacaccgcccgatattgttgctattcgtttcgacgaacaggtttgacgccacagcgaaggtccgacggcgacgtacatgcggagctacgccggcagcggacctcacgcatctcccttctactgccatggcaac

SEQ ID NO: 122434 - DNA, 303 bp, Zea Mays
atggccgcactcctccctccactcgtctctctctctctgctcacctgtgccgttgcccagctcgcggcgctctcggcctgtttggccatggccaccgccccatggagcctccctgtgcttgcccctaagctcggttctccacctccattcatctggataccggtgctgctcgccgtcgaccttcctcatcggaccgagcctgcagtagcaacacgtcttctcgtcgaactgcgcagctctctctcctatgcgcgcagctccctcgaggtccctgtccatggctcgccgcggtgctctctctag

SEQ ID NO: 122435 - DNA, 772 bp, Zea Mays
atgtctgccgccaaccagctcgccgccctcgtcagcaacatgtacgccacgggtttgcttgacgatcagttccagcagctccagatgctccagaacgccagtactcctgacttcgtctccgaggtcgtcacgctcttctgccaggacggcgagcggatcatcggagagctggccaaactgctggagaagcccaacgtggattttgacagggttgacgcctttgtgcatcagctcaaaggaagcagtgcaagtattggtgctcagaaggttaagaacacttgcattcagttccgcgaatcctgtcagcagaagagcaaagatgggtgcctcaagacactggagacagtgaagattaacttctatgacctgcgtgacaagtttcagaccatgcttcagctgcagcgtcagatttttcaggttggtggcgacgtcaggggagggcagccagccacagatagcaatgagacatgttgctgtagcgtcagattcagggcttttgccccaagaaataactcagttactcagagtggtggaattgatggagttggatgttgggatgatgcatacaatacatctttcagaatcaagggacgtgttcaatgagctcctcacttggcttctaggcttcaaccatctaggaagtctgtaacagcctagcagcaagattagctgttgacgcttttgtgtcactgtaatagtctgtcttaaatttataaggggtggagaagcaaagcatgttatggttaataatacctaaggtagtgtttgttcg

SEQ ID NO: 122436 - DNA, 858 bp, Zea Mays
ttgagttattttttaagctccttgatttgaatattcgtgcatttcagtattggtgctcagaaggttaagaacacttgcattcagttccgcgaatcctgtcagcagaagagcaaagatgggtgcctcaagacactggagacagtgaagattaacttctatgacctgcgtgacaagtttcagaccatgcttcagctgcagcgtcaggtcaatggctgtccccccagcaagtgaacaagatggtggagtggagcttcatgttgggatgatgcgtgcatctttcaagttccagaacattctgaataagctcctcaattggcttctaggaagtctgtaatagcttagcagcaagattagcgttgacaccaccgtagcagaagtcaatgtcgtcgtttttgtgtcaccgtcttagtcgtaagtgtccgtgctgggtgatggatctcctgcaagcagttgcaagtggtccatttactatgtagtagtggctctgaataatctatatcttagcaatgaatttggcaacatgtgcgtgctgtttgatatgctatgtgaaagtgagcctgtcgttggatcatggtttgtatcattgcagatttttcaggttggtggcgacgtcaggggagggcagccagccacagatagcaatgagacatgttggtgaaggcctgccctatcaatggaatctctacgcttatagcctgaatggagcttaggttttgcttacccttgagttttttccctaacatgctcttgtcaatgtttagttttttttcactcctttcttggccattatcttgatatgttcaatgttcttctgatgcagctgtagcgtcagattcagggcttttgccccaagaaata

SEQ ID NO: 122437 - DNA, 1234 bp, Zea Mays
gctgtgccaggaatcgcattccccctgtaatccactataaataggtctcaatcatccctcactagtcactcactctattcccattccaagcccccgctctcggattcccgacgacgagctcagagctcctcctctcctcccctgctcggtgttcgacgcaacagctgccgccatgtctgccgccaaccagctcgccgccctcgtcagcaacatgtacgccacgggtttgcttgacgatcagttccagcagctccagatgctccagaacgccagtactcctgacttcgtctccgaggtcgtcacgctcttctgccaggacggcgagcggatcatcggagagctggccaaactgctggagaagcccaacgtggattttgacagggttgacgcctttgtgcatcagctcaaaggaagcagtgcaagtattggtgctcagaaggttaagaacacttgcattcagttccgcgaatcctgtcagcagaagagcaaagatgggtgcctcaagacactggagacagtgaagattaacttctatgacctgcgtgacaagtttcagaccatgcttcagctgcagcgtcaggtcaatggctgtccccccagcaagtgaacaagatggtggagtggagcttcatgttgggatgatgcgtgcatctttcaagttccagaacattctgaataagctcctcaattggcttctaggaagtctgtaatagcttagcagcaagattagcgttgacaccaccgtagcagaagtcaatgtcgtcgtttttgtgtcaccgtcttagtcgtaagtgtccgtgctgggtgatggatctcctgcaagcagttgcaagtggtccatttactatgtagtagtggctctgaataatctatatcttagcaatgaatttggcaacatgtgcgtgctgtttgatatgctatgtgaaagtgagcctgtcgttggatcatggtttgtatcattgcagatttttcaggttggtggcgacgtcaggggagggcagccagccacagatagcaatgagacatgttggtgaaggcctgccctatcaatggaatctctacgcttatagcctgaatggagcttaggttttgcttacccttgagttttttccctaacatgctcttgtcaatgtttagttttttttcactcctttcttggccattatcttgatatgttcaatgttcttctgatgcagctgtagcgtcagattcagggcttttgccccaagaaata

SEQ ID NO: 122438 - DNA, 1996 bp, Zea Mays
gcaaagccgccgcccgccgggatggtgtcgtggaggtggttaggtaggccgtgtctgctcgtgcttgctgccgcggagcgtccgctggctagctggatgacggattacacgcaacgcgacgtcgtttggccggggaccgcgcaacgtggaaacagggcgaggcaggacgcctcacgcccgcattagcacgaaacgactagcgggaccaatcggggaagggagtgcgcggaaggccggccctgccttctttttttcccccgcgaagcagggcgaggcaggcagcgtgtataaactgagcgaacgtgagcggtcttcgccttgtcctccgactcttccattccattctattcccgcttccacacgtcggtcggcgcccttcgcgatcgtgtcgtttcttcccgcagcctgcctgcgtgtggggtgatggctaggcacttcaagtacgtcatcctcggcggcggtgtcgcggcggggtacgcggcgagggagttcgccaagcagggcgtcaaccccggcgagctcgccatcatctccaaggaaccagtggccccttatgagcgccctgcactcagcaagggatacctcttccctcagaacgctgcaagactgccaggcttccacacgtgtgtgggcagcggtggagagagactacttcctgaatggtactctgagaaaggcattgaactgatcctgagtactgagattgtgaaggccgaccttgcttcaaagactctgaccagtgcagctgcggaaaccttcacatatgagaccttgctcattgctacgggctcctcggtcataaagctcactgattttggtgttcaaggagcagaatccaacaacatattgtatctaagggacattgcggatgccgacaagttggttgcagctatgcaggcaaagaagggtggaaaggctgtgattgttggaggtggttacatagggcttgagcttagcgctgccttgaaaatcaacaacttcgatgtgaccatggtgtaccctgaaccgtggtgcatgccccgtctcttcactgctggtattgctcatttctatgagggctactatgctaacaaaggaatcaaggttgtaaagggcacggttgctgttggtttcgacgctgatgccaacggagatgtcactacagtgaagttgaagaatggaagtgttctcgaagctgatattgttattgttggcgtcggcggcaggccattgacgcgtctcttcataggccaagctgctgacgagaaaggtggactcaagaccgatgcattcttcgaaacaagtgtagccggggtatacgcgatcggcgacgtggccaccttccctctgaagctctacaacgagcagaggagagttgagcacgtggaccacgcccggaagtccgccgagcaggccgtgagggcaatcaaggccaaggagtccggcgaatcggtggccgaatacgactacctgccctacttctactcccggtcgttcgacttggcgtggcagttctacggcgacaacgtcggcgacgacgtgctgttcggcgacaacgacccggcctcggccaagcccaagttcggcagctactgggtgaaggacggcaaggtcgtcggcgtgtttctcgagggcgggtcggccgaggagaaccaggccatcgccagggtcgccagggcgcagccgccggtggccgacgtccaggcgctgaagcaggaggggatcgatttcgcttccaaaatctgagctcttggaaaggtgtaaaaaaaagaaacattggtaccagttttagctgatttctttggcaattctactttgagccttttcagaccacttgggtgctttgttacacagtagttcagattagttgttagcccctccctaataatttggccttcgatgtgatgttgaaagaaccaccgtgggatgacgatcctattaataatgcatgtgatttgtagcgtctgttcatagtctacctatcgcaatgcgattttttttctttttagaatatttc

SEQ ID NO: 122439 - DNA, 100 bp, Zea Mays
cgagaaaccgttcgctcggagccttggatcatcaacgtcgagatctccactcaatcaagttatcgtatctcacggaagatcgggccacgtctactatcaa

SEQ ID NO: 122440 - DNA, 2590 bp, Zea Mays
attgtctttgtgaataatctaaactatcaaacaactatatatggattataatatatttagattataatctagattatataatctataagctgaaacaaacggacctaaggctatacagctgagagatcgatggggggaggcggggacgcgcagcctttttgccctgccttcgcgagtcgcgccaaccccccccctccccccccccccccccaaaaaaaaacccccagaaccctagcagaggtctcgagcacgagcccgcgatggcgtcggacagcgaggcggcagcgcattctacctttaacgagcacgacagtggaggacggtggtgcgcacgagagcaagcaggaacacctcaatggcgcggtggggcacccccacggttgggcaggaggaagagataatcgggccgggcccagcgccggcgaagcagcggcggaagcgccctctccagttcgagcaggcgttcctcgacgccctcccctccgccgccatgtacgagaagagctatatgcatcgggatgtcgtcacgcacgtcgctgtatctcctgctgacttcttcatcactgggagcgcagatgggcatctgaagttttggaagaagaaacctgttggggttgaatttgctaaacattttcggtctcatctcagtcccatcgaaggtctagctgtgagtgttgatggattgctttgctgcacgatatcaaacgatcggtctgtgaagatatatgatgttgtaaactatgacatgatgttcatgatacgtctctcatttgttcctggggctattgagtgggttcatcgagaaggagatgttaaaccaaaacttgccgttagtgaccgaaatacacctttcgttcacatatttgatacccattctggttcaaatgacccaatcatgtccaaagagattcatggtggccctgtcaaagttatgaaatataaccacattcatgatgttgttatatctgctgatgccaaaggactgttggaatattggtctccatctaccctcatgtttccagaaaatgaggtgaggtttcgcctgaaatcagatacaaatctatttgaaattgcgaaatgcaagactactgtgtctgctattgaggtaagcaatgatggcactcaatttgctgtcacatcccctgatcgcaggatacgtgtattttggttcaaaactggaaaattaagacgtgtatatgacgagtccctagatgtggcgcaagatcttcaaagaagtgatgttccattgtatcaccttgatgctattgattttggacgacgaatggctgtggagaaggaaatagagaaaacagaaaatgttccacaacctaatgctgtctttgatgagagttgcaattttcttatttatgctacccttttgggtgtaaagattgtgaatttgcacacaaataaggtttcccgtatcctggggaaggtagagaacaatgagaggtttctgagaattgcactataccaaggagacaaaggcaacaagaaggttagaaaaattccttcagtagctgccaatgtcaatgatagcaaggaaccattatcagacccaacgctgctgtgttgtgctttcaagaagcatcggatatatctctttagtcgtagggaaccagaagagcctgaagatgcaactaagggtagagatgttttcaatgaaaaaccaccgccagaagagcttttgtctgcatcagacctaggaaaaactgctacaacatcattgcctgataatttggtgctacatacttctatgggtgacattcacttgagactatatccagaagagtgtccaaaaactgttgaaaacttcactacccattgtcggaatggttattatgacaatcttatatttcatcgtgtgattaaaggattcatgattcagactggagatcctttgggggatggtactggtggacaatcaatctggggcacagaatttgaagatgaatttcacaagagcttgaggcatgataggccttttacactttccatggccaatgcgggacctaacaccaatggttctcaattcttcttcaccactgtagcaactccatggctagataacaaacacacagtgtttggtagagttgtgaaagggatggatgttgtccagcaaattgagaaggtcaagactgacaagaatgacaaaccatatcaagatgtaaaaatcttgaatgttacagttcccaagacataagcgcgtgatcagttgggttcggaaattgtgcctgcactccttggttggacatattgctaaacctgtagaagctggagtcttacgagatcagctgtaatgctatgggtgaattgagcacaccttgggctgctcttgacgtcgggggtgcagctggcagaatggcctttgattacactacactaagaaatttctacttggggatgtggatctcatcacttcgataacttatctgaagtactacgtcgtttcgccaagtaactgcgtgtacgtcacttagcacattcatgtacaccgtattatatatccatgtaccctgaaagaatggtttgataaaaaggaagaagacaacggagatgaaaaaaaagtaaactaagagtctttgccatc

SEQ ID NO: 122441 - DNA, 2866 bp, Zea Mays
attgtctttgtgaataatctaaactatcaaacaactatatatggattataatatatttagattataatctagattatataatctataagctgaaacaaacggacctaaggctatacagctgagagatcgatggggggaggcggggacgcgcagcctttttgccctgccttcgcgagtcgcgccaaccccccccctccccccccccccccccaaaaaaaaacccccagaaccctagcagaggtctcgagcacgagcccgcgatggcgtcggacagcgaggcggcagcgcattctacctttaacgagcacgacagtggaggacggtggtgcgcacgagagcaagcaggaacacctcaatggcgcggtggggcacccccacggttgggcaggaggaagagataatcgggccgggcccagcgccggcgaagcagcggcggaagcgccctctccagttcgagcaggcgttcctcgacgccctcccctccgccgccatgtacgagaagagctatatgcatcgggatgtcgtcacgcacgtcgctgtatctcctgctgacttcttcatcactgggagcgcagatgggcatctgaagttttggaagaagaaacctgttggggttgaatttgctaaacattttcggtctcatctcagtcccatcgaaggtctagctgtgagtgttgatggattgctttgctgcacgatatcaaacgatcggtctgtgaagatatatgatgttgtaaactatgacatgatgttcatgatacgtctctcatttgttcctggggctattgagtgggttcatcgagaaggagatgttaaaccaaaacttgccgttagtgaccgaaatacacctttcgttcacatatttgatacccattctggttcaaatgacccaatcatgtccaaagagattcatggtggccctgtcaaagttatgaaatataaccacattcatgatgttgttatatctgctgatgccaaaggactgttggaatattggtctccatctaccctcatgtttccagaaaatgaggtgaggtttcgcctgaaatcagatacaaatctatttgaaattgcgaaatgcaagactactgtgtctgctattgaggtaagcaatgatggcactcaatttgctgtcacatcccctgatcgcaggatacgtgtattttggttcaaaactggaaaattaagacgtgtatatgacgagtccctagatgtggcgcaagatcttcaaagaagtgatgttccattgtatcaccttgatgctattgattttggacgacgaatggctgtggagaaggaaatagagaaaacagaaaatgttccacaacctaatgctgtctttgatgagagttgcaattttcttatttatgctacccttttgggtgtaaagattgtgaatttgcacacaaataaggtttcccgtatcctggggaaggtagagaacaatgagaggtttctgagaattgcactataccaaggagacaaaggcaacaagaaggttagaaaaattccttcagtagctgccaatgtcaatgatagcaaggaaccattatcagacccaacgctgctgtgttgtgctttcaagaagcatcggatatatctctttagtcgtagggaaccagaagagcctgaagatgcaactaagggtagagatgttttcaatgaaaaaccaccgccagaagagcttttgtctgcatcagacctaggaaaaactgctacaacatcattgcctgataatttggtgctacatacttctatgggtgacattcacttgagactatatccagaagagtgtccaaaaactgttgaaaacttcactacccattgtcggaatggttattatgacaatcttatatttcatcgtgtgattaaaggattcatgattcagactggagatcctttgggggatggtactggtggacaatcaatctggggcacagaatttgaagatgaatttcacaagagcttgaggcatgataggccttttacactttccatggccaatgcgggacctaacaccaatggttctcaattcttcttcaccactgtagcaactccatggctagataacaaacacacagtgtttggtagagttgtgaaagggatggatgttgtccagcaaattgagaaggtcaagactgacaagaatgacaaaccatatcaagatgtaaaaatcttgaatgttacagttcccaagacataagcgcgtgatcagttgggttcggaaattgtgcctgcactccttggttggacatattgctaaacctgtagaagctggagtcttacgagatcagctgtaatgctatgggtgaattgagcacaccttgggctgctcttgacgtcggggtattggaaccttgcaattttcaggatcgatggtaccacaggaattttaggtttacttgctttgattgcagaattatagggcagaaggttgtagttttgtaacgttgagttaattttaagtttagctgctttgattctagaatcctggggccaccgggcctgcggcgtagacactcactggttttgggcgctgacctggccttcccccaatttctgcgtcagcaaatgtacggcctgggaagaatctttgatgggtcgtcgctgtctgcagggtgcagctggcagaatggcctttgattacactacactaaggtcttgttcagttattttaatttcatgtgaattgaagtgtattaaaatggattgggataaattttgacttgttatgtatttaaaacaacataatatcacttaatccacatggattaatgatgaaaccaacaatccataatgtgagccgtgtgtaccgtgtatcacgatgcaaaccttgactatggagaaggaatgcatcgctcggtgg

SEQ ID NO: 122442 - DNA, 1489 bp, Zea Mays
cccgtccggaaggcacggcgcgaggtgaccccacgtgtcagttgtcacgccccaaagaccggcaccccgccgggtccgaggtgcatcgcggcatcggcatcgccacaaagcccatctcacagccccgcagcctcttctcctcgtccatctcttccgcctccctccccgcgccgccgttcgccgaagccccgcgtcgcgtcgcgtaggtaacttctacgaacccctactcccattgagtgcttgatggctgccgcaaggggcattaaccagcttctgaagagaattctccacaaccagtccgctgtaagtggtccatggctgctttcttcatttcggggaaatcatgaagagtcctctgctggattgagagcattggcgcttcttggagttggtgcctccggtcttttgagttttgctacaatagcatctgctgatgaagctgagcatggtttggcagccccagattatccgtggccacatgctggcatcatgagctcttatgatcatgcatcaattcgccgagggcatcaagtttacacacaagtttgtgcttcttgtcactccatgtccttgatttcataccgtgatttggttggggtggcctatactgaggaggaaacaaaggcaatggctgctgagattgaggtcgttgatggtcctaatgatgagggtgaaatgttcacccgccctggtaaactcagcgatcgctttccacagccttatgcaaatgagcaagcagcccgatttgctaatggtggcgcctacccgccggaccttagtcttatcacaaaggcaaggcacaatggtcagaactatgttttcgctcttcttactggataccgtgatccacctgctggtgttcagattcgtgagggtctgcactacaacccctacttccctggtggtgccatagccatgcccaagatgctcaatgatggagctgttgagtatgaggatggtactcctgcaactgaagcccagatgggtaaggatgttgtatcattcctttcatgggcagctgagcctgagatggaagagagaaagctgatgggagtgaaatggatctttctactatcactagcgcttcttcaagctgcatactaccgccgcatgaggtggtcagtcttgaagtcccgtaagctggtcctggatgttgtcaactgaggactaccattacccttttttatatttaaatatgagctgttaaggagtattcaaaataatgaatttgtgatgtacaattttgccactgggggctaggttccatgcctagagattattttgttttctttactctgctgagctgcaaaagcatttcaccaacgggtacatttcacgtttttttggtttgcaatgcctcgatgttatcagcaaccttgtaacttaacagctgatgagagttgataaattcttgtgctatgaaatacacctatcgtatgtcttggtctcgcttgcgggagtattgtgtttgctattcagttattcttgc

SEQ ID NO: 122443 - DNA, 1385 bp, Zea Mays
cccacgtgtcagttgtcacgccccaaagaccggcaccccgccgggtccgaggtgcatcgcggcatcggcatcgccacaaagcccatctcacagccccgcagcctcttctcctcgtccatctcttccgcctccctccccgcgccgccgttcgccgaagccccgcgtcgcgtcgcgtagagtgcttgatggctgccgcaaggggcattaaccagcttctgaagagaattctccacaaccagtccgctggtccatggctgctttcttcatttcggggaaatcatgaagagtcctctgctggattgagagcattggcgcttcttggagttggtgcctccggtcttttgagttttgctacaatagcatctgctgatgaagctgagcatggtttggcagccccagattatccgtggccacatgctggcatcatgagctcttatgatcatgcatcaattcgccgagggcatcaagtttacacacaagtttgtgcttcttgtcactccatgtccttgatttcataccgtgatttggttggggtggcctatactgaggaggaaacaaaggcaatggctgctgagattgaggtcgttgatggtcctaatgatgagggtgaaatgttcacccgccctggtaaactcagcgatcgctttccacagccttatgcaaatgagcaagcagcccgatttgctaatggtggcgcctacccgccggaccttagtcttatcacaaaggcaaggcacaatggtcagaactatgttttcgctcttcttactggataccgtgatccacctgctggtgttcagattcgtgagggtctgcactacaacccctacttccctggtggtgccatagccatgcccaagatgctcaatgatggagctgttgagtatgaggatggtactcctgcaactgaagcccagatgggtaaggatgttgtatcattcctttcatgggcagctgagcctgagatggaagagagaaagctgatgggagtgaaatggatctttctactatcactagcgcttcttcaagctgcatactaccgccgcatgaggtggtcagtcttgaagtcccgtaagctggtcctggatgttgtcaactgaggactaccattacccttttttatatttaaatatgagctgttaaggagtattcaaaataatgaatttgtgatgtacaattttgccactgggggctaggttccatgcctagagattattttgttttctttactctgctgagctgcaaaagcatttcaccaacgggtacatttcacgtttttttggtttgcaatgcctcgatgttatcagcaaccttgtaacttaacagctgatgagagttgataaattcttgtgctatgaaatacacctatcgtatgtcttggtctc

SEQ ID NO: 122444 - DNA, 1381 bp, Zea Mays
cccacgtgtcagttgtcacgccccaaagaccggcaccccgccgggtccgaggtgcatcgcggcatcggcatcgccacaaagcccatctcacagccccgcagcctcttctcctcgtccatctcttccgcctccctccccgcgccgccgttcgccgaagccccgcgtcgcgtcgcagtgcttgatggctgccgcaaggggcattaaccagcttctgaagagaattctccacaaccagtccgctggtccatggctgctttcttcatttcggggaaatcatgaagagtcctctgctggattgagagcattggcgcttcttggagttggtgcctccggtcttttgagttttgctacaatagcatctgctgatgaagctgagcatggtttggcagccccagattatccgtggccacatgctggcatcatgagctcttatgatcatgcatcaattcgccgagggcatcaagtttacacacaagtttgtgcttcttgtcactccatgtccttgatttcataccgtgatttggttggggtggcctatactgaggaggaaacaaaggcaatggctgctgagattgaggtcgttgatggtcctaatgatgagggtgaaatgttcacccgccctggtaaactcagcgatcgctttccacagccttatgcaaatgagcaagcagcccgatttgctaatggtggcgcctacccgccggaccttagtcttatcacaaaggcaaggcacaatggtcagaactatgttttcgctcttcttactggataccgtgatccacctgctggtgttcagattcgtgagggtctgcactacaacccctacttccctggtggtgccatagccatgcccaagatgctcaatgatggagctgttgagtatgaggatggtactcctgcaactgaagcccagatgggtaaggatgttgtatcattcctttcatgggcagctgagcctgagatggaagagagaaagctgatgggagtgaaatggatctttctactatcactagcgcttcttcaagctgcatactaccgccgcatgaggtggtcagtcttgaagtcccgtaagctggtcctggatgttgtcaactgaggactaccattacccttttttatatttaaatatgagctgttaaggagtattcaaaataatgaatttgtgatgtacaattttgccactgggggctaggttccatgcctagagattattttgttttctttactctgctgagctgcaaaagcatttcaccaacgggtacatttcacgtttttttggtttgcaatgcctcgatgttatcagcaaccttgtaacttaacagctgatgagagttgataaattcttgtgctatgaaatacacctatcgtatgtcttggtctc

SEQ ID NO: 122445 - DNA, 1467 bp, Zea Mays
cccacgtgtcagttgtcacgccccaaagaccggcaccccgccgggtccgaggtgcatcgcggcatcggcatcgccacaaagcccatctcacagccccgcagcctcttctcctcgtccatctcttccgcctccctccccgcgccgccgttcgccgaagccccgcgtcgcgtcgcgtagagtgcttgatggctgccgcaaggggcattaaccagcttctgaagagaattctccacaaccagtccgctggtccatggctgctttcttcatttcggggaaatcatgaagagtcctctgctggattgagagcattggcgcttcttggagttggtgcctccggtcttttgagttttgctacaatagcatctgctgatgaagctgagcatggtttggcagccccagattatccgtggccacatgctggcatcatgagctcttatgatcatgcatcaattcgccgagggcatcaagtttacacacaagtttgtgcttcttgtcactccatgtccttgatttcataccgtgatttggttggggtggcctatactgaggaggaaacaaaggcaatggctgctgagattgaggtcgttgatggtcctaatgatgagggtgaaatgttcacccgccctggtaaactcagcgatcgctttccacagccttatgcaaatgagcaagcagcccgatttgctaatggtggcgcctacccgccggaccttagtcttatcacaaaggtaattgcagttaatggtgttgcattgctttgatgtggcctttcactgattatggcttactgtttgcattgcattcatccaggcaaggcacaatggtcagaactatgttttcgctcttcttactggataccgtgatccacctgctggtgttcagattcgtgagggtctgcactacaacccctacttccctggtggtgccatagccatgcccaagatgctcaatgatggagctgttgagtatgaggatggtactcctgcaactgaagcccagatgggtaaggatgttgtatcattcctttcatgggcagctgagcctgagatggaagagagaaagctgatgggagtgaaatggatctttctactatcactagcgcttcttcaagctgcatactaccgccgcatgaggtggtcagtcttgaagtcccgtaagctggtcctggatgttgtcaactgaggactaccattacccttttttatatttaaatatgagctgttaaggagtattcaaaataatgaatttgtgatgtacaattttgccactgggggctaggttccatgcctagagattattttgttttctttactctgctgagctgcaaaagcatttcaccaacgggtacatttcacgtttttttggtttgcaatgcctcgatgttatcagcaaccttgtaacttaacagctgatgagagttgataaattcttgtgctatgaaatacacctatcgtatgtcttggtctc

SEQ ID NO: 122446 - DNA, 573 bp, Zea Mays
acccggcctctctctctcctcccttctcttccctctctcttctctctaccgcgaccgcgccaaggatcaagcgcacgcgacgcccgacgccccgactgcctcgacccacctgcgcctaggaagacccgacgccgccagcgcccaggaagacccgctttcggtatgttccaatgtttgtggagatagagtacgatccgaactgctagtacacatctgttctaatggaagagcaactggaggctcttggaagagcaatagttcctcgcaagacaggcaattgaaaatgagaattgatcttttttatgggcgaagtgttgaagatggctttggtgaaggaaatgtcttgttagcatcaagtaagtggcgacatcacaacccctacaagcttgtgccttaaaacaagaggatacaagaagttggagtgcttttgtgaaggcttttgcgaatcacttgaagcgttagtacttttgtgaatgattttgtaaagtatttgcaaatatgtgcaaaacataataacatgtgtagtttttgtgaatgattttgttgtggtgtttgttgatggtttatgtaacg

SEQ ID NO: 122447 - DNA, 1485 bp, Zea Mays
gtaagctactacaaataatctaatcataaattagttatacataaaaaaatgtctcatcatttagtctttatttatataattattttctataattaaactatatttaaaactttttcttaatattaaaaaaacattcgatgtaagggcaggaccaattagaaagtacaaactcgcctataatatagacggaggagcaccaacggcattattggtttcgccaaaaacctcaccggctccattcgaccattccatcctttccttatcccctcccgcttcgtctcccttcctggcttcctttcttcgccatggcaaccatgtccctccgctgcctcgccatggccatggccgacaccgcgctcccgcccgcccacaagctcctccccacagtttccctcccgctcctctcctcgtccacccgcgccgcgccgctcctcctcttcgccaggcgccgcctgccgctcgcgcccctcgttacctcctccgacgccgttgaggccaagtcggcagacgaggaggaggagaaggccggagagcccgtcgaaatggaagctggggagtttgaggaggtgctagcctcaggcggcgagggtgaggggcagtacgccgcggtggagccgccagaggaggccaaggtctacgttgggaaccttccctacgacgtcgacagcgagggactcgcgcagatcttcgaccaggccggcgtcgtcgaggtcgccgaggttatctacaacagagaaactggccagagccgtgggtttggttttgttaccatgagcactgttgaggaagctgacaaagccattgagatgttcagccgctatgatattagcgggaggcttctgaatgtaaacagggcatcttctaggggcactcgcatggaaagacctcagagacaatttgcaccagctttcagagcttatgttggcaacttgccatggcaagttgatgactctaggctggtgcagttgttcagcgagcatggagaagttgttgatgctaaggttgtctacgacagagaaactgggcgctcacgaggattcggttttgtatcaatggtgtcaaaggaggaactcaatgatgctatttcggccctagatggacaggaattggacggccgccctcttcgagtgaatgttgcagcagagcggccacagaggggcttttgatgcggttgtatgagagagatgactgtttgtttgtaatgagcatggagacacagagacacaatggaggagcaatggtacaaattagcggaagcggatgctgtcacaagttgctagatctttctcccttagcttcctgacatttggttcttgccacagctttttgatgcttctcttggcagctggacttaatggtttgctattcttgtcgacatcacgagttgaattgtcaaactagtctcttatgttctatgctgatttgccttaaccagattctcagcatggcaaaatgttttgtgggtgaaattaggggtggaaaaaa

SEQ ID NO: 122448 - DNA, 1101 bp, Zea Mays
gtaagctactacaaataatctaatcataaattagttatacataaaaaaatgtctcatcatttagtctttatttatataattattttctataattaaactatatttaaaactttttcttaatattaaaaaaacattcgatgtaagggcaggaccaattagaaagtacaaactcgcctataatatagacggaggagcaccaacggcattattggtttcgccaaaaacctcaccggctccattcgaccattccatcctttccttatcccctcccgcttcgtctcccttcctggcttcctttcttcgccatggcaaccatgtccctccgctgcctcgccatggccatggccgagttatctacaacagagaaactggccagagccgtgggtttggttttgttaccatgagcactgttgaggaagctgacaaagccattgagatgttcagccgctatgatattagcgggaggcttctgaatgtaaacagggcatcttctaggggcactcgcatggaaagacctcagagacaatttgcaccagctttcagagcttatgttggcaacttgccatggcaagttgatgactctaggctggtgcagttgttcagcgagcatggagaagttgttgatgctaaggttgtctacgacagagaaactgggcgctcacgaggattcggttttgtatcaatggtgtcaaaggaggaactcaatgatgctatttcggccctagatggacaggaattggacggccgccctcttcgagtgaatgttgcagcagagcggccacagaggggcttttgatgcggttgtatgagagagatgactgtttgtttgtaatgagcatggagacacagagacacaatggaggagcaatggtacaaattagcggaagcggatgctgtcacaagttgctagatctttctcccttagcttcctgacatttggttcttgccacagctttttgatgcttctcttggcagctggacttaatggtttgctattcttgtcgacatcacgagttgaattgtcaaactagtctcttatgttctatgctgatttgccttaaccagattctcagcatggcaaaatgttttgtgggtgaaatt

SEQ ID NO: 122449 - DNA, 1629 bp, Zea Mays
tccgcaccaaccaataggcgcaggcagacgccggcccgtcctcggtttctcagctgctccctcggtctcatcgaaaactccctcgttttatttcctctgctccctctccgcttctctccactatcctaccaggcaccactcgcatcgtgtgctcagtcagatccccgtcccgcatttcctaaggccaggttagttggcattgaagacgatgactgcttctgcagctgctggtgtgcagatggtggctgcacgcccttgcatttcggcctcgccaggaattcttaccgcacgggtttctaggactgattgcatgctcagtaccactgctacattccccaaaatcagctgctcctggcctctaaggtttaagcgcaatgatgttgttgtaagagcaatatcggaagagtgtggcccgcaggggcttcccattgatctcagaggtaaaagggcattcattgctggagttgctgatgataatggctatggatgggcaattgcgaaggcacttgctgcggctggtgctgaaattcttgtgggtacatgggtgccggcacttaacatatttgagacaagtctgaggcgtggaaagtttgatgaatcacggaagctgccagatggatctcttatggatattgttaaagtctatccacttgatgctgtctacgattcccctgatgatgttcctgaagatgtcaaatcgaacaaaagatatgcaggggcatcaaactggacagtaaaggaagttgttgaatcagtgaggaatgattttggcagcattgacatactagtgcattctcttgctaatggcccagaggtaacgaagcctttgttggaaacctcaagaagaggctatcttgcggcaatttctgcatccagttactcctatgtttcattgcttcagcacttccttcctataatgaatcccggtggtgctagcatctctctaacatacattgcatctgaaagggcgattcctgggtatggtggtgggatgagttctgctaaagcagctcttgagagtgatacacgggtgcttgcattcgaagctgggcgaaaaggcaaaatcagagttaacaccatatcagcaggccctcttgggagccgagctgctaaggcaattggatttattgagaagatgatagagtactcatatgttaatgcaccattgcagaaggagctgttggctgatgaggtggggaacacagctgcattcctggtttcttcattggcttctgccatcaccggctcgactgtttatgttgacaatgggctcaatacaatggggcttgcaattgacagccctaccataacgtcatagatgtggttgtggtagatagacgacctttcctgctgcattgcggtatcatccttgaataaagatcatagttagttataaatatgagaggtaagggcaggaaagggggaaaattatgaactggtcttttgcgctttctttgctggagaggaacattagagcgatttccagaatgatgggatgctattatgtgatttcatatgattcagaagcagtacaataactccctagatgagctgtcataactatacttatgtttaagaaacagcctacatcttaggtcacttatgttttatccactgtattttacttaa

SEQ ID NO: 122450 - DNA, 1621 bp, Zea Mays
tccgcaccaaccaataggcgcaggcagacgccggcccgtcctcggtttctcagctgctccctcggtctcatcgaaaactccctcgttttatttcctctgctccctctccgcttctctccactatcctaccaggcaccactcgcatcgtgtgctcagtcagatccccgtcccgcatttcctaaggccagttggcattgaagacgatgactgcttctgcagctgctggtgtgcagatggtggctgcacgcccttgcatttcggcctcgccaggaattcttaccgcacgggtttctaggactgattgcatgctcagtaccactgctacattccccaaaatcagctgctcctggcctctaaggtttaagcgcaatgatgttgttgtaagagcaatatcggaagagtgtggcccgcaggggcttcccattgatctcagaggtaaaagggcattcattgctggagttgctgatgataatggctatggatgggcaattgcgaaggcacttgctgcggctggtgctgaaattcttgtgggtacatgggtgccggcacttaacatatttgagacaagtctgaggcgtggaaagtttgatgaatcacggaagctgccagatggatctcttatggatattgttaaagtctatccacttgatgctgtctacgattcccctgatgatgttcctgaagatgtcaaatcgaacaaaagatatgcaggggcatcaaactggacagtaaaggaagttgttgaatcagtgaggaatgattttggcagcattgacatactagtgcattctcttgctaatggcccagaggtaacgaagcctttgttggaaacctcaagaagaggctatcttgcggcaatttctgcatccagttactcctatgtttcattgcttcagcacttccttcctataatgaatcccggtggtgctagcatctctctaacatacattgcatctgaaagggcgattcctgggtatggtggtgggatgagttctgctaaagcagctcttgagagtgatacacgggtgcttgcattcgaagctgggcgaaaaggcaaaatcagagttaacaccatatcagcaggccctcttgggagccgagctgctaaggcaattggatttattgagaagatgatagagtactcatatgttaatgcaccattgcagaaggagctgttggctgatgaggtggggaacacagctgcattcctggtttcttcattggcttctgccatcaccggctcgactgtttatgttgacaatgggctcaatacaatggggcttgcaattgacagccctaccataacgtcatagatgtggttgtggtagatagacgacctttcctgctgcattgcggtatcatccttgaataaagatcatagttagttataaatatgagaggtaagggcaggaaagggggaaaattatgaactggtcttttgcgctttctttgctggagaggaacattagagcgatttccagaatgatgggatgctattatgtgatttcatatgattcagaagcagtacaataactccctagatgagctgtcataactatacttatgtttaagaaacagcctacatcttaggtcacttatgttttatccactgtattttact

SEQ ID NO: 122451 - DNA, 1696 bp, Zea Mays
tccgcaccaaccaataggcgcaggcagacgccggcccgtcctcggtttctcagctgctccctcggtctcatcgaaaactccctcgttttatttcctctgctccctctccgcttctctccactatcctaccaggcaccactcgcatcgtgtgctcagtcagatccccgtcccgcatttcctaaggccaggttagttggcattgaagacgatgactgcttctgcagctgctggtgtgcagatggtggctgcacgcccttgcatttcggcctcgccaggaattcttaccgcacgggtttctaggactgattgcatgctcagtaccactgctacattccccaaaatcagctgctcctggcctctaaggtttaagcgcaatgatgttgttgtaagagcaatatcggaagagtgtggcccgcaggggcttcccattgatctcagaggtaaaagggcattcattgctggagttgctgatgataatggctatggatgggcaattgcgaaggcacttgctgcggctggtgctgaaattcttgtgggtacatgggtgccggcacttaacatatttgagacaagtctgaggcgtggaaagtttgatgaatcacggaagctgccagatggatctcttatggatattgttaaagtctatccacttgatgctgtctacgattcccctgatgatgttcctgaagatgtcaaatcgaacaaaagatatgcaggggcatcaaactggacagtaaaggaagttgttgaatcagtgaggaatgattttggcagcattgacatactagtgcattctcttgctaatggcccagaggtaacgaagcctttgttggaaacctcaagaagaggctatcttgcggcaatttctgcatccagttactcctatgtttcattgcttcagcacttccttcctataatgaatcccggtggtgctagcatctctctaacatacattgcatctgaaagggcgattcctgggtatggtggtgggatgagttctgctaaagcagctcttgagagtgatacacgggtatggtgttgcataattgtgtgcttaaattcttcctttccccatgaattcattttctcttttacgtttataaacctgccgatataggtgcttgcattcgaagctgggcgaaaaggcaaaatcagagttaacaccatatcagcaggccctcttgggagccgagctgctaaggcaattggatttattgagaagatgatagagtactcatatgttaatgcaccattgcagaaggagctgttggctgatgaggtggggaacacagctgcattcctggtttcttcattggcttctgccatcaccggctcgactgtttatgttgacaatgggctcaatacaatggggcttgcaattgacagccctaccataacgtcatagatgtggttgtggtagatagacgacctttcctgctgcattgcggtatcatccttgaataaagatcatagttagttataaatatgagaggtaagggcaggaaagggggaaaattatgaactggtcttttgcgctttctttgctggagaggaacattagagcgatttccagaatgatgggatgctattatgtgatttcatatgattcagaagcagtacaataactccctagatgagctgtcataactatacttatgtttaagaaacagcctacatcttaggtcacttatgtttt

SEQ ID NO: 122452 - DNA, 171 bp, Zea Mays
cggcctcaacctcggcctcgaaaggaggtcttcgcctcgcccgaccctagggctcagcctcaacctcggcctcggaaggtggtctccgcctcgcccgaccccagggctcggcctcaacctcgacctcgggaggaatcgcgtcctcgcccgaccccggcctcggcctcaggg

SEQ ID NO: 122453 - DNA, 554 bp, Zea Mays
cgccgcccgccgtccactggtcccgcctcccagtgtccgctccacgcctccactgctcccggcgtccgctccattgctcctggcgtccagcgttctgctcctgcgtcgtcctcgtcctacgcgccgccaccgacgcgggcagtggtgccgccgccccccgcgagtctcattttccagttcttactgaatatacaaatttatctgaatttcgattgtttttctgcttgtgaaccttttaggttctgcacaacaggacttcctagcgatgtcaccattgaggttggggatatgtctttccaccttcacaagttccctttacttttaaaaagtgcctttcttgaacggtcaattgaagaaaattctgaccaagaagaatgcatcatcaaactaaatgacattcctgggggtgccaagtcatttgagctagttgcaaggttctgctatggtgtgaaaatagagctttcacctacaaatgttgtctacctacggtgtgcctcaaagcatctagaaatgactgaagaagtagctaaggaaaacctgattgcaccacaaat

SEQ ID NO: 122454 - DNA, 823 bp, Zea Mays
gaacgacaacgacatgggtagtcttggatgtggccgaatccgtttagagcttcacttcgacgaccaccagaacgatatcgggactcgacggcgaacgacgagctgggcaggatccgagctaataggcacagtatgtgacagcgaccagcacgacggacaaactaagtcgcggcgagatcggccgacgagggaaaataaggatcacgatggtcagtcggcaagctggcagagggaggagtgctggcgaggttggggaaaacaatgaccggcgcggttggggaaaaggcagggcgcgacagaaagctccaaaccggcgcggccatggcagagctgggcgccgagttggagggagagcgagctagacgcgcagggagctcgggcgagccgggaccggacgccgagcaggggaagaagcaggagctggggcgcggcatgggaaagcaggggcacgtcagggaagaagctgcgcgcggctgggaagaatcaggggcgagctcgtcgcggccaacagggagcagcgcgcgcggcgatgggagcagctccatgacgagggcgcacagagcacggggagatgggcgccatccgagccaggggcgagctcggggcagggaggacgcgcgcaggcgagcttgaagaggaccgcgctgaggggagagaggaggagcaccgcggcgagcagcaaggaagaagacgcgcaggagagaagcttggctgtcggccgataaaatcaatcggagatggagcggcggtaggataggaatgaaagagattttcctagatttttttttgagaatcagcgcgtggagcagcttaaacgaatgcc

SEQ ID NO: 122455 - DNA, 1435 bp, Zea Mays
aaataatgttacaaatggaaaagtgagaagcaacttctttggactaaaaaaatccaattttctccgcgacgaaggagaggcatccctcccttccgcgtggtgtgctctctgttcctacgccgtttcctctcccgactctctcctcgccggcgacgccgcggagtaggtgcaacagaaactgctcgaggcggaggcggagcctgcggctgcacagacatgggtgatcacgaggcgcgcggtgatgacttcgagaagaaggcggagaagaagctctcgggctggggcctcttcggctccaagtacgaggacgccgccgacctcttcgacaaggctgcgaactccttcaagctcgccaagaactggagcagagctgcatcagtttacatcaagattgctaactgtcatttgaagggagatagcaagcatgaggctgcctcagcgtacgtcgaggcagcaaattgctacaaaaagttttcacctcaggaagctgcgcaagcgctaaaccagtctgttaatcttttcttggaaattggtaggttgaacatggctgcaagatacagcaaggacattggtgagatatatcagcaagaacaagatttagagaaggctacagattacctggaaagggcagctgacctttttgacagtgagggacagtcgtctcaatcaaacaccatcaaacagaaagttgcagaaattgctgctcagttggaacagtacccaaaagcaactgagatatttgaagcgatcgctcgtcagtcaatcaacaacaatcttcttaagtatagtgtcagaggaattcttcttaatgctggcatctgtcaactatgtagaggtgatcctattgccatcacaaattcattggagcgataccaggaaattgacccgactttctctgggacacgtgaatacaagcttttagctgatcttgctgcatctatggatgaaggggatgttgccaaattcactgatgcaatcaaagaatttgatagcatgacacgtctggatccttggaaaaccaccctgctgctcagggcgaagaacgagctgaagaaaaaggaggacgatgaggacgaccttacataagtattgtagtaaaaagaaatggtacgatatgttttggtttgtgcctccattgcattggaggcatcgtgttccttacaaacgagcatgatgaaattaatcgctggtctggttgtacagaacgtcaatttgggttctactgttgatgtgactgccagtttcgttgacttgatgccagagtgaaaattagtaccgagatgcttgtttctggggttctgttcttttcaaatctttagaccttatttcctattgtacttctatacctcgtattaataatctaagcggtttccaatggattgtatcattgttctgctattgtagctttatcaagttaattcaattgttagaataa

SEQ ID NO: 122456 - DNA, 1339 bp, Zea Mays
aaataatgttacaaatggaaaagtgagaagcaacttctttggactaaaaaaatccaattttctccgcgacgaaggagaggcatccctcccttccgcgtggtgtgctctctgttcctacgccgtttcctctcccgactctctcctcgccggcgacgccgcggagtaggtgcaacagaaactgctcgaggcggaggcggagcctgcggctgcacagacatgggtgatcacgaggcgcgcggtgatgacttcgagaagaaggcggagaagaagctctcgggctggggcctcttcggctccaagtacgaggacgccgccgacctcttcgacaaggctgcgaactccttcaagctcgccaagaactggagcagagctgcatcagtttacatcaagattgctaactgtcatttgaagggagatagcaagcatgaggctgcctcagcgtacgtcgaggcagcaaattgctacaaaaagttttcacctcaggaagctgcgcaagcgctaaaccagtctgttaatcttttcttggaaattggtaggttgaacatggctgcaagatacagcaaggacattggtgagatatatcagcaagaacaagatttagagaaggctacagattacctggaaagggcagctgacctttttgacagtgagggacagtcgtctcaatcaaacaccatcaaacagaaagttgcagaaattgctgctcagttggaacagtacccaaaagcaactgagatatttgaagcgatcgctcgtcagtcaatcaacaacaatcttcttaagtatagtgtcagaggaattcttcttaatgctggcatctgtcaactatgtagaggtgatcctattgccatcacaaattcattggagcgataccaggaaattgacccgactttctctgggacacgtgaatacaagcttttagctgatcttgctgcatctatggatgaaggggatgttgccaaattcactgatgcaatcaaagaatttgatagcatgacacgtctggatccttggaaaaccaccctgctgctcagggcgaagaacgagctgaagaaaaaggaggacgatgaggacgaccttacataagtattgtagtaaaaagaaatgaacgtcaatttgggttctactgttgatgtgactgccagtttcgttgacttgatgccagagtgaaaattagtaccgagatgcttgtttctggggttctgttcttttcaaatctttagaccttatttcctattgtacttctatacctcgtattaataatctaagcggtttccaatggattgtatcattgttctgctattgtagctttatcaagttaattcaattgttagaataa

SEQ ID NO: 122457 - DNA, 300 bp, Zea Mays
atgaccgacgttcacccggtgggggtttccccgattggaggtggaagcagaacgatgggggcggttattatcgatgtttgtgcagatcggagcatggtccacgggggggaggctgaccgcggcggccacaacactccgatatatatacccgcgtgtacccaataccctacgggtacgggcatgggtacaatgttttacctacgggtacagttgcgggcgggtatggctaatactcgtgggtacggttgcgggcgggtatctattatacccgacccgaatccgacccgttgccatccctag

SEQ ID NO: 122458 - DNA, 769 bp, Zea Mays
atctttagttggatcataatctaatggatcggatggtttgtttgcacgcgaaggactgcttcatagcggtcgttgccctgaaattcgtgtgacctgtggagatgcctaaagaaccctagtcacacggaacactcagtgcctgcacgcacgagcgaattaccaggcgtttgcgatgggcggagaggccacgaatgccggcggcgggggtatccgcgcgcggatggagcactacctttacagtggcgagaagaagcacgtcgtcgccggcatcgccatcttcgctgccgtcttcggcgtcccatggtacttcatgacgcgaggggcaaagcatcaatctcaccaagattacatggaaaaggctaacaaggcgagatcagagaggctttcttctggacagtcatctgcactaaaagaatgaatgttgtattgcctattctggtccctgaccttcagagcttgtcatagatcatacactgtattgatttgcactcaacggatttgatctgttgttaaataagcaggttatctttctttctaatatcagttgtggaaacgaggtacgttccaagaattttgtctactggtgatctttttttgggtctaatgagcctattaccgtatcttcaagttgcaggtcactagacatgtatttgttctaaggaatctgtgtttaaggtcgacttggtcaaggatattatgaaatgcatgtttgcagcaaattggatgccatgagcatatctgggcaccttgttcgttaggatttaggaag

SEQ ID NO: 122459 - DNA, 1799 bp, Zea Mays
aaaatattcgcatctcctggcaatctgccatggcgccgccgctcgccgccgccctccgccctcacctctcccgcctcggccaaaccctctcgtctcgtcttcttcgcctctccacctcccattgtccctccgaccagagcgacttcgaaccagaccccgaccaccccatcctctctgcccctgacaatgacgacggtgagctcgcctccttcctccaccacctctccagcgcggcctccaatacctcatccccgaaggaggccctctccttcctcctttccatgtccacgggcccgttgccggcctcccacgctctcctagtccgcgcgctctgggatctgcgccgcgacccggacgctgccgcgttagcgctccggtacggagacgagtgcagcgccgtggatgggaccgatggggcgggtctaccgccgccgcctgaagcgtggcacctggccgtctgggccgcgggtaaggcgaggcggttcgacctcgcatgggagatcgtgcggcggatgcggaaccgcggtgtgctcacctgccgggtcatggttatcctgatggagaggtatgcagctgccagtgaagtaaataaagcaatcaaaacatttgatgtcatggagaagtttaaaatcgagtcagatcaaagtgtattctactcccttcttcacgctctttgcaaaataaaaaacattgaggatgctgaggagttgctttttctgagaaagaaattcttcccacttactgcagaaggtttcaatataattctagatggttggtgtaatgtgatcaccgatgtggctgaagcaaagagagtttggagagaaatgtcaaatcactgcattactcccgatggcatgtcctatactctcatgatcagttgtttctcaaaagtaggaaacctttttgatactctaagggtttatgatgagatgaaaaagagaggttggattcctggtattgttgtttacaattcacttgtctatgttctgacaagagaaaattgtgtgaaggatgcacacaatatatttagcaaacttacagatgaaggcctccagccggatgttgaaacatataacaatatgatagttcctctctgtgaaagttgtaagcttgatgaagcgcgaaaggtaatggaaagcatgatacttagaggcattgttcctaccatttcgacttaccatgcatttttaaagcaagaaggcattgatgaatcactgaagctcttgcagaaaatgaaggaggatggttgtggccctaagagtgacacatttgtcatgcttattgataaatttttcttgctgaacgagtcggggaatgctctaagagtgtggaatgaaatgagaaaatatgagatcagccctgtccgtgcacactatatgacactggtccaaggtttagtgaaacatggatgtataccaagagctttagagtactatgacgaaatgaaggaaaaaggttttgcctctgatacacaacttgataaggaatttaaaacctttttgttgaaaaacagagaccactggagaggagcaggcaaatacaatatcattccccagcgtggcaaatattttacaaagcagtcaagaatgcaataacaaatgtggggttaataaatttgcttctagtgcctttgtgatatgaggacttcatttcaaaaaatttcaatatggaccacaatgaggtaaatatagttaacctgttcttgaactctgaccaatggtaaaaaagtaaaatctatgtgaatctaattataaaaagataataaacacagcagttgactgtttttctgtaaatagtta

SEQ ID NO: 122460 - DNA, 167 bp, Zea Mays
gaggcctttagttgtacaccacgcctttggagcagttcctggtaggcggcttggctgctatttgtacattacttttggaggccgctggttgtatatatgtgacgatgtttggaaagtgtcgaacatttcttacactgtcgtgatacttttccttgtattagtttcta

SEQ ID NO: 122461 - DNA, 106 bp, Zea Mays
tttttatttatgaatttgcactagagaccactagatcattcgttttcttcattgattttttcattccattgttcttaattttccctctaatttgtatatagtcagc

SEQ ID NO: 122462 - DNA, 368 bp, Zea Mays
agccgtcgtaggttctctcccatggcgcctagtcttctccccatggcgaactcacccagccactcgcctccactacagcacgccgtgcctgcgcagccccgacagcaacgccctcctctgtgtcgcgccatcgacccactcgatggaatgccgcagcgagctctacccgatctgctgcgcctgcgcgccgtcgtcgaaatccccgcaaccgtgttggtccgcaacaacatgtcgtcgatctacaatccctagccttggccgacctagccctccgtcgatgtcgcgtcttgtgcatcgcttgctcgacggaagcctcactcgtgatcgacatgcgcgactcatccgatcccgcctggttgtttgatgtg

SEQ ID NO: 122463 - DNA, 795 bp, Zea Mays
atgaccatcagcgtggaggacctcggctgccactgcacgccgaagctcgaccagggaggaagaccagcacggaggagcggagaccctttgctatcactgcggagctccgccggagaggaagaagaccagcacggacgaccttggctacggcgacgcggagatctggccgtggaggagccacaacgcggaggcagtcagatgcagtggcgcggaggccctcagccaccactacgctccggagatcgaccggcgaggaggagaaccagggtgaaggagcttggctgccatggtgtagagtttgttcaatcattgcttgctgctggccagcaatccccgtcttgcttggatcagttgccgctgcaaccaaatggttttgtcgtctgccgagcatcaatcacaggtggctacgacggggtaagggaatgggttacctatcgtgcaacaggtgatgcagcacccccttgctacagcagggcttggtggcttggtgcatcgtttgctgatgcgcggttggaccacctacattgtccgcctggtgcagctaacaaacagggtactggtgttgaaagggtatcttcaacgttgaggtctggcccctatgtgggatcgactcaggctaacctctcaaacactcttgatgaacaaatggtttctaaagcaatgaaaagagatgcgttgagaaatctagacgggccttcggagcagttgccggttgagggccatgttggatatcctttctcgcctacttcatcaccttgtgcctcaaatatggatcgaacacgcgacttttcatga

SEQ ID NO: 122464 - DNA, 110 bp, Zea Mays
gttcgacacttaatcaccaaaacattatagaaattgcccaatggcacatttccctttcaatcatatggcatgaaattttggaccgaccacaaatacacaacaagaaggtc

SEQ ID NO: 122465 - DNA, 2001 bp, Zea Mays
gaacacgacgaaagaattggccatgtcgtacttcatcttctccaagttgggcgagatggcgaactggatcatcggcggtggtccgcaggcaagggccagcgtgtcgtccccaccttccggaacgtgctcccgcaggacggcctccgtgacgaacccaacgctgtacttccacccctcctccgggcgctttacctggtcgatgacgtaccacaccttgagcctgtccgggtactcggccgcccaccggtcgagctcgtcgcggaggaggatgtcgtcctccgtccggttggcgtacacgaggtgcatctccgtgtggtcctccggctgctcgcgcagcaccgcctggatgatctggtacatgggcgtgatcccacttccgccgcagatcatggcgaggcggctcgcatggcgctgcttgccgttgatgacgaagctgccgcggccggtgtactccacgtggccaagcgggcccttgacgtcgatgtaggagccgacgggaagcgagtcgaggtactgggtcatgaggccgccgttggggaacttggggtgctcgttcttgaagtagaccttgacgaggaggtcgaagtggccgatctcgtccaccatgctcgtgggcgtgtacgcccgcatacacagcttcccttcaatactggcgcagacgaagatgtgcttgccgatggggaggccgagcacctggtcgggcgacggcagcgagaagcggaagaggcggacgtcgcgggacagctccttcttgccgacgaggcggcagtggatcttttcgcgcgggttggagagcgcgggagccctgacggcctcgcggatgggcgcgaggtgcgacaggacggagccgccgtggacggagttgtcggagctgtagccggtgcccgtggtgatgagctcgccgatgcggtaggtgtcgaggagcgccttggccttgtcggagtggatggcgtcgaactcctcggtgcagtcggtaccggcgttgatgaggatgctgtcggcgccgcccgggtggtccttgaggaacttggtgcagtcgtagacgtggccgtgcacgacgatccacgccgactcctgcgacgcgtgcttgcgcacctcggacatggtgaactgcttgccgacgtcggtggtgttcatgaacggcgtggacgtgctgcgcttgaggcccggcgcggccgcctccgccgtctccaggtgcttctgccgcgccatccacccgccgggctggttgccgggctgcgtcgggtgctcgaacaccagcccgatctcgcccttgtgcggacggcacacgttcaccttcaccttgaaccagcagttgttcatcatcccctgtgccatcatcagatttatatatcatcaggagcagaaacagaaacttattcagtattaatattatgtgctagtatatatatgtaccatgaggttccatatgagcttctcgggctgggtgttgagcgactggtcccatgcgcgcacggcgatctccttggcgccgagcaggtcgaggacctccacctcgacggaccagaagcaccagcaccagtacttgccgtacttgttgggcttctccgggtggtcgaggtggcacaccagccatgtctcgccgccgtccagcgtcacctccacccgcgtcaccttcttgccgccgcctacgtgtaccacaaaacaacgagaaaagtcgtaaggctcgcctaaccaccgctctaccctcatataacgtacctgaaacaagtgtagtgctccaaaattttgaaatactatattatttaaagtatttagagtattaaaacaaattaaaagctctaaatcatttattttagaaaataaattacattattaaaaagtaaaaatttgagaattgtctagagaaattactaatctagggtgtatatttatatttgtaattaaaaaatataaaataagatattgttggaactactttttatatgttaaaccatatatttttacaccatacctctatctctctatataaaaaattaa

SEQ ID NO: 122466 - DNA, 100 bp, Zea Mays
ctttccagccgagggtgggttctagacctcagttataccctccacacttatctcaactatacacatatatgtatctcttttgtcccctactgcagacagc

SEQ ID NO: 122467 - DNA, 189 bp, Zea Mays
atgacatgccgcggccgcgtggaactgcggcagatcgaggaccgggtgggctggcaagtgcgcttctccaagcgctgctcggggatcttcaagaaggccttcgagttctccctgctctgcgacgtcgaggtcgccctcatcgtcttctcccccaccggcaagctctgcgagcgccaccacgcatctctg

SEQ ID NO: 122468 - DNA, 1710 bp, Zea Mays
aatccaaaaccacccacgccgcgcggccagggctcctcccctcgctccttttaaattttgaaccccatctccgttcgagcatcaaacgaatcgcgcacgcttccctgactcatccaatccacgcacaccaacccccattctcggccgccactcgccgctccggcaagtctccagagatacgcgtgcggtgcgacggcggtatggacgcactcccggatggcgtcgtgcagcacatactctcgcagctcagcaacgcccgtgacgtggccgcctgcgccgccgtcgcccgctgctggcgcgactgcatgcccttccttccgtcgctctatttcccgcgtggcgcctttgagtccgtcggcgtcggaccggcgtcagccgtggccgcggccgacgatgtcatcggtcggatggtcgatgccgccgcgcgcctcgaggagctcgtagtgtactgccccttctccgcgtccctgctcccgcactggctcgcggcgcgggccgccacgctgcgcgtgctcgagctgcgcgtggaatccgccgccgacgacaagtcgggccacctggactccatcggggtggccacgagcctcgaggagctcaggctgtgggcgctcaggatgacgcgcgcgcccgcgtggggccagatggagcggctccgcgtgctggaggtcgtcggcgccgtgctggaagacgccgcggtcaacggcgccgtcgccgcctgtcccaatctcaccgatctcgcgctgctcgggtgcgagtgcgccggagaggcagtcatctcgctcgcccatctcgagcggtgccggctcgatttcgtcggctccggcaacacttctctcaggtttgccgcgccgcgcgtctcgtcccttgaggtccagggcttctcattgatctatctgcaaggtggcaaccgtctcaaacatctcacaatctccaagaacactggtagtgtgtatcatgtggagatggggaagctcccggagttggaccatctctcgctgcgcggcgtccagtggagctggggcgccatcagctcggtgctgcagtgcgctggcgaggtgaagcacctggtgatgaaggttgagttctgtggtgattatgacacgctgcagccattcccggagctcgacctcgtggaattcttcaacagccacccgaagcttcacaagttcgagatccacggcgccatgttcgcggcgctgtgtcagaagaacagcctgaagaagttggattcaaggttcgtgattcctttcttggagcacgtgctggtcaccgtgcggtcacccctgaatgctgagcagaagctggacaccctcgagtcccttgtcaggtacagcgtgaggctaagaaggatggtcattaggatctcgcagatgaagaattgccacggtgccgctgatgatttttttgcggagatttgcaagttcgcttacatgaacagtgggagagtgtgcatagagtagaggtgttgctgcatttgccattcttgaatgagttagcactaaatcaaggcagttttttttacccaatgccgtttacttgtggcagtttattggataatttatagtttgttttgttgttcacccagcttgaatgcatctgcacttgaggccagaaatcatttggttaaatttgttactagtctaagtattgcgcctgtttaactgtaccgttcattggttcctgaaatgtaataatcaaccttggtttgtt

SEQ ID NO: 122469 - DNA, 89 bp, Zea Mays
ctacaactcttgaattaagaattctcacaacgacagggtctactcgatatggattaggcgtaaatgaaacctttgcaaaaaatctaaaa

SEQ ID NO: 122470 - DNA, 2077 bp, Zea Mays
gaatgcaaggaggacgcgctggcgttgatccgccgcgacgcgccgatgcttacggatttcacccacaacctgcttaacgcgccgctgctggataaacaggccgaatggtgcgaagtgtttgaccgcgggcgcaccacgtcgctgctgctgttcgaacatgttcatgccgagtcccgcgatcgcggccaggcaatggtggacctgctggcggagtatgaaaaggtcggcctgcagctggattgtcgggaactgcccgattatctaccgctgtatctggagtatttaagcgtactgcctgacgatcaggcgaaagaaggattgctcaatgttgcgccgatcctcgccctgcttggcggtcgcttaaaacaacgcgaggcaccgtggtacgcgttgtttgatgctctgctgcaactggcgggaagctccctttcaagtgacagtgtcacaaaacaagtaaacagcgaagagcgcgatgacacccgccaggcgcttgatgcagtgtgggaagaggaacaggtgaagtttattgaagataacgccacggcgtgtgacagctcgccgcttaatcaatatcagcgacgctttagccaggatgtcgcgccgcaatatgtcgacatcagtgcgggaggtgggaaatgattcagtatctgaacgtctttttttacgatatctacccgtacatttgtgcgacggtgtttttcctcggcagctggctgcgctacgactacgggcagtacacctggcgcgcctcctcaagtcaaatgctcgataaacgcgggatggtgatatggtcgaatctgttccatatcggcattttggggattttcttcgggcacttgttcggcatgttaacgccgcactggatgtacgcgtggtttttgccagtggcagcgaaacaactcatggcgatggtgctcggcggtatttgcggtgtgttgacgttgattggcggcgcaggactgctgtggcgcaggctgacaaatcagcgcgtgcgtgccacttccactacgccggatatcatcatcatgagcattttgctgatccagtgtctgttggggctaagtaccataccgttttcagcacagtatcctgatggtagcgaaatgatgaagctggtgggttgggcgcaaagcattgtcactttccgtggtggatcgtcagagatgctcaacggcgtagcgttcgtcttccgcctgcatctggtgttgggaatgaccatcttcctgctcttcccgttcacccgactggtgcatgtgtggagcgcgccgtttgagtactttactcgtcgatatcaaattgtgcgttcgcggcgataatttcaccctgggccggatagcccttcgctctccggccacttgcaggctatgatagttctccagtcacaggagaacgttaatgaaaccgcaggtgtaccacgtcgatgcttttacctcacaaccgtttcgcggcaattctgccggtgttgttttccccgccgataatcttagcgaagcgcaaatgcagcttatcgcccgcgagttaggccattcggaaactgcttttctgctgcacagcgacgacagcgatgtgcgcatccgctactttacgccaacggttgaagtgccgatttgcggtcacgcgacagtagctgcgcactatgtacgtgcgaaggtgttaggtttaggaaattgcacgatctggcaaacatcgctggcaggaaaacatcgcgtgactatcgaaaagcacaacgatgattatcgtatttcgctggaacaaggtacgccgggctttgagccaccgctggaaggtgaaacacgtgcggcgattatcaacgcgcttcatctcactgaggacgatattctgccaggcttgccaattcaggtggcaacaacaggacactcaaaagtgatgatcccactgaaaccggaagtgcatatcgacgccctttcgcctgaccttaatgcgctgaccgctatcagcaaaaagattggctgcaatggtttcttcccgttccagatccgcccaggcaaaacgaacgatggtcgcatgttctcgcctgcgattggtatttgtggaagatccggtgactggcaatgcc

SEQ ID NO: 122471 - DNA, 843 bp, Zea Mays
atggagcccagttttcctcccccacacgtttgccaggttcgaccattctgctcaccgtgccctccccatgccagcacgcgagcgcccctcccgtccctgctcctctccatcgacgcccaggccgatgccgagctcccagcccctcctgatggcgtggtcaagcatctagaattgaaatccccatgtttgagcaaggaagtaattaaaggagtgaggtcatgtgatgctcgccaggtatcagaattcctggattccaaatctgagacagatgttgatgttgactataacagcttgtactcaaagcattactttctacagggtgagaaaactggtagagatgagaatgaagtccttaaagctattgattatgtgcatgaattgagtatgaggtgccctggccaaagcgagtgttctactctacccaaaaactttagaaacccctcgtatgaaaaagcttcatactgtcaaggctgctacaatggtcttagtaaaatagtaaaggaaggccctgaatgcccaaaattggccacaatatttcaccgtcaggtggatttagggagcacgaggacgaagccgctgccagaacagaaggcactggagatgatttttgagaagcttcaaagtgatgagggtgttcattgggcagtgcaaaatggtctccatctatcaagaagcactgttgtgtacttcaagcacaatgatgtggcttcacttgcaagcactttggaaaaacttactcgtggaaataaacgtgctgaaaagattagacgctacattgttgtagaatccatttacaagattatcccagtgttttggtttgatttagagtacacttatgtatga

SEQ ID NO: 122472 - DNA, 234 bp, Zea Mays
atgatgtgcggcggctgcgcggcgtgggtgcggtccatcctggcgtggacgctcgtcgcgctctgctgtggctcgctcggtatccatatcggccacggaacgtttttggatctgttgcataatccttatgtgaaatgtggcattgctacaactgctttgtttgggcctggaagagggagtaacagacttatcctgaagggcatcgagcaaactggctcatcagtatgcaagtaa

SEQ ID NO: 122473 - DNA, 1481 bp, Zea Mays
gttgcatatattttattacaccaagatttggttacaagaatttgttgtttggttctgaggcatgaatcgtagtcctggctgcatgcctggcccacaccatcctctattaaaccgattttaatatcaaaatgttatagacattaaatataataataccatactgtatgatggaaagagactcgatcgtaaaagtatggagttttataagaataaaagtttcttttttaaaaacaatatgagtgtgttttggcattaacacactgacgagacgacggccttttatatactcggactcggtgcgggggggcacttcatcccaaaccagttcagcttccaaaaaggcaaagcagagcccgcaagcggagaggctacagaagggtatgggtcacctccgcggcctcaccgccgcgcggctcctcgcggcggccttcctgctctccgttgccgtcccggccgccagagcccaggaagaaaccgagcacgaggaggagttcagctacgtcgtcggcgacgagaacgggccggagcactggggcagcatcaaggcggagtggggcaactgcagcgccgggcggatgcagtcccccatcgacctctcccacgagcgcgtctcgctggtgcggtccctcggctacctcacccactcctaccgccccgccgaggccgccatcgccaaccgcggccacgacatcatggtgaggttcaagggcgacgccggcttcctggtgatcaacggcacggcgtactacctgaagcagatgcactggcactcgcccaccgagcacaccgtcgacggccgcaggtacgacatggagctgcacctggtgcacgagagctcggcgaacaaggcggcggtgatcggcatgctctacgagatcggcgccgaggacccgttcctgcaagcgctggagccgtccatccaccggatcgccgacaggcaggaccgggaggaggccatcggcgtggtggacccccggcgcgcgcgcggcagggccagcgtctactaccgctacgtgggctccctcaccacgccgccctgcaccgagggggtcatctggaccgtcgtcaagagggtccgcaccgtgtccaggcaccagctggagctgctcagggaagccgtgcacgacggcatggagaagaacgcgaggccggttcaggacgtcaacgacagggacatcagcatcttccgcccaaagccacacaagcactactagtactagctatggtataggttgcacagtccagcagcgcgcgtagttggtatcgatcagtagtgatgcacgagctagctgacgcggttcagtgttggggagaggtgtctgctgtatatggttacggttttgttttataattctttccatctatgttataggacgaaataaacagacgaggatcaccttcaggtccactcttcagaagaagaacaaaaaaaaaaggaaaagagaacatgtcgatgcgcatgtggctcgatcgatttgatt

SEQ ID NO: 122474 - DNA, 948 bp, Zea Mays
atactcggactcggtgcgggggggcacttcatcccaaaccagttcagcttccaaaaaggcaaagcagagcccgcaagcggagaggctacagaagggtatgggtcacctccgcggcctcaccgccgcgcggctcctcgcggcggccttcctgctctccgttgccgtcccggccgccagagcccaggaagaaaccgagcacgaggaggagttcagctacgtcgtcggcgacgagaacgggccggagcactggggcagcatcaaggcggagtggggcaactgcagcgccgggcggatgcagtcccccatcgacctctcccacgagcgcgtctcgctggtgcggtccctcggctacctcacccactcctaccgccccgccgaggccgccatcgccaaccgcggccacgacatcatggtgaggttcaagggcgacgccggcttcctggtgatcaacggcacggcgtactacctgaagcagatgcactggcactcgcccaccgagcacaccgtcgacggccgcaggtacgacatggagctgcacctggtgcacgagagctcggcgaacaaggcggcggtgatcggcatgctctacgagatcggcgccgaggacccgttcctgcaagcgctggagccgtccatccaccggatcgccgacaggcaggaccgggaggaggccatcggcgtggtggacccccggcgcgcgcgcggcagggccagcgtctactaccgctacgtgggctccctcaccacgccgccctgcaccgagggggtcatctggaccgtcgtcaagagggtccgcaccgtgtccaggcaccagctggagctgctcagggaagccgtgcacgacgtaagttcatgacgtcgcttgcttcttagtcccaaatgtgtttgaccagcattctggatggaatggaaggcgccaggaaagctggttttagtttgtttgttttt

SEQ ID NO: 122475 - DNA, 83 bp, Zea Mays
acacagtatctggagcatgtttgtgcttgccggaaccaaatccgcggtcgaaaacaacgtcgcgaggaggaggtggaggagag

SEQ ID NO: 122476 - DNA, 1329 bp, Zea Mays
tccccgtttcccaaccgacctttagctacagctcagcgtctcctctgtccaaggcaggaggcttggcggcggcgttgggcggctgcaatggtggacgtcgaccgccggatggccagcctcacgccggcggcgcacgcggcggggctgcgccgcctttccacgcgcgccgcggcgagcccgtcctcggcgtcggcctccccgcggcaggggctgcactccttcgccccgctcgcggctgcggtgctgggccacctccgggcctccggggtggcggtgctcccgggcctcacggagctcgagctggcgcacgccgaggccgagatggggttcgcgttcccgcccgacctccgcgccgtcctcgccgcgggcctcccgtcggggcccgggttcgctgactggcgctcgtgcgcggggctccgctccgcgttcgacatgcccatcgtggcggcgtcgctgcagatcgcacggggcgcgctgtggccgcgctgctgggggccacgccccgccgaccccgaccgcgcgctgcggctcgcgcgctccgccatccgccgcgcgccgctgctcgtgccgctcttcgaccgctgcttcctgccctgccgcccctgcctcgccggcaacccggtgttcttcgtcaccgacgaccgcgtcctctgctgcggcctcgacatcctccacttcgtcacccgcgactcctgcttccagccgccggatctgcgggcgccgccgcctccggtggcgcagcagcagcagtacgccggggaggccgtcgccacgccgtgcacgcgccgcagcctcgacgcggcctgccgcggtaaggcgccgcgctggatagaattctggagcgacgcggcgtccgaccatcgccgccgcaactcgtcgttctcggatgcatccacagcgtcgtcgctgtcctcagggtgcgcatcgccaccgcctgctaggtggcccaggaacccgcactgggtcgacagctaccttgaccggctgggccacgtgctgaggcagggcgggtggagggacacggaggtgacggagatggtcgaggtggcggcctccggggtgttcgacggtgaggaggcggcggtccccgtggtggactcagacgcagtgctcgatgcgctcctgctcaaggccgaccagtgctccgactcgctccggcgggccggatggagctcggaggacgtatcggacgcgctcgggctggacctccgctggtgcaaggagcggccgcgccccgccatgctggtaccacaagagattgccgtcaaggtcgagcggcttgcgcagtcagtggcgcgcccctgactgactgacctcccgccgccctca

SEQ ID NO: 122477 - DNA, 2237 bp, Zea Mays
accaccgtttggaaagaagatcatctcagatcgctcctctcccctcgtgcccctctcccctcgtgctcctcttcaaatagcactcgggtacaaaagggaagtacaacgaaggcacttggctgccttctgaggctgagagaggatcactcttcttacaagttgcagcgtaggggcggccaccacaccacatggctttcttcctcgctgtagcttgcatctacatcgtctccctcactctgctggtgctgctgctcgacgcgagcagacgacggagaacaaccggaggtggcagtagcagcacggaggagcacaagctgcctcctggctccctgggtctgccgttcctcggcgagactctccagctctactcccagaacccgaaggtcttcttcgcctccaggctgaagaggtacggcgaggtgttcaagacacacgtgctgggttgcccctgcgtgatcttggcgagcccggaggcggcgcggatggtgctggtgtctcaggcgcacctgttcaaaccgacgtacccaccgagcaaggagcgcatgattggcgcgcaggccctcttcttccaccagggcgactaccacctccgcctgcgccgcctcgtgaagggctggcttggcccggacgcgctccgcggcctcgtgcccgacgtcgaggccgccgtggcgtccacgctcgacgggtgggaaggccgcgtcaccagcaccttccataccatgaagaggctcaccttcgacgtcggcgtcatcgccatcttcggccaccggctggccggccacgtgaaggaggagctgaggaggaactacttcaccatggagaaaggctacaacagcttccccatcccggtcgcctgcaccagctacagccaggccatcaaggcgaggcagcggctgggcgcggtgctgagcggcatcctggcggagcggagggcgcggcggagcgacgacgacgacgaccatggcctcctgaacgccctcatgcgctcccgtgacgacagcggggcggcgccgccgctctcggacgaccagatcgccgacaacgttatcggcgtgctgttcgcggcgcaggacacgacggccagcgtgctcacctggatcctcaagttcctccatgacaacccgaagcttctggaagccgtcaaggtggagcagatggcagcctacgaggagaacgatggcgggaggctcccgctgacgtgggcgcagacgaggaagatgtccataacacacctggttatcttggagagcctgaggctggcgagcatcatcgccttcacgttcagagaggccgtcgaggacgtgcactaccaagggttcctgattcccaaagggtggaaggtgatgcccctgttcagtaacctgcactacagcccggactacttcgaggacccacacaagttcgacccttcccgattcaaggtggcgccgcggcccggcacgttcctgccgttcgggagcggcgtgcacgcgtgccccggcaacgacctggccaagctcgagatgctcgtcctcatccaccgcctcgtcaccacctacaggtatatataccattcatcattcgttttcgttcacgtacgcatgggcatggcgcctctagcgttttcctctcgtatcattcgtcgttcgtgcgtgcttggcgtttgcaggtgggaggtggtggggtcgagcgacgacgtgacctacagcccgttcccggtgccgaaacgcggcctcctggcgaggctcagcagggccaccaccggcagcgcggtcgtcggccgtgcgccgccgctggacattggaggacctgcaggcgctagctatagctagctcctcggaccaaaaggcaatgcatgcacccaagcacccaggagatagataggcccggcaggcggcaggggacgacgacacacacatccagacatcgtccagtcacgtggcagtagcaagctagtactactactactgtgtgtgctgccattctgcatgcatgcgtttcctctcattctcgtgttccttcatggcatgtgtttccttccttcgtttcccctcgatcgcttatacagatataaatatctggtcaatcattgggatagcaagcagacggtgtaccgtaccgccgcctgccggtctagctagctatatatatgcatgcatgcatgctccgtcctaaaagaatataataataggatccgtgtgtcctttgttagaatatatttaaagtttggccaaatacgcaggcaaaataaagtactt

SEQ ID NO: 122478 - DNA, 1906 bp, Zea Mays
accaccgtttggaaagaagatcatctcagatcgctcctctcccctcgtgcccctctcccctcgtgctcctcttcaaatagcactcgggtacaaaagggaagtacaacgaaggcacttggctgccttctgaggctgagagaggatcactcttcttacaagttgcagcgtaggggcggccaccacaccacatggctttcttcctcgctgtagcttgcatctacatcgtctccctcactctgctggtgctgctgctcgacgcgagcagacgacggagaacaaccggaggtggcagtagcagcacggaggagcacaagctgcctcctggctccctgggtctgccgttcctcggcgagactctccagctctactcccagaacccgaaggtcttcttcgcctccaggctgaagaggtacggcgaggtgttcaagacacacgtgctgggttgcccctgcgtgatcttggcgagcccggaggcggcgcggatggtgctggtgtctcaggcgcacctgttcaaaccgacgtacccaccgagcaaggagcgcatgattggcgcgcaggccctcttcttccaccagggcgactaccacctccgcctgcgccgcctcgtgaagggctggcttggcccggacgcgctccgcggcctcgtgcccgacgtcgaggccgccgtggcgtccacgctcgacgggtgggaaggccgcgtcaccagcaccttccataccatgaagaggctcaccttcgacgtcggcgtcatcgccatcttcggccaccggctggccggccacgtgaaggaggagctgaggaggaactacttcaccatggagaaaggctacaacagcttccccatcccggtcgcctgcaccagctacagccaggccatcaaggcgaggcagcggctgggcgcggtgctgagcggcatcctggcggagcggagggcgcggcggagcgacgacgacgacgaccatggcctcctgaacgccctcatgcgctcccgtgacgacagcggggcggcgccgccgctctcggacgaccagatcgccgacaacgttatcggcgtgctgttcgcggcgcaggacacgacggccagcgtgctcacctggatcctcaagttcctccatgacaacccgaagcttctggaagccgtcaaggtggagcagatggcagcctacgaggagaacgatggcgggaggctcccgctgacgtgggcgcagacgaggaagatgtccataacacacctggttatcttggagagcctgaggctggcgagcatcatcgccttcacgttcagagaggccgtcgaggacgtgcactaccaagggttcctgattcccaaagggtggaaggtgatgcccctgttcagtaacctgcactacagcccggactacttcgaggacccacacaagttcgacccttcccgattcaaggtggcgccgcggcccggcacgttcctgccgttcgggagcggcgtgcacgcgtgccccggcaacgacctggccaagctcgagatgctcgtcctcatccaccgcctcgtcaccacctacaggtgggaggtggtggggtcgagcgacgacgtgacctacagcccgttcccggtgccgaaacgcggcctcctggcgaggctcagcagggccaccaccggcagcgcggtcgtcggccgtgcgccgccgctggacattggaggacctgcaggcgctagctatagctagctcctcggaccaaaaggcaatgcatgcacccaagcacccaggagatagataggcccggcaggcggcaggggacgacgacacacacatccagacatcgtccagtcacgtggcagtagcaagctagtactactactactgtgtgtgctgccattctgcatgcatgcgtttcctctcattctcgtgttccttcatggcatgtgttt

SEQ ID NO: 122479 - DNA, 1835 bp, Zea Mays
cacaggtaccaccggcacagcagcaacaataagcaaagagcagtctccaatagtatagcaacaccaagaaaataagcgccatgcagacgccggccatgtcgacgtccacggccacgacaacaagggccatggcgccagcgaagccccccgcgcggcggcattgctgcagctacctcctcctcctcctaccctccaccggccaccgccgcagcgtcgcggcgtggtccgcgaagaaaaagaacccgtggctggacccgttcgacgacgggcccgacgaggagttcgactaccagggcatgttctccggcgggaagcaggaggaggacccgcggccgcccgaggaccctgcgaacccgtacgggttcctgcggttcccgcagggctacaacccggagctggacagcctcgcgtccaaggtccgcggcgacgtgcggcgcgcgtgctgcgtcgtgtcgggcggcgtgtacgagaacgtgctcttcctccccgtcgtgcagatgctcaaggaccggtaccccggcgtgctggtcgacgtggtggcgtcacccaggggcaagcaggtgtacgagatgtgcaagaacgtcaggtacgccaacgtctacgacccggacgacgactggccggagccagcagagtacacgcacatgctcggcgtcctaaaggttacgtacatataacttgctattcgttgcttgcttgcttgcttgcatttggaacaattcctctgtttttttttttttgggtcccctgttctatgagcaactacgctacgctactagtgagaaattaagttggatgagtaaactgtgcattgcttttggctgaatatataatctcgtcatgttgttgcaaacattgcagaataggtactatgatctgatcgtgtcgacgaggctggccggcatcgggcacgcgctcttcctcttcatgtcatcggcgcgcgacaaggttggctacgtttaccccaacgtcaacagcgtcggcgccggcctgttcctgaacgagatgttcaaggcgccgaccaacaacctcgccgacggcggctaccacatgtacaaggacatgctggagtggattgggcggccggcgaagaacgtgccccggcagccgacgcagccgctgcgggtgtccatctccaagaagctacgggcgtacgtggaggacaagtacagccgcgccggcgtggagaagggcaagtacgtcgtcgtccacggcatcgcatccgattccgtcgccagcatgacgtccagaggcgacgacgactgccttcttcccctcgagcactgggctcagatagccaaggagatcagctctggcgacaaggggctcaagcctctgttcgtgatcccccatgacaagcacagagaggaggtcgaggaggaagtgggggacgacacgaacatcctgttcatcaccaccccaggacagctcacctgcctcatcaacgactctgccggcgtcgtcgcgacaaacaccgctgccgtgcagctcgccaacgcccgcgacaagccatgtgtggccttgttctcgtcggcagagaaggcacggctgttcctgccgtacgtggaggacaagagcagctgcaccgtcatctcgtcgatgacggggaagctgatcgacatcgacatcaacgccgtgaagaatgcggtgaaggacctggagcccgctcccagcttcgcattggcacagaagtagcagctcccagcatcattccatcgctttgtttgtacacagtaccagagaatgtaatggtgcaggctatcacaaactgcaaacggcacgcacgatgtgttataccgataaataaatgacaatctcgtatcagctattgcaat

SEQ ID NO: 122480 - DNA, 1636 bp, Zea Mays
cacaggtaccaccggcacagcagcaacaataagcaaagagcagtctccaatagtatagcaacaccaagaaaataagcgccatgcagacgccggccatgtcgacgtccacggccacgacaacaagggccatggcgccagcgaagccccccgcgcggcggcattgctgcagctacctcctcctcctcctaccctccaccggccaccgccgcagcgtcgcggcgtggtccgcgaagaaaaagaacccgtggctggacccgttcgacgacgggcccgacgaggagttcgactaccagggcatgttctccggcgggaagcaggaggaggacccgcggccgcccgaggaccctgcgaacccgtacgggttcctgcggttcccgcagggctacaacccggagctggacagcctcgcgtccaaggtccgcggcgacgtgcggcgcgcgtgctgcgtcgtgtcgggcggcgtgtacgagaacgtgctcttcctccccgtcgtgcagatgctcaaggaccggtaccccggcgtgctggtcgacgtggtggcgtcacccaggggcaagcaggtgtacgagatgtgcaagaacgtcaggtacgccaacgtctacgacccggacgacgactggccggagccagcagagtacacgcacatgctcggcgtcctaaagaataggtactatgatctgatcgtgtcgacgaggctggccggcatcgggcacgcgctcttcctcttcatgtcatcggcgcgcgacaaggttggctacgtttaccccaacgtcaacagcgtcggcgccggcctgttcctgaacgagatgttcaaggcgccgaccaacaacctcgccgacggcggctaccacatgtacaaggacatgctggagtggattgggcggccggcgaagaacgtgccccggcagccgacgcagccgctgcgggtgtccatctccaagaagctacgggcgtacgtggaggacaagtacagccgcgccggcgtggagaagggcaagtacgtcgtcgtccacggcatcgcatccgattccgtcgccagcatgacgtccagaggcgacgacgactgccttcttcccctcgagcactgggctcagatagccaaggagatcagctctggcgacaaggggctcaagcctctgttcgtgatcccccatgacaagcacagagaggaggtcgaggaggaagtgggggacgacacgaacatcctgttcatcaccaccccaggacagctcacctgcctcatcaacgactctgccggcgtcgtcgcgacaaacaccgctgccgtgcagctcgccaacgcccgcgacaagccatgtgtggccttgttctcgtcggcagagaaggcacggctgttcctgccgtacgtggaggacaagagcagctgcaccgtcatctcgtcgatgacggggaagctgatcgacatcgacatcaacgccgtgaagaatgcggtgaaggacctggagcccgctcccagcttcgcattggcacagaagtagcagctcccagcatcattccatcgctttgtttgtacacagtaccagagaatgtaatggtgcaggctatcacaaactgcaaacggcacgcacgatgtgttataccgataaataaatgacaatctcgtatcagctattgcaat

SEQ ID NO: 122481 - DNA, 156 bp, Zea Mays
ttatttttttggaagaaggtcgctaagaaaggttgttcatgtttcttttgccaattttctttatccatgatatatttagttgttaggaaatattggtatatgtttctcttgccaatttgtgttcttgtgtgttttatgttacttttttacaggtga

SEQ ID NO: 122482 - DNA, 531 bp, Zea Mays
atgtgtcggcagctgcatgaggggtttaagcggcggaagggtttggtgaggatggcctgtaagctgatagcaggatgttacgtcgaggtctcgacggtagcggtggaagttccggtggtggccctgacttctcagggccgaaatgcagatgcgttagcgctttattttggagaagatccagcacgatgtccatttgagcaagtagttacaacactccaaaattttgtgagattgttcacgcgttcccatgaagagaactgtaagcaactggatcttgaaaagaagaaagctctgaaggaagcagaagacaatagtaaacaactggaccttgaaaagaagaaaacccagaaggaagcagaaacagagaaaataaagaagaaatctgacagtgagaaagcttgtaagaaagaactggaaaatgataaatcttctaagaaggattcagcaaatgagaaaggcaagcttaacaatcccatcaaagagctagatatatcacttcaatcacctgcacaaactgccagtgccaaatga

SEQ ID NO: 122483 - DNA, 411 bp, Zea Mays
atggttgtggctatggcggccagggtgaaggctagctcaccggctccggcgaggagggggagccgcacggggaagagcagcaggagcaccagcgccgatgaagtgggatccacgcagggaagagcagctgttgcggttgtgccacgcagaagggagtcgcacctgggcggggaagacaatcggttgcagtgggcacaggggtgggcacacatggagatgcgctggccaggaggggttccacgtaggcagggggcatggcggtgggtgcagccacagccacccaggtacaggagacggtggagagggaaagggagaagggatggaggaagagggagctctgtccatggtcggaggatggccggcgtcgagctcctgttggtggcggctaggggaggggaggaggctgattag

SEQ ID NO: 122484 - DNA, 101 bp, Zea Mays
gttctgctgttggtttcaggttggatagcttgcttaaacttagtgacacccgtgctcgtaacaataagatgactttaatgcactatttatctaaggtaccc

SEQ ID NO: 122485 - DNA, 603 bp, Zea Mays
gacgaccttcacgccatgcgccgcctcgccgacgtcctcttccatgccatgcgtgacaacgtcatcatcacctgctgctttgtcgccaggcacctgcacgcgaagtcctccgccgggattcccgcctctccaggcctcaacgcgtgtcatcaccaatgtatacacgcgccgggaacgcgtggcgaccgaaccatctccaacatcagcaccaccgtcatcccctccactgttgctacccaagggtgcggttgctgtccagccagtaaccaacttgcacccgatggcgacacgagccaagcgtcgctttcgcattccagcactgttccatgctgcacacctctccccggtgcccaagacctatcgtggtggcctcggtgacccgagttggcgcaccgccatggaggaggagcatgctgcccttctcgagaatcatacttgggaccacgtacctcgaccacctcatgccaatgtggtgacaggcaaatgggtcttcaagcacaaatttcatgcagacgagacactgaagcggtacaaggcacgctgggttcttcaggttttacctaacgcctaggtgtggatttctcagagacattcagtcctgtg

SEQ ID NO: 122486 - DNA, 486 bp, Zea Mays
atggcaaagttagtgggaacagctaatgtgttgtgtgaatcacttaatacctttgttagtaacactctttttctccttttctttgtttttcttgatcttttacctttttttggagcacagagtgcaattctggctctggatgatactgttctggatgctgaccaggtggagaaccttattaagttcactccaactaaagatgaaattgaacttctaaagggttacaaaggagacaagcaagttcttggagaatgtgagcagttctttatggagcttatgaaattaccacgtgtagaatctaagctgagagttttctcatttaagattcaattccgttcccaggtttctgaccttaagcggaacctgaacattgttaattcttcagcagaagagatacgaggttcagtcaagttgaaaaggattatgcagacaattctttctctcggaaatgcattgaaccaaggcactgctagaggagttccataa

SEQ ID NO: 122487 - DNA, 244 bp, Zea Mays
gtctaccccagcccccaagtctccaccgactccagcaccacattctccagctcctgctacaacgagctcttcaccaccacgcactccagccacgactccggctacagcgagctcttcgccaccacgtactccagcaccgacggtaccctctccgggaacgtcctctccgacaccagctccagccgccgcccccacccctccccttcagccgctgccgccgccccctcccttctccggcgaccca

SEQ ID NO: 122488 - DNA, 805 bp, Zea Mays
ccgaaagatcaaacgccccacctaaaacaccattaaagaaacgcgcacagacacaaaaaaaaaactctctccgttcctcttcacaccaaagcacgggaggcgaagaagaggacaaggggcggaaggctgcaaaccctagcgctgggtcgaagcaacgtcgtgcgccagccacaggcgccagacccgcgcgcacctgcattcgcgattcctttaccttcacgccgcggcaactccgcattgtgttgtgccgtgctttgtgccaggacggggatccatggcgttgtcggcgcgacgaggctcgtggtggtagggccgcgcgggtgccggatccgggagacgcggcatggcgctcttccgcaagttcttctaccgcaagccgcccgatgggctccttgagatcaccgaacgcgtctatggtgcgtttaccccgtccaatccctccaccttgtgaccttgtcaatgccagtgtctattcgcaggggaatgctctctgcgtggtggtctgatttgcgtttccattgtcgaatgccgtggtaaatgtgtcggggcaatgcggcgttactggaaatgtttcggtgtttgttttttccccttattggtttgtcgtgcaaacgtctttacttccttctggtgagagaccgtgttgagatcagactgaggaaatttcagcgaccatcgacctttagcaacactacttcagcgaacgtgctgtaatattgagtcacaatttttttttaccttctaagccataatttctggaattgtttcggaggacaactgtttgtctacagtgttgttacttgca

SEQ ID NO: 122489 - DNA, 800 bp, Zea Mays
agcaggagaagcaggggactcccttgccgccggtggtgaggtactggttcgcgtaggtcatgtccccaaccatgaggaccagggatgggtcgttgcgggcgaggtggtcgacggtggcggtggagttccccgtgaggccaaggagtgctcgtcgctgaggccgccggggaggctgctgtcgccgcagcggtagtagtagcgcgtggcagggcgcaggccgcggagacggacgtgatggatggcgccagaggtgtagttgagcaggcccgggtacgggtacagctggctgtacacctcggcggaccccgtgaccacgtgcggataggatgcggcgtcggcggcgctgcgctcgccgtaccagacttcgctgccggcggcggcggggtcgagcggcgcgaggttggaggagcccacgcgcgcgcggcccgtgacccaagagacccagagcgagtcggcgtcggcggaggcggcgagcgcgatctgctcgggcgccgggggctgcacgcggggcgcaaggcgcggatccgtgagcgggacgtcgttgctgccctgccgcagcgcgcggtcgaacgcgcgcgtggccggcggaaacggcccgtccagcgtcgtggggatgccgccgctctcaaccagaagcgcgaagcatagtggtactagcaacagcagtggaagcacttgggtacaatgccaatgcctgttgccgccgcgggtgacggtgctggtgggcgtcgccatggccgtagccagcaccagcacgcgcaccctactgatctcgcgcggaatggcggattaccagctac

SEQ ID NO: 122490 - DNA, 2100 bp, Zea Mays
accatttcaccaaattggcaagaaagccgctagcaatccacagttgcgatttgcgggaacaactactactatcaaaaactttcgacattcgattatgctggcgatggaaatggagctcctggtccgatttcaatgagagccataggcctccaaaaatagggttcaaaaagggccagagagcaaggagtcatcccatttttagccgttgccgtagctggtcgtcgtcgtcgtcgctgctcccaatctgcggccgtcggtgttgccttcgactttaatccacaagggcgagcagcaccgaccgagccgatccgctcctcttcttggttcttcttcaataaatcagcagagcaggaaagatctgtgagcgttcttgcagccggcaggggtccaggattacgaaggaaaccaagaacgcaagaaacgtctaagaagaggggaggaaagatttgggtgtagattggtagatatattacacaggttttgttttggtgtaggttattagcaaataaatagctggagaagaagcctggcaaaaaaaaggtgaaatttgtggagaacatgtttgggatccaaaccagggatgtggcagaagatttcaactcctggaggaggacattaaggaacacacccaccgtctcaatgcccatgaacaaccacaacattatgtacaacacaggcaagagtttgttcaatgtacacctcatgtctgtcaagtttgaagacctgtatggattcatggtggagggcaatgtggacgatgtcaatgtgctgaatgaggtgcgggagaggatcagggagcaaggcagggtgtggtgggcgctggaggcaagcaagggtgcaaattggtatctccaaccaaagatttcttcaaacgagggggtgatcagtgtcacatcactcaagttgtcagtgctcactaatacaattacattgaggaggttgatcaggaaaggtgtccccccggtgttgaggccaaagatctggttatctgtgtcaggagcagccaagaagcggtcaacggtgccagaaacatactatgatgagctaattcgtgctacggaggggaaaaccacaccagccacaaggcaaatcgatcatgatcttcctcgcactttcccttgtcatccttggttgaacagtgacaaaggtcaggcatctctgcggcgagtacttgtggggtactcattccgtgattcagaagttgggtactgccagggtctaaactatgtagctgcactcttgttgcttgtgatgaagacagaggaggatgcattttggatgcttgctgtactccttgagaatgtacttgtcagtgattgctatactgacactctttctggatgtcatgtcgagcagagggtgttcaaagatctcctggctaagaagtgtccaaggattgctgctcaccttgaagcaatggggtttgatgtttcacttgttgctacagaatggtttttgtgcctcttctcaaagagcctgccttcagagacaacacttcgggtatgggatatattattcaatgaaggagccaatgttttgttccgtgttgctctcgcaattttcaagatgcgagaagatgatctactgcgcatccaacatatcggtgatgtgattgatattttgcaaacaaccacacatcatctatatgaccctgatgaactcctgacattcgcgtttgacaagattggttcaatgccaacaaatacaatcacaaaggaaaggaaaaagcaggagactgttgtcctggctgagcttgatcaaagaacaagacggctgagttcactcaagatggatggatagtttgtaaaatacaagttcttgaaagctgtagtcttggcctattcggcacctggtcccacagcgtatgcttcactgagcgaaaaatcatgggtctaccgaatactgggagatggaaagctgcagtatgtgtttgttgaacacgagtttttggacttcatattgtgtgcttttgtgtgttcttcctttgtgtttgcaattcatatttacaagatacgggccatggtgctgatttctcttattatgtatatgtctatttcatatctatttttatatatcttataattttaaaacctactaaaa

SEQ ID NO: 122491 - DNA, 2042 bp, Zea Mays
ggagatggccactcactcaccgatctcgcttccacctccacgccagaggcaacgggctccccgccgtgagctcttcggccacgcgggcgtcttgcctccctcgtccttcctcaccgcaggaggatggccgcgatagcctcagcttcgcccaggaccctgatccctccgcggccgcgccaccacggcgccgcgccctccccatccacctccgacgtctcctcgctccgactcctccgcgcgcacccgcgccacgtccgacgcagccgcggagtgtccatctcgatgcccgtggcgcggagccggtcgttcgtcttctccccgcgcgcggtggctgactccaagagctcccagacctgcctggaccccgacgccagcacgagtgttcttggaatcattctgggaggtggtgctgggactagattgtaccccttgacaaagaagcgtgccaagcctgcagtgccattgggtgccaactatagactgattgatattcctgtcagcaattgtctcaacagcaacatatccaagatctatgtgctaacgcaatttaactctgcttccctcaaccgtcacctctcaagagcctacgggagcaacattggagggtacaagaatgaagggtttgttgaagtcttagctgcacagcagagcccagataatccaaactggtttcagggtactgcagatgctgtaaggcagtacttgtggttgtttgaggagcataatgtgatggaatttctaattcttgctggcgatcacctgtaccggatggactatgaaaagttcattcaggcacacagagaaacaaatgctgatattaccgttgctgccctaccgatggatgagaaacgtgcaactgcatttggcctcatgaaaattgatgaagaagggaggatcattgagtttgctgagaaaccgaaaggagagcagttgaaagcaatgatggttgacaccaccatacttggccttgatgacgtgagggcaaaggaaatgccttatattgctagcatgggtatctatgttttcagcaaagatgtaatgcttcagctcctccgtgaacaatttcctgaagccaatgactttggaagtgaggttattccaggtgcaaccagcattggaaagagggttcaggcttatctgtatgatggttactgggaagatatcggtaccattgcggcattttataatgcaaacttgggaataaccaagaagccaataccagatttcagcttctatgaccgttttgctccaatttatacacaacctcgacacctgccaccttcaaaggttcttgatgctgatgtgacagacagtgttattggtgaaggatgtgttattaaaaactgcaagataaaccattctgtagttggactccgatcttgcatatctgaaggtgctatcatagaggacagtttactaatgggtgcggactactatgagacagaagctgataaaaaactccttgccgaaaaaggtggcattcctattggtattgggaaaaattcatgcatcaggagagcaatcattgacaagaatgctcgaattggagacaatgttaagatactcaatgctgacaatgttcaagaagctgcaatggagacagacgggtacttcatcaaaggtggaattgtcacagtgatcaaggatgctttactccctagtggaacagttatatgaagtgaacgtgcgacatgcagctgtgtgtctcgacattcgacaatgatcagcacctggttacatgcgtgatctgcagatcagtctgttggagatcatcggagcaataaaagtgtcatccaaggcattttttctttctttttgctcttttgtgtccttcaatgttgtagggtagaatgttgtagcagcaaatgttagttacatgttgaatcgacattgggggcctggatttggggatacatcatgctgtaaattgatcagtttaattaccatactgtgctgctttgagcgaagccatggagaccatgctccacttttgtgcctgacgaatataagcgttgctggtttggagtgcggattttaaagat

SEQ ID NO: 122492 - DNA, 1841 bp, Zea Mays
agttaaacttaattcgtaagatcaatcataattctcgagttgcaaaccatggacatggctttggcgtctaaagcctcccctccgccatggaatgccaccgccgccgagcagccaattccaaagcgtgacaaagccgctgcaaatgattcaacatacctcaatcctcaagctcatgatagtgttcttggaatcattctgggaggtggtgctgggactagattgtaccccttgacaaagaagcgtgccaagcctgcagtgccattgggtgccaactatagactgattgatattcctgtcagcaattgtctcaacagcaacatatccaagatctatgtgctaacgcaatttaactctgcttccctcaaccgtcacctctcaagagcctacgggagcaacattggagggtacaagaatgaagggtttgttgaagtcttagctgcacagcagagcccagataatccaaactggtttcagggtactgcagatgctgtaaggcagtacttgtggttgtttgaggagcataatgtgatggaatttctaattcttgctggcgatcacctgtaccggatggactatgaaaagttcattcaggcacacagagaaacaaatgctgatattaccgttgctgccctaccgatggatgagaaacgtgcaactgcatttggcctcatgaaaattgatgaagaagggaggatcattgagtttgctgagaaaccgaaaggagagcagttgaaagcaatgatggttgacaccaccatacttggccttgatgacgtgagggcaaaggaaatgccttatattgctagcatgggtatctatgttttcagcaaagatgtaatgcttcagctcctccgtgaacaatttcctgaagccaatgactttggaagtgaggttattccaggtgcaaccagcattggaaagagggttcaggcttatctgtatgatggttactgggaagatatcggtaccattgcggcattttataatgcaaacttgggaataaccaagaagccaataccagatttcagcttctatgaccgttttgctccaatttatacacaacctcgacacctgccaccttcaaaggttcttgatgctgatgtgacagacagtgttattggtgaaggatgtgttattaaaaactgcaagataaaccattctgtagttggactccgatcttgcatatctgaaggtgctatcatagaggacagtttactaatgggtgcggactactatgagacagaagctgataaaaaactccttgccgaaaaaggtggcattcctattggtattgggaaaaattcatgcatcaggagagcaatcattgacaagaatgctcgaattggagacaatgttaagatactcaatgctgacaatgttcaagaagctgcaatggagacagacgggtacttcatcaaaggtggaattgtcacagtgatcaaggatgctttactccctagtggaacagttatatgaagtgaacgtgcgacatgcagctgtgtgtctcgacattcgacaatgatcagcacctggttacatgcgtgatctgcagatcagtctgttggagatcatcggagcaataaaagtgtcatccaaggcattttttctttctttttgctcttttgtgtccttcaatgttgtagggtagaatgttgtagcagcaaatgttagttacatgttgaatcgacattgggggcctggatttggggatacatcatgctgtaaattgatcagtttaattaccatactgtgctgctttgagcgaagccatggagaccatgctccacttttgtgcctgacgaatataagcgttgctggtttggagtgcggattttaaagat

SEQ ID NO: 122493 - DNA, 1473 bp, Zea Mays
agttaaacttaattcgtaagatcaatcataattctcgagttgcaaaccatggacatggctttggcgtctaaagcctcccctccgccatggaatgccaccgccgccgagcagccaattccaaagcgtgacaaagccgctgcaaatgattcaacatacctcaatcctcaagctcatgatagtgttcttggaatcattctgggaggtggtgctgggactagattgtaccccttgacaaagaagcgtgccaagcctgcagtgccattgggtgccaactatagactgattgatattcctgtcagcaattgtctcaacagcaacatatccaagatctatgtgctaacgcaatttaactctgcttccctcaaccgtcacctctcaagagcctacgggagcaacattggagggtacaagaatgaagggtttgttgaagtcttagctgcacagcagagcccagataatccaaactggtttcagggtactgcagatgctgtaaggcagtacttgtggttgtttgaggagcataatgtgatggaatttctaattcttgctggcgatcacctgtaccggatggactatgaaaagttcattcaggcacacagagaaacaaatgctgatattaccgttgctgccctaccgatggatgagaaacgtgcaactgcatttggcctcatgaaaattgatgaagaagggaggatcattgagtttgctgagaaaccgaaaggagagcagttgaaagcaatgatggttgacaccaccatacttggccttgatgacgtgagggcaaaggaaatgccttatattgctagcatgggtatctatgttttcagcaaagatgtaatgcttcagctcctccgtgaacaatttcctgaagccaatgactttggaagtgaggttattccaggtgcaaccagcattggaaagagggttcaggcttatctgtatgatggttactgggaagatatcggtaccattgcggcattttataatgcaaacttgggaataaccaagaagccaataccagatttcagcttctatgaccgttttgctccaatttatacacaacctcgacacctgccaccttcaaaggttcttgatgctgatgtgacagacagtgttattggtgaaggatgtgttattaaaaactgcaagataaaccattctgtagttggactccgatcttgcatatctgaaggtgctatcatagaggacagtttactaatgggtgcggactactatgagacagaagctgataaaaaactccttgccgaaaaaggtggcattcctattggtattgggaaaaattcatgcatcaggagagcaatcattgacaagaatgctcgaattggagacaatgttaaggtattccaaactgatgttccaacggtcaagaatattaatttagatttttccttaggatattacataatacttgatatgccattttgtcctcttatttttaacatttatttttga

SEQ ID NO: 122494 - DNA, 1781 bp, Zea Mays
aaattttcattccaaccttatctcctcctgtccgtactactagcggtcattgtccagccatcctcaggcagcttcgagttccacgacgagagcaccggcagccgcacacgcgtttgtctcctcgccggaccttcccggcaccgccgccggctctccctcacggtccactacactccacagcaccgccgtcgcacaacgacatggcctcctccgctacctatctcatgctcgccagcgcccacgctcccctcgctcctctcataaggccaccgccgatggcccttgtcgcgagaaccgccgcaacctccatcactaggcgcgaaagagccagtgtccctctgttagtcaaccccgctgcgtgccggccgggactgcggcgccgtggctgggcccatatctgcagagactcgtccctccagggcccttcgggcgccgattctcctgctcaggagcaagaggatctgaagaagagcgaggcggtgtcagaggctgcggctcggattgccggaggcactggcgggacgttaagcgactggagcacgtcggtgctcatcttcgggatctgggcgggactcatgtactacgtcttcctgctcgcgcctaaccagacaccataccgagacacatacttcttgcagaaacttttaaatctgaagggcgacgatggctttcgaatgaatgatgttcttgtttctctatggtacattatgggcctctggccactagtctacagtatgttgctccttcctactggtagaagttccaaaagcaagattcctgtgtggccattcctggttctttcatgcatcggaggagcatatgctttgattccttactttgtcttatggaagcctcctccacctcccattgacgaagatgaaattggacaatggccattaaaatttctcgagtcaaagttaactgcaggactagtgtttgccctgggcattggactgatcatatatgctggcaaagctggtggcgacgattggaaggaattcattcgatacttcagggagagcaagtttatccatgccacctgccttgattttactttgctatcagccttctcaccattttgggtctataacgacatgacagcaaggcgatggaaaaatggttcatggcttctgccgcttgcactgataccttttgtggggccctcactgtatcttctactgcgcccatcactttcttccttgctggaagcatctgcttcagcatctgatgagttcaaaaaataattggtatctaactcagaactgatggagaatttggttgtgagcacatgacatgggtagagaaatggttatctggcaactgcatttgttagcccaaatgctatgtcaattgctgatttggaggaaatccacaattttgcatgccacctccctgttcaaaatgaaaggacccaatgagatcctgacaatgaagatattgtcagtattatcatcacctgggtgcctcacaaattttgtcagtgttatatttatgtgtaatccacaattttttaatcactgatgaagcagtgtaagtatgcaacaaactactaggatattatacttgtatacataggtggttcagagtatagaatattttgctcctgttacagtggaacgtaataagccaaagtagtatcactacacctttgaagcacgaatttcttcgtgtgtcgccctccctcccgtgctaataatgcagtgtatgtatgcaacaaactactaggatattatatttgtataaatggagatgaaatccaatagaaaatcgttggagcataa

SEQ ID NO: 122495 - DNA, 1042 bp, Zea Mays
accataccatccatcgatcgatcaacaatacataggcaatccatctcctcccacatgtacagctcgctttccgatctagcaatgtcaacgggagcaacggagatgatcgtagccaccgccgatgccgccagcagcaccaggtgcatgtcgtcgacggcgagagcagaggacgtgatcgtgtccaccgccgtggccaccgcggccggcaccaagtgccacatgttcaagatcgacggctacaagcggatcaaggccatgtacggcaagggcaggagcatcgactcctgcaggttcgaggtggctggccgcgcatggaagatcctcttcttccccaacggcgactgccgggacaccgcgggccacgtctccctcttcctcaagctggacgacgacgacaccgtcggcggcggccccgacgacaacgacgacggcaaggtcgtggtggtcgagctcaggttctcgctgctgtgccgccccggctgggcgccggacgaccggccccagagctggacccgcacggccaccttcaccaacaagggcaacaagaccatgggctacagccagttcatgaagcgctcggagctggagatgccgaggttcctcggggacgactgcctcgccatccgctgtgacatgtccgtcctcgacgaccccgtcgacgtcaaggaggagcccgcgcagccgctcgacctgcagcggcttggggtgcctctcgactgcaaggtcgtcgacgacggcgcgtgcatcaagaccgaacccctcgttcccgttcccctcagctacttcaagttcacggaggcgctcgtcaagctgttcgtcggctgtttcgacgtctgaccgaatggatcctcgccggctgggttttattgttgcgttatatagtttcgacaaccatcatttcgagtatttcaagataaaagtacactgtcatcgttcccccaagttttgtttagatcgatcagggtgctagtttatttaatttatgtgtaaatcatcagaatttccacattattagtgaataaactgaatctagttttttcaa

SEQ ID NO: 122496 - DNA, 351 bp, Zea Mays
atggcggatggggagcgggttagtcaagagaattggagtcgtgttattgagacattggagggagtgagtagcaggttgaaggatgtggagagggtgcagcaacaaatcatgatgcggacggaattagcggcatcagttgctgaacaggctgcgaaggagagaaatgatttgggtcttaaattggaggagactggaagggtagtagcacagatgaggttggaacagttggggaaggaattaggtgaatcttctggggttctggttcaccatcattggaggtgcagcatagtgggtctctgtatacgagaggtcgtcatcagaaggaggtggagggtggtagagctttcaaag

SEQ ID NO: 122497 - DNA, 1019 bp, Zea Mays
gacagcagctcgtcgtcaagtccatcgatcgaccagctcgtccgctcatcttcatcaatcgatcggtgcagtgatcaatcgagcaacacaatggaggatgatgagcagcagcagcagcaggcagcaggtgcgtgcgtgccgccagggttcaggttccacccgacggaggaggagctggtggggtactacctggccaggaaggtagcctgccagaagatccacctcgacatcgtccgggaggtcgatctctacaggatcgagccatgggatctccaggagaggtgcggctactacggcggcggccaggatcaggaggagccgacggagtactacttcttcagctacaaggaccgcaagtacccgagcggcacgcgcaccaaccgcgccaccgccgcggggttctggaaggccaccggcagggacaagccggtgctgtcctcctccaccgccgccgtcatcggcatgcgcaagacgctggtcttctaccgcggccgcgcacccaacggccgcaggacggactggatcatccacgagtaccggctgcagggcaacgagcacgagcacgcccaggaggaaggctgggtcgtgtgccgcgccttccacaagcccatgcccaaccagcaccagcacatgatgctcaggcacgccgccggctgttactacccgccgcccatcttcggctacgacgacggccctgcccagctgatgagcggcagcggcagccccttggcggctgagtccaagctgcacgtgcagcagcttctcgccgacatgccgccgccgctccacagccccgcagtcgacgtcgtcggcgtgcatcatcatagctacaacgccaacgaccacgccgccgcggagccgacgacggtggactggaacctgctgaacagcctgctgccgcccgcgcagctgaatttccaccacccaccgtcgccggcttctccttcttcttgctccaagaacaacaacggtgcatgagcatgacaacacagcatttgtatatctatcaatggattaat

SEQ ID NO: 122498 - DNA, 2421 bp, Zea Mays
cgaaaggttatcccacctcttttctattcttttttccgcccgaagacaacgtaacaaaccaacgataatcctccctcttgctacaaaaaaggaaaaaaaaacatcaataataatccactgcggtcgctcgtcctcctcccaacctcctcccaagttgcctcgtgctctgcttcttcggttttcaggagcgtcggccattgctgctggaaaagcagaccattgggactccctcgtgcgttttccaaatcaggttcgttcttgacgcggtctgcgatccgattgtttcggctcccttgcacaccattgggactcgttacccatctcgtggactcttctgtttcttctccttttctccccccgtttattggaccagcggcggcttgctcctcttcgtgtaacgggatttggttttctgcggatgagtgtttattgttcgatgcggagcttcgatctggattcgtgcttgtcctcttggtctctgctcgctttgtaatgcttgggtacggtgcgctgaaggtgtttggggggtatgattgttgttgcacctgaataactgaggtgggtgtggcgcgaacttgggggtgtcttctctttggcgatcagtgcaatcgaatggtcagttgagttagatagtttttacatcggcgttgatggacttgcataattatgtgcgaatcatgggatcattaacttggtataaggggacgatcagtgatatgtgaagctgtcatgtttaggtgcttgattcagcaaagtggttaggcatccgacgctacgttttggggattgagatgcaaaataaagttcagcacttaactatggatcaagggttgtagagcgcaacccagctcttctgaatccaaactgtaggttgatacgtcggtgccatgaaactgaaaaccgatagttgtggcataggctcagggcaagaatcattttttttttcattttctgacttttccgtaactataggtcacacgatgattattttctccgcgacattatccgggtattaccgtgacagatatttttattggctccatttctgccatgtagtcaggttgatggcgatggagggaccagttttatgccgccctgcaatgcaagccaaatcgcctgctgctgcgctggtcaacaactccctgaccagattcgggcagcttgggaccatttcaaaatacaggaacgtttcaagattcatttctcccatctctcagccatctacgaagaacataggtccatgctgtagcttcagctcgtcttctgatggcaatggatacatggctggaaactttagcgacagtgatgaagattatgttaattctactgtgctagaagcagttgaggtgagaagtggatcggaaggatatgtgataaagatgcgagatgggaaaaacttgcgttgtgtccataacaattctcaagggagaaatattccagagagtgcaccccaacctgctattgttttgaggattgaagatggaagcgaaactttacttccaatcattgtttgtacgtaaatcttttagtttgatttgataatttggaagtaggaacctttaattgacattaatgcatgtccaccttctcaattttctcagtggagatgccaagtgtacttctgatggcggctattcgtaatgtccacattgtaatatcttctattgtcattaatactactgtttggtactgtccattctgtttcatgtagtctatataacgcctttatgttataggcacgaccaaccatatatcaagttgtcaaggaaatgattgataaaatgggctatgaggtaaaacttgttcgggtaaacaaaagaattcaagaagcgtactgtgctgaactttgtctaacaaagattgatgattctacagacagcatcaccttcgatcttcggccttcagatgccataaacattgctgttcgttgcaaggttcctgtacaagtccatagaagtcttgcatacagtgacggcatcagaccagtcgagccagcaagaatggcagtagcagctggcctatcagatgggttgttatttacagagcttgacagacccgatggacaggcatctgttgaggctcaagagtttggattggtgaagaacatgctcattgcagccgtagaagagagatacaaggatgctgcatcatggaaggacaaactgatgcggctgaggtctaagcggaagaactgggcctgacagcgttgcatgtctggatggtgtaaataaagatgatgcccagctgaattccagtacgcattccagataattgatgctgggttatggctatgtaactagctgtacatattgtatggacccgaggatggtcttctgtaaattcagactaagctttgaagtgaaacactaatccttcggagaaacttggtaccttgtccgtgttcacttgtggtatataatg

SEQ ID NO: 122499 - DNA, 1437 bp, Zea Mays
cgaaaggttatcccacctcttttctattcttttttccgcccgaagacaacgtaacaaaccaacgataatcctccctcttgctacaaaaaaggaaaaaaaaacatcaataataatccactgcggtcgctcgtcctcctcccaacctcctcccaagttgcctcgtgctctgcttcttcggttttcaggagcgtcggccattgctgctggaaaagcagaccattgggactccctcgtgcgttttccaaatcaggttgatggcgatggagggaccagttttatgccgccctgcaatgcaagccaaatcgcctgctgctgcgctggtcaacaactccctgaccagattcgggcagcttgggaccatttcaaaatacaggaacgtttcaagattcatttctcccatctctcagccatctacgaagaacataggtccatgctgtagcttcagctcgtcttctgatggcaatggatacatggctggaaactttagcgacagtgatgaagattatgttaattctactgtgctagaagcagttgaggtgagaagtggatcggaaggatatgtgataaagatgcgagatgggaaaaacttgcgttgtgtccataacaattctcaagggagaaatattccagagagtgcaccccaacctgctattgttttgaggattgaagatggaagcgaaactttacttccaatcattgttttggagatgccaagtgtacttctgatggcggctattcgtaatgtccacattgcacgaccaaccatatatcaagttgtcaaggaaatgattgataaaatgggctatgaggtaaaacttgttcgggtaaacaaaagaattcaagaagcgtactgtgctgaactttgtctaacaaagattgatgattctacagacagcatcaccttcgatcttcggccttcagatgccataaacattgctgttcgttgcaaggttcctgtacaagtccatagaagtcttgcatacagtgacggcatcagaccagtcgagccagcaagaatggcagtagcagctggcctatcagatgggttgttatttacagagcttgacagacccgatggacaggcatctgttgaggctcaagagtttggattggtgaagaacatgctcattgcagccgtagaagagagatacaaggatgctgcatcatggaaggacaaactgatgcggctgaggtctaagcggaagaactgggcctgacagcgttgcatgtctggatggtgtaaataaagatgatgcccagctgaattccagtacgcattccagataattgatgctgggttatggctatgtaactagctgtacatattgtatggacccgaggatggtcttctgtaaattcagactaagctttgaagtgaaacactaatccttcggagaaacttggtaccttgtccgtgttcacttgtggtatataatg

SEQ ID NO: 122500 - DNA, 1437 bp, Zea Mays; identical to SEQ ID NO: 122499

SEQ ID NO: 122501 - DNA, 1441 bp, Zea Mays
cgaaaggttatcccacctcttttctattcttttttccgcccgaagacaacgtaacaaaccaacgataatcctccctcttgctacaaaaaaggaaaaaaaaacatcaataataatccactgcggtcgctcgtcctcctcccaacctcctcccaagttgcctcgtgctctgcttcttcggttttcaggagcgtcggccattgctgctggaaaagcagaccattgggactccctcgtgcgttttccaaatcagtcaggttgatggcgatggagggaccagttttatgccgccctgcaatgcaagccaaatcgcctgctgctgcgctggtcaacaactccctgaccagattcgggcagcttgggaccatttcaaaatacaggaacgtttcaagattcatttctcccatctctcagccatctacgaagaacataggtccatgctgtagcttcagctcgtcttctgatggcaatggatacatggctggaaactttagcgacagtgatgaagattatgttaattctactgtgctagaagcagttgaggtgagaagtggatcggaaggatatgtgataaagatgcgagatgggaaaaacttgcgttgtgtccataacaattctcaagggagaaatattccagagagtgcaccccaacctgctattgttttgaggattgaagatggaagcgaaactttacttccaatcattgttttggagatgccaagtgtacttctgatggcggctattcgtaatgtccacattgcacgaccaaccatatatcaagttgtcaaggaaatgattgataaaatgggctatgaggtaaaacttgttcgggtaaacaaaagaattcaagaagcgtactgtgctgaactttgtctaacaaagattgatgattctacagacagcatcaccttcgatcttcggccttcagatgccataaacattgctgttcgttgcaaggttcctgtacaagtccatagaagtcttgcatacagtgacggcatcagaccagtcgagccagcaagaatggcagtagcagctggcctatcagatgggttgttatttacagagcttgacagacccgatggacaggcatctgttgaggctcaagagtttggattggtgaagaacatgctcattgcagccgtagaagagagatacaaggatgctgcatcatggaaggacaaactgatgcggctgaggtctaagcggaagaactgggcctgacagcgttgcatgtctggatggtgtaaataaagatgatgcccagctgaattccagtacgcattccagataattgatgctgggttatggctatgtaactagctgtacatattgtatggacccgaggatggtcttctgtaaattcagactaagctttgaagtgaaacactaatccttcggagaaacttggtaccttgtccgtgttcacttgtggtatataatg

SEQ ID NO: 122502 - DNA, 2844 bp, Zea Mays
cgaaaggttatcccacctcttttctattcttttttccgcccgaagacaacgtaacaaaccaacgataatcctccctcttgctacaaaaaaggaaaaaaaaacatcaataataatccactgcggtcgctcgtcctcctcccaacctcctcccaagttgcctcgtgctctgcttcttcggttttcaggagcgtcggccattgctgctggaaaagcagaccattgggactccctcgtgcgttttccaaatcaggttcgttcttgacgcggtctgcgatccgattgtttcggctcccttgcacaccattgggactcgttacccatctcgtggactcttctgtttcttctccttttctccccccgtttattggaccagcggcggcttgctcctcttcgtgtaacgggatttggttttctgcggatgagtgtttattgttcgatgcggagcttcgatctggattcgtgcttgtcctcttggtctctgctcgctttgtaatgcttgggtacggtgcgctgaaggtgtttggggggtatgattgttgttgcacctgaataactgaggtgggtgtggcgcgaacttgggggtgtcttctctttggcgatcagtgcaatcgaatggtcagttgagttagatagtttttacatcggcgttgatggacttgcataattatgtgcgaatcatgggatcattaacttggtataaggggacgatcagtgatatgtgaagctgtcatgtttaggtgcttgattcagcaaagtggttaggcatccgacgctacgttttggggattgagatgcaaaataaagttcagcacttaactatggatcaagggttgtagagcgcaacccagctcttctgaatccaaactgtaggttgatacgtcggtgccatgaaactgaaaaccgatagttgtggcataggctcagggcaagaatcattttttttttcattttctgacttttccgtaactataggtcacacgatgattattttctccgcgacattatccgggtattaccgtgacagatatttttattggctccatttctgccatgtagtcaggttgatggcgatggagggaccagttttatgccgccctgcaatgcaagccaaatcgcctgctgctgcgctggtcaacaactccctgaccagattcgggcagcttgggaccatttcaaaatacaggaacgtttcaagattcatttctcccatctctcagccatctacgaagaacataggtccatgctgtagcttcagctcgtcttctgatggcaatggatacatggctggaaactttagcgacagtgatgaagattatgttaattctactgtgctagaagcagttgaggtgagaagtggatcggaaggatatgtgataaagatgcgagatgggaaaaacttgcgttgtgtccataacaattctcaagggagaaatattccagagagtgcaccccaacctgctattgttttgaggattgaagatggaagcgaaactttacttccaatcattgttttggagatgccaagtgtacttctgatggcggctattcgtaatgtccacattgcacgaccaaccatatatcaagttgtcaaggaaatgattgataaaatgggctatgaggtaaaacttgttcgggtaaacaaaagaattcaagaagcgtactgtgctgaactttgtctaacaaagattgatgattctacagacagcatcaccttcgatcttcggccttcagatgccataaacattgctgttcgttgcaaggttcctgtacaagtccatagaagtcttgcatacagtgacggcatcagaccagtcgagccagcaagaatggcagtagcagctggcctatcagatgggttgttatttacagagcttgacaggtattctagaaggcgaataagaattttacagtagctgtaggatttgtttttaatattttcgtgatctgcccccaactttgcttgtggtctaagaagctttgttgttgttgattatctgccctgcaacttattgcttctaccgtgttatttctgagggcatggagggactgatgaatcgatatgtttcttagacctttcactgatatatccaacaaactggtttcgtacattcgagtatattctgtgcatttaagatccagaactccaatatatgaatctgtatgttaatttttgttacacttgcatttttgttagacccgatggacaggcatctgttgaggctcaagagtttggattggtgaagaacatgctcattgcagccgtagaagagagatacaaggatgctggtaatgatccattcttcttgtggattcattcaattcatctaggactccagattgagcatctggcaatgactccacccagtgttgtattaccaaaaccgtccgaatgctgaacaaaaatcacctctcttttactttgcaaccatgttctgcaaagaacaaaacaagattaatgtgcatcaccttgcgtgatacgcattgatcttcaatataattatgattagatgaaacctagatgtggtagttctattgaaggttgattgatttatctgttggcttcgacagcatcatggaaggacaaactgatgcggctgaggtctaagcggaagaactgggcctgacagcgttgcatgtctggatggtgtaaataaagatgatgcccagctgaattccagtacgcattccagataattgatgctgggttatggctatgtaactagctgtacatattgtatggacccgaggatggtcttctgtaaattcagactaagctttgaagtgaaacactaatccttcggagaaacttggtaccttgtccgtgttcacttgtggtatataatg

SEQ ID NO: 122503 - DNA, 759 bp, Zea Mays
atgtggaggctatccttggccgcaggggagggcgccgcgggggagggggcaggggcggggatgggtgtgggcgtggaggagggcgtcgaccagacggacgaggagtcatcgctctcctcgccatcggagggggtggggccgatcgaggtggtgaggggcgtcggtgccatctccaggaccggctctagcacctcttcctcctgctgctgttgtagcagcagcgacggcgggacaccggagacgaggttagggtttggtggggccagcgcggtggcgggtgttgccatgggaagggccaaggtggagaacgcgctcctccctccccgacaccgaccgacccctcgtccgctcgcctccctccctgatccccaccgccaccgccgcgtcctcctcttcctcctccgaggttccgatcgccgcctgcacctgcgtctccgtcggcgaggtgggttgctcctcccctgcctgccggtcctggatccgcccgatctgcttgcacggcgcggcgcggcgctcgatctcatatcgtctggttttcctttcctcctgtgccaggtagcggtgggcgcggtggctacaagcagcggcgatcgggtggtggcggattgcggggtgtgcgccatctgcctcgacaggatagcgctccaggagacagccctcgtcaagggttgcgcgagtgaccatgtcatgtggctgctgggggttggcggtagggaccgcgaagtggggagggcgggaggcgggggcagtctacactaa

SEQ ID NO: 122504 - DNA, 90 bp, Zea Mays
cgagaacgaagaatgagtcttctatatatctttctcgcgccttcgttgctgatgataggattcgaggttcacatttatgatctaccatga

SEQ ID NO: 122505 - DNA, 80 bp, Zea Mays
tttttaattttttaatttttgtatatatatgtatttgtcatactcttaaatgtattgtacatattttagttttattaaac

SEQ ID NO: 122506 - DNA, 832 bp, Zea Mays
ggccaccgggaagagaagttagatacctcaccagcctgcgcgcacggaacaatggcgcacgcgaaggccgtcgccgtcctcggcgtggtgatcgcgtcgctcctcctcgcggctgagagccgccacattgcccgaaaagacctgggcgtcggccttggtgggggcggcagcggcggcggtggcggcagcctcggtgtcggcacgggtggtggcgtcggggttggtacaggcggcggacttggggttggcacgggtggcgggctgggtgtcggctcagggatcggcgccggcgccggcgtcggcggtggcggctcagggtccgggtcctactcgggctcagggtccgggtcatggtcaggctcgggctcggggtctggcgctccaggctcatcggctggctcttatgctgagtcaggatccgggtcgaacgcagggcccggtggtgcaggagcaggatcctacgcgggctcgagagctggctcttacgcaggctctagctctggaggagcaggatcggatgcgggctctgacgccggctcgtacgctggcccgcacggcggctcgggtgcaggttcctacgcagggtcccatgccggatcctacgctggcagcggacatggcaagtgagcgcgagagcttacttatcggtgccgcgcagcacgaaacagacctccactacgatgttgctactgtgtgtcatcatgtatattgttcgttcctattgcacttgcaccgttgtacgagagcagccacaaataagataccagagtatatatatatacctctggtgtaacatatgtttatgcaaatgaataaattcagcacatatttc

SEQ ID NO: 122507 - DNA, 1083 bp, Zea Mays
ggacggacgatacacaaaaacggaggcatgacaacaaacggacggtctggattgagaaaaggcagaacgagggagaggcaggctacccttgtagctagtagagatttagaaaaaagaatctttcaattcaaccaatggcaaccaacgttcagccggatttgcaattttataaacaattgtttgccaaaaaaaaatataaatataataaatacaaagaataaaaataaataaataaaacggacgggcaaggccaattccaggagccaagaattgcgtgctgcgtttatctctgtggcccttcgtgcctgcgttgtgtaattgttctcctgctaccccgcgtccgctgtgtgctctctcgctctctcggtggaagttggcgacgactgggcgaccgccgccgccgtacgccaggtgctcaggtctccgtcagacccttcgccaggtcttcttcggcggcgagcaccgccagggtgtgcacccaatcttcttcactgggtcctccgctgcttctagtcacgcatctaaatccggagttgccagcattcgcttgaggtgccggaccacagcacaccatcatgcagcgataggttcaacataaactctcagcttgagcatcttcaagccaaatatgttggtacagggcatgctgatttgtctagatttgaatgggctgtaaacatccagagagacagttatgcctcttatattgggcactatccaatgctagcatattttgccattgctgagaacgaatcgatcggaagagaacgttacaatttcatgcagaaaatgctgcttccttgtggccttcctcccgagagagatgaagattgaagagctagctggtgctgcatagtttctgtgtttccagtggttcctgtagtgtttgcttttagctaccatcgtactatgtgcgagcatgcctttcacgtttcttcctttagtctcttttgtgatacatagaacccgtatgtattgttaaccaaatgctggcctgccccattgttgtgtttttgtggtgtgttcagccaatgtgaaagaaaaaaaaaaaaagcccaagagattgatgactgcctacaacaa

SEQ ID NO: 122508 - DNA, 1088 bp, Zea Mays
ggacggacgatacacaaaaacggaggcatgacaacaaacggacggtctggattgagaaaaggcagaacgagggagaggcaggctacccttgtagctagtagagatttagaaaaaagaatctttcaattcaaccaatggcaaccaacgttcagccggatttgcaattttataaacaattgtttgccaaaaaaaaatataaatataataaatacaaagaataaaaataaataaataaaacggacgggcaaggccaattccaggagccaagaattgcgtgctgcgtttatctctgtggcccttcgtgcctgcgttgtgtaattgttctcctgctaccccgcgtccgctgtgtgctctctcgctctctcggtggaagttggcgacgactgggcgaccgccgccgccgtacgccaggtgctcaggtctccgtcagacccttcgccaggtcttcttcggcggcgagcaccgccagggtgtgcacccaatcttcttcactgggtcctccgctgcttctagtcacgcatctaaatccggagttgccagcattcgcttgaggtgccggaccacagcacaccatcatgcaggctagcgataggttcaacataaactctcagcttgagcatcttcaagccaaatatgttggtacagggcatgctgatttgtctagatttgaatgggctgtaaacatccagagagacagttatgcctcttatattgggcactatccaatgctagcatattttgccattgctgagaacgaatcgatcggaagagaacgttacaatttcatgcagaaaatgctgcttccttgtggccttcctcccgagagagatgaagattgaagagctagctggtgctgcatagtttctgtgtttccagtggttcctgtagtgtttgcttttagctaccatcgtactatgtgcgagcatgcctttcacgtttcttcctttagtctcttttgtgatacatagaacccgtatgtattgttaaccaaatgctggcctgccccattgttgtgtttttgtggtgtgttcagccaatgtgaaagaaaaaaaaaaaaagcccaagagattgatgactgcctacaacaa

SEQ ID NO: 122509 - DNA, 359 bp, Zea Mays
tttaaaaactggtttagagaataaacgaacttgcttctctccataattttatttataaaaatccaaaaatgatgaaacctgttttgttagttagatgttgtcatactccatcaaggaaaaatagaaaacttatatgttgttcactgttttcttggtgtgctaattaaatcatgttaaataggaaaaagaagatttattttcttattatttttggatctgtatctctagtgctccaaatgagttgaaatatttacagtagactcttggtgtgatgcttggtgactggtaaaaatttcatgaattgttgtgcatgtatgattaagttagtgatttaacttgtttaatgcaccttaggtagt

SEQ ID NO: 122510 - DNA, 127 bp, Zea Mays
ggagcaggccgagaagctttttaaatctcaagatccccagaacaagtccttccagtttagacattgttggctattattgagaaatcaaccaaaatggaatgataagctgcaacaattagtagcagtg

SEQ ID NO: 122511 - DNA, 565 bp, Zea Mays
cacaggccacacaccacacaagcccaatacagatcaacacttgctaaaacaaactagacagagtccatggtggcactagagaaaagatccagaattagcaagagaatggtgtcgcggcggcggcatttccagctcatggtgctgaggcggctccgggagctcaagaaggttattgtgccggaggagggcgctcgccgcaaggccaccgccgacgtggtgctccggcaagctgccgagtacatctgcgcgctggagctgaaggtggccgtcctccggagggtctctgacatgtacggtgtgtagcgagctctaacacacaatcaccaatgcaatccgtcgtttgcattgcacatgtgagactgcactgcattccttgcccatgggcacctgcagcctgcgttcaactcctctccccagcaccacccaccaaccaaagtagtagcgttttagctgtgcctccgctcccctatgcgattatattggctgttggtcacacgtgcaagtgtgtctagtactagttagatctggctggctggaaaagtttctttctctggtgctttgtcaa

SEQ ID NO: 122512 - DNA, 683 bp, Zea Mays
atgaatcttcgaagattggtgttcagaaaaagacaaaaaaatgcaaattgcacatgaatcgagcggggaaatgtcgtttggatggggacgtcagccagctttcttgggaacatttagcaagaggcttaacaggtgtttcaatgatgctacaaatggggttccaggtgatggttggtctctaatgagcaatgatggtgctgaggatgttcctattgttgtcgactctttctccaaacaaacttattggtgctcatgtcaactcctcccagatgttttttgactgttgaaggtggtctcctgcgtgttaaggtataaattggatgaacttgcggaactgatccaagctgagcggacagagatcccggccgccactgatgatgcctgagttgaagaagagcagagggattcgtcgtcctggaattggaacagaaccgctctgtgctctgtcagtgtcatgaattaattaagagctccgcgtctgaaaattattgcagtatatatatcctgggctgggacgcatgcataccaagcgcgccggcctgttgtagcagcttcgctttatactgtgcgtagaagttgatctgtgtaggaatataaaataatccagtggccaccaggcggacaggaacagcttgttgctccataacaccatgattattagctaccttgctttcaagcgtttc

SEQ ID NO: 122513 - DNA, 362 bp, Zea Mays
tttttttgctatgctgctggcagaacgtgtcgtgggtatggtctccaggtatggtgcttggtcatgggagcttttttttgtacgtgtctccaggtctccaggtatgatgcatttgtttttgttggctatgttttgtttgtttgtttttttgctatgttttgtctaatgattctgttatttttttctattgttgttattttttgctatgctgctggcagaacgtgtcgtgggtatggtctccaggtatggtgcttggtcatgggagcttttttgtacgtctatatcattagttgagataacatgcaccgaatccacttcaacatgtaggctaagtgtttgcagactgcagagaccttagtcat

SEQ ID NO: 122514 - DNA, 884 bp, Zea Mays
ccagaagctgagagattgagggcggagcgtgattttcgcggtgattttcctgctcccatatcgttggcggccggttgatagcgagttgtgctggagggggaggtgcctgtgacaggatctgtggttgctgtccgtgggcaacaagctgtgtcgaaggaggtcgaactcccaacgcgatgtgtggtggcggggatagttcaatgacgttttcagttccaacctgtagcgatggtgctccagctcgtgttgacacggtcgatctggtatcgcacctcttcactttccccatccccttatggaaggcgtgagatagagtgtcgaacggagcttcccacgacgatgctgctgtttgccggcgagctctcccccctacccatttcttctactcctttgtaaggctcagagagctgcctacagagagaaggtgctaattgaagcagagaaacagtttcaggacgatttcaattttttgaaggaaaaggtattagttgattttggccaattagtggatgtccaacgtattgacagtatttgccaagttatgtgcgacaagttcaagggttgttgttcggtttgcaagacaatgtgtattgaagctatagtcgattctgtgaaaattatggttgaagcaatgtctatcaagcatcaggagattttgaattccatgaaccctctagtgaaaactatggctgttaagcagatgagaaatacacccatactgatatcaatgtacaaccagctattgttaagtcggatgagaaagtcgttgttgcagactttgttgagtcatctgatgggaaaaggtcttggtgtgggtactagcaatcctctggtaacagtgcccatacatctgaacacatcaacacaccagtcgtttataggtc

SEQ ID NO: 122515 - DNA, 171 bp, Zea Mays
ctctctctctctccactctctctgacgattcttcagcttgtggtggcctccgaaaccgacgactcgtggtggtttctgctgctatcctcaataggatcactgccagtgtttactatcccgtgtgcttgccctaagcccttcctgaccaccatgttcttcaattccctgacc

SEQ ID NO: 122516 - DNA, 345 bp, Zea Mays
atgggcaggtcgaatgcggaccgcagccccacgcgcgactgccagtccgggaacccgggccccgacggcaggcccgcggcgaggacggcacggaggtcgggcgggaacgcaaaccacatctcagccttggtgcgcaccaactctagctctgtcaggcccgggagcaccgccaccccggaggcccagaggtggccaagcaccgcggccgtgagcggggcgaaggagtgcagcccgtgccgcgatgaggccgacgccgacgaggggccaagaacaggggcggggtggcggcctcttcgaagatctgggagggggcgagggcatggtatggcctcgtgggggcggtag

SEQ ID NO: 122517 - DNA, 134 bp, Zea Mays
attggagcagtgtgggaggaatgtgtgtgttggggtatctgctaatgcagttttctttcgaaatctagtaaacaaatccaaatttgtttatcattatataatggtttttatcatgttgcaaatatgtgttgttc

SEQ ID NO: 122518 - DNA, 782 bp, Zea Mays
ctccttctccctccccctttctctctcttctctctcccacgcacctgacctgtcggcagcctccggaggaggcccggcccagggcagtgcgacgacatggctggtggtggtggagggccggggctggggcggggagccgcacgccgtgggtcgggctggcggcggcggtgtgggtgcaggtggctgcggggagcgcctacgggttcccgctctactcgcacgccgtcaaggaggcgctcggctacaaccagcaggctctcaccatgctcggtgtcggcaacgacatcggcgagaacgtggggctcgtcacggggttgctcgccaaccgcctcccgccctggctcatcctcgtcatcggctctgcctgcgccttctttggcttcggcaggctctggctcgccgtcaccaagacagtcgccatgccttattgggtgacagacaattgaaaaagagaattgatcttttttatgggtgaagtgttgaagatggctttggtgaaggaaatatcttgttagcatcaagtaagtggcgacatcacaacccctacaagcttgtgccttaaaacaagaggatacacaagaagttggagtgcttttgtgaaggcttttgcgaatcacttgaagcattaggacttttgtgaatgattttgtaaagtgtttgcaaatatgtgcaaaacataataacatatgtaggttttgtgaatgattttgttgtggtgcttgttgatggtttatgtgatgtggatttattattgtgcaatactaattaaatttgtatatcta

SEQ ID NO: 122519 - DNA, 1193 bp, Zea Mays
cttctccctcccattcgcgcgagtttgccccgaaaggagatgaagcagacgcgccccattcgcttcccatcgtagtgaactcggttcgcctcgcctcgcccaccgccgaggcagcgaccagcgaggcgtgctcctcctccggcgctaagacggggccggccgctcgtggggcctcgcctcaggggccccgtgggaggcggcgggccccgaaacgccgtcgtggtgtatcaggcatcatagggctcgcggcggcgattgttggccgcgagttggtcgtgtggatgaggctccaggcgggccccagttttggcaaatggcaccagttcctgcaacaacgaggtcatctacgctggcatctactaccctccccgaagtctcaagactgatgctaaagacttgggagcaagtatatcatataacacaacagttatcagtgcgtgtgttgtatccaaaggccttgaactccatgttggtcgaaccaaagagctgcagaattatcatgagaaagggcattctagcgaagagagggctacatagctcataagaattattattagccttgtggctatgtgccattcacttggggttatgcaccgtgatctgaagccagaaaacttcctccacttggataaagaagatgatttgtcaatagaagcaatcgattttggtctatccgtgttcttcaaaccaggtcaggttttcactaagctggttggaagtccatagaccctgtagtacagaacagtcatcggaacatgatcacgcgttagaattattggagtggagcagctcactcgacaaaaatgtgtcaccaaccgatgatttattgcattgtcaactgcacttaatgttcttagttgttggggtcttcttctccactgaaggtccttaagtcataaacaccttcgataaaatgccacaagaggtccgcctcacttccgccgaaggttctcaagacgaagatctcggaaagaagcagaaatgcagaacgacgaagctagcttcagctcaaatcaagcaaagaaggaaaagactagatagaccttgctggtttaaattgcttatagacaaatgttcaagggcatgtatgtaattttacctgggctgcgtcccgtacctagaaatagatgaacagtatcaccgtactgtttaagctggattataattactctctcgcattcacgcctttgagc

SEQ ID NO: 122520 - DNA, 3730 bp, Zea Mays
atggatgcttccttctggtgctagtggaaactagagcagtgcctcccaggatcctctcgcccgcgggctccgagttgccgcctccgcctctctggaacaagatgaagctggttttctggcattggatttttctattcttcgtgttgctttcaacatcacagggtatgagttcagatggcctagctcttcttgctctgtccaaaaccctaatactaccaagtttcataaggaccaactggagtgcttctgatgcaactccttgtacatggaacggtgttggctgcaatggaaggaacagagtgatttctctcgacctatcgtcatcagaggtctcaggttttataggacctgaaatagggcgtctgaaatacctgcaggttctcattttatctgctaacaacatatctggtttgatccctctagaattgggcaactgcagtatgcttgaacaattggatctgtcccaaaacttgctttctggcaatataccggcatcaatgggcagcctcaagaaattgtcatcactgtcgctgtactacaactctttccatggaacaataccagaggagttgttcaagaaccagtttctggagcaagtgtacctacatggaaatcagctcagtggttggatacccttctcggttggtgaaatgacaagccttaagtcattgtggttgcacgaaaatatgttgtccggagttttgcccagttcaattggcaactgcaccaagttggaggagctgtatctactccataatcaactgagtggcagtattccagaaaccttgagtaagatcgaaggcctcaaggtttttgatgccactgccaatagtttcacgggcgagatctctttcagttttgagaactgcaagctggaaatattcatcttgtcattcaataatataaagggtgaaattccgtcatggctagggaattgcaggagcttgcaacaacttggatttgtcaataatagtctgtctggcaaaattccaaattttataggcttattcagcaacctcacgtatcttttactttcacagaactccctgactgggctgatcccacctgagattggtaactgtcggttgctgcagtggctagagctagatgcaaatcagctggagggcactgttcctgaagaatttgcaaatttaaggtatttgtcaaagctctttcttttcgagaatcacctcatgggagacttccctgagagtatttggagtatccaaaccctcgagagtgtccttctttatagcaacaaattcacagggaggctaccttcagtgttagctgagctgaagtccctaaagaacatcacactgtttgataatttcttcactggagtcataccacaggagctgggtgttaatagccccttggtccagatagatttcacaaataacagttttgttggtggtatcccaccaaacatttgttcaggaaaagcattgagaattttggacttggggtttaatcatctcaacggtagcatcccatccagtgttctggactgcccaagtctggagcgagtcattgtcgaaaacaataaccttgttgggtctattccgcaatttataaactgtgcaaatctaagttatatggatctgagccacaattccttgagtggtaacataccatcaagtttcagcaggtgtgtaaaaattgctgagataaactggtcagagaacaatatttttggggcaataccaccagaaattggaaagttggtgaatctgaaaaggcttgacctctcacacaatctattgcatggttcgatccctgtgcaaatttctagttgctccaagttgtattcacttgatttgggttttaactctttgaatggttcggccctcagcacagtaagcagcctgaagtttctgacacagctacgattgcaagagaatagattcagcggaggtttgcctgatcctttctcacaattggaaatgcttattgagctgcaacttggtggaaatattcttgggggcagtatcccttcatcattaggacagctggtgaaactgggtacaaccttgaaccttagtagcaatggtctagtgggtgacattccatcacaattcggtaatttggtggagttgcaaaacttagatttgtcatttaataatctcacaggaggccttgctacattgcgaagtctacgctttttgcaggccttgaatgtttcttacaaccaatttagtggaccagttccagataatcttgtgaagtttctgagttccacaacaaattcttttgatggaaacccaggcctctgtatctcttgcagcaccagtgattcttcttgcatgggagctaatgttctgaaaccttgtggcgggtcaaagaaaagagcagtgcatggccgattcaaaattgttctcatagttcttggctcattatttgtgggagcagttctggtactcatactctggtgcatccttctgaaatctcgagatcagaagaagaatagtgaggaagcagtcagtcatatgtttgaaggttcctcatctaaattaaatgaggttatagaggcaactgaatgttttgatgacaagtatatcattggtaaaggtggtcacggaaccgtttacaaggcaacactgaggtcaggggatgtttatgctataaagaaacttgtgatttctgcacacaaaggttcatacaaaagcatggttggagaactgaagacactaggtaaaatcaagcacaggaacttgattaagctgaaagaatcttggttgagaaatgacaatggattcatactgtatgattttatggaaaaaggtagccttcatgatgttctacatgtagttcagccagcaccagccttagactggtgtgtgcggtatgacatagccctcggcactgcccatgggttagcatatctacatgatgactgccgccctgcgatcattcatcgcgacatcaagccaagtaatatactgctggacaaggacatggtgccacatatttcagattttggcattgcaaagctcttggagcagccttctactgctcctcagaccactggtgttgttggcaccattggatatatggccccagagttagcgttctccaccaagagcagcatggagtccgacgtgtacagctacggcgtggtgctgctggagctgctcacgaggagggcggcggtggatccctcgtttcccgacggcacggacatagtcagctgggcgtcgtccgccctgaacggcactgacaaaatcgaggccgtctgcgacccggccctcatggaggaagtcttcggcacggtggagatggaggaggtgagtaaggtcctgtcagtggcgctgcggtgcgcggccagggaggcgagccaaaggccctccatgaccgcggtcgtgaaggagctgacggatgcacggcctgccactggcggcggccggtcgttgtccaagtcgaagcaggggaaaccaggatcgcaatccaacagcagcgcctaccggcagtaggatctctgactctgccgagctgtttggggacaccaactttactcaactttagtctctactctataggtaccctcgcttggtgtacatcctgattggttagttggcaaagattagttgtagttcaaatgaaacggagagatgctggactcgtgtcagtgcgagtgaagcaagctgcttgttctgaaatctgtggactgtggcttgtccgtggcttccagggacgggaccaggatagaatgggtattccaaattgtact

SEQ ID NO: 122521 - DNA, 636 bp, Zea Mays
actggaatccaagccagaggggcgcggcagaggaggaggaaggaggagcgcgcgtaagggagcacgcacggctgggcgaactgtggcgcgcatcatggaggagagcacggcgcgcaggggcagagggacgcgaagatgggcacgcggtggagctgagcgccggcaagcatcccaggcgcgccgcacagaggagaaactcggcgcgaagaggggcaagccagagagctccggtgtcgaggggatgcaggctccgggcaaatcccagggcgcggccatgggaggagcgacagggagaaacgccggacgccatggggacgagccttggctgggaggagctcggctgggcgttgggcgctacgcagagggaaacaggatggccagcagaggactccggccgggcgttggaggaaacgcgccatgggagcaccgggagctggagggggcgagccagcagagggagcgagcagtaggggcttgcagccggcagagaagggagggagataagcgagggccgagcggcaaggaagaaaccgagctagagctcgcggctgctgaagatggggcctgatttttcttggttgcgtgcagatgaggacgacgactaatgagcggctggaggttgaagagaggaaaagc

SEQ ID NO: 122522 - DNA, 773 bp, Zea Mays
aacaattataattcgtcataagtaatactaacaatattattgtttagacattttaaaatactaaatttaaacttcattcactaatttaccgtacgtcacataattaacatcttaaacctacccaacccgactactccaaaatcatgaaaataatcacattgcatttatcgaactaattcaataattaagctaacggaaatatgaattgactgaccatactaaatcaagcttgcaaccacgaaatcgacgatgccttttagctcagcatttcaccgaaaataggatgagtgctgcttcgaattgcgcttcttcatcatccacatcgagaattcttcggcagcatactgatttattttcttctacacctaatcttctcggatcttggcgtagatgaggatgacgatcgacgacttgttcgagctttttgtcgagcgctcagtaaatattacgatgctagcttcgtcttcactcgacttttgtgatttcttgatgatgcacgaaacgacaacgagatcgagtctggagcgagctggcgaggtgtggtcgagcaggttagcgcgagctctagtgatgacgaaatcacgagcaagagaggatggtttcaacagctcgacgtcaaacgtgagcacgcagcgaggcatgcagcagcgacgacaatcgaatcgacaacaaagcgttggcgaactcgatgaacacgaccacggtcgcgtgctgacgcggaaggacaacggtggcgagagaaatccgagctggggaaagcgaatctgaacgtc

SEQ ID NO: 122523 - DNA, 1779 bp, Zea Mays
ggatgattgcttctagtccacaccgcgctgcaggtgctctccctctcgtcctccatggaatataatggatgattgcttctagtgctagtcaaaactagaggagcgcctcccaggatcctctcgcctgcgggcaccgagctgccgtctctgggacaagatgaagctggttttctggcatcggttttttctattattcgtgttagtttcaacatcacagggtatgagttcagatggcctagctcttcttgctctgtccaaaaccctaatactaccaagtttcataagaaccaactggagtggttctgatgcaactccttgtacatggaacggtgttggctgcaatggaaggaacagagtgatttctctcgacctatcgtcatcagaggtttcaggttttataggacctgaaatagggcgtctgaaatacatgcaggttctcattttatctgctaacaacatatctggtttgatccctctagaattgggcaactgcagtatgcttgaacaattggatttgtcccaaaacttgctttctggcaacataccagcatcaatgggcagcctcaagaaattatcatcactgtcgctctactacaattctttcaatggaacaataccagaggagttgttcaagaaccagtttctggagcaagtgtacctacatggcaatcagctcagtggttcgatacccccttctcggttggtgaaatgacaagccttaagtcattgtggttgcacgaaaatatgttgtctggagttttgcccagttcaattggcaactgcaccaagttggaggagctgtatctactcaataatcaactgagtggcagtattccagagtccttgagtaagatcgaaggcctcaaggtttttgatgccactgccaatagtttcacgggcgagatctctttcagttttgagaactgcaagctggaaatattcattttgtcattcaataatataaagggtgaaattccctcatggctagggaattgcaggagcttgcaacaacttggatttgtcaataatagtctgtctggcaaaattccaaattttataggcttatccagcaacctcacatatcttttactttcacagaactccctgactgggctgatcccacctgagattggtaactgtcggttgctgcagtggctagagctagatgcaaaccagctggagggcactgttcctgaagaatttgcaaatttacggaatttgtcaaagctctttcttttcgagaatcacctcatgggactcttccctgagagtatttggagtatccaaaccctcgagagtgtccttctttatcgcaacaaattcacagggaggctaccttcagtgttagctgagctgaagtccctaaagaacatcacactgtttgataatttcttcactggagtcataccacaggagctgggtgttaatagccccttggtccagatagatttcacaaataacagttttgttggtggtatcccaccaaacatttgttcaggaaaagcattgagaattttggacttggggtttaatcatctcaacggtagcatcccatccagtgttctggactgcccaagtttggaacggttaattctcagagataacaatcttagtggatcaattatgtgatccataagatttggaaatgcatctacaggttacctttttatgaaacgggagaggtctagttgttttgtttggccaggcatctataggttgggccatgcataaaaaacactcaaattagtggactagttattttgtttctgttggacacca

SEQ ID NO: 122524 - DNA, 1608 bp, Zea Mays
ggggaaggttgtcaatgtgcgcaattttggttgatgacaactgctcatacatgcaatccccatcgaattgtgcattgaactacttgtacataggcgaaaaaagatcttctactgacttctatccaaaattttcagggacaagatgaagctggttttctggcatcggttttttctattattcgtgttagtttcaacatcacagggtatgagttcagatggcctagctcttcttgctctgtccaaaaccctaatactaccaagtttcataagaaccaactggagtggttctgatgcaactccttgtacatggaacggtgttggctgcaatggaaggaacagagtgatttctctcgacctatcgtcatcagaggtttcaggttttataggacctgaaatagggcgtctgaaatacatgcaggttctcattttatctgctaacaacatatctggtttgatccctctagaattgggcaactgcagtatgcttgaacaattggatttgtcccaaaacttgctttctggcaacataccagcatcaatgggcagcctcaagaaattatcatcactgtcgctctactacaattctttcaatggaacaataccagaggagttgttcaagaaccagtttctggagcaagtgtacctacatggcaatcagctcagtggttcgatacccccttctcggttggtgaaatgacaagccttaagtcattgtggttgcacgaaaatatgttgtctggagttttgcccagttcaattggcaactgcaccaagttggaggagctgtatctactcaataatcaactgagtggcagtattccagagtccttgagtaagatcgaaggcctcaaggtttttgatgccactgccaatagtttcacgggcgagatctctttcagttttgagaactgcaagctggaaatattcattttgtcattcaataatataaagggtgaaattccctcatggctagggaattgcaggagcttgcaacaacttggatttgtcaataatagtctgtctggcaaaattccaaattttataggcttatccagcaacctcacatatcttttactttcacagaactccctgactgggctgatcccacctgagattggtaactgtcggttgctgcagtggctagagctagatgcaaaccagctggagggcactgttcctgaagaatttgcaaatttacggaatttgtcaaagctctttcttttcgagaatcacctcatgggactcttccctgagagtatttggagtatccaaaccctcgagagtgtccttctttatcgcaacaaattcacagggaggctaccttcagtgttagctgagctgaagtccctaaagaacatcacactgtttgataatttcttcactggagtcataccacaggagctgggtgttaatagccccttggtccagatagatttcacaaataacagttttgttggtggtatcccaccaaacatttgttcaggaaaagcattgagaattttggacttggggtttaatcatctcaacggtagcatcccatccagtgttctggactgcccaagtttggaacggttaattctcagagataacaatcttagtggatcaatt

SEQ ID NO: 122525 - DNA, 2380 bp, Zea Mays
atgggctcatggcacgatgcaaatgagcaaacctgtcaggcggtgaagagaaccgagggcgaagcgccaacgaacccaactgaccaacacagtcagggacctggatctgaattcccatcacactccccgtcgatggacatccccaccgctgtcatacaccgcctacagtcctcgctccgcgaggccatcttcgccccttctgtagaagatgcacccgcccctcccttcccctctgtctccgacgccgtcgcagccttcgactcgggcgccgcctctgtctcggcggagttccgatgtgtgggctgcgggtccgcgggagggctcctgcgcggtgcgcagtctgcactctgcgcctactgcgggtgtcccaggcgcggggaggaagctgaaggcggtggaagcggtggcatcgccttccgtaacagcgcggcctaccggtgcttgctcggctcgcttggactggacggatccgagtttgtagaattcgatactgacacaacagctttgaataaaagcaaggatgcaccaccgccaaacagtgattcattttttgttgaaagaaaagagatgacttcttctcttccgcaaactcataatgcggagcaggaaaagaaaagaactgatagcaaaaaccatgaatctagactggagagcgatcagttacatggaagggaatatactgcagtcaatgatgatgaagcttttgatgaatggcaagaatttacagcaagtggtaatcaggacagcctatcaaatgcaggagagaatatggaggaacctttaaggggagattcgtctgaaaaggatgtaatagatccttggccagtaggcaacaaggaatcacccaataatgttatcgaagactctaatcaatggcaagcttttgcttctatgtctggtcaagcaagagattttgtgatatctgtagagagatcaagtggtcacagactaaatttggtgagaccagatgtagttgaagagacaatgagcagcatctcgcatcaacattcttcagaaattaatcctgttgatctgtggcctgtgggcaatgttgaagcactaaacgctgcagaaatgtttaaggaaacaaacgattattttggcgattggcaagattttactaccactggtcaggtccaggacacttcgctgaatcaaactggggacatgatagaggtccgaaaagccactcacaaagaaacagacatggattcatggttcattggaaatattagggagccagcaaatactggtaccatgaatgaaaataacatgttggacaatcggcaaggtttcacttgttcagatcaagcacatcaaacttcatctagccccggtgccgaaatgataagtgttccattggagctgcatgatgtaagtgtttctgtccaatcatgggcaaatggcagcagcaaagatgccgcaacaccatcctcaacaaatatagaaagcaacacatttaatgttaggcaagattttgctaaatcaggtcatctgcaagaaaacatttctagtcttgggagagaattgagtagtgtgtcacctgaaccagttgaagaaaatgattccttagatttgtggcttaccagcaacttcaaggaatctaagtgcagcgatgttgttgggagaactaatgcctcgtcggatgggtggcaggattttgccagttttgatcatgctcagagcagtactaaaattcctgtggaagggcatcttataaaaatccttcagggtctgaaactatggacttatgggcctcaattagctgcatccgaaaatctaaaggataaaaaggaggcttctaatgaagcaaaaacatctccatctgatgaccacttgaaaagcacaaacggaatgcagcagatggatgatgttgattcgctatcttcattatggccaactaataaaccagaccctgcaaatacaaatgtggaacagttgcttgctcagatgcatgacttgtcctttatgctcaaagatgaactttcggcccctgataaactcatcgatcgttccaaatcctgaagtgacaacagcaaaaaaatgtgttctattactttcagacaaagaagatcgtggatggaaatccaacctcttgggtgctagacgaattgcacccaatattcctgagcggaaaatgcaaatcaagacacagaaagcctttttgttccaacagtgtgccttttatcagagcattggtcaacagatgattgtatttgttttatctgttgcttcgttgctttgatcatcagtcaggttggttccttgactgtccctgagtgaggctgagaatcatgtttttgcctccacatgtatgtaaggcctgcgtgatgttcggtgtcgaaccaagctcaccattcaatgaattccgtttaatgtt

SEQ ID NO: 122526 - DNA, 3099 bp, Zea Mays
atgggctcatggcacgatgcaaatgagcaaacctgtcaggcggtgaagagaaccgagggcgaagcgccaacgaacccaactgaccaacacagtcagggacctggatctgaattcccatcacactccccgtcgatggacatccccaccgctgtcatacaccgcctacagtcctcgctccgcgaggccatcttcgccccttctgtagaagatgcacccgcccctcccttcccctctgtctccgacgccgtcgcagccttcgactcgggcgccgcctctgtctcggcggagttccgatgtgtgggctgcgggtccgcgggagggctcctgcgcggtgcgcagtctgcactctgcgcctactgcgggtgtcccaggcgcggggaggaagctgaaggcggtggaagcggtggcatcgccttccgtaacagcgcggcctaccggtgcttgctcggctcgcttggactggacggatccgagtttgtagaattcgatactgacacaacagctttgaataaaagcaaggatgcaccaccgccaaacagtggtatgatcatatctgatctattggacttaaaaatcacttgccttcctgaaaataaggaaacatcttcaagttccataacaaaggagcaataatcttctgtggatacactaataaatttatctgctgctaacctagattcattttttgttgaaagaaaagagatgacttcttctcttccgcaaactcataatgcggagcaggaaaagaaaagaactgatagcaaaaaccatgaatctagactggaggtgcttgctgcatctaaaagcttaattagttctcaaagaacaaatcagattgaagctactccagcatttgcaagttgggatgctgattttcagtctgctagttcagaaagtgctgcaaaaaaactccaaacaaactgatctgtttaagagctcttgtgtccccgagtcttttagtttcccagcttcagatactgccatcaaacctgtagtaggtactgaaaataaaacaaatacgagaagtgtcatcctagaacatcattcagaagatttggcttcagcaaatggcacattatttggtgatgaccattctaatcaaaaggttgcccagcatatctttgagagcaacattgctcctgagtccactgaatcccctctcaacatgaatttgctaagagcgatcagttacatggaagggaatatactgcagtcaatgatgatgaagcttttgatgaatggcaagaatttacagcaagtggtaatcaggacagcctatcaaatgcaggagagaatatggaggaacctttaaggggagattcgtctgaaaaggatgtaatagatccttggccagtaggcaacaaggaatcacccaataatgttatcgaagactctaatcaatggcaagcttttgcttctatgtctggtcaagcaagagattttgtgatatctgtagagagatcaagtggtcacagactaaatttggtgagaccagatgtagttgaagagacaatgagcagcatctcgcatcaacattcttcagaaattaatcctgttgatctgtggcctgtgggcaatgttgaagcactaaacgctgcagaaatgtttaaggaaacaaacgattattttggcgattggcaagattttactaccactggtcaggtccaggacacttcgctgaatcaaactggggacatgatagaggtccgaaaagccactcacaaagaaacagacatggattcatggttcattggaaatattagggagccagcaaatactggtaccatgaatgaaaataacatgttggacaatcggcaaggtttcacttgttcagatcaagcacatcaaacttcatctagccccggtgccgaaatgataagtgttccattggagctgcatgatgtaagtgtttctgtccaatcatgggcaaatggcagcagcaaagatgccgcaacaccatcctcaacaaatatagaaagcaacacatttaatgttaggcaagattttgctaaatcaggtcatctgcaagaaaacatttctagtcttgggagagaattgagtagtgtgtcacctgaaccagttgaagaaaatgattccttagatttgtggcttaccagcaacttcaaggaatctaagtgcagcgatgttgttgggagaactaatgcctcgtcggatgggtggcaggattttgccagttttgatcatgctcagagcagtactaaaattcctgtggaagggcatcttataaaaatccttcagggtctgaaactatggacttatgggcctcaagtcatgctaatgaaaagaaccttgaacagataagagaaaataatgatctattcgatgactggcaagatttccaaaactctagtccacagcaaacaaccttacaaatttcttcagatgctgcactatttgatataacctcagcagcatggcctgatgcttttggagggctggaatttgggggtgctttgcagttagctgcatccgaaaatctaaaggataaaaaggaggcttctaatgaagcaaaaacatctccatctgatgaccacttgaaaagcacaaacggaatgcagcagatggatgatgttgattcgctatcttcattatggccaactaataaaccagaccctgcaaatacaaatgtggaacagttgcttgctcagatgcatgacttgtcctttatgctcaaagatgaactttcggcccctgataaactcatcgatcgttccaaatcctgaagtgacaacagcaaaaaaatgtgttctattactttcagacaaagaagatcgtggatggaaatccaacctcttgggtgctagacgaattgcacccaatattcctgagcggaaaatgcaaatcaagacacagaaagcctttttgttccaacagtgtgccttttatcagagcattggtcaacagatgattgtatttgttttatctgttgcttcgttgctttgatcatcagtcaggttggttccttgactgtccctgagtgaggctgagaatcatgtttttgcctccacatgtatgtaaggcctgcgtgatgttcggtgtcgaaccaagctcaccattcaatgaattccgtttaatgtt

SEQ ID NO: 122527 - DNA, 438 bp, Zea Mays
atggagcatatttttgttgatgaagctgatcgtccgactaatgatattattatttttgattgtggagaacttcgagaaggtgctaatgatggagttgtaaactttttcaaggatggcgacatgtatcctgattggccgattcatctcgatgaaaagcttgtagaaaattcttggtggatggatgttatggggtctacaaaggcttttgtaatgaaagcttcaagggatggcgaggggctatacctcgccagcgattcgaacaagcgactattgatctacttccccttcatgcaagtggtcaagctgcattccgtgctattcaaaggccccaaggatgatgctgaaatgcatatttatgtaataaatatcagcaatggcaatgactatctaccaatggtcaccctggagctatcttccgatcatttgatagaggtatga

SEQ ID NO: 122528 - DNA, 537 bp, Zea Mays
atggcacttggggatctaggttctgcaatcatgtggcagtttaagttcgggaactggagtagcaagaggaaaaatgatgtaggctttttaaagaaaggctatcagtattgtggtcgattcagcaatagttccagtagtggattcagcaacagttcgagacggactgatagcgagtaccagacaacttgccttggaaaagcctcatttggtagcaactatagttcaggcgaacgttatgggagcttcagtggtacaaaggaagctgactcatacggtgatagttacagggacaaagaacctattaaaacttccacaagcaacagcggcagtcagaaatctggcagcaagctgaggaaggatgtgaagcctgataggaggcttactcgtggatcaaatggcaaaacaactgctaagtcaaatgaggtggatctgtttggcccaaacttgatggacgattttattgatgcatctgcagcaactccagcaacagacaatgctgcagaaccacaggttgatctgtttgggtccacatgttaa

SEQ ID NO: 122529 - DNA, 264 bp, Zea Mays
atggttggtcatggttcttacctgatttgtgacactccaggacagcaggtacagcttcgaacagacgtcaggtttgattcacctaaggatatacgtagcttcatacctcaggaattgagggcttctttatgtggcctcttggcattgttaagcaaccgagcacaacaaggacatggcaggatgtggtctgtatttgctaaagcaatatgtaccaagaattatgcccccttctttagaacggacataattataccagggtcctaa

SEQ ID NO: 122530 - DNA, 382 bp, Zea Mays
aagatttgtgttcggcgaggatgttagagcggactcactctgaatggtgaattgctggggctcaatgatggatttgagacgtcagtgtgcttgtgtgaagaaatgggaaggccttcccttttatatctcaagggaagcgccttacattggcatccaccttagaggaagagagagagagagagatttccaatcgatgtggtgggcccctcgtaaggtcgagcgcggcaatgctcccggtatggcgtcgtccgtcacgcccatccctgtaggagtgtggttgctcgggcaagctcttcctgctgactgggggaggtcgctagcctaatcctcgaactcgtcgaagtcctggaactcttggagattcgcctcgacactttcttct

SEQ ID NO: 122531 - DNA, 1535 bp, Zea Mays
attaaccgcctctccctcgctcctctcgctcgctcggctcactccctctccaaagcggcagcctcacgcagtcacgcgctccaccacgccacctccctctactcactcatgttgttttccgtccatccgcccaccggttcgtagcccgcgccgcaaaaccctagccccgggaggatcgcggggcgcctccgcggtgccagcgacgtggctcgtttgatccgattgctggtcgagccccgccctcgctgccgcgcttcgctccggctgtgcagcggcgtgagcaccgagcacactcgcgaatggggaactgctagggtgcttggatcaaggatgggagccctcaccctggggcctcaggttcgtccatcctatcctagccgttgcttggtaccgttggttcatggggtgatgcgatgagggttttcggcgatccgtgcttgctagttgcgctctacggtcaggcggagggggtttgagatgtgaaaattccggctcgttgctacttgctcgcgacacatgtatcttttgcgaaatgatgtgtactcgtctgtgtgatgcgttttccccggggtggggatttgacaacagaggggaactttgatcgaatcaggtatgcaatggcaggctgctgattgggctattccagtgggtcttgttctgttacatgattccaaccttttagctgtcttgccaacttcaaaatgtccaaggagctagaagtgagccatcgcaatcgctttagagtggttttgctaaagcgcgcttggaacctgaggcgttgtactttgtaggtggttctgcagtctgcactgtgcaaaaagagcttatcctttatatcacacaaacaaagggaaaatatttcaggagttgattaattgtttcatgttgttattatatttttattcatttgcttaatgtaccgtgtagatacgaaattaggaaaagtactaaaattctaccttgatttattttgatagtgtcatgacaaggctagtaatgtcaaccaattcacatcagatagtcggtttctatgacctattaattaaatgttttgagtagttagtcatagttatattaataccaacttatattattttttcctcataaaaggcatgtatgtttactgtgttatcatatgcccacatcggttgctcttcactggaatgttttaggatcctctaggaaaattgatttctggagctgattcttcgacatcaacaatccagcagtgctagatttttttttgccaaagatggcttcatggcaagcagatatctcagaagacagcacttcatttctcttaagttctaaggtgtggcgttcgttggggaagagcgaagacttgttgaaggctgaggctgccagtccttcatcgtcggagtcgaatgaagagcagtctgagtcccattctttgccaagatgagcctcgccttttgccttcctatagattttcttcttcttcttcccatgtctttcttccccctggtcattttcattatcgggacattgagcaataaaatgacatgtattaccgc

SEQ ID NO: 122532 - DNA, 460 bp, Zea Mays
accacgcataaaaagctacggcatgcgtttttattgcatacctgtagaaggaagtggagagtgcactagagtaatttcttatacctgataacagcacaaaacaagctgatacggattcatggcatgtggtttttatttttgggaacaactacatctgtttttcaaacaagaacaatggcaagcatgcatgacatttcagacttgttattctttttatttccttaaggtttttattttgggaagaaatacatatgtttttcaaacatgaacagtggcaagcatgacatttcagacttgttattcttcattttttttatgtcctgaatagctcaatctgttttcctcttaaataagcacagctttgacatccatgatccaccccaaaagaaaacaagggacaaaagaaaattatttggacatagaagacctctcttttgtagatttttctcagtacattttt

SEQ ID NO: 122533 - DNA, 930 bp, Zea Mays
tgccctttccccttggcgatggcggcggctggggaacgggttcacccccgcgcgcccgcgaggctgcgtggcggtacagcgagtggtggtcggcacgtctgtgcccccgtggctgcggcagcgtgacggcggcgcccgcgtgcctgcagcggccagcgtaccggcgctcgcgcgcccacgcctgcgtccgtgtggctggcagtggcggcggcgcctgcttgccccgtccatgtgctcggccgttgcggcggcgcacgcacgagtgcccagtcgcagctgcgcacgcctgctgctcgaccgcgacgacgtggaccggctacgccggcttgtctgcgaggagacgacgttggcctgcaggtcggagaagcttctacatgcacttctgttcgtgcctccgttcccaggaccgggctgactagctaaacccagcaccagcctgcagtggtggcgtgctcctcgcctgtgcctgagcactcatctgtggagcgcggtggttgtgcttgtgcatgcctgtgcacttgccttcaaggcagcggtccagtggaggttgcgacggtggcggtgctgttgtggcgcggcgtttcaggttcacaacggaggttggcaaggcgccaaggcctcacgctggaggtacgacgagcggtggtcaaggctagcacgaagctaattctaacctttatcatggcagctaaatctattcctgggtaacaactaatcgtagcaagcagttagattcttacctttcttctttgttacctttgtgaactcctaggccaacggagcattcgtgctgataacgtgttaagaatcctttgctactagtgtagtccaaaggcttcttaactagaaatagaatcataaacacaggagacacaaagatataggaggaactgttattctcattcatgtattcagctcaatggttacaac

SEQ ID NO: 122534 - DNA, 821 bp, Zea Mays
gtgataaaacggtagctaaatctcagtactttgatttaattccatactcaatttcttgttcgttgtcgttgtgctatcattagtaggcatggtggttggtgatttcggagatgtgatgctcatgtggtgaagagcgaatgatttctgtggccaattccttctgtacccgttggtcgttcgaatctgaacatattgatgtgctgcatactcttctggagcaccatttgattttgatcctctccgatggcgttattacacagaacgctatgctgcatgcctcaaccatctggtcaaggaaacccccacctccgcaagggcgcaccattgtctgcctccgcaagggcgcaatgttcggtaccccaggtgcccatagttccttacttttctgaaattggatccttgatctttgcagtttcttctctttaaccactttattattttttagatttatttatttgtgttacgttacgtgctaatttctctgactgccactgtgccacagatgctagggtccaacacaatcctctttttgttcggtgcaactatgcttaccaatagttttcatacagatacaggagtaatcactaaccactgataggctggctatgctttacaacttcatcagtctatgggcaatctttttttctttttctcattttgggttccttcttgtttattaacaatcattggggtcaagaatgctgccacaacatgtgacttattagagtatctcaaacaaggtgacctaaaaaaatgccctataaattaaaaatactgatgttttaaataatttaggtcaccataaaaaggttgaacttcag

SEQ ID NO: 122535 - DNA, 1256 bp, Zea Mays
agaatttcaaattggcaacggcgcgccggcggaaaagcatttcatttccctccgtcttctcccgccccctctctccaccatgtcagcgatccgcgtgagaagcgcatctcgaccgtccgtgcgaagaagcaccaacgttccacaccgtttgaagccagcgatccgcggcacctgcctctccaccaatcacgctcacctctcccgtcctataataagcgcatcgccccaagccaccatccccaactacggtaactcgtctgctcgcatttcctcccaatccatcccgcctccaaacccgaactccaagtcgccccgcatcgatggcgcccaaggccgagaagaagcccgcggcgaagaagccggcggaggaggagcccgctgccgagaaggcgccggccgggaagaagcccaaggcggagaagcgtgtcccagcaggcaagtccgccggcaaggagggcggcgagggaaagaggggccggaagaagggcaagaagagcgtggagacctacaagatctacatcttcaaggtgctgaagcaggtgcacccggacatcggcatctcctctaaggccatgtccatcatgaactccttcatcaacgacatcttcgagaagctcgccgccgaggccgccaagctcgcgcggtacaacaagaagcccaccatcacctcccgtgagatccagacctccgtgcgcctcgtcctccccggggagctcgccaagcacgccgtctccgagggcaccaaggccgtcaccaagttcacctcgtcctaggctgcgtggcctccgcttgcaggcttccctcgtatgttcgcgtgtcttgctgtagttaggtgctgctgtgtctggtctcctccggtagcaactgttatctgatggaacagtaacaatgcttattgaatccagctagttgcttatttgtggatcctctctctttgttgttggccacctttatctcgtgatgtttgtgtgcatgtgaatactctgaatgtgcatttcgaagtttgagaagttacgacgcgttactgccattcctgtgaatgtttcggttgtgcacttgtagaatttggggtaatttctaattcgcgatcgaacatgttttgagaagttatatagtaatttgcaggctgtaaattgctctaatgtaggccgggttgtttgtcgtggcttcaaatttccttcctgttaacccggtcatgctatatgtttccaaatgaaatttccacttcatgctagtcgcttagcactgggtggcgc

SEQ ID NO: 122536 - DNA, 1976 bp, Zea Mays
aaccccaccagaccttcaaccgctacatttccgtcactaccggagccgccactcccacgaacgcgcggcggagcggaagcgaaccagagcacaggtaaaaagaaaaggatgaggcttgggagtataaacggcttgcggttcacgcagcttaaacttgtcatccttgcgttcttcatgttgtttgttctctggaaatgggagaagggctcgtcatactacgattccgaaatcctccagccagatccgttggttctgactcatccagctaacttgaagtttgtagaccagcatacatccccagaagaagacttttcaagtgcagatcgatcacaccggtcagtaggtaaagtagaaaagccggttactagtgcgctgccaccattgtctacgataggctattctgttgatgttgcagatgggaatgaagtgccacctcctgagaagaaagaatgcgagtacaggaatggaaagtgggtttctgacaatcgtagaccactatactcagggtttggttgtaagcagtggctttcagagagttggtcctgcagactaacccagcgaaaagatttcgcgtatgaaaaattcagatggcagcctgaagcttgtgagatgccagagtttgaggcctcccagttcttgagaagaatgcaggataaaaccatcgcttacgtgggcgattctctagggaggcagatgtttcagtcgatgatgtgtatggtcactggtggaaaggagaggctggatgtagaagatgttggcgcagagtatggctttgtgttagcgccgggtgcaaaaaggccagacggctgggcctaccggttcccgagcaccaacacaacaattctataccactggtcatcaacgctctgtgatttggagcccctgaacccatcagaccgagcgaccagttacgccatgcacctggaccgcccgcctgcttttctgaagagcaacctccacaggctccacgttctggtcctcaacaccggccaccactggaaccgagggaagctgagggcgaacaggtgggagatgtatctcggcggagcgccgaacagcgacaggaacaccgccgtcatctggaaggccaagaacttcaccgtccacagcgtcgtcagatgggtggacacgcagcttccccgccaccccaagctgaaggcgttctacaggtcgatatcgccccggcacttcttcaacggtgactgggacaccggaggcagctgcgacaacaccagccctctggccaagggagggagcggcgtccacctcgaccgttcggaggacgccgacgccgagggcgccgtgaggggcaccggggtcaggctcctggacgtcactgccctatcgcggctgagggacgaagggcatatttcacggtacagcatcaaggccacttctggcgttcaggattgcctgcactggtgccttcccggcgtgcctgacacctggaacgagatccttgcggcccagctatagcctgtagctgaatttgaagatgccaagggttatgtcgaattgtttatgggtgaagctcgtatatacagtaactaccacggagtactacgtcgttgccggagacccaatgctgctggtagtgaaacactgagctgcagtacattctttcgggaccgtgcttaactgtagaaaatacagggccttttttttgtgtaagtacatgttgtgtttgcctactgttacctgtgtacgccagttgttaattggagaactggattgatagatagtttggaagtgttgcctgagaggtagggcaacgcatcttgcagcatccagtcctttgagaactcatctgttatgtaccaaacacgaacagagagcatcatgcattgctgatccatgtgatgtggttgttggtacgttgattgttgctaggttcgtcctctcaccccttgtatcaccattgtttatggtacatgtggaatcatctggtaagttctgaatgtcataattaattactg

SEQ ID NO: 122537 - DNA, 1545 bp, Zea Mays
atggatggcttccaagcgctcgtcgattctaacgcgaaggatacttctatgtcacagagcacaggtaaaaagaaaaggatgaggcttgggagtataaacggcttgcggttcacgcagcttaaacttgtcatccttgcgttcttcatgttgtttgttctctggaaatgggagaagggctcgtcatactacgattccgaaatcctccagccagatccgttggttctgactcatccagctaacttgaagtttgtagaccagcatacatccccagaagaagacttttcaagtgcagatcgatcacaccggtcagtaggtaaagtagaaaagccggttactagtgcgctgccaccattgtctacgataggctattctgttgatgttgcagatgggaatgaagtgccacctcctgagaagaaagaatgcgagtacaggaatggaaagtgggtttctgacaatcgtagaccactatactcagggtttggttgtaagcagtggctttcagagagttggtcctgcagactaacccagcgaaaagatttcgcgtatgaaaaattcagatggcagcctgaagcttgtgagatgccagagtttgaggcctcccagttcttgagaagaatgcaggataaaaccatcgcttacgtgggcgattctctagggaggcagatgtttcagtcgatgatgtgtatggtcactggtggaaaggagaggctggatgtagaagatgttggcgcagagtatggctttgtgttagcgccgggtgcaaaaaggccagacggctgggcctaccggttcccgagcaccaacacaacaattctataccactggtcatcaacgctctgtgatttggagcccctgaacccatcagaccgagcgaccagttacgccatgcacctggaccgcccgcctgcttttctgaagagcaacctccacaggctccacgttctggtcctcaacaccggccaccactggaaccgagggaagctgagggcgaacaggtgggagatgtatctcggcggagcgccgaacagcgacaggaacaccgccgtcatctggaaggccaagaacttcaccgtccacagcgtcgtcagatgggtggacacgcagcttccccgccaccccaagctgaaggcgttctacaggtcgatatcgccccggcacttcttcaacggtgactgggacaccggaggcagctgcgacaacaccagccctctggccaagggagggagcggcgtccacctcgaccgttcggaggacgccgacgccgagggcgccgtgaggggcaccggggtcaggctcctggacgtcactgccctatcgcggctgagggacgaagggcatatttcacggtacagcatcaaggccacttctggcgttcaggattgcctgcactggtgccttcccggcgtgcctgacacctggaacgagatccttgcggcccagctatagcctgtagctgaatttgaagatgccaagggttatgtcgaattgtttatgggtgaagctcgtatatacagtaactaccacggagtactacgtcgttgccgg

SEQ ID NO: 122538 - DNA, 1665 bp, Zea Mays
aaccccaccagaccttcaaccgctacatttccgtcactaccggagccgccactcccacgaacgcgcggcggagcggaagcgaaccagagcacaggtaaaaagaaaaggatgaggcttgggagtataaacggcttgcggttcacgcagcttaaacttgtcatccttgcgttcttcatgttgtttgttctctggaaatgggagaagggctcgtcatactacgattccgaaatcctccagccagatccgttggttctgactcatccaggtcatctttaaagcacacagagacgttacctctctttaagcttcttcttgctacattgacctctgttttcatcttccttcgaacttgcagctaacttgaagtttgtagaccagcatacatccccagaagaagacttttcaagtgcagatcgatcacaccggtcagtaggtaaagtagaaaagccggttactagtgcgctgccaccattgtctacgataggctattctgttgatgttgcagatgggaatgaagtgccacctcctgagaagaaagaatgcgagtacaggaatggaaagtgggtttctgacaatcgtagaccactatactcagggtttggttgtaagcagtggctttcagagagttggtcctgcagactaacccagcgaaaagatttcgcgtatgaaaaattcagatggcagcctgaagcttgtgagatgccagagtttgaggcctcccagttcttgagaagaatgcaggataaaaccatcgcttacgtgggcgattctctagggaggcagatgtttcagtcgatgatgtgtatggtcactggtggaaaggagaggctggatgtagaagatgttggcgcagagtatggctttgtgttagcgccgggtgcaaaaaggccagacggctgggcctaccggttcccgagcaccaacacaacaattctataccactggtcatcaacgctctgtgatttggagcccctgaacccatcagaccgagcgaccagttacgccatgcacctggaccgcccgcctgcttttctgaagagcaacctccacaggctccacgttctggtcctcaacaccggccaccactggaaccgagggaagctgagggcgaacaggtgggagatgtatctcggcggagcgccgaacagcgacaggaacaccgccgtcatctggaaggccaagaacttcaccgtccacagcgtcgtcagatgggtggacacgcagcttccccgccaccccaagctgaaggcgttctacaggtcgatatcgccccggcacttcttcaacggtgactgggacaccggaggcagctgcgacaacaccagccctctggccaagggagggagcggcgtccacctcgaccgttcggaggacgccgacgccgagggcgccgtgaggggcaccggggtcaggctcctggacgtcactgccctatcgcggctgagggacgaagggcatatttcacggtacagcatcaaggccacttctggcgttcaggattgcctgcactggtgccttcccggcgtgcctgacacctggaacgagatccttgcggcccagctatagcctgtagctgaatttgaagatgccaagggttatgtcgaattgtttatgggtgaagctcgtatatacagtaactaccacggagtactacgtcgttgccgg

SEQ ID NO: 122539 - DNA, 1568 bp, Zea Mays
aaccccaccagaccttcaaccgctacatttccgtcactaccggagccgccactcccacgaacgcgcggcggagcggaagcgaaccagagcacaggtaaaaagaaaaggatgaggcttgggagtataaacggcttgcggttcacgcagcttaaacttgtcatccttgcgttcttcatgttgtttgttctctggaaatgggagaagggctcgtcatactacgattccgaaatcctccagccagatccgttggttctgactcatccagctaacttgaagtttgtagaccagcatacatccccagaagaagacttttcaagtgcagatcgatcacaccggtcagtaggtaaagtagaaaagccggttactagtgcgctgccaccattgtctacgataggctattctgttgatgttgcagatgggaatgaagtgccacctcctgagaagaaagaatgcgagtacaggaatggaaagtgggtttctgacaatcgtagaccactatactcagggtttggttgtaagcagtggctttcagagagttggtcctgcagactaacccagcgaaaagatttcgcgtatgaaaaattcagatggcagcctgaagcttgtgagatgccagagtttgaggcctcccagttcttgagaaggataaaaccatcgcttacgtgggcgattctctagggaggcagatgtttcagtcgatgatgtgtatggtcactggtggaaaggagaggctggatgtagaagatgttggcgcagagtatggctttgtgttagcgccgggtgcaaaaaggccagacggctgggcctaccggttcccgagcaccaacacaacaattctataccactggtcatcaacgctctgtgatttggagcccctgaacccatcagaccgagcgaccagttacgccatgcacctggaccgcccgcctgcttttctgaagagcaacctccacaggctccacgttctggtcctcaacaccggccaccactggaaccgagggaagctgagggcgaacaggtgggagatgtatctcggcggagcgccgaacagcgacaggaacaccgccgtcatctggaaggccaagaacttcaccgtccacagcgtcgtcagatgggtggacacgcagcttccccgccaccccaagctgaaggcgttctacaggtcgatatcgccccggcacttcttcaacggtgactgggacaccggaggcagctgcgacaacaccagccctctggccaagggagggagcggcgtccacctcgaccgttcggaggacgccgacgccgagggcgccgtgaggggcaccggggtcaggctcctggacgtcactgccctatcgcggctgagggacgaagggcatatttcacggtacagcatcaaggccacttctggcgttcaggattgcctgcactggtgccttcccggcgtgcctgacacctggaacgagatccttgcggcccagctatagcctgtagctgaatttgaagatgccaagggttatgtcgaattgtttatgggtgaagctcgtatatacagtaactaccacggagtactacgtcgttgccgg

SEQ ID NO: 122540 - DNA, 3055 bp, Zea Mays
atgccccgccccagttcacgcgccaaggcggcatcaccgccggaggcggtggccggtgcctcgcagcgcacccctgcgccgtccccgtccacctccctccgcctcggcattggccccgtagcctccgatgacaaccgcggcgccggatccctcgacctcaagcaacccgccgctgggcctcgccgacacagcctgcgcctcatgggcgccgccctcggcctcggcctaggcccggtctcccaccacgatgactgcggcgccggatgccccaacctcagtcctcccgccgccgtgcctccccgacgcagcctgcgcctcgcgggccccgccttgggtactccaaacactctctccgctcgtgacggcagttcctccgggttcgggtcgggcgggagcgagaagaggtcggggagggcccgtgctcgagtccctgcctcttcgcttgctacatccatctcgccgaggactgggaactccaatagcgatggcggagggtcgggggcggacagggtttccgcgagcggcgacagctctggcggttcggatcccttcacgaccctgcggtcagggtttcggatcgcgaagcgtcggatggaggcgggtggggaggcggagactgggtcgtctcgtcgaggacaggtgcataacgaaatgctgcaccaacacgtggacacgccgacgaagcggtgtaagaccatattggtcggtggagtggagacagagcatgtctctgacacaaagggtgattctgatgaggattgtatgatgctgggtccaagtgggaccgaactgaattatgttgctacgaagactgaaaagggggatgtggatgatcctgccaatgcaagcaatggagaatctctgcagacgcataatctgttaccggcagcaaatggtggggtggttgagcaattagtatatgcttcaggaagtcctgcaagttttgaagcacaagtctctgcagatatgtgtctcaaggaaggttcgagccaatgcagttctaggaaggaaggcaaagtgaaagagaagcttgttttggggaataacaaatcttgcgcttatgctaatgtgggctctgcagtcgatacctgttcccacaaattcaaccctgatagcaaaggaaaggaaaagatggttgcagaagatagtttatcatctctgacctcgagcgaggatgagccagatttcgatccagtggattccaaagagactcagctcaactcaggatcagtttctgcttctatggagtcatatcgcagacaaaccgtaaaagaaagggctatcaagctggcccctaaatttgcattcttcaaagcagataaagatgagcatagtgaagatgacgatgaagagttagagcctggtcctgacactgaagactggccaggcccatttgcaactgcggcaaggatatatgaagaaagagaagctaagttgagagctcgagagttgaattctttaaagctggacgaatctgcaaacagggtcatccgttggtcgccttcaaaggataggaaaaatctagtacaagctcaagttgctccatcacttacaagtgtatgcttaaatacccttgcggaacattctgaatggattcaatcgcttgaaggtgtcccagaggagctaaagcacaagctgttaaagattctgtgtgattccaggaagatgaatactcatcttctcaataaactattgtgtgacagtcctacagaactgcatctcagcgagtgttcatggctgagtgaggatgactttgagaaaacttttgggaaatgcagcactgaaagtttgcaggatctacagcttgatatatctgggagatgcatacctgactacatattgccaactaccttagctaaggttcctaactgcatgccattgttgagaaaaatatctctgaagggaaattatcgactttctgataatggtttagtcacaatcatctctgccgcgccttctttatgctccctaaatctgtgcgagtgttctcttctcacttcatctggaatcgatattcttgcaaacaagttatgttcagttcttagagaactctatatagatgactgcacaaatgtggacgctatgacgattcttccttctctacagaagattaagcatctagaggttttgtcaatgtctagaatacaatctgtttgtgacaaatttgtgaaggggctcattcctgtacatggtttaaatctgaaggagttagcatttgctggttgcttgaaacttacctcatcttccatcaagactattggggaatactgtcaaaaaataacttcattggacctttgcaacttgaatcggctgcgtgactcagcaatgatgcatcttcgtggttgtaggctaataaggaaactaaagcttcaaagaaatgcattcagtgatgaagctgtgtctcaatatttggaagcatctggaggatgcctgactgagctaatgctaaacaatgttgaggttggagaccttactgcgcttgcaatttctcgcaagtgttatgtttcattggaggctctggatctttccttctgccgtgaactgacagacgaagctttggggctgattgtcgacagctgtccatcattgaggattcttaagctatttggttgtacccaggtcacggatttgttcctcaagggtcactcgaacacatcggtcaaaatcgtcggaataggagggagcatactagtgcaaatggatagccgttagtttgattggagaacgacactacattctcctgttcattcagttatctagcttaggattcgaggcactaaaggtcctcaatgtggctgcagcactaagatgccatattcccgggacaacggaatcgaagggaaaagaaaatggaacatggctgcagcactaagcagaacatcaaacgcggaatattttgtgaacctaccttgcttataccagttagcagtgtagagatctttcttgaaatgcttttgtttttcttggttaacgttttttcttgaaaggtttctcggttaacttgaagcagcgtaaagtctgatgctgcataatgcaaactattgataaaaaaata

SEQ ID NO: 122541 - DNA, 189 bp, Zea Mays
ctaaatcccaatttcctaaattgtactttgggttaacttcaaattctaaactcaattagtatattactattattattatttgatttcaaatgcacaaccaatcaaaactccaatatgatgcatatttatgaaggtgccttatttaatttccttaaatattattatccccatgaaatgaggattggatgg

SEQ ID NO: 122542 - DNA, 1110 bp, Zea Mays
aaaaaaaacccataaagcgagctcgcagagcggatcgaacgggagaacggagaagagaacaagagatagtacttgacactcctgtcctgctcctcccactcccacgctcccaaccgagctcgagcgcacgcacacgcgcacaagcaggagctcctgtcccgctagatcccaaacagtctcctgcccgcgcgcgtttggggtggcgcgaaggaatcaccggatggcgatgttcgcgcggccgctgctggccaccctgctgctgctgccggcgttcctgctctctgccgcctcggccgccgacagcaagagcaaccctgctgatgagctcgtggcactgatcaacagcaaccgcactgctggcaaggcatcttctgtttcggacaaccaaggtttgggatgcatcgctctgcagtacatcaaagcatacgaaggccattgtgaccaggtggacgacaagaagccgatggagtcaagcttcaccgacacgttcgccccgacctgtggcgtccaggccacaaccctctccaagatcaccggaaggctggtggcttgccagtcccagtacttggctccagctgaggcctttggcgtcttgttggtgaacgacgcgaagggcctccagatactgcgcagcaagaaccacacggaggtcggggcggctgtgagcggcaccgatggcggtggaccgtacttctggtgcgtcctgttcagtgacggcaagccgactaccagcttcaaggtggatggcgaagtgccgaaggcagccatccacccgggatgcttcagtggcaacaatgacgactgctcgggccccacaaatggcgccgttttgaccagtgctggtgcgctgaggctggtgacggccattctttttgctgtagctgctttgtgagcgtgtaagtaggtgtaatgttttctgccattattttgctttgtcaccatctcctgtctgtctgcagtggcacgctatatattctttgagcatatgaactatgtatgcaaggatttgtaggtcgttgttcagcattttgagactatctgttacctgttcggaatgttcatcatagtagttttgtgcgctcttttcggaagtatttgagcaaattaaag

SEQ ID NO: 122543 - DNA, 1667 bp, Zea Mays
cgctgctcacactcactgtccagtgtccttgttgtccaccactccctcgagtccgtgacgcgtcagcgtcaccgtccgtcgtcgcagacgagcccagtggcgactggcgattcgctttcgaaccgcagtcgtccctgctgtgttcccggttccctcccttcctcctcctatagttggcttctcgccaccctctgccttcgaccaactttctcccttctcccctccccgttcccctctccaactccaatccatggcctccacggatcgctccgcgccggcggaggaccagcaacagccgcagcgcccgtccctcttctcgccgtaccagatgccccacttccgcctcgcgcaccgggtggtgctggcgccgatgaccaggtgccgggcgcccgatgcgctcccgggccccgcgctcgcggagtactacgcgcagcggtccacggaaggcggcttgctcatctccgagggcaccatcatctcgcccgccggccctgggttccctcgtgtccctgggatatacaatcaagagcagactgatgcatggaaaaaggtggttgatgctgttcatgccaagggagccatctttttctgccaactatggcatgtaggtcgagcttctcaccaagtatatcagccgggtggttctgctccaatatcctctactgataaaccaatatcatcaagatggaggatactgatgcccgatggatcctatggcaagtatccaactccgaggcgcctagccacatccgagataccagaaattgtcgagcaataccgacaggctgccataaacgccatcaaagcaggtttcgatggcatcgagatccacggtgcccatggctacctaatcgaccagttcctcaaggacggtatcaacgacagggctgacgagtacggtggctcactctccaaccgctgccggttcctcctggaggtgacgcgcgccgtggtctccgcgataggggcagaccgggtggcggtccgggtgtccccggccatcgaccacctcgacgcgtacgactccaacccgctgcagctcggcctggccgtagtggaccgcctcaacgctctccaggaggagaccgggcggctggcctacctgcacgtgacgcagccacggtacacggcgtacgggcagacggagtccggccagcacgggagcgccgaggaggagagccggctgatgcgcgccctgcggggcgcctaccgcggcacgttcatgtgcagcggtgggtacacgcgcgagctcggcgtggaggccgtcgagtcgtgggacgccgacctggtgtcctacgggcggctgttcatcgctaacccggacctggtggagcggttccggcgcgacgccccgctgaacagatacgtgcgcaagacgttctacaccccggatcccgtcgttggttacacggactacccgttcctcggccagcctaaggcgcgcatgtgattattagttaggttggtaactataagaggcggactattgttcgtgtattgtggcttgagaaaataagcaaacacatggtggtagtgctgtgcaataagccttaggtgcaaacatgagcctcctgggcctttagataatgatctaattatagatgtaattatagttttgtcaagaagttaatgtttatttgcacagcaatcagcagtcatctctcata

SEQ ID NO: 122544 - DNA, 1319 bp, Zea Mays
cgaatcccggtcttctaccctccggatcgaatctcggtgagacggcgcaacactggcgagtggcgaccgaggaggcgaagaggaggctgagcgaagtgacggcacaacacagcctcgacggtgaccctccccgtcgccttctcactagttccctcgtgtccctgggatatacaatcaagagcagactgatgcatggaaaaaggtggttgatgctgttcatgccaagggagccatctttttctgccaactatggcatgtaggtcgagcttctcaccaagtatatcagccgggtggttctgctccaatatcctctactgataaaccaatatcatcaagatggaggatactgatgcccgatggatcctatggcaagtatccaactccgaggcgcctagccacatccgagataccagaaattgtcgagcaataccgacaggctgccataaacgccatcaaagcaggtttcgatggcatcgagatccacggtgcccatggctacctaatcgaccagttcctcaaggacggtatcaacgacagggctgacgagtacggtggctcactctccaaccgctgccggttcctcctggaggtgacgcgcgccgtggtctccgcgataggggcagaccgggtggcggtccgggtgtccccggccatcgaccacctcgacgcgtacgactccaacccgctgcagctcggcctggccgtagtggaccgcctcaacgctctccaggaggagaccgggcggctggcctacctgcacgtgacgcagccacggtacacggcgtacgggcagacggagtccggccagcacgggagcgccgaggaggagagccggctgatgcgcgccctgcggggcgcctaccgcggcacgttcatgtgcagcggtgggtacacgcgcgagctcggcgtggaggccgtcgagtcgtgggacgccgacctggtgtcctacgggcggctgttcatcgctaacccggacctggtggagcggttccggcgcgacgccccgctgaacagatacgtgcgcaagacgttctacaccccggatcccgtcgttggttacacggactacccgttcctcggccagcctaaggcgcgcatgtgattattagttaggttggtaactataagaggcggactattgttcgtgtattgtggcttgagaaaataagcaaacacatggtggtagtgctgtgcaataagccttaggtgcaaacatgagcctcctgggcctttagataatgatctaattatagatgtaattatagttttgtcaagaagttaatgtttatttgcacagcaatcagcagtcatctctcata

SEQ ID NO: 122545 - DNA, 876 bp, Zea Mays
caggactacaacgtgaccgtcgtgtactacctgacgcactacctggtggacctcgtgacggagccgcacaccggccggcgcgtcctcaagctggacgccatcgaccaggcccgcgactggctcgccgccgacgtgctcgtcttcgactcctggcactggtggccgcgcaccggcgccacgcagccctgggactacatccaggtgggcgacacggtggtgaaggacatggaccgcacgcaggccttcgccaaggcgctgcacacctgggccaggtgggtcgacgccaaccttgtccagaccgacaccaaggtcttcttccaggggatctcgccttcccactacaggggccaggactggggcgcgtcgccgaagaagacgtgcatgggggagacgcggccgctcaacgccacggggccctacccgggcggcccgatcccgcagcaggcgatcctgcgcggcgtgctggcggccatggccaagcccgtctacctgctcgacttcacctacctctcgcagctgcgcaaggacgcgcaccccaccaagtacgacggcggcatcttcggcggcgactgcacgcactggtgcgtcgccggcctccccgacacctggaacgtcctcttctacgccgcgctcaccgccgggcaggggcacaactgatggatgagtactacgttttttctttctttcctttttctttttaccgacacgcagtgttacgtagctcaataagtaaaggaaaagaaaaagatagcagattgatttcgtatagttacgagggggccttcaaaagatttttcaacctaaatgagttgatagaagaatatcaaaagagaatattgtaattcattcccgaattcagttggcatttttcctggg

SEQ ID NO: 122546 - DNA, 406 bp, Zea Mays
acgcccaaaacagagaggaagatcgagagagtcggagagaagggatccgccgtggccgatgagtgccccatcgttgcggagttttgagagagcatcgaggacttcgtcatgacaccccgttcatgcgccaggtctacacaagttcgaacatcaataggtgtgcgcgtaattgctcaccggcgacagagtgatgccgcgggtccgcttcgcaccatggagcttcgcctgtgatgccattccgggcatatggaatggctggggagcttcggggagcctcctcgttgctgatcggggacgctccagggaagattggtggccggagcaccttgaattgttcaccgccactggtgctccaccatggatcatcccactcgcgtgggcagcctcatcggcacctccatctccg

SEQ ID NO: 122547 - DNA, 204 bp, Zea Mays
ggcccgtaattgcttaaacgtgccgggctcatttcgggcggcccgaaattataaaagcccgaaattcaaattagggtccgaaatttattttttggcccgaaattcacatgagggcccgaaattcaaaacaaatttaataaaacaaataaaggataagacaaataaatttgacaaaaagcaaacttaatatttctattaagttac

SEQ ID NO: 122548 - DNA, 195 bp, Zea Mays
atggcctacccctcctgcctctctgccccgatggagccctggttccggagcaaaaatcaagacgagacgcggcaaaccctggcgagatctaggcggaccgagggagaggggaacgtaggaggggacgacgcggcggaagagggcagggcagcagggactggcgtgcgggaggcgagggaaggcgacaacgggtaa

SEQ ID NO: 122549 - DNA, 861 bp, Zea Mays
atggcgaatagaaaatcgacgaccgacccagatgcgattgatgagttgagcgacttcaacgatttaacggcggccgcgacagcgagcagggtcccaaactcaacgccgacgtcgaggagtgctaacactacggtcgggcgagctgggaacactggcaagcagaggagcgcgcgcatcaaggctaaacacaggagaacacacgaaagggagctcgacatgggcagtggctcacgtccacgacgagcaggctgggcgcgccgatggcgtagctgcagggagaaacacccggcgagccaacaggaaactcaggcaaaatcgcggccggcgaacgccgtgaagatggctaggccgagcgcagtgtcgggggcgagcaggacgccgagcagagggtcacggcgaacagagaagcctgcacgcagccatggaggacggaacttggcgggacgcggccatgaacggagcttggtgtggagccgagaccaggggcacacgatggcaaactggaacaggcgagcagaggggcgctggcaaatgacagggctgcgacagcagagaaacaggcgaccaaggacgcggcccgagctccatgtcgacacaccatggaggcacggtccgagcaggaagctccgcggcgagcagaggacaccggcgtccatggcattgacagggcgagctgaagggagggagacggccgtgggagagacgcaaaggaaactcggcaccaggaaaatgggcgtcgcgagctcacggctggggagggacggtgtgctcaactgctggaaggggaagggctgggtgggcgcgcgtgccatgcgcaggagactgagcgctgttgtgggctcgagcgtggggaggagataa

SEQ ID NO: 122550 - DNA, 861 bp, Zea Mays
atggcgaatagaaaatcgacgaccgacccagatgcgattgatgagttgagcgacttcaacgatttaacggcggccgcgacagcgagcagggtcccaaactcaacgccgacgtcgaggagtgctaacactacggtcgggcgagctgggaacactggcaagcagaggagcgcgcgcatcaaggctaaacacaggagaacacacgaaagggagctcgacatgggcagtggctcacgtccacgacgagcaggctgggcgcgccgatggcgtagctgcagggagaaacacccggcgagccaacaggaaactcaggcaaaatcgcggccggcgaacgccgtgaagatggctaggccgagcgcagtgtcgggggcgagcaggacgccgagcagagggtcacggcgaacagagaagcctgcacgcagccatggaggacggaacttggcgggacgcggccatgaacggagcttggtgtggagccgagaccaggggcacacgatggcaaactggaacaggcgagcagaggggcgctggcaaatgacagggctgcgacagcagagaaacaggcgaccaaggacgcggcccgagcaccatgtcgacacaccatggaggcacggtccgagcaggaagctccgcggcgagcagaggacaccggcgtccatggcagggacagggcgagctgaagggagggagacggccgtgggagagacgcagaggaaactcggcaccaggaaaatgggcttcgcgagctcacggctggggagggacggtgtgctcaactgctggaaggggaagggctgggtgggcgcgcgtgccatgcgcaggagactgagcgctgttgtgggctcgagcgtggggaggagataa

SEQ ID NO: 122551 - DNA, 1940 bp, Zea Mays
gatatgatttcattagtgttgaagagaacctagaagaactgtccaagcttgaggaaggtaaattagtttgtagtttttatttcataattgtttctactatgttcttattgatttcagattttactaatttgtttactccttactattactgcaaagttttgtgacctcactgtttctaaggaggcaacaaccacccctaccaattcttgagcatgaaaatttgatgaatgatgaatggtgaatggagaatatgaggctatcaaagtttaagctcaaatatgtgatctgtaatctcaaactatcattaatgggaagttatgtaatgtatgacttgaagagttgaagtctggactctggaccatttaaatttgttgtaatgtttgttattgaatttgtgacttgctactagttattgtggacttatattcattgttgagtgttgtgctgctggttatcagtgcatgtgtgctgctggttagtggctatttgctgctgtttattcaattttgaatacagtcatagcacaggagcagccaaacaaagctaactaagatggatttcggatgtttagtttaaaccgaacaccgaaccgaatagctcggttttcttttgtgagacacggagatcagtctgctctatctgtaaaccgaacttctacgataccgaaaaaaccgaaccgaaaaaccgattgcataggctagtaatggtcccgcgccagacggcccagcagtggctgcacctcggtcccagctgtcagcgaacggcaacgaggcaaacacatgacgcctctcttctcttccgtgtagatctcgcttagaattcgtgtaccagaaaccccggccctaaccgcgcccgcaccctcgcccttggctcgccggagattaacgctacagccgtaatcacgtaaattccttttcatggagggtgtgggcgcgcggctagggcgcacttcggcgcgctacgggccggcgacgacgttcacgggccatgtcaggaagtggcgcaaggagtgggtaccagtggtcgccgccgccgccgccgccgccgccaacgccaacaccagcgccaacggtggcacgacgtcctccacggggatgggatctggcggaggatcccgcgggaataatcttctcctgtttaagtggaccccggtgaacggggctaacgggggaggaggggatggggagcagcagcagcaggctgagacggccacgagacgccggcggtatgtgccggtttctttaatggaagagcaaaggcaagaatctaccaaatctgatgatgagaacaaggctaatgatggagatccatcttcgaatgaaactgagccatcaaatggaaagactgatatcaatgatacacctatggatgaatctcaggcaacagatgaggatggtcgagattctggtaaaaacggcggtggaacagacctaaatttgaatttaggtttgaaagacccggatggtgataatgaagttgagacatcagagaaacatgtagcggcaaacaatccgcagacagagaatagatccaagaggaaatccgtaacccctgaccttgagatgacaatgtaacccagaaatttcatttgtcttaattttactatttgccatgagcccatgaggtgtgtaactggggtacgttctcatcgtagaaacatttaagtaaaatcgattacaggacatacaatagtgtgaactgaagaaacctttttttactcgaacatggagaattgtctaaagtcattgtcaaatataatttaattttccagagatgttgggaattggataacatgtcttcagaacttatttgcaaaatgttcttttattgcaagtgtatcttgattgagaaaccggaaaccgagggaacttcccgcttaggccttgttcggttaatcatgttactatgtattggatgaaatggaaaaaaaataataagaa

SEQ ID NO: 122552 - DNA, 1494 bp, Zea Mays
aacttcaaaggcataggagtaacagtcttcgcacaaatattccctcccccaaggcccgaagccccgaaactttccggatctttcttccgccgcttcatcttctttgcgcaaaactagttttgtttctcgttcttctcttcgatttcggccgaataaagatggcgtcggctgcgcgcctcctcgcgccgatctccaggcgcggcgtcgtctctgtggctctggcgggggtggagaggcggcggccggaggcggcgtcgctcctgggggcgcctgtgctggctacggtggaagcctgcgcttcgatcaaggtcattcctttgtcgaatcagctggctcgatactcgacaactgcatttcagaggtttgggttttcaacttcagccccccaacaagatgataaggagacaaacaagcacacagatgatggggttaatagaagtgttggagcaagtactggagcttcaagtgaagccaataatgtgcctggaaccgagaaggcacaggaagcaggttcacttgattctatatccaagtctaacaggaagaggacagctaaacgaactgcattttctgattcagattcagaagacctagacctatcaaaggaggaccttgtgaagctgcttcttgagaaagacgaatcattgaagtctaaagatgaagagtttaaagatatgaaggataaggtcctacgcagctatgctgagatggagaatgtccttgccagaacaaagcgtgagtcagagaacaccaagaagtatgccatacagagcttctccaagagcttgttagatgttgcagacaatttgtctcgggcatcatctgttgtcaaggcaagtttctcaaagatagattcatctaacgattctgatgaagctgtaacactactgaaaaccctactagagggtgttgagatgactgagaagcaacttggagaggtcttcaagaagtttggagttgaaaagtttgatcctttgaatgagaagtttgatccaaataggcactatgccattttccaaattcctgatccttcaaaaccatcaggaactgttgctgctgttgtgaaggttggctacatgttacatgatcgtgttcttcgccccgctgaagttggtgtcactgaaggtggtccaactgaagaagagccagaggagtaatctagatcaaacggaggttgctggctgcacgtatatctatgactactgccctttattggttggataagcatacatatcataggttatgtttttaactagatctgtgaggcaaatcactatttttgtagcatgttcaacgaggcaatttgttcaagctagtccagaactctcctttttcttgctcggtaataaaaacgagattgtagaacatgtacatcaccgaaattgcttgccaaagacggattattgcagcctgcattaataggaatactgacaatgagcgtgccacaatcaaaggtggtctgttttgaatgataatgtttgaatgaagatggga

SEQ ID NO: 122553 - DNA, 1420 bp, Zea Mays
aacttcaaaggcataggagtaacagtcttcgcacaaatattccctcccccaaggcccgaagccccgaaactttccggatctttcttccgccgcttcatcttctttgcgcaaaactagttttgtttctcgttcttctcttcgatttcggccgaataaagatggcgtcggctgcgcgcctcctcgcgccgatctccaggcgcggcgtcgtctctgtggctctggcgggggtggagaggcggcggccggaggcggcgtcgctcctgggggcgcctgtgctggctacggtggaagcctgcgcttcgatcaaggtcattcctttgtcgaatcagctggctcgatactcgacaactgcatttcagaggtttgggttttcaacttcagccccccaacaagatgataaggagacaaacaagcacacagatgatggggttaatagaagtgttggagcaagtactggagcttcaagtgaagccaataatgtgcctggaaccgagaaggcacaggaagcagattcagaagacctagacctatcaaaggaggaccttgtgaagctgcttcttgagaaagacgaatcattgaagtctaaagatgaagagtttaaagatatgaaggataaggtcctacgcagctatgctgagatggagaatgtccttgccagaacaaagcgtgagtcagagaacaccaagaagtatgccatacagagcttctccaagagcttgttagatgttgcagacaatttgtctcgggcatcatctgttgtcaaggcaagtttctcaaagatagattcatctaacgattctgatgaagctgtaacactactgaaaaccctactagagggtgttgagatgactgagaagcaacttggagaggtcttcaagaagtttggagttgaaaagtttgatcctttgaatgagaagtttgatccaaataggcactatgccattttccaaattcctgatccttcaaaaccatcaggaactgttgctgctgttgtgaaggttggctacatgttacatgatcgtgttcttcgccccgctgaagttggtgtcactgaaggtggtccaactgaagaagagccagaggagtaatctagatcaaacggaggttgctggctgcacgtatatctatgactactgccctttattggttggataagcatacatatcataggttatgtttttaactagatctgtgaggcaaatcactatttttgtagcatgttcaacgaggcaatttgttcaagctagtccagaactctcctttttcttgctcggtaataaaaacgagattgtagaacatgtacatcaccgaaattgcttgccaaagacggattattgcagcctgcattaataggaatactgacaatgagcgtgccacaatcaaaggtggtctgttttgaatgataatgtttgaatgaaga

SEQ ID NO: 122554 - DNA, 585 bp, Zea Mays
aacttcaaaggcataggagtaacagtcttcgcacaaatattccctcccccaaggcccgaagccccgaaactttccggatctttcttccgccgcttcatcttctttgcgcaaaactagttttgtttctcgttcttctcttcgatttcggccgaataaagatggcgtcggctgcgcgcctcctcgcgccgatctccaggcgcggcgtcgtctctgtggctctggcgggggtggagaggcggcggccggaggcggcgtcgctcctgggggcgcctgtgctggctacggtggaagcctgcgcttcgatcaaggtggtgttacagtccctgtgcgtggctcgtgagcagcggcagcgcatcgtgcttgtagattttttcttggatggtgctgcatgtatagagttgttaaggagcagtgcgtcttgaggattatttctgagtttggggattccctaaggtggaatttgtactctttcatagcgattagagcgtagagcaattcatttcgatcatgaaattttgatgtggctttcagggtcaatatattatttgaataaattggggaagctttgtcgggttctccttcaca

SEQ ID NO: 122555 - DNA, 1445 bp, Zea Mays
aagtttgatgtagccaaacgccgccccttccctcctcgcaggtcggtgctgagaaaaggaagtgaagtccatcgtgttcgtacgcttcgtcttcgattttgtcaaaggtcccgatccaagccatcgaaggtgattggagtctccttgccatgttgcgtttgatttctctattttcccataacggtttagagaagaacactaagttcagaggggtcacattatattgttccttttttacctgtgtttgattcagtcaccggtacattttctccctaattatttcgttcattcacatagattaatccagattttgacacataaagcaaggcattatttcgttctgatttcccataatggttcagattcagtcatctgtgttcaaggcattattttgacacataaaatgagtttagttcatttattcggtttccacctgacttaaggaaatttcctatacaataatttatctttaggcttcttgataaaataatctaaatcatgaccatttctactagggtatgtaatcaccgtgcttgagctatgaccctttcttgtctgaatgtagttccctgcattggatgaccaaagttgcttctagtgattatggcatgcaggtgacgtaatgtaattattttcattactccataattctattttggcacatacgaacaatattttttgttgtgtgtacgacatggaaaagtatataatataaatttccaatgtattgtttcctatataggatcgaggagtaatttctacattaaatgaaaatgtgttgtaaaaagtattttaaattcatgacatacttttttgtgataggtgaaaaaaatgtagattattcaaatctagtaacactgtagatatagagaaccaaatttaggggacgttgctgtagacgaagaaaatatagagaatagaatcgtttagagggtgctataaaggatagagaatatttctttagaagatgaaatttaggggacgctgctgttggaggccttcgtcttccgaaggtcctcaaaaacatgatttaacaatgtttttcaagtgtgacatatgaacaggtaacttcggactcgggttaaaaccatacgcgatgtgaaaagcatggttgagacgaaggctgatgattgcttcgaagctacacgcaaggaagcttcggctaagtggcggaaaaaggaaccgacttaaaggggaaaagacaatctagtccccgttggtttattcataagtcaatagtaaatataaagggcatgaatgtaaatttacacaggttgcgccctgtgcctataaatagatgaacagtacccccgtactgttcacgctgactggtactcgcttgtgcgtcacgcttgtaatttcaccctctgtcaagccgaagatacaaatataattcaatattgtttctgtttttccatgataatataaagaagatgagttaataa

SEQ ID NO: 122556 - DNA, 3635 bp, Zea Mays
tcgaatcgccaaagcagacaggggcgctcgcgggggcgccgagctcgacggggcgagatggccgggaacgactggatcaacagctacctggaggctattctggacgctggcggggccgcgggagatctctcggcagccgcaggcagcggggacggccgcgacgggacggccgtggagaagcgggataagtcgtcgctgatgctccgagagcgcggccggttcagccccgcgcgatacttcgtcgaggaggtcatctccggcttcgacgagaccgacctctacaagacctgggtccgcacctcggctatgaggagtccccaggagcggaacacgcggctggagaacatgtcgtggaggatctggaacctcgccaggaagaagaagcagatagaaggagaggaagcctcacgattgtctaaacaacgcatggaatttgagaaagctcgtcaatatgctgctgatttgtctgaagacctatctgaaggagaaaagggagaaacaaataatgaaccatctattcatgatgagagcatgaggacgcggatgccaaggattggttcaactgatgctattgatacatgggcaaaccagcacaaagataaaaagttgtacatagtattgataagcattcatggtcttatacgcggggagaatatggagctgggacgtgattcagatacaggtggtcaggtgaaatatgttgtagaacttgctagggctttaggttcaacaccaggagtatacagagtggatctactaacaaggcagatttctgcacctgatgttgattggagttatggggaacctactgagatgctcagtccaataagttcagaaaactttgggcttgagctgggcgaaagcagtggtgcctatattgtccggataccattcggaccaagagacaaatatatccctaaagagcatctatggcctcacatccaggaatttgttgatggcgcacttgtccatatcatgcagatgtccaaggtccttggagaacaaattggtagtgggcaaccagtatggcctgttgttatacatggacactatgctgatgctggtgattctgctgctttactgtctggggcactcaatgtacccatggtattcactggtcattctcttggcagagataagttggaccagattttgaagcaagggcgtcaaaccagggatgaaataaatgcaacctataagataatgcgtcgaattgaggccgaggaactttgccttgatacatctgaaatcataattacaagtaccaggcaagaaatagaacagcaatggggattatatgatggttttgatctaactatggcccggaaactcagagcaagaataaggcgtggtgtgagctgctttggtcgttacatgccccgtatgattgcaatccctcctggcatggagtttagtcatatagcaccacatgatgttgacctcgacagtgaggaaggaaatggagatggctcaggttcaccagatccacctatttgggctgatataatgcgcttcttctcaaacccccggaagccaatgattcttgctcttgctcgtccggatccgaagaagaatatcactactctagtcaaagcatttggtgaacatcgtgaactgagaaatttagcaaatctttaatggcaactgttttccctgcagacactgatcatggggaatcgtgatgtcattgatgaaatgtcaagcacaaatgcagctgttttgacttcagcactcaagttaattgataaatatgatctatatggacaagtggcataccccaagcaccataagcaatctgaagttcctgatatttatcgtttagctgcgagaacaaaaggagtttttatcaattgtgcattggttgaaccatttggactcaccttgattgaggctgctgcatatggtctacccatggttgccacccgaaatggtgggcctgtggacatacatcgggttcttgataatggaattcttgttgacccccacaatcaaaatgaaatagctgaggcactttataagcttgtgtcagataagcacttgtggtcacaatgtcgccagaatggtctgaaaaacatccataaattttcatggcctgaacattgccagaactatttggcacgtgtagtcactctcaagcctagacatccccgctggcaaaagaatgatgttgcagctgaaatatctgaagcagattcacccgaggactctctgagggatattcatgacatatcacttaacttaaagctttccttggacagtgaaaaatcaggcagcaaagaagggaattcaaatgctttgagaaggcattttgaggatgcagcgcaaaagttgtcaggtgttaatgacatcaaaaaggatgtgccaggtgagaatggtaagtggtcgtcattgcgtaggaggaagcacatcattgtaattgctgtagactctgtgcaagatgcagactttgttcaggttattaaaaatatttttgaagcttcaagaaatgagagatcaagtggtgctgttggttttgtgttgtcaacggctagagcaatatcagagttacatactttgcttatatctggagggatagaagctagtgactttgatgccttcatatgcaacagtggcagtgatctttgttatccatcttcaagctctgaggacatgcttaaccctgctgagctcccattcatgattgatcttgattatcactcccaaattgaatatcgctggggaggagaaggtttaaggaagacattaattcgttgggcagctgagaaaaacaaagaaagtggacaaaaaatatttattgaggatgaagaatgctcatccacctactgcatttcatttaaagtgtccaatactgcagctgcacctcctgtgaaggagattaggaggacaatgagaatacaagcactgcgttgccatgttttgtacagccatgatggtagcaagttgaatgtaattcctgttttggcttctcgctcacaggctttaaggtatttgtatatccgatggggggtagagctgtcaaacatcaccgtgattgtcggtgagtgtggtgacacagattatgaaggactacttggaggcgtgcacaaaactatcatactcaaaggctcgttcaatactgctccaaaccaagttcatgctaacagaagctattcatcccaagatgttgtatcctttgacaaacaaggaattgcttcaattgagggatatggtccagacaatctaaagtcagctctacggcaatttggtatattgaaagactaaatctttgatctttgctggtcagcagaggaatcaaagcaggaatgtaggatcgaggagagtgacaggacttcccctctgtgcacttcgccgaaaagtaataatgggattgctatgcatggcccttgttgtacactagaaaattgggcacgcaaacttgtgtcagtttttccgctgttgcgaaattcagtgatggtgtttttgtaactataccaacctgtgtcagttttgccgttgttgcaaaactcagtgatggtgttttttgtaattattatacatccgaataataagactggtgtttccagacagactatgcaagctaaggggaaatcacgattttcctagatcaaatatgtaatatgttcttttccgatgca

SEQ ID NO: 122557 - DNA, 3637 bp, Zea Mays
tcgaatcgccaaagcagacaggggcgctcgcgggggcgccgagctcgacggggcgagatggccgggaacgactggatcaacagctacctggaggctattctggacgctggcggggccgcgggagatctctcggcagccgcaggcagcggggacggccgcgacgggacggccgtggagaagcgggataagtcgtcgctgatgctccgagagcgcggccggttcagccccgcgcgatacttcgtcgaggaggtcatctccggcttcgacgagaccgacctctacaagacctgggtccgcacctcggctatgaggagtccccaggagcggaacacgcggctggagaacatgtcgtggaggatctggaacctcgccaggaagaagaagcagatagaaggagaggaagcctcacgattgtctaaacaacgcatggaatttgagaaagctcgtcaatatgctgctgatttgtctgaagacctatctgaaggagaaaagggagaaacaaataatgaaccatctattcatgatgagagcatgaggacgcggatgccaaggattggttcaactgatgctattgatacatgggcaaaccagcacaaagataaaaagttgtacatagtattgataagcattcatggtcttatacgcggggagaatatggagctgggacgtgattcagatacaggtggtcaggtgaaatatgttgtagaacttgctagggctttaggttcaacaccaggagtatacagagtggatctactaacaaggcagatttctgcacctgatgttgattggagttatggggaacctactgagatgctcagtccaataagttcagaaaactttgggcttgagctgggcgaaagcagtggtgcctatattgtccggataccattcggaccaagagacaaatatatccctaaagagcatctatggcctcacatccaggaatttgttgatggcgcacttgtccatatcatgcagatgtccaaggtccttggagaacaaattggtagtgggcaaccagtatggcctgttgttatacatggacactatgctgatgctggtgattctgctgctttactgtctggggcactcaatgtacccatggtattcactggtcattctcttggcagagataagttggaccagattttgaagcaagggcgtcaaaccagggatgaaataaatgcaacctataagataatgcgtcgaattgaggccgaggaactttgccttgatacatctgaaatcataattacaagtaccaggcaagaaatagaacagcaatggggattatatgatggttttgatctaactatggcccggaaactcagagcaagaataaggcgtggtgtgagctgctttggtcgttacatgccccgtatgattgcaatccctcctggcatggagtttagtcatatagcaccacatgatgttgacctcgacagtgaggaaggaaatggagatggctcaggttcaccagatccacctatttgggctgatataatgcgcttcttctcaaacccccggaagccaatgattcttgctcttgctcgtccggatccgaagaagaatatcactactctagtcaaagcatttggtgaacatcgtgaactgagaaatttagcaaatctttaatggcaactgttttccctgcagacactgatcatggggaatcgtgatgtcattgatgaaatgtcaagcacaaatgcagctgttttgacttcagcactcaagttaattgataaatatgatctatatggacaagtggcataccccaagcaccataagcaatctgaagttcctgatatttatcgtttagctgcgagaacaaaaggagtttttatcaattgtgcattggttgaaccatttggactcaccttgattgaggctgctgcatatggtctacccatggttgccacccgaaatggtgggcctgtggacatacatcgggttcttgataatggaattcttgttgacccccacaatcaaaatgaaatagctgaggcactttataagcttgtgtcagataagcacttgtggtcacaatgtcgccagaatggtctgaaaaacatccataaattttcatggcctgaacattgccagaactatttggcacgtgtagtcactctcaagcctagacatccccgctggcaaaagaatgatgttgcagctgaaatatctgaagcagattcacccgaggactctctgagggatattcatgacatatcacttaacttaaagctttccttggacagtgaaaaatcaggcagcaaagaagggaattcaaatgctttgagaaggcattttgaggatgcagcgcaaaagttgtcaggtgttaatgacatcaaaaaggatgtgccaggtgagaatggtaagtggtcgtcattgcgtaggaggaagcacatcattgtaattgctgtagactctgtgcaagatgcagactttgttcaggttattaaaaatatttttgaagcttcaagaaatgagagatcaagtggtgctgttggttttgtgttgtcaacggctagagcaatatcagagttacatactttgcttatatctggagggatagaagctagtgactttgatgccttcatatgcaacagtggcagtgatctttgttatccatcttcaagctctgaggacatgcttaaccctgctgagctcccattcatgattgatcttgattatcactcccaaattgaatatcgctggggaggagaaggtttaaggaagacattaattcgttgggcagctgagaaaaacaaagaaagtggacaaaaaatatttattgaggatgaagaatgctcatccacctactgcatttcatttaaagtgtccaatactgcagctgcacctcctgtgaaggagattaggaggacaatgagaatacaagcactgcgttgccatgttttgtacagccatgatggtagcaagttgaatgtaattcctgttttggcttctcgctcacaggctttaaggtatttgtatatccgatggggggtagagctgtcaaacatcaccgtgattgtcggtgagtgtggtgacacagattatgaaggactacttggaggcgtgcacaaaactatcatactcaaaggctcgttcaatactgctccaaaccaagttcatgctaacagaagctattcatcccaagatgttgtatcctttgacaaacaaggaattgcttcaattgagggatatggtccagacaatctaaagtcagctctacggcaatttggtatattgaaagactaaatctttgatctttgctggtcagcagaggaatcaaagcagtaggaatgtaggatcgaggagagtgacaggacttcccctctgtgcacttcgccgaaaagtaataatgggattgctatgcatggcccttgttgtacactagaaaattgggcacgcaaacttgtgtcagtttttccgctgttgcgaaattcagtgatggtgtttttgtaactataccaacctgtgtcagttttgccgttgttgcaaaactcagtgatggtgttttttgtaattattatacatccgaataataagactggtgtttccagacagactatgcaagctaaggggaaatcacgattttcctagatcaaatatgtaatatgttcttttccgatgc

SEQ ID NO: 122558 - DNA, 2333 bp, Zea Mays
acgacaaagctaaaaaagatttagcattttggaatggagtgagttttattttatcaaaatttaatatcagtatcaggtcgtgtgtgttggtgactaccttttgttttatcttatgtgttatctggagaactttggtgtttgctagtataaattcatttttatctcaagaaatctaatgattgactcttgactttcacaactcatgtttatttgagtttcaattattttcagggagtttttatcaattgtgcattggttgaaccatttggactcaccttgattgaggctgctgcatatggtctacccatggttgccacccgaaatggtgggcctgtggacatacatcgggttcttgataatggaattcttgttgacccccacaatcaaaatgaaatagctgaggcactttataagcttgtgtcagataagcacttgtggtcacaatgtcgccagaatggtctgaaaaacatccataaattttcatggcctgaacattgccagaactatttggcacgtgtagtcactctcaagcctagacatccccgctggcaaaagaatgatgttgcagctgaaatatctgaagcagattcacccgaggactctctgagggatattcatgacatatcacttaacttaaagctttccttggacagtgaaaaatcaggcagcaaagaagggaattcaaatgctttgagaaggcattttgaggatgcagcgcaaaagttgtcaggtgttaatgacatcaaaaaggatgtgccaggtgagaatggtaagtggtcgtcattgcgtaggaggaagcacatcattgtaattgctgtagactctgtgcaagatgcagactttgttcaggttattaaaaatatttttgaagcttcaagaaatgagagatcaagtggtgctgttggttttgtgttgtcaacggctagagcaatatcagagttacatactttgcttatatctggagggatagaagctagtgactttgatgccttcatatgcaacagtggcagtgatctttgttatccatcttcaagctctgaggacatgcttaaccctgctgagctcccattcatgattgatcttgattatcactcccaaattgaatatcgctggggaggagaaggtttaaggaagacattaattcgttgggcagctgagaaaaacaaagaaagtggacaaaaaatatttattgaggatgaagaatgctcatccacctactgcatttcatttaaagtgtccaatactgcagctgcacctcctgtgaaggagattaggaggacaatgagaatacaagcactgcgttgccatgttttgtacagccatgatggtagcaagttgaatgtaattcctgttttggcttctcgctcacaggctttaaggtatttgtatatccgatggggggtagagctgtcaaacatcaccgtgattgtcggtgagtgtggtgacacagattatgaaggactacttggaggcgtgcacaaaactatcatactcaaaggctcgttcaatactgctccaaaccaagttcatgctaacagaagctattcatcccaagatgttgtatcctttgacaaacaaggaattgcttcaattgagggatatggtccagacaatctaaagtcagctctacggcaatttggtatattgaaagactaaatctttgatctttgctggtcagcagaggaatcaaagcaggtatcgtgagacagttttgctacaaatttttttctaatgttgagagatatttcacacccaagatcggcattcgaagtgcaaagttgaaattacatgtgtgcttttgaaacttaaagggcaaatacacaaaccgacacttatctacatggttttccacccatcacagtgcatcttgcttatctacttaaacgcactcgtttggtctcaaataatactgccacagcatgcagggaccatctctttgtttctttgatgtctcatggcacaattattgggctgcttagttgctatattctaaaaaagaatcttttttttttggtgtagtaggaatgtaggatcgaggagagtgacaggacttcccctctgtgcacttcgccgaaaagtaataatgggattgctatgcatggcccttgttgtacactagaaaattgggcacgcaaacttgtgtcagtttttccgctgttgcgaaattcagtgatggtgtttttgtaactataccaacctgtgtcagttttgccgttgttgcaaaactcagtgatggtgttttttgtaattattatacatccgaataataagactggtgtttccagacagactatgcaagctaaggggaaatcacgattttcctagatcaaata

SEQ ID NO: 122559 - DNA, 3938 bp, Zea Mays
tcgaatcgccaaagcagacaggggcgctcgcgggggcgccgagctcgacggggcgagatggccgggaacgactggatcaacagctacctggaggctattctggacgctggcggggccgcgggagatctctcggcagccgcaggcagcggggacggccgcgacgggacggccgtggagaagcgggataagtcgtcgctgatgctccgagagcgcggccggttcagccccgcgcgatacttcgtcgaggaggtcatctccggcttcgacgagaccgacctctacaagacctgggtccgcacctcggctatgaggagtccccaggagcggaacacgcggctggagaacatgtcgtggaggatctggaacctcgccaggaagaagaagcagatagaaggagaggaagcctcacgattgtctaaacaacgcatggaatttgagaaagctcgtcaatatgctgctgatttgtctgaagacctatctgaaggagaaaagggagaaacaaataatgaaccatctattcatgatgagagcatgaggacgcggatgccaaggattggttcaactgatgctattgatacatgggcaaaccagcacaaagataaaaagttgtacatagtattgataagcattcatggtcttatacgcggggagaatatggagctgggacgtgattcagatacaggtggtcaggtgaaatatgttgtagaacttgctagggctttaggttcaacaccaggagtatacagagtggatctactaacaaggcagatttctgcacctgatgttgattggagttatggggaacctactgagatgctcagtccaataagttcagaaaactttgggcttgagctgggcgaaagcagtggtgcctatattgtccggataccattcggaccaagagacaaatatatccctaaagagcatctatggcctcacatccaggaatttgttgatggcgcacttgtccatatcatgcagatgtccaaggtccttggagaacaaattggtagtgggcaaccagtatggcctgttgttatacatggacactatgctgatgctggtgattctgctgctttactgtctggggcactcaatgtacccatggtattcactggtcattctcttggcagagataagttggaccagattttgaagcaagggcgtcaaaccagggatgaaataaatgcaacctataagataatgcgtcgaattgaggccgaggaactttgccttgatacatctgaaatcataattacaagtaccaggcaagaaatagaacagcaatggggattatatgatggttttgatctaactatggcccggaaactcagagcaagaataaggcgtggtgtgagctgctttggtcgttacatgccccgtatgattgcaatccctcctggcatggagtttagtcatatagcaccacatgatgttgacctcgacagtgaggaaggaaatggagatggctcaggttcaccagatccacctatttgggctgatataatgcgcttcttctcaaacccccggaagccaatgattcttgctcttgctcgtccggatccgaagaagaatatcactactctagtcaaagcatttggtgaacatcgtgaactgagaaatttagcaaatctttaatggcaactgttttccctgcagacactgatcatggggaatcgtgatgtcattgatgaaatgtcaagcacaaatgcagctgttttgacttcagcactcaagttaattgataaatatgatctatatggacaagtggcataccccaagcaccataagcaatctgaagttcctgatatttatcgtttagctgcgagaacaaaaggagtttttatcaattgtgcattggttgaaccatttggactcaccttgattgaggctgctgcatatggtctacccatggttgccacccgaaatggtgggcctgtggacatacatcgggttcttgataatggaattcttgttgacccccacaatcaaaatgaaatagctgaggcactttataagcttgtgtcagataagcacttgtggtcacaatgtcgccagaatggtctgaaaaacatccataaattttcatggcctgaacattgccagaactatttggcacgtgtagtcactctcaagcctagacatccccgctggcaaaagaatgatgttgcagctgaaatatctgaagcagattcacccgaggactctctgagggatattcatgacatatcacttaacttaaagctttccttggacagtgaaaaatcaggcagcaaagaagggaattcaaatgctttgagaaggcattttgaggatgcagcgcaaaagttgtcaggtgttaatgacatcaaaaaggatgtgccaggtgagaatggtaagtggtcgtcattgcgtaggaggaagcacatcattgtaattgctgtagactctgtgcaagatgcagactttgttcaggttattaaaaatatttttgaagcttcaagaaatgagagatcaagtggtgctgttggttttgtgttgtcaacggctagagcaatatcagagttacatactttgcttatatctggagggatagaagctagtgactttgatgccttcatatgcaacagtggcagtgatctttgttatccatcttcaagctctgaggacatgcttaaccctgctgagctcccattcatgattgatcttgattatcactcccaaattgaatatcgctggggaggagaaggtttaaggaagacattaattcgttgggcagctgagaaaaacaaagaaagtggacaaaaaatatttattgaggatgaagaatgctcatccacctactgcatttcatttaaagtgtccaatactgcagctgcacctcctgtgaaggagattaggaggacaatgagaatacaagcactgcgttgccatgttttgtacagccatgatggtagcaagttgaatgtaattcctgttttggcttctcgctcacaggctttaaggtatttgtatatccgatggggggtagagctgtcaaacatcaccgtgattgtcggtgagtgtggtgacacagattatgaaggactacttggaggcgtgcacaaaactatcatactcaaaggctcgttcaatactgctccaaaccaagttcatgctaacagaagctattcatcccaagatgttgtatcctttgacaaacaaggaattgcttcaattgagggatatggtccagacaatctaaagtcagctctacggcaatttggtatattgaaagactaaatctttgatctttgctggtcagcagaggaatcaaagcaggtatcgtgagacagttttgctacaaatttttttctaatgttgagagatatttcacacccaagatcggcattcgaagtgcaaagttgaaattacatgtgtgcttttgaaacttaaagggcaaatacacaaaccgacacttatctacatggttttccacccatcacagtgcatcttgcttatctacttaaacgcactcgtttggtctcaaataatactgccacagcatgcagggaccatctctttgtttctttgatgtctcatggcacaattattgggctgcttagttgctatattctaaaaaagaatcttttttttttggtgtagtaggaatgtaggatcgaggagagtgacaggacttcccctctgtgcacttcgccgaaaagtaataatgggattgctatgcatggcccttgttgtacactagaaaattgggcacgcaaacttgtgtcagtttttccgctgttgcgaaattcagtgatggtgtttttgtaactataccaacctgtgtcagttttgccgttgttgcaaaactcagtgatggtgttttttgtaattattatacatccgaataataagactggtgtttccagacagactatgcaagctaaggggaaatcacgattttcctagatcaaata

SEQ ID NO: 122560 - DNA, 3697 bp, Zea Mays
ataaacactgtacgagatcactgaccataatcattagcaatttagcattagcctcagctggcgtaccgtcgagtccattcccacctttctaccccttccagaaacctccaggatccgactccaatcgaatcgccaaagcagacaggggcgctcgcgggggcgccgagctcgacggggcgagatggccgggaacgactggatcaacagctacctggaggctattctggacgctggcggggccgcgggagatctctcggcagccgcaggcagcggggacggccgcgacgggacggccgtggagaagcgggataagtcgtcgctgatgctccgagagcgcggccggttcagccccgcgcgatacttcgtcgaggaggtcatctccggcttcgacgagaccgacctctacaagacctgggtccgcacctcggctatgaggagtccccaggagcggaacacgcggctggagaacatgtcgtggaggatctggaacctcgccaggaagaagaagcagatagaaggagaggaagcctcacgattgtctaaacaacgcatggaatttgagaaagctcgtcaatatgctgctgatttgtctgaagacctatctgaaggagaaaagggagaaacaaataatgaaccatctattcatgatgagagcatgaggacgcggatgccaaggattggttcaactgatgctattgatacatgggcaaaccagcacaaagataaaaagttgtacatagtattgataagcattcatggtcttatacgcggggagaatatggagctgggacgtgattcagatacaggtggtcaggtgaaatatgttgtagaacttgctagggctttaggttcaacaccaggagtatacagagtggatctactaacaaggcagatttctgcacctgatgttgattggagttatggggaacctactgagatgctcagtccaataagttcagaaaactttgggcttgagctgggcgaaagcagtggtgcctatattgtccggataccattcggaccaagagacaaatatatccctaaagagcatctatggcctcacatccaggaatttgttgatggcgcacttgtccatatcatgcagatgtccaaggtccttggagaacaaattggtagtgggcaaccagtatggcctgttgttatacatggacactatgctgatgctggtgattctgctgctttactgtctggggcactcaatgtacccatggtattcactggtcattctcttggcagagataagttggaccagattttgaagcaagggcgtcaaaccagggatgaaataaatgcaacctataagataatgcgtcgaattgaggccgaggaactttgccttgatacatctgaaatcataattacaagtaccaggcaagaaatagaacagcaatggggattatatgatggttttgatctaactatggcccggaaactcagagcaagaataaggcgtggtgtgagctgctttggtcgttacatgccccgtatgattgcaatccctcctggcatggagtttagtcatatagcaccacatgatgttgacctcgacagtgaggaaggaaatggagatggctcaggttcaccagatccacctatttgggctgatataatgcgcttcttctcaaacccccggaagccaatgattcttgctcttgctcgtccggatccgaagaagaatatcactactctagtcaaagcatttggtgaacatcgtgaactgagaaatttagcaaatcttacactgatcatggggaatcgtgatgtcattgatgaaatgtcaagcacaaatgcagctgttttgacttcagcactcaagttaattgataaatatgatctatatggacaagtggcataccccaagcaccataagcaatctgaagttcctgatatttatcgtttagctgcgagaacaaaaggagtttttatcaattgtgcattggttgaaccatttggactcaccttgattgaggctgctgcatatggtctacccatggttgccacccgaaatggtgggcctgtggacatacatcgggttcttgataatggaattcttgttgacccccacaatcaaaatgaaatagctgaggcactttataagcttgtgtcagataagcacttgtggtcacaatgtcgccagaatggtctgaaaaacatccataaattttcatggcctgaacattgccagaactatttggcacgtgtagtcactctcaagcctagacatccccgctggcaaaagaatgatgttgcagctgaaatatctgaagcagattcacccgaggactctctgagggatattcatgacatatcacttaacttaaagctttccttggacagtgaaaaatcaggcagcaaagaagggaattcaaatgctttgagaaggcattttgaggatgcagcgcaaaagttgtcaggtgttaatgacatcaaaaaggatgtgccaggtgagaatggtaagtggtcgtcattgcgtaggaggaagcacatcattgtaattgctgtagactctgtgcaagatgcagactttgttcaggttattaaaaatatttttgaagcttcaagaaatgagagatcaagtggtgctgttggttttgtgttgtcaacggctagagcaatatcagagttacatactttgcttatatctggagggatagaagctagtgactttgatgccttcatatgcaacagtggcagtgatctttgttatccatcttcaagctctgaggacatgcttaaccctgctgagctcccattcatgattgatcttgattatcactcccaaattgaatatcgctggggaggagaaggtttaaggaagacattaattcgttgggcagctgagaaaaacaaagaaagtggacaaaaaatatttattgaggatgaagaatgctcatccacctactgcatttcatttaaagtgtccaatactgcagctgcacctcctgtgaaggagattaggaggacaatgagaatacaagcactgcgttgccatgttttgtacagccatgatggtagcaagttgaatgtaattcctgttttggcttctcgctcacaggctttaaggtatttgtatatccgatggggggtagagctgtcaaacatcaccgtgattgtcggtgagtgtggtgacacagattatgaaggactacttggaggcgtgcacaaaactatcatactcaaaggctcgttcaatactgctccaaaccaagttcatgctaacagaagctattcatcccaagatgttgtatcctttgacaaacaaggaattgcttcaattgagggatatggtccagacaatctaaagtcagctctacggcaatttggtatattgaaagactaaatctttgatctttgctggtcagcagaggaatcaaagcaggtatcgatcgaggagagtgacaggacttcccctctgtgcacttcgccgaaaagtaataatgggattgctatgcatggcccttgttgtacactagaaaattgggcacgcaaacttgtgtcagtttttccgctgttgcgaaattcagtgatggtgtttttgtaactataccaacctgtgtcagttttgccgttgttgcaaaactcagtgatggtgttttttgtaattattatacatccgaataataagactggtgtttccagacagactatgcaagctaaggggaaatcacgattttcc

SEQ ID NO: 122561 - DNA, 581 bp, Zea Mays
tgaacaagcatgcaattacatatctgaatttgttccttacagcatcctccaaggcaagaggtgtgtggcagataaaatctcttgcggaagatcttatctatcctcgttcatacctggcagaccggcagcaagtactcccctattttcctcaaaagaggcagggcgatgagacgtcactttcagaccatcacgcatgcttgaggtgaaaggatctggtgttaggcgagctgtgattcgttccttgacgtgccgttcttcgcacgcgcgcgcgtgcagatgtgtcacgcccatcagtgttggatcggatggcatctcgtcctaaacaagtggcgactggcgagctagttgacggcaggtcaagcacggcatccgatccttcgtcccctgatggctgatgctgcgtcaggccggccgtagaagcgtgtgcgcggcgactgcatgcgtggcaccggtaggtacggggctgaagactttcaggacgccggcctttagttttgggatggatactgaggaaattataagtgatcttctattcttcttaaccttagcttttatgcctgaggaaatcggtttgcgttgca

SEQ ID NO: 122562 - DNA, 3678 bp, Zea Mays
atgggcgccgctcgtacggcggcgccggtctttatgctgctgctgctgctccacctgtcgccgcgcgcggttgctgccgggacaggcgacgaggcagcggcgctgctcgcgttcaagcgcgcctccgtagccgccgaccaggccggcaggctcgcgagctgggcggagcccaactcgacctccggctccgcctcgccgtgcgagtgggccggcgtctcgtgcgtgggcggccacgtccgtgcgctcgacctcagcggcatgtccctcgtcggccgcctccacctagacgagctgctcgcgctcccggcgctccggagcgtcctcctcggtggcaacgccttccacggcgacctcacccaccgggccccgccgcggtgcgcgctcgtggacgtggacctgtcgtcgaacgctctcaacgggacgctgccccgggcgttcctggcgtcctgcagcagcctgcggctgctgaacctgtccggcaacaccttcaccggcggaggcggcttcccgttcgcgtcgtcgctgcggacgctcgacgtgtccaggaacgagctgtcagacgccggcttgctgaactactccctgagtgcctgccacggcattcggcacctgaacctctcggccaaccagctcaccggagagctcccaccacggttcgcgcagtgcagccaggtttctgttcttgatctctcagggaacctcatgtccggcgccctccccggcaggctcttggccacggcgccggccagtttgacacgcctgagcatcgctgggaacaacttctccggggacatctccaggtatcagtttggtggctgtgcaaatctctccgtgcttgatctttcgtacaacagactgagcgccaccatagggttgccaccgagtcttgccaattgccaccacctcagggaactagacatgtctgggaacaagattctgtcgggccgagtaccggagttcctggggggcttccgagcattgcggcgactcggacttgccgggaacaacttcaccgaggaaatcccggatgagctgagcctcctgtgcggaacgctggttcagctagacttgtcaagcaaccaattggttggcggtttgccagcgagcttctcaggatgcagatcgcttgaggtgctcgatctgggtagcaaccagctgtcaggtgactttgtgatcactgtgatcagcaagatctcttctctgcgtgtgctgaggctgccgttcaacaatatcacaggcacaaatcctctgcccacgctagcagctggctgccctttgcttgaagtcattgatctcgggtctaacatgctggaaggagagatcatgcccgagctgtgttcatctttgccatcactcagaaagctgctcctacccaacaactacatcaatggaaccgtgccgccctcactcggcaactgcagtaatctggagtcactggacctcagcttcaacctcatggttggtccgatcacgcctgaagtactgttgcttcctaagcttgttgatttggtcatgtgggcaaacagtctctccggtgagataccagacacgctatgctccaacagcacagcactgaagacactggtcataagctacaacaacataaccggagtgatccctgtctccatcaccaggtgcgtgaatctcatatggctgtcacttgccggcaacagcatgaccgggagtgtccccgccggcttcgggaacctccagaagctcgccattctacagctgcacaggaactcactctctggtcctgtgccagcagagcttggtcgctgcagcaacctcatctggcttgatctcaacagcaacaacttctccggtgcgataccgccgcagctagcagcacaggcagggctcatcactggaggcatggtttctgggaagcagttcgcgttcctgaggaatgaggctggcaacatctgcccaggtgctggagtgctgttcgagttctttgacatccgtccggagcggctggcccagttccctgctgtgcactcgtgtgcctccacgaggatatacactgggatgacagtgtacaccttcaaccaaagtgggagcatgatattccttgatctctcgtacaacagcctcacaggcacaattccggcgagcctggggaacatgacgtatcttgatgtccttaacctggggcataatgaccttaccggtgcaattccagatgcgttcacagggttgaaggcgattggtgtccttgacctctcgcacaatcacctcaccggtgtcatccctgctggactggggtgtttaaatttcctagctgacttcgacgtctccaacaacaacctcactggtgagatacccacgtcagggcagctcagtacatttccagcatcccgttttgagaacaactccggcatctgtggcatccccttggatccttgcacgcacaatgccagcactggaggtgttcctcaaaacccctctaacgtgcggaggaagtttctcgaagagttcgtgctccttgcagtgtcgctcaccgtgctcatggtggccaccttggttgtcactgcatacaagctcaggaggccccgtgggagcaaaactgaagagattcaaactgctgggtatagcgacagccccgcatcgtccaccagtacaagctggaagctttctggttccaaagagccactgagcatcaatctggcgatatttgagaatccgttgaggaaactaacatatgcccacctgcatgaggctaccaatggcttcagctcggaagctcttgttggcacaggaggattcggtgaggtttacaaggctaggctcatggatggcagcgttgtggctgtcaagaagctgatgcatttcacaggccagggcgaccgggagttcactgcagagatggagaccattggcaagatcaaacatcgcaatcttgtgccgttgctaggctactgcaaagttggcgacgaacgtctgcttgtgtacgagtacatgaataatggaagcctggatgtcttgctccatgaaagggacaagactgatgtgggtcttgattgggcaacaaggaagaagattgcagttggctcggcaagaggactggccttcctccaccatagttgcatcccacacatcatacaccgggacatgaagtcaagcaacgtgcttcttgacgataatctcgatgcctacgtatcggatttcggaatggcgcggctcgtgaatgctgttgactcacatctaaccgtgagcaagctcttaggaacacctggttatgtggctcccgagtacttccagtcggttatttgcacaactaagggcgacgtctacagctatggcgttgttcttctggagcttctctcagggaaaaaaccaatcaatccgactgaattcggcgacaataatctcatcgactgggcaaagcagatggttaaggaggaccggtgcagcgagatatttgatcctatattgaccgacacaaaatcctgcgagtcggagctgtaccagtatctggcgattgcttgccagtgcttggacgatcaacctagtcgcagacctacgatgatccaggtcatggcaatgttcagtgagtttcagattgactctggcagcttcttcttggacggcttctcgctcgattcagatagaggaatcatctgaaaaaaaatgtgtaaatgttattgatccctgcagattatatgattcactgga

SEQ ID NO: 122563 - DNA, 2145 bp, Zea Mays
atgagtctgctgggccagaggaggcatcttctgctgggccggcctaggctgatgggctccaggaataggagcgctacgattgccatgcttgccgttgactttgtcctacccctggacgacgtgcccgcagaagtggaaggcttctttggcagtttgatgggacatgaaggggctcctgtaggtggtgtggtggccgtccctctggaggtagtgaaaaggaaaagggtgccaccgtggatgatcggttggaaggagggatcactggcgtttgcaaggatgtgctcctggagggaatacttgccaggaacccgaaggaattcactgtgccagcatgtaattgttgccagcaaggccaagaacagtcgagatcaacgtctgaatgttctgtatgccaacaacctgcgagtggaggttgatggctgcggattcatggagaagcatgacatcttggatgggctggtggaaactgtcatgaatgcatggggacttggcctaggatgttgtgtgcatgggcgttggtggtttatgctcctgtgctgctgtggtggtttcatgcttggtgtcctgggtgcgggtgagcagcttttgccggcagccttggtggcctgtgtgagcttctccttaaacttgcaactggcaacagtgaggcgctcacgttcctcggcgtcgaccttttatttagtggcggctgcagcagcagtggtggagaatgggacaacattgtctttggccgatgcccgatggtgtgtccatgggaagagggctgctgtcctcaaggaaaatatgaacattgatttgcgtgtcatgggaatagctggttctaggacaatgcttttaagtgatataggagtagatttgacccagtggaaagagaagctacaaactgaagcagaacctgccaatcttgataagtttgttcatcatttgtctgagaatcacttttttcctaacagagttttggtagattgcacagcagatacaagtgttgcatctcactattatgattggctaaagaaaggaatccatgtcatcactccaaacaagaaagcaaattcagggccacttgacaggtatcttaaacttagaactcttcagcgtgcatcatatactcattacttctatgaagcaactgttggtgctggcctccctatcattagcactctgcgtggtctcctagagacaggtgacaagatattgcgcattgaagggattttcagtggaacgttaagttatatttttaacaacttcgaaggagcaagaacctttagtgatgttgttgctgaagcaaaaaaagcaggatacacagaaccagatccaagagatgatctgtctggtactgatgttgccaggaaggtcataattcttgcaagggaatctggtttggggcttgagctttctgatattcctgtacgaagtcttgtgccagaggcacttaagtcatgtacctcagccgatgaatacatgcagaagttaccatcttttgacgaggattgggcaagagagaggaaaaatgctgaagctgcgggagaagtcctgcggtatgttggagtggtggatgtggtcaacaagaaggggcaggtggagctgcgagcctacaagagggaccacccgttcgcgcagctatctggttccgacaacatcatagccttcaccacctcgaggtacaaggatcagccactgatcgtgcgaggtccgggggctggtgcagaagtgactgcaggaggcgtcttctgcgacatactgcgcctgtcttcctaccttggtgccccctcgtagtctgtcaaggttttgcggtgccgtggtgttgtgttgctgctctactactggttttttttgttgttgttgttgttagtgcttggaatagctggagtaagtatggattaagtgagttctggggtgttaagggttgggtgtcttagttagaaggtcgtattggagggaatggaatccgttcaccgttcttgcgtgttgcaataatcttgtgtggagtctccaggtttgttcggttgctgacagtaagccaagccaaaatggcgagtctagtgaagaaccaaataaaaaaaaggctgggctgtaaggaatgtatccacacgttacttcattggtgtcaccataaatatatacctggatcatttggcttggttt

SEQ ID NO: 122564 - DNA, 143 bp, Zea Mays
cccgtgtcgttgttttcggttctcctttgcctttgtttcccttttctgttctttgggggttgagctctgaggttttcatacggggtttcatctctagcctaccccaacgtgcttgggacaaaaaggctttgttgttgttgttg

SEQ ID NO: 122565 - DNA, 331 bp, Zea Mays
tatcttttcagtggataaccaaagtcacgaccgacctgaaaatgagcacacaccacacctttctttctttgctcactgcagtgggttgcttgttttagaagcaggtaacagtaaccacccacaaaacaaaacaaaaaaaacaacagcgactgggggtcacagaggcagacagcacatcctgcctgcactagctagttctcggaattattcaaaattcaaaaacccagtttaacacacctaaagtgagatccttattcacacggtaaaaggaatgctgattgtgcagagcaccaaaacaaggtgatcgccaggccctaaaatatctctcttg

SEQ ID NO: 122566 - DNA, 1892 bp, Zea Mays
gcctaaaccccgaaattataaagaaaaccgcctcggccgcaacttgactatctttgtgaggaccttcaaccatctcaggcggaatggcggcttctggtgagggcgcgtcgctgccgtctccggcgggcggggaggatgcgcaccgccgccgcgtcagctatttctacgagccgtcgatcggagactactactacgggcaaggtcacccgatgaagccccaccgcatccgaatggcgcactcgctggtggtccactacggcctccaccgcctcctcgagctctcccgcccctacccggcctctgaggccgacatccgccgcttccactccgacgactacgtcgctttcctcgcgtccgccaccggaaacccgggtgtcctcgacccgcgcgccattaagcgctttaacgtcggtgaggactgccccgtgttcgacggtctcttccccttctgccaggcctccgctgggggaagcatcggcgccgccgtcaagcttaaccgcggggacgccgacatcaccgtcaactgggcgggcggcctccaccacgccaagaagagcgaggcctccgggttctgctacgtcaacgacatcgtcctcgccatcctcgagctcctcaagttccacaggcgtgtgctatatgtagacattgatgtccaccatggagatggcgtggaggaggccttcttcactacaaaccgagtcatgactgtttcctttcacaagtatggggattttttccctggtactggacatatcactgacgttggggcagccgaagggaagcattatgctctgaatgttcccctgagtgatggtatcgatgacaccacctttcgtggtctgtttcaatgcatcattaagaaagttatggaggtttatcagccagacgtggttgtcctccaatgcggagctgactctttggctggagacaggttaggttgcttcaacctgtctgtgaagggtcatgctgactgcctccgtttccttaggtcgtacaatgttcctatgatggttttaggtggtggaggttacaccatcagaaatgttgcacgctgctggtgctacgagaccgcagttgctgttggagttgaacctgataacaagctgccttacaatgattactatgagtactttggccctgattatactcttcatatccaaccaaaaagtgttgaaaacctgaataccacaaaggacttggagaacataaagaacatgatattggagaacctgtcaaagatagaacatgttcccagcactcaattccatgacagaccgtcagaccctgaagctccagaggagaaagaggaggacatggacaagaggccacctcagcgcagcagattatggagcggaggagcttacgactctgatacagaggatcctgacagcctgaaaagcgagggtaaagacgtaactgctaacttccagatgaaggatgaaccaaaagatgatctgtagaagtttcagaagtgcccccaaagttactgagttgtgaatgggatcgtcgacatgcatgttgaagagtggggacgcatctgaacctgtccgtgctgatatctgccgctgtgcatctgtaacagactgaacgttttgctggttccagctttcctgcgtgttggtaactagactagatatatggccctttggtgggtcccaaactgttgagctggagaaatgaagtgattattctcgcatgattttgtagcatgcatgtaatcattacccattagttcattaggctatcaacagtagtttactcatccccatattcaaacttcactatgtgcgcaaacagtgatttgattgaccatatgattaaactttgaagatggtctttgggtagtgtttggtttcaaagtgtaatgggatggagccgctccgctcttaatt

SEQ ID NO: 122567 - DNA, 1221 bp, Zea Mays
ataataatgagatcaaatccgatcctgatggtgctgtccgcggcggcaatcgggctcttggtcggcgtctcctctcccatacggatcgcgccgacggtgctcccgttgttcagcagccttggtggcggtggcggcggcggcggcgacgacgcgaactgcacctctgccggcgccggcggcagaaacatggccgccagattgtcagcagcactacccttcttcggaaacagcaccacctctactgcaacaccaatgaaggtttctccgccggcgaaatcagaagaagcaaagaagggcgcggaacggctactaccgccagacatcgttgttcgtgagtctgatctccacctgcgtcggctctggggacaaccgcgtgaggacacccccgttcgcaagtacctggtggcgctgacggtgggctacagcgagagagccaatgtcaacgcgacggttcacaagttctcggacaacttcgacgtcatgttgttccactacgacgggcggacgacggagtgggacgccgagttcgagtggtccaggcaagccatccacgtcagcgccaggaagcaggccaaatggtggtacgccaagaggttcatgcaccccagcgtcgtggcgccctacgagtacgtcttcctttgggaccaggacctcggggccgagaccttcgacgcggaggagtacatcagggtcgccaggaagcacgggctggagatctcgcagcccggcctggacatcgtcaggggcgtcaagaactacgacgtcaacgtcaggaggaacgacaccgaggtgcacacgtcgacgtcggccggcaggtgcagcgcccaagacgccgcccgccgcccgccgtgcagcgccttcgtggaggtcatggcccccgtcttcactcgccgggcctgggcctgcgtctggcacatgatccagaacgatctggttcacggatggggtctggactggaacttctggagatgcgtcgacgagcctgggcggcagatgggcgtggtggacgcgcagtacgtggcgcaccaccacggctttacgctgggggacaagggcaacgacaccgtggacggaagccgacgcaaggtcaggctgcgtgcgtcggccgagtttggcgagttcaaagccagactgtacaacgcggacagggcccagcaggcagcagcagctcttcttgcacagtccaaggcggcagcagcagcagcgccgccaccgtcgtaa

SEQ ID NO: 122568 - DNA, 100 bp, Zea Mays
tgacgaactggggcagttgggtgtgttaaacacagccaaatggagcaatcagttctggtggattggactggatattgagtttgcgggagctgttagggac

SEQ ID NO: 122569 - DNA, 711 bp, Zea Mays
atggagttcatgcttacctcacccttctctgtgtcgcggaacagccaagcacgttacattagcactgctataagtgatggtccgggatgcttgatgctgaggtgtcctgatccgtcctgtgctgctgctgttggacaagatatgataaattcactggctaatgttgaggatacggaaaagtatgggcgatatcttcgcagatcttacattgaagataatagaaagaatatgcaccagggctatcccaaagaaacactggtgcgtttccttaaggctagagagtggaatgtagcaaaggctcataaaatgattgtagaatgtttgaattggaggattcaaaatgaaattgatagtgtgctggagaggcctatagccccagtagatttatacagatcaatatgtgattcacaacttattggcctgtcaggatacacaaaggagttgactggacattgtttggttattatggtctgtaggatcataggtctcccaatttttggcattggtgttgggcatagcacatatgacaaagcttcggctacaactacagccaaaatcataaaagtgtctggtttgaagctatcagcactaagccaaataaagggtgagatagagaacaaggacattgtgaaccaagatgaattgttcatggatattgacagtgcggagtgcggacttggggaactagcttggagtaacacaatatgctga

SEQ ID NO: 122570 - DNA, 688 bp, Zea Mays
accattcaatatatcataagcattgtcaaacaacgcatacataagtgtactctaaatctaaactaaaatacaactgtttgcactaatgttaagcctagctttatatgaattaaagtctccacacttttgcgaccaccaaatttgaattctattctatgttttcttgtacaacaaataggagaaaactaggcatagcaaaaagctccaagcagcacgtggatggtctcaaagttgcccttgtgcttctccctgttcttgagactcctacacgcccggtgttcctcccgccagtcaccatgaccatgttgccgacgtcaaacttgataatccttgcctatatattgtacacccatgtacctctatattcaatctactataccccaagccagatctacttccaatggtgatcagacagaagatgttaataataaatagacccatcctgaaatataatgtttttgagttgctctacgtcaaactatcctaaatttggcaaatttatagagaagaataatatttacaataatagatgaacatcattttcaactcatacatttatgaaatatatttttatagttgatctcctcaatgccactaatacttaatactcttttctatgaacttggtcaaacttaatgtagttacttaggacaaactcaaatcgattacatttcaggacagtggtagt

SEQ ID NO: 122571 - DNA, 1392 bp, Zea Mays
ccgtccacacaacgcacgcgaggtccatcgctcctcctctccgtcaccgagaaaatgtcggtctcctccccggccatggcctcgccccctctcgccgcgcccggcactcaccgcggcccctgcttctcgaccctctgccgcttaccgtcgccttcctgctacccgcctctttcggcttcctcctcaccggctatctccaccgtctccgcattcgctgtcctcaaacacaagcccagaggtctgggactaaggtgccaggccgcggaggaggcaccaccgccggcgcggggtaagacttcgctcaaggtgatgatttcgggagctcccgcctcgggaaaaggaacgcaatgccgcatgatcgtcgagaagtatggtttagttcacatatcaactggtgatcttctgcgagctgaagtatcttctggcacagaaattggcaagaaagcaaaagaatacatggacaatggaaagcttgtgccggaccaagttgtgacagatatggtggtatcacgactgtcacaaccggatatacaagaaagagggtggcttcttgatggttacccaaggagcttcagtcaagcacaacaccttgaaaatttgaaaataagaccgaatatattcattgtgctagaagttcctgatgatgttctaatcgacagatgtgttggaagacggctggatcctgtgactggcaagatttaccatttaaaaaactaccccccggagaatgaggagatttctgcccgacttattacacgttctgatgacacatttgagaaggttaaatcacgtcttgatacgtacaagcaaaattctgaagctattcttcctacatactctgatttgcttaataagattgatggaaactgcccagccgaagttgtttttcaggcgatagatttcctgttacagaagatctgtgagaacacttcagcgagcaagttgaccaaaacaaatggaaaacgaccagattctgcggatacaggttcaaaaaatgagtggcgtggaattccaacgaggttgaataacattccacattctagggaaattagggaatacttctacaacgacgtgttaaaagctacaaaacttgctattgaagataaaaagactcggttgcagatagatatcaatattcctgaacttaaccctgaaatggatgtttaccgcataggaaccctcatggaacttgtaagagaactttctctatcctttgcagatgatgggaaacgtgtcaaggtctgtgttcaaggctccatggggcaaggtgcatttgctggcatcccacttcaactggcaggaaccagaaaaattttggaattcatggactggggtgactatggggcgaagggcaccttcattaatattggagcagtaggtgtgtatgtgttg

SEQ ID NO: 122572 - DNA, 1078 bp, Zea Mays
acctgcttcctccttcccatcagtaggtgttgctaacatattggtatcaaaggtcatggatccccggatctggagccgatccactacacccgtcgtgccaagcatctcggtgccatggatccacaggttaagctcgccttggaagctcaaaaactcgatcgttcctcaccgagctcgacaagaaattcgcagcgcttgacgccaagtgggagtcacgcatcggcgacctggagcgctcgacgggccgattcagttccacgatctcaaggctgacatccacacagatgtgacggcccagctggaattcttcatcaacacggtgaccgaacactcggatcagatcgcgactgcaacagcttcgcgggttgcggtgctggagtcggcatccgcggccttcgactcgtggcgcaccagcattgaatcctcggtggcggatgtcaaggtcggcatcgaatcgatccagacgaccgtcgccaaactgtctcaaactaaggatcctccaccgccggtgccagcacaccttcaacatggcatcctcggcgagttcaggtcggtttccacgcacccatctaccgaattcaggaccgacggcccagaagggcacgacatcgactctcatcgctgggaggctggttttggacgcgtttacgcatccacccacttcctgcacaatgttactgttctccagcgtcggatggtgtatcgtggagtacgcgccgtgcagcaaggcttgatccaatggtcgacgctgccgtcgtcgctagccacccgagaagacctcgaagcactccggcaatgctttccactagcgcctgcttggggacaagccagcgctcaaggcgggggcaatgtcagcactcaggagactacgccaacagtccaagctcctacggctgtcatcgcggacaggggaactgatgaagtacagacttcaaagccaaagaggagggttcggcccagtagccgggtgatgggtccagaatgggtgcattagacttaagtctcgctagcccaagagtattatttatgttttgctgtatccgaactggaggcaaacaagaaagaaaatatctatcta

SEQ ID NO: 122573 - DNA, 706 bp, Zea Mays
actacgtaccagatcgtacagtgttttttctttctttcatttttttgcctaaaatattcacacgaacacacacacggcgcctttctctggctttcacctaccttcatggtggtcgcaggctcgccggagaagagagacctcaggtttagcagcacctcgttgacgtacggcagcaccagcctcagcagccacacggcatcctcctccccgaccaggtagcagcacctatcgccgccgacgcctccatcatcgtcgcactccacactttcacccctgcgtttttttttaccttaccatggttatcaatgacacaagaaatggttttgcttggtcctccgaggagattagattagcagcgttttttacctgctcagtatggacttgcgcaggaagcgtagaccgaggtagatcaggcctgcatacgacgccgccgtgatcgtgctgcagaaggcataagatttttcaacgcttttaggttctgccaacttcagggttacagcaggtgcatgcagcaaaggttggacagcgagtttacttacttgaagtttaggtctttggcgtaggaggaggagacgagcaagaaagtccctagtccgaacaccagcgcggattttgacacgtcggtccacatcaccagattcactgcgaaacccatgttcttgaactagattgtttgtgtgtgttgttgggaacagaagcatgccga

SEQ ID NO: 122574 - DNA, 99 bp, Zea Mays
atgtggagtataaactgtaacagcgaaatggcgcagagattggcaaattctgaagtaacctcaggtgctgtttgcttcaagagctaacaagttgtaccg

SEQ ID NO: 122575 - DNA, 848 bp, Zea Mays
ttgggctggccattccctagtcctccctccaccagagaacccgcagcgcccgccatggccgtctccgattccctcgcgcatccagggctggcgatcgtggtcatgggagtcagcggctgcggcaaatcaaccgtcgcggcaatgctcgccgaagccctgggctgcagcttcatcgaagcagacgactaccattccgaggcaaacaaagccaagatgagcgcgggcgtgccgctctccgacgccgaccgcgcgccgtggctggagtcggtgcgggacgccatccgggggcggctggacggcggcgaggacgtggccgtcagctgctcggcgctgcggctcgggtaccgggatgtgctccgcgcggccgaccgcgcctacgagccggggcgctacgccgcctgcagggtgaggttcgtgtgcctgagggcgccggcggaggtgctcgcggagagggtgctgcggaggtcggtggaaggggagcacttcatgccggcgagcctgctgcggagccagctcgacctgctgcgggtcgaccccgcggagggggtcgccgaggccgacgcgacggcgcgccccgacgacatcgtccgcgacaccgtcgccctgttcagggacgagctagcggtgtcgtccggcgtccctgcttgacttgtttctggatgcgaacgcggtgcagtttcatggtttcatcccatgatgcagtcagtattcattcatccaccattaaagaacctccgtgcagtcggttcgaattaaagccggttatagactcgtgcagctgcaacctgtatagataaaaacactataaaaacagtagaaatttatacgaattaaagccaagaaacaaa

SEQ ID NO: 122576 - DNA, 2099 bp, Zea Mays
cacgacggggctcacactgtgcacgctctacggccatccatggcgccttatccagcattacacctgcagcagcaggtccacctccggcacgccagcaagccaacgaatccagctccggttcatcatcacgggcatggaaaccccaagcccgacgctgtggcggcgtcgctccggcgaggcgccccggccgacgctcgcggcctccgggcgctaatcaaggcgctgtcgtcgtctgcgtcctccaccagcaccgcggcggcagtgcacgcccacgcaaccaagatcgggctggaccgcgagcgtaccgtccgcaacggcctcatcgcgctctacctcgcgcgcggcgagcgcgccgccgcggtgaccctgttcgacgcgttcccgggcgacggccctgacgtggtttcctggacggccatggtgaccgggcacgcgaggctaggcctcgcccgcgacgccgtggcgctgttcctcgcgatgctggagctgggcgacggcgtctccgtcgacgcggtggccgccgccgcagggttcgcggcctgcgcggaggcgcgcgacctcgcgctggcccgggaggcgcaccggcgcgtcgcggcggcgggcgtcgcgctcgacgtcgtggcctggaacgcgctcgtggacatgtacgccaagtgcggcgacgtcgccgccgcacgccggtggttccgcaggataccgctgcccaggaccgtcgtgtcctggaacaccatgctcgcggcgctcgcgcgcgccggcgagtacggcgaggcgctggccctgttccgggagatgcagcgcgcgggtgtgtgcccggacggtggcacgttcgtggccgtcctcggcgcgtgcgcccagctcggcgcgctggacaccggacggtgggtgcacgcgtacatgcgccggcagctggggcgtgacgccgacgccggcggcgttgttagtaacgccctgctcgacatgtacgccaagtgtggcgcggtggaccaggccatgatagtgttcgacggcatggcgcagcgcgacgtgtacacctacgggtcgatgatcgcggggttggccacccacggccgcgccgaggaggccctagcgctattcgcggccatgcggcgaaccggcgtgcggccgaacggcgtgacgctcctcggcgtcctctccgcttgctgccacgccgggctcgtcaacgagggcctccatcacctcggcgccatggcggaggcctacggcgtggcgcctggcatcgagcactacgggtgcgccatcgacatgctcggccgcgcggggaggctggacgaggcggaggcgctcgccgcggcgatgcccgtgccacccgacgcgctcgtccgaggttccctcctcgcggcctgccgcgcgcgcggcaacgtcgagagagccgagcgggtgatgcggcgcgtcgtggtggcggcggacagcggcggtggcgaggccggggaccacgtgctcttgtcgaacatgtacgcgtccaagggacggcatggaagggctgtgcgggtgaggaagcagatgaggaggagcaagatcgtcaaggatcctggctgcagctccatcgagatcgacggcgtcgtgcatgagttccaagcggttccggccaacgccatcgcatgatgtgaagttattgttgacagcgaacaaaaacacaattcaggcctgtttacagttaaaaaaatgcaggcctgttgatacttacaggaatccgtatttgcaaaaagcaatgaacttgccaatcgaattcaagaacgggaacgggatttgttgagacacggaacgagaatttgttgttctatcaagaacacgtgtatggcaccaattcttatgctgtccctctgggaagcggtggatttgaagattcagacgcgttcaccatgtttcgatgccgcttgctgtggctttaatttggctgcagctacgacttttacagtattttgtctctataaattgcagttgtagtagtcctaacagttaccatagctactgattgtatgaactggctcggtcgtttctaagaagtccctcaaagacagatgtaaacaatacctaaggatccgacgccagtcctacgagcctccgagccatcaacaagc

SEQ ID NO: 122577 - DNA, 2124 bp, Zea Mays
tgcaggcccaccaaaaagcaaacgcactagcaaatgcgccgaccaagcggaagagccctgatcatgcagccggaacatccacaccatctttggcgccaagcagcaagaagcagaagagcaccttaacctgcacggtgtgtggcatcaccgcaaacagcgagaaggtcatgcaagaccacctcaatgggaagccgcacaagaggaagttggtagcacttccggagctgccaaagccagtgccagagacagagcaggagagggggctcgagacaggggaggaagaggcaatggcgatggagacattgagagattacaaacccaccaagttcatgatggcgacgacagcaggagcgctgaacgaagtgatacagatggacggttacctcctctgtgagctgtgcaatgtgcggacgtctgaccgtgttacaatgatgtgccacatacaagggagcaaacacatctctaatgaccagaagaagcatgaactttccagcaggccatcaggagtggctattgccagtgctgatcctgatgtaaagctggctctggaggattacagtgtggagctgccacccaccgtgcgccgcttggaaggctttctgctctgcgagctgtgtgacgtgaaggccccatcgatgaatggcatgcgtcaacacttgtcagggaagaagcacgagaagaaggcgagtaccagctcatctgatgcctccgtcaacggctccatagccataggtggaaaggaagaagccgaagcacagccgatagacacaaatcacacggttgtcatctctgacgacatggcagcaaaggcgaaagcgctactggcgaataagtcgttgcaaccaaagcacggtgatgacattgggctgcaagaaacgactgtggcagcagcaaaggaacgcgtcgccactggggacgacagtactgcaactcctggaacggaaatgatgaaaggcagtgcaacttctgctggggctcaggtcaacaatgtctgtgattctgactcactggccatggaagtagacggtgtgttgcaccctctgcggcgggtggatggcttcctcgtctgcctgagctgcaatgcaaaggcaccatctgagatcgtcatgcggtctcacctgtctgggaagaagcacaagcgcaagatcacactcgctgctgccggaggaaacaatggcttgtgtgtccttgccaccgccggggctgatggggcccaagaaaacatcggctcaaagcctaccaaaggcaacgtggaggcagaatcggcggcggcacaagcaaaaaccgctgccaacgaagaagcagaatcagccccgtcgttggaagtgtcacaaacgaagaacactgcatccacggcatgcatcattgagccagctgaggatggcgagattgctaaggaagctgaagaagagcaggcagctgcaggcaccaatggtggtgtgatccaagccaaggaaaccgtgagagcagatgacgccacttcccctgtcaagtcaatcaaggcgtccaccgtgatgcagcaggagaatggcaggtcagcatgatcctgcatctctacaccagtacgcactggggcctcggacatggctgcagttgcaatggtggataaggatgtctcaggtgtgacaacgatgtccgtgtgataaaatctaatggtgaagaacttgaacgtagcgttgcatgaaaaacgattggttccgcctctgcctatttcttgtgtgatgtgtagggctacaatctagtcatgaatacttgatgctttgaacgacagtaccttctcgaaatcttaacctttaatttggtcactattttcttgcaaagtatatatgtgattcgaatggacattgctttttttttcatatctacaaaattacttaaatgtttcatctgttacccctgttagagaactgatttctagatgcggcggcggggatacccctgttaggtaaataattagctaacaaaaataagccagagtatgtttagaaacttaggcaatagatgtcttttttttctctttatataatctattagcaaagtcaaatgtctaacgggcagccgggctaacaattagtcaatttgtttgccgaatttgttagccgatctgtttggaggttaatgtgc

SEQ ID NO: 122578 - DNA, 435 bp, Zea Mays
cgaaaacgagaatggagtttctgtaccgcgccgtcgacgagcctcgaagccggtccccgccaccgccagcggcaccagttactcctggttccggatcgactgacggccacggaagcgacggtccggcggagtgcgtgggtaattctgccgtgacgctatggcagtccgatctgcccccaccggagacggcggaagccgacgcctacgaactgcggcggcaagcggagaaggcgaggatcagggagcggatcctcagggaggaagcggagcaattggagctcgagatggtggtgcgtagcgagttaagggagcaaatgctgcaactcttgtggcctacgctagggcggccgacgaggggatcagagacgaaggtggtgctgtcaccgggaacgattaccgccgccaattcgtcgccgccgattctcgcgcttgagg

SEQ ID NO: 122579 - DNA, 1773 bp, Zea Mays
ctctgttctctggtgcgtgctctccgtgcctctcctgtctggctgtctcctctggaggttgagagagaaggcacacgcggcttccaagaatgcccgatgaggcgaggccaagcaagacctcttctcgctcagacacgggagatgtgcggaagcaagtcggagagggacagcggcccactactccccaatccacgcaccattaccaccggcctcctgtcgtccaccactgctgataggatgatgggtagagagagataaggggtgggggatacagtccagagtcgttgggggcggtggcgtttcttgccgggcatgcgtgcttcctcaatctcgccccgtccgccccggactcctattgccaccaatcgttgggcctttttgggttttcgacctcacctcacccatgggtcagaggagctctccgcctctccccttcacacggccgcccacggcaggagagagaaagcggggacgagcaacagcaggccagggcaggcaggcgcaagaaacttcccccacctccacctcctcctcgccttccgcctttatttcttctcgtctccttcctcggtcctatctcctctcctgctccgccttttcctcatcggtccctcctcccctatcctctgctcctcatcccctgcgctccgtttcttcggggtttgaggcgagtgatctaggccatggcggccaccaagaaaaccaagatcgtcttggcccagccggcggttggggctccgacgtcgcggctgccgttcttttctcgcgcgcccggcccggtccgaggcgccggggacgaggcggcgcacagggcgagcctcaggtaccggtccctcctccaggactaccaggagctcatcaaggaaacccaagcaaagaaggagaggctgtacatggagaggctcaggaagaagaggcttttggctgaagtcaaattcttgcgtaagagataccaatctatggctaagaacccctctcagacaattgcttgtagagtgaagaatccagcactgtcgtctgcatcctggagggctgcttcggtaagtgacgcccagcaccagttggttcgtgctgtcgggagctccagtagaaaccagctggtgcagccaaggcgcggtggttctccaagggtgtatccggcgattgacctcaatgaggcctgtgagccgggttatgagatggaaatcgtcgaagagcgccatggcaacagggcccctcttggcatcaacaagtcaaagaggtatccaatggaaagtgatgctgctgccggcaacaactcaaagaggtatcctatggagatgggaagtgatgttgttgccggcccaacccaggggaggatgcctgtgttctgggatgtccagaacccagcagggcgatctgggaagaggaagatctcatgtcaggatcaacgttagtccttagagtataggtaaacgacaatgttagctctggtacagcagtagtgccctagtaggatcagtatgtgccgttgctagcctggtagatgtaaagggatggctgggacaatcttgacggttatctgctcatgtttattgatgatgaaaacatatgctgttgcatgatgaagtaggtgggcatgtgtgtctgtcattgttttaaagactaccgacccaaaaaaatcctaggcgcggctaggcgtcgccttaccgctttaagaagcatggtgtctgtgatccatcaccaaaatcttgtggttagtactggtatggagggctattgattaatgagagatgtatacgctttcaagcaagt

SEQ ID NO: 122580 - DNA, 2227 bp, Zea Mays
gcaggcagataaaaagtcaaacctcctccttaatagaagaaataattcatacatattacatacgacaagcgcgaggagacaaggtaagcatttgggtcctccactccgtctccgagatgggtatcgctctcctcgcgctgctgctggtgctgccggcgagccatgcgcgggtgtgcccgccgtgcgggtcgacggccgtgccgtacccgctcagcacaggcgacggctgcggcgacccggcgtacaaggtccggtgcgccgccgccaccaactcgtcgacgtcgtcgccgacgctcatgttcgatgcgctgaacggcacgtcgtaccggatcacgtccatctcggccgcgacgcagcggctggtggtcgcgccggcgccgttggtggcgcagggcagcaggtgcgtgtcggaggggcgcggcggcggggtgcagctgaacgcgtcgctgccgttcaacgtgagctcgtccaacaccatcatgctgctcaactgcaccagcgcgctgctgctgtcgccgctcaactgctcctccaactcgctctgccacgtctacgccaacgccacggggtccacggcggcggcttgcgcgccgctgccgctctgctgcaccttcgtggcggggggctcgtccacgtcctacagcatccgggtgtccccgcagttctgcagcgcgtaccgcagcttcgtggggctcgacccggcggcgcagccgccggccacgtggggccgccgcctcgggctggagctgcagtgggccacgcccagggagccgctctgccgcacgcaggccgactgcgaggacggcgccaacgccacctgcgccgacgacccgctcacgcccgcggcccgccgctgcttctgcgtgcccgggctctcgtggagccccctcgccggcgcgtgccagctgaatccctctgattgccagatcgctgggggctgcggaggatccaaccatgcgcctctcattgcagggctggtgtgcggcctcggcggcgcgttgctgctcgccgcagcggggctgctggcgtaccggcggcagcggcgcgtccggctcgcccgggagaggctggccaaggagcgggaggagatcctgaacgccaacaacgcgagcgggcgcaccgccaggaacttctccggccgcgagctgaagcgcgccacgggcaacttctcccgcgacaacctcctgggcgccggcggctacggcgaggtctacaggggcgtgctcggcgacggcacggtggtggccgtcaagtgcgccaagctgggcaacaccaagtccacggaccaggtcctgaacgaggtgcgcgtgctgtcgcaggtgaaccaccgcagcctggtccgcctgctcggctgctgcgtcgacctggaccagccgctcatggtgtacgagttcgtccccaacggcactctcgccgaccaccttcacggcgccacgagcctgagccgcccgcccacgctcgggtggcgccagcgcctggccatcgcgcgccagacggcggagggcgtcgcgtacctccactccgcggccgtgccgcccatctaccaccgcgacatcaagtccagcaacatcctgctggacgcccgcctggacgccaaggtctccgacttcgggctgtcccggctggcggagcccgggctgagccacgtgtccacctgcgcccagggcaccctgggttacctggacccggagtactaccgcaactaccagctcacggacaagagcgacgtctacagcttcggcgtcgtgctgctcgagctgctcacgtccaagcgcgccatcgacttcgcccgcggcgccgacgacgtcaacctcgccgtgcacgtgcagcgggcggcggacgaggagaggctcatggacgtcgtcgacccggccatcaaggacggcgccacgcagctccagctcgacaccatgaaggcgctcgggttcctagcgctcgggtgcctcgaggagcgccggcagaaccggccgtccatgaaggaggttgcagaggagatcgagtacatcatcaacatcgaggccgccggccatcctatcgagcagcagcgaacttgcctagactccagcgagtgatatgaacttgtctagaacgtatgaatatcttcggaaatcaagatactcctattttgtaatactcttctgataccagagttgttgaaatagtcaataattactatatacgcaacagatgtgtcatcatgatatgatttacgcttgagaaagttcgg

SEQ ID NO: 122581 - DNA, 744 bp, Zea Mays
gcaaaagtgttagtagatggcacatttgtatcaattgatagggccatgtattggaatgatttttttaattatgttaatttcaattcacaacttaaaatgttgacattatacttatttgggtaaagagttatctgtactgtgatgtgtgtacatattctttgttgcttggaaaaagtttcagattatgtaacatgacaaacaaccctctcctagcttccatcaatcactgtttcactgcaatcatactctttctacaaagtgtcttctgacctagttagagatatgtctttttttttgtcatgtatgtactgtaggcctgtagcttgttttcctttctggacatttctgacctatggctatgttctgtttgcatgcagaaaaaatgggcgcttaccagattacatgcctgattcatcggctaggataaaggaaggtagaagttcctggtgatgaagataaacttatgtacattgctgtggtgatgaagatgaatttatctgcattgctgtgttgttctacatgtaacagggaatggagcaaagctgcataggcttgcttaattccccagttctgggagcaattggcctcgaatcttgagtgcaatttatctgagtttctttccggaaagaattttgacattctatttgctagtggaactggagcagcaatatatgatttatgtgctacagtaccccatataatgagtgctatctatctatatattcgaatgacaacaagatctat

SEQ ID NO: 122582 - DNA, 1118 bp, Zea Mays
aaccgatttggtgaacctccagagcctagagatgcatgcgaattgatcccaaatctgaaataagagaacctttattactgttcactcagaggacccaccaccctgaattcctcgccgccgtcttcgtccaccagaaccatggcctccgacaccgcctcggcagttccgtcgtctgtggtctcagctgccgaggagacgctcggatataccgaatccgtaggggaccatctctcccatctgctcgcggcggcggcggcggaccccgacgccgtggccgagctcccaccccttctccgggcgcgcgctttccttgccttggcgcaggccgcgacctcccttctcggagttcgtttaaggtgttcgggagttgaccctgacgagcaccccatcagaaaggagtttgaaaggttaagcctaatgcaggagaagttaaatcaatttgagaactgggacaaagcaccacttcgcccttctactacactaaatacacaagcagcagcaaggttcattggacactcactttcccatctgacatccgatcagaagaggagcatgcatgaaataagtagaggagaaaggcggagttggtctgggcagaagagaaagcctgaaccttcagtagaaaagaagtctgttcgtgctgctgcagaagagttccttgcaaaggcttctcaggaacttattggacatagtgatagcagggtcaagggtcctgttatactcatttctgatgaagatgaggactagatcaaaaaaatgggcgcttaccagattacatgcctgattcatcggctaggataaaggaaggtagaagttcctggtgatgaagataaacttatgtacattgctgtggtgatgaagatgaatttatctgcattgctgtgttgttctacatgtaacagggaatggagcaaagctgcataggcttgcttaattccccagttctgggagcaattggcctcgaatcttgagtgcaatttatctgagtttctttccggaaagaattttgacattctatttgctagtggaactggagcagcaatatatgatttatgtgctacagtaccccatataatgagtgctatctatctatatattcgaatgacaacaagatctat

SEQ ID NO: 122583 - DNA, 738 bp, Zea Mays
agaacctttattactgttcactcagaggacccaccaccctgaattcctcgccgccgtcttcgtccaccagaaccatggcctccgacaccgcctcggcagttccgtcgtctgtggtctcagctgccgaggagacgctcggatataccgaatccgtaggggaccatctctcccatctgctcgcggcggcggcggcggaccccgacgccgtggccgagctcccaccccttctccgggcgcgcgctttccttgccttggcgcaggccgcgacctcccttctcggagttcgtttaaggtgttcgggagttgaccctgacgagcaccccatcagaaaggagtttgaaaggttaagcctaatgcaggagaagttaaatcaatttgagaactgggacaaagcaccacttcgcccttctactacactaaatacacaagcagcagcaaggttcattggacactcactttcccatctgacatccgatcagaagaggagcatgcatgaaataagtagaggagaaaggcggagttggtctgggcagaagagaaagcctgaaccttcagtagaaaagaagtctgttcgtgctgctgcagaagagttccttgcaaaggcttctcaggaacttattggacatagtgatagcagggtcaagggtcctgttatactcatttctgatgaagatgaggactagatcagtatgttgttttttgtcaatttgtgaaataatcaaatatttatactgctga

SEQ ID NO: 122584 - DNA, 488 bp, Zea Mays
aaccgatttggtgaacctccagagcctagagatgcatgcgaattgatcccaaatctgaaataagagaacctttattactgttcactcagaggacccaccaccctgaattcctcgccgccgtcttcgtccaccagaaccatggcctccgacaccgcctcggcagttccgtcgtctgtggtctcagctgccgaggagacgctcggatataccgaatccgtaggggaccatctctcccatctgctcgcggcggcggcggcggaccccgacgccgtggccgagctcccaccccttctccgggcgcgcgctttccttgccttggcgcaggccgcgacctcccttctcggagttcgtttaaggtgttcgggagttgaccctgacgagcaccccatcagaaaggagtttgtaagctcctcttagctctaaatcctggatctttcagtgtatctttcagatgcccttggagtaggggattgttttgatgttattaa

SEQ ID NO: 122585 - DNA, 736 bp, Zea Mays
tttttttctgggtgttgaaggctgagacaaaaatatccaaatcaaaattagctcttattcccctaatggatcaaagatccaggccagaagctcatctccagaataattcagcaaccatactgaaaatacatagtactacgcaccatatattccgttcatattgatccaaattgataattctgattagtttcgagaaaacatctatccacggaagcattaataacgactgtcggcagaaacacgccggggcaaatccctagaaaaaaatcgctaaaataaaattaggcgaatagcaaacattgaacgactgattggagaggtacgcgatggtttggattccagcgaccggcgctcacatcaaagaggggatcccgcaggccgaaacgtaacggacaagcaaaaccatccaatccctatccgaaccagccgaaaggcgaagatgactggaagggaacatagaaccccgttcggatatccactccatgccagaggcgtcaagcgtagggaggggatgcgggtgcctgccaacggggaaggaatggaggaaagagacgccgtttgcggcggagggaaggatgcatacctggatctggaacgggacgtcgcctgccgggcgcggagggcggtggggaggcactgcgaggcggggggcggagtggatgcggcggcccttggaaagggagagaagagaggcgtggccccggtgaaccgtccgaatattggcgacgggcaatga

SEQ ID NO: 122586 - DNA, 419 bp, Zea Mays
atgccagcacccatcaaaatcccatccgggtccctaaaactccatccgatggatactacgcggagtgcagaggatagtgatgtgcagagtctggaccccgacacccgcgaccgaagttgggagagaagagcgcggggaagaaagagtcgagcagaggggcacggttatggcgccgggataacgccccaaccgaacgacgaaagcttcctccgtccggccgctcccggtggcgacagcagcgttgcccatgctgcggcgcggcaccatgacagggctgtttctggcgctcaaggctccatgggagagggtgtcagcctcagggctgggagtggcggtaagggagatgagggcttctggaagatggagggtggggtttggaggtccctgcctttatcgccccatgcccaaacccggttata

SEQ ID NO: 122587 - DNA, 707 bp, Zea Mays
ggatccgcgccactggctgccgacgtttcttccacgccgtcgctgccgagttcccatcttccccctcaggtacgagttcccatcttccacgccgccgagtactctttggaaatggaggcgccagcaggtggactcggcagcaggtggcctccacgctgccgagttcccatcttccctcacgcggatggaggcgcctccagcaggcaccaatgcagttgaagctccttctgaagtgtagagattaaatagagtttggaatggtcttttagacgtcattagacacatgcaagtctcagctgatgagttgaggaggttgaccagacgcaatcatgtacctgagtatgtagagtacctgcacaaaaatagcctagttaatgccatgagtgttgtcactgaaattgcacaaggtctagaccatgtgagcacagatctggaggaagttcttattggtctgtaacctcttcttgaagattatgaagcccttggtttgtacaatgatcgtcgtctaccgcatatgaacgagcgtatatgagatatttgtttgcgagagagtctgtaccactaatgcatgtatcttatgaattgtactgcctttctgtcaagtctgtatcttatgaagccttagttagttgccattttgttcctgctacttgtatgaattgagttatgaaaatgaagagttgtgttatgagttgttttttgtgatc

SEQ ID NO: 122588 - DNA, 1304 bp, Zea Mays
ctggatccgcgccactggctgccgacgtttcttccacgccgtcgctgccgagttcccatcttccccctcaggtacgagttcccatcttccacgccgccgagtactctttggaaatggaggcgccagcaggtggactcggcagcaggtggcctccacgctgccgagttcccatcttccctcacgcggatggaggcgcctccagcaggcaccaatgcagttgaagctccttctgaagtgagtcaaaagtgttccttcctccttccgaagtttagagatcacacaagcgaggtataatcgtagatttcttgcattaatactctgagatagtatgcaaggtggaattggtgttggttgatgatctagtatgcaagaaaaccctaaaccctaaatgagttcaggtggaattggtgatggttgataaactgtgagataggatattttcggtggaattggtgatggacttcttgccttcaggagtattaaattagtttaatgtgtggtaattcagcacctgttatgcgatacatgtagaactcaaataaaagttgggagtaggggttcacttattgcatttttctgtcactatttcggtgactatttgagtttatagaactatactatttgagtttacattaatatactttatagaatctatgacaaaacgcaagcagaagacattgttgggagtatcgacatgagcaacattgtttatggcactagcagaatacgaccgcgtcattgattatccagcttacatgatccgatatgttttagcgtcaggagcattatagatttggattggcaatactgatgtgtgatagaatctcattcttctatttgtattgtaggtgtagagattaaatagagtttggaatggtcttttagacgtcattagacacatgcaagtctcagctgatgagttgaggaggttgaccagacgcaatcatgtacctgagtatgtagagtacctgcacaaaaatagcctagttaatgccatgagtgttgtcactgaaattgcacaaggtctagaccatgtgagcacagatctggaggaagttcttattggtctgtaacctcttcttgaagattatgaagcccttggtttgtacaatgatcgtcgtctaccgcatatgaacgagcgtatatgagatatttgtttgcgagagagtctgtaccactaatgcatgtatcttatgaattgtactgcctttctgtcaagtctgtatcttatgaagccttagttagttgccattttgttcctgctacttgtatgaattgagttatgaaaatgaagagttgtgtta

SEQ ID NO: 122589 - DNA, 222 bp, Zea Mays
atcgcagcggcgaggtcacagggggcctctggctcttgcgggagcaggagagggctgaccttggatcgcttgcccttcttcctggtgtatactatcccaaacctcctgatgccgtcctcgtcctcggggacaacctcagcggtggggtgcctccggcggcgccgttttcttctgtacacgataccgaaggacttcgtcagaggtggcaatcccggtttggga

SEQ ID NO: 122590 - DNA, 208 bp, Zea Mays
atgcattttttttaccttttcctttcatcatttctacatatcagatcccataagatacagaacctagctagctactttaatttatacaaggaattacagttttcagttcaagcattccacctcaaaattggcttgacaaagttgacaacccgaggggagggcgaaaaaatagccccacagcttgtcgaaaagccaacatcatgggcaa

SEQ ID NO: 122591 - DNA, 960 bp, Zea Mays
atgaaagcattctggcgtaacgccgcgttgctcgcggtttctctgcttcccttctcttctgccaacgccttagcgttgcaggcaaaacagtatggcgattttgatcgctatgtcctggccctctcctggcaaaccggattttgccagagtcaacacgatcgaaatcgtaacgaacgagatgaatgtcgcctgcaaaccgaaacgaccaacaaagctgattttctgaccgtacatggtctgtggccaggattgcctaaatcggttgctgcccgtggtgttgatgaacgccactggatgcgcttcggttgcgctactcgcccaatcccgaatctaccagaagcgcgcgccagccgaatgtgttcatcgccggaaaccggattatcactggaaacggccgctaaactaagtgaagtcatgccaggagctggcggacgttcctgcctggaacgctacgaatatgccaaacacggtgcctgctttggttttgatccggacgcatacttcggtacgatggtacgcctgaatcaagaaattaaagagagcgaagccggaaaattccttgcggataattacggtaaaacagtgagccgccgtgactttgacgccgcctttgccaaaagctggggaaaagagaacgtgaaagcagttaagctaacgtgccagggtaaccctgcgtatttgactgaaattcagatctcgatcaaagctgacgccatcaacgctccgctttctgcaaactcattcttgccacaacctcacccagcagttggcatccaagagcaattacacatcttgaagctagcccagaaaaggtttctgcaatctgcaactacccatgacaacagagtaaaacttccaacggtgaagccaaggacttacagaggggttctgaggatctatgtcgaaggagttgatggcacaagattcagcaagcaattcaaggggtctcttatctgctaa

SEQ ID NO: 122592 - DNA, 471 bp, Zea Mays
atgtggctgtgcctgatctgctctgctcttctctgtgatgaactcatggtcatgaccttgctgtattttggttgtgagggaacggtgcgcgccaccatcttgacgggcgacggaaccggtgctccgaccctactgcttacgccattaacgagccgcgtcaagctcagagatgttggtgaagagaatctatctcagttcattaacaatgatctgaggattgttccaagtgaagaaaatgctccatctcagtccattaacaatgatctgagcagtgttgcccctacccctacccctattgaccttgaagagggtgctgctgctaccgacaatggttctgcccccacttctgatgctgatggtaagaagcgcaaaagaatttgcacatctaaagtgtggcaggacttcgaaccactttacagaaccgtagatggtaagaagatcaggtatggtgggcaagcagtcaatgcttaa

SEQ ID NO: 122593 - DNA, 948 bp, Zea Mays
ctttaatgtgttcattttatttgtcgattttttttcttctgtcgtgatgggcggggtgtttgtttcacgcgcacggcgcaccatactcgacgtaacgaggcatcgacactgacagagtccacggcacggcttgtttaccaccaaccatccggcccttccccgaccatggcggcggcaccccctcgctggtggccgctcctcctgcagctcgcaatcgcccttggcatcctgctcgcggcggccgaggcttggacgggggagatccgcggccgcgtcgtctgcgacgtctgcggcgacgcagccatcggcccggaggaccacgccctcgaaggtgcggaggttgctgtcctctgcatcacaaaatctggtgaggttatcaactatcaagccttcacaaactccaagggcgtgtatactgtcgccgagactatgccggagagcgacaggtgggactcgtgcttggcgaggcctatgagcagcttccatctacattgcacacggcggggtgatgctcactctggggtgaagttcacttacaacaaatcgtctgggaacccgcacaccgtcaagcctttcctctacaagccggccaccgtccctctgtattgtagttaaacaacacatcttgctggaacgcagaagatagaacatacaggaagaaaatatgtattcgtgccccgactccatatgaccatatataagtaaacactgtttgatgtaaatcaaagattcagctgtctatgggagctgttctagtgtctggtcacccatacctgcgaggaaacagatgttgcgtgcttaatgttgataatatcagtgtttttcacctgctgtaaatgttttgcgaatgctattattatcttggttatgatgatattgtttttttctattctaagtttgtaaggactggtttgataacaaggaaattggaggagatgcatagaaagg

SEQ ID NO: 122594 - DNA, 2593 bp, Zea Mays
ttctagcgacccgaacctgtacaaattcttgtgcaagttcgacgtgctcccgcacgtaccatcgagtcgcattcaacgacaccgttctactcaaaagcagcacggggttgcgcagtcgggtcataaacaccgatagtatccaagtataagaacagacagtcattgtcgatatgtcgtgcgaaggatagtcgtggtcgatggaagctatcgaggtcgttgaaaagttggagtcccccaattcacgcgtgctaggggcgtcgtggtgatactggtgcacatgagaggcatagatgaagatggtgacacaatcaaggcagtcgatgaagaaggtcgatgtcgaagtcgatattgtcgaaccatcatggccgaggcgttgaagcatcaaagttcttggagttacaacggcgagagcgccgcaatgacatacacaatatgttgtaaatttataggaataagtgacatgctttctacatatttaaatagattaaatatactaattccgaataaaacaagcatataactcagataaatgccatatgtaagtataacagcaatgaacagtagcaattccaggacatgaaaacatgtaatatagctactcaaatccatttgcaaattaaacatggcaggtagatgaataaggcggattaaacaaataaacatgattgtttatattaaaatattgctctcaaaatagcgggttgctgcaatagacagccctccaacgctaaagggtgatcaaagatcctcgactaacgtgacagtcctatcttaccaaatcagggttttagatcaaatattatgagcctagaaatcaagcatgaatattaagatcaaaacagtgtgcataagaattaaggaacaataatgaacttaaataatcagcttgcacaatagtaagaaataactaggcacaaataatatcaatgctgaaaataacaacacactaaaacccagactgtcacgtcgtctcactacaccgctatcatcatcgagcacataatccgcccacaaattgtgcaatcacacccaagtaaataatactagcagatagcacaaaattattcaataaataaatagaggcaacgggtaactcacagcacgtagattgtctacgtgggaagaccagctcagcgaacacgaggttctgtcccagaaaaccaattccgccgcccacgtccggacctgcacggcgggaggttgacggagatactggagccgctgccggagccgagggagacgtcctcggcaccggcccgagaagaggaacaccgcgcatcagggagcccaagcaccaggccacggtggacaacaatcagagccgacagagcactacacaggagcgctggtaatgcaactgagcgcacacagaccaagctgcacgagcgcagggatcacctctaccctcttccaatcaccaccagcgagaatcacaacagaagatcgaacaaatcgatcgagattcgattggagcagtgaactgggagagaaggctgatacgagcgtatgctgagagagatgattaacggccaggggatcaaactcccatttaaggagctgagaggggagaaggcaaacggatttcaccgagattccggacgaacgagccgcgcggatcgtaatccattgaacgccgccgccacccagacgctcggccttctccgaatcgcctccgctcgtgccttgcgcacgctcgatgccctactccttctaccagcctgctctcagccgttcgatacatgcgcatgcacgtgatggggatcggccagccggctgggctgctcggcagcggcctgccagcggcccagctctgctggcctttttcatttttttttaatttcccaatatgaaaataaaagggaaaatctctcataaatgaacagcaatccccaccattttcactcttattttctgatcaatgtcaatgagctcccgtactgtttatatactacttttcggcagaggtacttgttaggtttgaaccaaagcctatcccagtgtgttccaaccctgcacgagtaagcggaggactacgccttgatccacaaaccctagtgtgagaatcttcgcacaaaaggcacatagtactaggcagattatctgcttctcttacggggcagggcgttacggtcatgccctttagtatctattcatgagctcactagagagaaaaccccattctctcctggactgcgaccccacagtcaactcatataggtgaaatcattaaggaaattctataggacaatttccctgcttatagcattgacttcattaagagcatatcgctcaacctgccatacagacagagcacagcagctcatgagactctttatcttttgtgctcttggtttcacagtgcttcgtttcctggagcctggatctcgggatctccggtcacacaggacaattatccgcagttgaaaccgctaacagggtacgagtcccattcccatgcacgttgcttggactggcttttgagccagccctttggtgaaaggatcagcaaggttcctttcagacttgatgtaatctacggttattacacccgtctctctagcatgccgacatgaatcaagtcgtcttctgatat

SEQ ID NO: 122595 - DNA, 1083 bp, Zea Mays
gaggaatgataatattggtggccgacaagtgggggccgtgcactctctcctacgactcccacttcctctaccagcctagggcctaggctaccaccccagtgcgaaggaagtcagagctctccgcctccgccggcggggctcgatactgatgggtgtcttcgggacctcgcgtcctgcctccgtcaccctctgcgccttcctcacattcctcaacctcttcgccttccttctcgccgtcggcgccgagcgccgccgcagcaccgggaaggtggtgccggacgagtacgacgagcggtcctactgcctctacgacaccgacgcctccacagtctacggcgtttccgctttcttcgtgctgctgctccagcaggccattgtcaccgccgccacgcgttgcctttgcttcggccccgtgctctcctcccgcggctgcgccgtcaccgcattcgtcctctcctgggcaacgtttctcatcgcagaagcctgcctcataggaggatcggtgaggaacgcaaagcacaccaagtatctaggctactacacgaagcacgacctggtgtcgtgcgccaccctccgcaagggagtctttgcggccgccgctgcgatgatgctcgtcaacctcttggcgtcccttgtgtgctgctggagctactcgaaagccgcgacgggcgggttcatgaagcaccagaatgaggtcggcgtgggcatgacggattacggccttgacaggggcgtttctgggccctgagtgagttgggtggaaccttgttggcgtctgtgctgcagtaggcgtctcacctgtggtgtaatattatggtcgaaatgtatgtgagtgaagttccgttctttctctacggtcggtgcgaatggtataccagaactgtgctctggaatgtgctagtcagtgatgatgttgtatggttcgtgattttatatctgtgaaaaaatgtggaagcattagctgtatttgctgctgtgctgtgcacgacaccggcacggcttcctgttcctgctcacggtggttgttgtaaagcagcagaaatatcagaaagcgggacttcaatgttcttcgctgtcattaaa

SEQ ID NO: 122596 - DNA, 1512 bp, Zea Mays
gccggcagtggcactcgcagactcgcttctccccgaaaaacggctgaaccctgaaccctcactacgtcccgccgcctgcttcacagttcaccccggccatggtctccaccgctcgcgccgccctcccgacgccccacctctctctcgcttcctcctcccgccgcaggccccatctgtttttcacgccctcctccgcacctcgcctgcgcggcggcgctgccacctccatcaccgccggcagctccgcctcgccgcagcagcaccaggtcaccacgcgcctgggcgacgtgatagaggcgcagcagttcgatcgggactcgcttaacgagatctttgaggtggcgcgggagatggaggccgtggagcggagctcccacggcgctcccagtcgcgtcctcgaggggtacctcatggccactctcttctacgagccctccacgcgcacgcgcctctccttcgaggccgctatgcggaggctcggcggggaggtgctcaccaccgagaacgcgcgcgagttctcttccgccgccaagggggagacactcgaagataccataagaaccgttgagggttattctgatattattgttctgagacattttgaaagtggagctgcaaggagagcagcatatactgcgaatattcctgttattaatgcaggtgatgggccagggcaacatccaacccaggctttgttggatgtttatacaataaagagagaaattggcacactagatggaataaaacttggtttggttggtgaccttgctaatgggaggacagttcgttctctggcttacttgattgctaagtaccagaacattaagatatactttgtatctccagatgttgttaaaatgaaggatgatatcaaggactacttaaattcccaaggtgttgaatgggaagaatgttcagatttgttggaggtggcatccaagtgtgatgttatttatcaaacacgtattcaaaaagaaagatttggtgagaggattgatctttataaagctgctcgtggtaagtacattgtggataagaaggtcttagatgtgctgccaaagcatgctgtgatcatgcatccccttccaaggcttgatgagatcacggcagaagtcgatagtgatccaagagctgcatattttaggcaggctaagaatggcctctacataaggatggcattgctcaaacttctgcttgttggtcactgacatatctgctagtgtgtgagcttgtgctgcgtcaagggatgaggaaatgtactaataatcagcagctcctgtcaaaattcaacgttcctgcgctgtcagggtaataaaagtctggatccatgctggagtgcagcaaagtttggcatggccatgttaatgtacaaatggtgttcgaaatagagttttgctgttctcatgtgatgtgagaacatggaacgtcattgatttgcttgcacaaattcatttgccggcttcagttgatgattatctgatacatttttagcaagcatggtcgttggtggag

SEQ ID NO: 122597 - DNA, 1217 bp, Zea Mays
aaccccaccccaccaccgttacaatcccacacagcccaatactactagccacaagacagcagcagcagcagcagcgcgcggacccgacctgacctgactgacctcctcccacgcccggacggcggaaggccgcagcagccaagccatggcggtggacctgatgtcctgcggcggcggcggggcgtacgagcacctggcgttccaggaggcggccgcggcggggctgcgcagcctggagctgctggcttcctcgctctccccgtgcgccgcggggcgggctgagtcgccgccgctggggcagatcgccgaccaggccgtgtcccgcttccgccgcgtcatcaacctgctggaccgcacgggccacgcccgcttccgccgcgcgcccgccgccgcggcgaagcctatagggatgacggagacggaggcggcgctccctcccgcgtcgggccgacaggcggtggcggtggagccggcgcagaagacggagccggcgcagaagacggccctgacgctggacttcgccaagccggccccggccccggccgtgtccgcgacgtcgacctcgttcctgtcgtcggtgactgcgggcggcgaggcgtccaaggggtgcagccttgccgccgtgtcctccggcaagcctcccctcccgaagcgcaagctgccgccgtgcgccgccgccgtcccccaccaccaccagcaccaggcgcaccacccccaccccgccgagcggtgccactgctcctccaagaagaagcgcgcccggcatgggatgctgtcgaggcgcaccgtgcgcgtgcccgcggccgcggccgcggcggggtcgcagccgccccacccccacgcgcccgcgtcgtcggacatccccgccgacgactactcgtggcgcaagtacgggcagaagcccatcaaggggtccccctacccgcgcggctactaccgctgcagcagcgccaagggctgccccgcgcgcaagcacgtggagcgcgccgccgacgacccggccacgctcgtcgtcacctacgagggcgaccaccgccacgacgccgccgccggccacgcgccgtgaacatccttttttcccccacactcattagcagcggtagtcgatcagtgctagtggtccgcttgttcgatttgttctttctttggattagttgtagatctcaagctttgcttctgtaaatgaagaaatcaaaaggcttcgaatttctctcggc

SEQ ID NO: 122598 - DNA, 1098 bp, Zea Mays
gcagccacaacacatcccacaaccattattcttgttcaactgcatcaggtcgtccaactcaccaagcggcaagcgccatgccttcttccgcgcaggttctgctctgcctcgccgccgtgctcgcggcggcggcggccaccaccgccgaggcgcactcgcagtgcctggacaacccgccagaccggtccatccacggccgccagctggccgaggccggcgaggtcgtccacgacctccctggtggcctcagggcctacgtcagcggcgccgcgagctcgagccgcgccgtcgtcctcgcctccgacgtcttcgggtacgaggcgccattgctcagacagatagcagacaaggttgcaaaggcagggtacttcgtcgtcgtgcccgatttcttgaagggagactacttagacgacaagaaaaacttcacggaatggctcgaggctcactctccggtgaaagctgcggaagacgctaagccactgttcgccgctttgaagaaggaagggaagtccgtcgcggtgggaggctactgctggggagggaagctgagcgtggaggtggggaagaccagcgacgtcaaagctgtgtgcctttcgcacccgtacagcgtcactgccgacgacatgaaagaggtgaaatggccgatcgagatcctgggggcccagaacgacacgaccacgccgccgaaagaagtgtaccggttcgtgcatgtgctacgtgaaagacacgaggttccctactacgccaagatcttccagggagtcgagcacgggttcgcctgcaggtacaacaccaccgaccctttcgccgtcaagaccgcagagacggccctcgcctacatggtcagctggttcaacaagcacctcaactgaatcaagcctgcactgcacccaccagactgaattcaataaaccacagcagtgctgtgatattttgtttggattcatggctccccagattgatttgtcatggctaagacctctactactgtaatttccctcattttttgtctcttcaaactctctgtattctttttttttgcttttttatgaccgcaataaagttcagtaggggtatacccctcatgtttgcttcaaa

SEQ ID NO: 122599 - DNA, 1229 bp, Zea Mays
gcagccacaacacatcccacaaccattattcttgttcaactgcatcaggtcgtccaactcaccaagcggcaagcgccatgccttcttccgcgcaggttctgctctgcctcgccgccgtgctcgcggcggcggcggccaccaccgccgaggcgcactcgcagtgcctggacaacccgccagaccggtccatccacggccgccagctggccgaggccggcgaggtcgtccacgacctccctggtggcctcagggcctacgtcagcggcgccgcgagctcgagccgcgccgtcgtcctcgcctccgacgtcttcgggtacgaggcgccattgctcagacagatagcagacaaggttgcaaaggcagggtacttcgtcgtcgtgcccgatttcttgaagggagactacttagacgacaagaaaaacttcacggaatggctcgaggctcactctccggtgaaagctgcggaagacgctaagccactgttcgccgctttgaagaaggaagggaagtccgtcgcggtgggaggctactgctggggaggtatgtgacatccacgccaactgaaacgaacactccattcagttcaggcaacccgcatagagcgttctgtttctcacatccggccgaccttgttgctgctgcttcctcttcgctggcatggcacttggcagggaagctgagcgtggaggtggggaagaccagcgacgtcaaagctgtgtgcctttcgcacccgtacagcgtcactgccgacgacatgaaagaggtgaaatggccgatcgagatcctgggggcccagaacgacacgaccacgccgccgaaagaagtgtaccggttcgtgcatgtgctacgtgaaagacacgaggttccctactacgccaagatcttccagggagtcgagcacgggttcgcctgcaggtacaacaccaccgaccctttcgccgtcaagaccgcagagacggccctcgcctacatggtcagctggttcaacaagcacctcaactgaatcaagcctgcactgcacccaccagactgaattcaataaaccacagcagtgctgtgatattttgtttggattcatggctccccagattgatttgtcatggctaagacctctactactgtaatttccctcattttttgtctcttcaaactctctgtattctttttttttgcttttttatgaccgcaataaagttcagtaggggtatacccctcatgtttgcttcaaa

SEQ ID NO: 122600 - DNA, 1241 bp, Zea Mays
gcagccacaacacatcccacaaccattattcttgttcaactgcatcaggtcgtccaactcaccaagcggcaagcgccatgccttcttccgcgcaggttctgctctgcctcgccgccgtgctcgcggcggcggcggccaccaccgccgaggcgcactcgcagtgcctggacaacccgccagaccggtccatccacggccgccagctggccgaggccggcgaggtcgtccacgacctccctggtggcctcagggcctacgtcagcggcgccgcgagctcgagccgcgccgtcgtcctcgcctccgacgtcttcgggtacgaggcgccattgctcaggtacgtagctgcctccgttcgattcctgctcctcctccttctccggcgtaccccagttttaggagacttgtaaaagacagggcatatatattccatccttgatttagctgaaatctatgtggttggcgtgttcaataacgcagacagatagcagacaaggttgcaaaggcagggtacttcgtcgtcgtgcccgatttcttgaagggagactacttagacgacaagaaaaacttcacggaatggctcgaggctcactctccggtgaaagctgcggaagacgctaagccactgttcgccgctttgaagaaggaagggaagtccgtcgcggtgggaggctactgctggggagggaagctgagcgtggaggtggggaagaccagcgacgtcaaagctgtgtgcctttcgcacccgtacagcgtcactgccgacgacatgaaagaggtgaaatggccgatcgagatcctgggggcccagaacgacacgaccacgccgccgaaagaagtgtaccggttcgtgcatgtgctacgtgaaagacacgaggttccctactacgccaagatcttccagggagtcgagcacgggttcgcctgcaggtacaacaccaccgaccctttcgccgtcaagaccgcagagacggccctcgcctacatggtcagctggttcaacaagcacctcaactgaatcaagcctgcactgcacccaccagactgaattcaataaaccacagcagtgctgtgatattttgtttggattcatggctccccagattgatttgtcatggctaagacctctactactgtaatttccctcattttttgtctcttcaaactctctgtattctttttttttgcttttttatgaccgcaataaagttcagtaggggtatacccctcatgtttgcttcaaa

SEQ ID NO: 122601 - DNA, 813 bp, Zea Mays
gcagccacaacacatcccacaaccattattcttgttcaactgcatcaggtcgtccaactcaccaagcggcaagcgccatgccttcttccgcgcaggttctgctctgcctcgccgccgtgctcgcggcggcggcggccaccaccgccgaggcgcactcgcagtgcctggacaacccgccagaccggtccatccacggccgccagctggccgaggccggcgaggtcgtccacgacctccctggtggcctcagggcctacgtcagcggcgccgcgagctcgagccgcgccgtcgtcctcgcctccgacgtcttcgggtacgaggcgccattgctcagacagatagcagacaaggttgcaaaggcagggtacttcgtcgtcgtgcccgatttcttgaagggagactacttagacgacaagaaaaacttcacggaatggctcgaggctcactctccggtgaaagctgcggaagacgctaagccactgttcgccgctttgaagaaggaagggaagtccgtcgcggtgggaggctactgctggggagggaagctgagcgtggaggtggggaagaccagcgacgtcaaagctgtgtgcctttcgcacccgtacagcgtcactgccgacgacatgaaaggtgcagtgcagtgcagtgtgctcctcctcttcttcatgctgcttcactagcctcaccgcatgtgttcattcgaaatcgaaacagaggtgaaatggccgatcgagatcctgggggcccagaacgacacgaccacgccgccgaaagaagtgtaccggttcgtgcatgtgctacgtgaaagacacg

SEQ ID NO: 122602 - DNA, 96 bp, Zea Mays
gctgtattgacaaagcgatcatacctgcgaaggacctctgctgtattgacaaagcgatcatacctgcgaaagacatcgttggaaaaatcatcaccc

SEQ ID NO: 122603 - DNA, 639 bp, Zea Mays
aaattttgcattcccacccctatcttttttcagccgccacttccttttccctgcctttttcttcctccagcgagcagcaagcgcagggagcagcagctttcccagcgccccctctctcccatggctgagcagcagctctgctcgccccctcccatggcacctccacctccctgcgtgctctctcctcgctccttggcgcagcagcaaattaccatggtgcctccctctgctgtccacgaagagcagccaagcgccccactgttgaagctccctggatggcgcccagaatttcagtagagagcttcttctccatggccagccgcccctctgttgctgccgagctccagctctggccagcagccatggcgccgaggattacctgcaggcgagcagctcggcccttcttccctacgcccagctattctccctgcgcagcacctccttcttctacctcttgccggcgcccagcagcagccatcaacgccagcagcacaacaccacgcctgctgtcccagccaccccatcgagttcccctttgcaacttccatggcgtagaggagaacagcagcccagccctccgatccaaaaaacggcagccctacgcagagcctcttcccttgctccttccgatgtgcgcag

SEQ ID NO: 122604 - DNA, 172 bp, Zea Mays
ttgctattgtcaggaatgtatttttctttctaggaagtttaccgatcgttgttatggtgctctgtttttagattccatggccaaaaataataaatgtgataaagttaattgtcatgctggatttgaatctctctctttgatggtattggttgtgatggtatttgttgtggca

SEQ ID NO: 122605 - DNA, 881 bp, Zea Mays
caaggttaccaactacaattttggtttcctttttttccctgttgccaataccactgttgccacaggatgtttttacttttcagtccgggagctattttatttggtttcatggataagcatccttgccagcattgtttacaaaaagaacattctactaccaaagctgcacaaaattagtggtttgagttctcgtgtactcttgaattgggtactatgtttgcttttttcattagtgacatggttgtgagtttttgccttattttgaatctaagtgtgttgctatttagcccctttgagcatgtagtgtgaatgtaaattaatttgtagtattctaatttggtttctgattaccattataatcttttcaggcaactttgccaaggttaccaactataaatttggtatcctttttttccctgttgccaataccactgttgctactggatgtttgaactttccatgagctattttattggtttcatgtgtaagcatccttgccaacattgttcagtaaaggaacattgtacttccaaatctgcacaaacttgtaactgtaatggtttgaattctcatgtacttttccatgcagcaccaacatcagtttctttttgcgtggcattgtgtaatctatttgttttttcattagtgacattttgaattcaaacgtgttgctattttacccctttgagaatgcagtgtgaacgtaaattaattttagtattctaatttagtttctgattaccattcactttggttaactttgtcaagcttacctatttactttggttaactttttcccctgttctgttgcctatatcatccattgcttgattttcgtatttaatgcaccgtcttttattataggcattctggcaactatt

SEQ ID NO: 122606 - DNA, 1464 bp, Zea Mays
actcgacttcccccacctccctcgtcagctgcagtgtcaatccctcctctccgccgcctacagctgcggggagctcgccagtcgccacttcgccagtcgccacttcgccagaatggttgcccacacggtggcttctcctcgctttgttcctcctaccggcgtggctgctgatctcggccgtttttgtgtaatttgtttggatcccgcagttccatcagtaccaggcagcgggtcgcgcgctgccagtccccgctgatgagcaccccaagatctaccgcatggagcttgcgctaccaacgaggtctgctccaaatccaagctctggtactatctgaggaagctcaagtctcaagaaggtttaagagcaacggtcagattctcgccatagacgagatctttgagtgtaaccctacaacaatcaagagctgtggcatctggctgtgttaccagtgcaggacaggttaccacgacctgcacaaggagtaccgtaataccaccctgaatggtgccatggagcagatgtacaatgagacggcttcctgtcatcgtgtggtcaccctacatacagatcatcaagacggcaacaatcaactttaagctttgcaagagggacaacgccaagcagttccacaattcaaagttcaagtttcctttggtttactgcaacaagtcaggccaccaaataggaagctgaagaccaccttcaaggctttaaggcccaacttgttcgtgttatccaacttgccctgacaccctcccaaatctgtgaggctgtcagtctggtggtttgctagttcagggtaatgcaatctacatgcaacctattgtttctaagttctagttggaggtccatgaaagggttcttagtgtgatggcaaaggcttccgagtagcaccctagtgacccgggtctggtgggttgctagttcagggtaactcaatctacatgcaacctattgtttctaagttctagttggaggtccacaaaagggctcttagtgtgatggccaaggcttccgagtagcaccctagtgacctgggttatgactcccagtgggagtggatttatgtggactgggtaaaaatatccctttgtctaaccatacgtcaaagcacgatttaaggcctgtcccatgctcacataggcaatgtggtcgtcgtgtaagggtgtgggaaagtaggtttaagggttcccttaggcaatgcttgggggcctatcccatcctcatttctttttgttctttaccgtctggtgccttataaattataatagcatgtacaaatctcatgtgctttaaacttacccaaaaaagagcagacctgttactggagggatctggacggggtataaacggaggcaatggtgacttagtgagacagctctcaccactgcattatgcctgctttaaaattcactcaaatgtcaaaactggtgtttgcttatggctatgttgctgcggtcttc

SEQ ID NO: 122607 - DNA, 1382 bp, Zea Mays
actcgacttcccccacctccctcgtcagctgcagtgtcaatccctcctctccgccgcctacagctgcggggagctcgccagtcgccacttcgccagtcgccacttcgccagaatggttgcccacacgttccatcagtaccaggcagcgggtcgcgcgctgccagtccccgctgatgagcaccccaagatctaccgcatggagcttgcgctaccaacgaggtctgctccaaatccaagctctggtactatctgaggaagctcaagtctcaagaaggtttaagagcaacggtcagattctcgccatagacgagatctttgagtgtaaccctacaacaatcaagagctgtggcatctggctgtgttaccagtgcaggacaggttaccacgacctgcacaaggagtaccgtaataccaccctgaatggtgccatggagcagatgtacaatgagacggcttcctgtcatcgtgtggtcaccctacatacagatcatcaagacggcaacaatcaactttaagctttgcaagagggacaacgccaagcagttccacaattcaaagttcaagtttcctttggtttactgcaacaagtcaggccaccaaataggaagctgaagaccaccttcaaggctttaaggcccaacttgttcgtgttatccaacttgccctgacaccctcccaaatctgtgaggctgtcagtctggtggtttgctagttcagggtaatgcaatctacatgcaacctattgtttctaagttctagttggaggtccatgaaagggttcttagtgtgatggcaaaggcttccgagtagcaccctagtgacccgggtctggtgggttgctagttcagggtaactcaatctacatgcaacctattgtttctaagttctagttggaggtccacaaaagggctcttagtgtgatggccaaggcttccgagtagcaccctagtgacctgggttatgactcccagtgggagtggatttatgtggactgggtaaaaatatccctttgtctaaccatacgtcaaagcacgatttaaggcctgtcccatgctcacataggcaatgtggtcgtcgtgtaagggtgtgggaaagtaggtttaagggttcccttaggcaatgcttgggggcctatcccatcctcatttctttttgttctttaccgtctggtgccttataaattataatagcatgtacaaatctcatgtgctttaaacttacccaaaaaagagcagacctgttactggagggatctggacggggtataaacggaggcaatggtgacttagtgagacagctctcaccactgcattatgcctgctttaaaattcactcaaatgtcaaaactggtgtttgcttatggctatgttgctgcggtcttc

SEQ ID NO: 122608 - DNA, 1370 bp, Zea Mays
actcgacttcccccacctccctcgtcagctgcagtgtcaatccctcctctccgccgcctacagctgcggggagctcgccagtcgccacttcgccagtcgccacttcgccagaatgttccatcagtaccaggcagcgggtcgcgcgctgccagtccccgctgatgagcaccccaagatctaccgcatggagcttgcgctaccaacgaggtctgctccaaatccaagctctggtactatctgaggaagctcaagtctcaagaaggtttaagagcaacggtcagattctcgccatagacgagatctttgagtgtaaccctacaacaatcaagagctgtggcatctggctgtgttaccagtgcaggacaggttaccacgacctgcacaaggagtaccgtaataccaccctgaatggtgccatggagcagatgtacaatgagacggcttcctgtcatcgtgtggtcaccctacatacagatcatcaagacggcaacaatcaactttaagctttgcaagagggacaacgccaagcagttccacaattcaaagttcaagtttcctttggtttactgcaacaagtcaggccaccaaataggaagctgaagaccaccttcaaggctttaaggcccaacttgttcgtgttatccaacttgccctgacaccctcccaaatctgtgaggctgtcagtctggtggtttgctagttcagggtaatgcaatctacatgcaacctattgtttctaagttctagttggaggtccatgaaagggttcttagtgtgatggcaaaggcttccgagtagcaccctagtgacccgggtctggtgggttgctagttcagggtaactcaatctacatgcaacctattgtttctaagttctagttggaggtccacaaaagggctcttagtgtgatggccaaggcttccgagtagcaccctagtgacctgggttatgactcccagtgggagtggatttatgtggactgggtaaaaatatccctttgtctaaccatacgtcaaagcacgatttaaggcctgtcccatgctcacataggcaatgtggtcgtcgtgtaagggtgtgggaaagtaggtttaagggttcccttaggcaatgcttgggggcctatcccatcctcatttctttttgttctttaccgtctggtgccttataaattataatagcatgtacaaatctcatgtgctttaaacttacccaaaaaagagcagacctgttactggagggatctggacggggtataaacggaggcaatggtgacttagtgagacagctctcaccactgcattatgcctgctttaaaattcactcaaatgtcaaaactggtgtttgcttatggctatgttgctgcggtcttc

SEQ ID NO: 122609 - DNA, 1330 bp, Zea Mays
actcgacttcccccacctccctcgtcagctgcagtgtcaatccctcctctccgccgcctacagctgcggggagctcgccagtcgccacttcgccagtcgccacttcgccagaatggttgcccacacggtggcttctcctcgctttgttcctcctaccggcgtggctgctgatctcggccgtttttgtgtaatttgtttggatcccgcagttccatcagtaccaggcagcgggtcgcgcgctgccagtccccgctgatgagcaccccaagatctaccgcatggagcttgcgctaccaacgaggtctgctccaaatccaagctctggtactatctgaggaagctcaagtctcaagaaggtttaagagcaacggtcagattctcgccatagacgagtgcaggacaggttaccacgacctgcacaaggagtaccgtaataccaccctgaatggtgccatggagcagatgtacaatgagacggcttcctgtcatcgtgtggtcaccctacatacagatcatcaagacggcaacaatcaactttaagctttgcaagagggacaacgccaagcagttccacaattcaaagttcaagtttcctttggtttactgcaacaagtcaggccaccaaataggaagctgaagaccaccttcaaggctttaaggcccaacttgttcgtgttatccaacttgccctgacaccctcccaaatctgtgaggctgtcagtctggtggtttgctagttcagggtaatgcaatctacatgcaacctattgtttctaagttctagttggaggtccatgaaagggttcttagtgtgatggcaaaggcttccgagtagcaccctagtgacccgggtctggtgggttgctagttcagggtaactcaatctacatgcaacctattgtttctaagttctagttggaggtccacaaaagggctcttagtgtgatggccaaggcttccgagtagcaccctagtgacctgggttatgactcccagtgggagtggatttatgtggactgggtaaaaatatccctttgtctaaccatacgtcaaagcacgatttaaggcctgtcccatgctcacataggcaatgtggtcgtcgtgtaagggtgtgggaaagtaggtttaagggttcccttaggcaatgcttgggggcctatcccatcctcatttctttttgttctttaccgtctggtgccttataaattataatagcatgtacaaatctcatgtgctttaaacttacccaaaaaagagcagacctgttactggagggatctggacggggtataaacggaggcaatggtgacttagtgagacagctctcacc

SEQ ID NO: 122610 - DNA, 652 bp, Zea Mays
actcgacttcccccacctccctcgtcagctgcagtgtcaatccctcctctccgccgcctacagctgcggggagctcgccagtcgccacttcgccagtcgccacttcgccagaatggttgcccacacggtggcttctcctcgctttgttcctcctaccggcgtggctgctgatctcggccgtttttgtgtaatttgtttggatcccgcagttccatcagtaccaggcagcgggtcgcgcgctgccagtccccgctgatgagcaccccaagatctaccgcatggagcttgcgctaccaacgaggtactatctgaggaagctcaagtctcaagaaggtttaagagcaacggtcagattctcgccatagacgaggtacagccattccacctcttactgctaatgctgatctatcattctcttatgggtttagggggtgtttggtttataggtactaatttttagttgtccattttagtccttaaattgctaaacatagggattaaaagagttatatctctattttagttcggcaatttagggactaatgcatttcaaaagcttgttggagctgtgtcattgttcaatgttagaattgtcacatagtagccctgtccaattatattatgccccacgcccaccttgcttgcgatttgt

SEQ ID NO: 122611 - DNA, 162 bp, Zea Mays
atggcggcggcctcccgtcgagcaaccatggcggtagcggcctcccgtcgagcaaagctggaaggaagtgatgtccgatgggtattacccaagcccaatgcggaacaaacactagcgacgaatcctactcctacatggaacagtgtccttgggataatgtag

SEQ ID NO: 122612 - DNA, 1459 bp, Zea Mays
ttccctgggaaataaattgccacgaaatttaaacaccaacctctgatttcctctcctccgtgtcgccggccacccactgatccatccactcgccccaatggatcacgccgccgagcacctcgaccccaccgccccggcaccctcgtccgcctcctcctctgctgccgtcgcggaggtaaatgcgtggctggcctccctcgccgcggatgtgggagggcgaggcggtggcggaggtgcggcggcggagctgtcgctgggtcccgaccccacaccgcgcggggtggcctacctccgcgcgctggcctctgcttcgcaggggcggtcccgcgctgccggaatcgcggctgcggggctgcgtgcgcaggcggccgagtaccgcgccgaggcggcgcggttgcgggaggctctcgagcgggcggggctcgcgagggacgcactcccaccacctgcagccgcggcggcacgagccgttgctgcagtcgctaacctcctcgccatccgtgacaccgagatgagcagctttgtagtggcaagtgcagacttgtctctgaggcgagcagaggtggaggagaagagggacaaagtgcataaggagtccaaggcactacttgactacacacggaaggccataaacaagcttactgagctgaagaagatgctggagaaatttaagaatgatgtggagaagcaacaagtggagcaaatgactgattggcaaacaaagcttgttatgatggactccaaggaacggcaatatatcctccaagtctcaaattataaggcaatgcttaatcgagtgggttatacgccagagatcaatcatggtgtgttgatggaaatggctgagcataagaaggatctcgagaggaagactaaacccatagctgacacattaaggagctaccaggatttacctccagataaagctttagctgcactagctatagaggacaaaaagaggcagtatgcagccgcagagaagtacctagaagatgtgttgcaatctgctctaaccacaagtggcctataatgtgcatagttttgtttgctgtgtcttatatgttgccatcgattgaaggtgaaatggtaattaacttccttgtaatttgtgactttgttaaataattgtgtaacatctctatcttcgccatagaaattaagttctgtcgcagtaatgatcttagcgacaaccaagacactcgccagagatcttggcctgctgtgtatgtgtgtgtgatgccttgatgtgattttggatgactagtttgtctagagatgagctgtgcgatgttttagtggacatacatacagttgtgatatagtatggatgttattgtttctctttcctttcatgcattctaccatatacataccaaatttcattcaagtattgaaacaaaacccaattactgaatttaatactttgtattttgtgatttatgtatgattaagatattgt

SEQ ID NO: 122613 - DNA, 977 bp, Zea Mays
attattttttatttaccactaggtatatgcccgtgcgttgcaacgggtgacacttgtgcacgcatagatcattgtttactggtgttatcaatcgacgagtcacacttgtgtacgcatatgtcattgtttagtgatgttatcaaccgaactctgcgcgtcgggtcggcaggcgagggaggtggcatcgagaggcgggctcggggcagggcatcgggtgtgtgcgaccgcaaatcgcgtcgagaggtaggctcgagggcagcaggtggctggaggtcgtggcatgcagagcgtggtgcagttgaagcgagaggcggggaagggggctagaggtcgtggcatgcggagcgcggtgtagttgaatcgagaggcggggaagagctggaggaggccaggcgtggattgttgtgccaaaagtgtcgagtccatttgtcggagataggaaaggcagaaccagagagggtcagcctacccctttccttcttcatagtagtatagtcagttacatgtacgttgttacggacatacatagaccttgtttaattatttaaacgtgttccaacagaatttgcgagtaaagtttgtttggtgtttatacctttccctcgtgatcttctagactaccttcttcatcgagataagtagagattgacatatcctattttaacatgaaccattcctatatttcagttaccaactgtatttctatatgtgcgtgaaacattgtggattccacaatattgtataaagcttggttatattgggcaccaactatatatgaagctagtttatccataaaaaataaaaaatatagaaatgaaaaattagacacacataatatcacatgcaacacagaatatcacatacaatatagatttcaaacacattgatatatgttcatatcacaaattcacacaagtccaaatatataagttcacataatatcacatacaatacagttagtcctatagccttttgtt

SEQ ID NO: 122614 - DNA, 679 bp, Zea Mays
gccattgtctcagatagataaccttctacagacatcttatgatcaaggggacaaatgagatcatgccaactctactccatgtactgctggtgtcacaggattaatatacaatgaagatgttgattcttcttggagttgcacgaatgaaccttgtgattgtgattagttacttcaaagcatttttttggtcttaatgcatggatgggagagtgtcggatgcttcttcagatactatttcttggtccgtcaaatctgcttgacccaaatgaaagtttttctcaaatgtggcaaaaataattgtctcatcaattgtcagcgcgcctgcttccagcaaagtttcagagaaggtaagttatttttgatagatccaaaatctagcataattctatcattttatacacatctatatgaccttttgtgacatgtcacaatatgaggtgttcaaatgtgtctaactactaattattgtcttctcctatttattttacatgaaaagatggaatgtaacacaatttttggtggccgcataagtgtggagacttgattcatatatacttagttaggctcatattagtgcaaacagctgatacagttttcattagtatttagtatggcttagagtacacttatgtatgagttatttgacatgtttattatgagaatattgatggtacttatt

SEQ ID NO: 122615 - DNA, 87 bp, Zea Mays
atgggggagcccgctcccgccggtgcccggattggtgagatcatcagttgttttgagaagaagggcttcaatctcaagattctgtaa

SEQ ID NO: 122616 - DNA, 323 bp, Zea Mays
atataatcacatagatatacaaatttaattagtattgcacaatgatagatccacatcacataaaccatcaacaagcaccacaacaaaatcattcacaaaacctacacatgttattatgttttgcacatatttgcaaacactttacaaaatcattcacaaaagtcctaacgcttcaagtgattcacaaaagccttcacaaaagcactccaacttcttctatcctcttgttttaaggcacaagcttgtaggggttgtgatgtcgccacttacttgatgctaacaagacatttccttcaccaaagccatcttcaacacttcgccca

SEQ ID NO: 122617 - DNA, 3710 bp, Zea Mays
cacctcctctttgttcttctccaatacatcttgctgtgttccatctcttctggtttcccgtatctcgagtgttaacatttggtatccgattaagtcatcctagatccacttgttgatgtgccatggcgaccccgatcttccacaatagagcatcaagacgccgccatccgcaagctgctcgatgaaatgcgactcatggagacgcttgtccgagcgcatcagccctgtgacgagacgtctcaagaagagccctgtgacgagacgtctcaagggtcccatcttcgacgtggagccctgtttccaccgccgcatcctcaattcggatccaatctctccctacgactaggtcgatctgctttcggtcgtccgtgtcgcggccccgagctcccgggatttgcttcctccactgggcatccgtgctgtgccgagcagctacgtcgcgagcgggcatccacaggaggtggtcggcgtcgacgtccgagccgacacgctgcaggatcttctcctgcttcgcctccagctcggacagcacgacagagaacttgtccagccctcgcgacgagtcgagtcggctactcgcgtcgagtcgagcgttcctagggcctccagcaccgagatggacagggagttcagcgccgccttcgtcacagcatcagccgcctccggcaccagcgccctcgaggaagcgcagctgcacctcaacgacctctacacaatcgccaccgaggggattgacacggccatcgcgacgacgcggagggagagcaagcccgtgtacatcagcgtgagctgcaacctggtcggcctctcccacccgaccttcagtcgagagccggtacccctattcaagagcttcggcggcccggtcgacatcgtcaagaacgaccagccgtacgtcctgttcgacgacagcaagcgatgcgtctgcaggtccatcgacgaggacgacgaggttcccaacacattgcccaccaggtgttttaggaatggtttcatattcgtatagagcttctcgcctccattcaattgcagctgggatgccgtgccgcataggcaaccttggccaccaccacatatgcaagttgagtttggatatagccatgatgatttacgtacaattccatggtcgtctctcaacatagtagttcatgaggttgctattggggagtattgcatttttgtccaagaaacctccatggccacctccagctcatcaatatttcagatctatgcatactgaaactgtgggaagttggaaacacgagatggtgactacagagtggagtttccatatgctcattcaaggagaacgacaacaacaatggggcggtactgttgaactggcttggcagagggatagcataatggtgcccaagtggcttgctaatagagtgatggcatttctaataatatatagtgaggccattatagttcttctctgttgtgcaatcactatggcccttttattgctagaattactcaaactcaaggataattggcagtgttctgtttgcttggaaccaacacatcttggtatcgctagtggttgcttcctagagggatgtgtcattgccaatctatgtggttgtgtggtactgacaggatgtggccatatagccagtgatatacatgtgctagttctgttgatagctgatgagctaattcaagagcaaaaccagacgaatcgcaatggaggtggaggcaatacaaatgccataatgtcaattcaacaagattcggttcagttttgtatttctttcacattgaatgattgttgttccatgtgtttggttgtccgttggaaaccaccatgactacttcaaactcgacaggacatcagtgctgaactgcgaccagtactgtggccctccttcagagcattccatgaagctactgcaaggtggtggtgtttgagttggatcaggctacaaacatggctatcttcaggttggtgctattctgggtaccaaagcgagatgctgcagatattgtcaaggatcaccccttctatgtttgcaatatggctcagttcaaattcatatgatgcgcattattctcatatgaatttaatggcatgcatgactctggtccgtctcagttgcttcggtaacatgctaattctcacgatgcaatctgtcagctatatggtgctcgcactctacatattcgggtaccatacacatctccaggttgttgtccctgttctcatagttcgcgtcactgctttgtacaaggtagagattgcttgctgttcagttatacctggataatccaacagaaaaatcacctgatcagttttgatgcacttcgtagtagctacttacttagtttcgaggaggtggttctgatttgggtttggggcatctggatatctattttctttgcacaagttgacttgttcagttggtgttctgaaaattcagacttgagcagattaatagctctcaattgccctgccgacagtgacaatgcaatggtgcttctgatgtaccatggtgcacccagcacgtatcttccttatggtgcaatcgtcatggtgcagcctttattaacccaagtagctaatggacaacgctatatacctatgaaggtggctggggttaacaaatggattgtgattcagtatcagtgttcacctacctgtttacagggtattttaccatcgttttccacgggtgcagtagtggaattactgttgatatcagacgactcggcacctcaggcatccaaggacagctgtctcaattcaaagtctttactgatcggaccaatattatttccgattgcgacagtcttcaaaagcactttttggcaacagctattgagtttgttggacgctcaactaagtctgaattcagcctggtcaggcatgcgccctccatgtcaactggggaagaggctgaagcattgaagacccggtttccacaagcccatgcttggggacaagcataatttgaaggggaggagaatgtcagcacagctgctccaggcaaacatgaggtactggctttcggaggcaggaaccatggagaatgggaccaaatgtcgcgaggccacgcagacggaggcgcgcgagtgttccgggtaactgggccagactgggattactgggctttgtaagcgcgtgcgtcgtaggttggcccgagagaggaatatatggtgcccaatgtgtagtaggaaagctatcacacaagaagaacctgaactcgctgcacgcaaacacttcctctatgttcttattctccaatacatattgctgcgttccatggcttctggtttcccctattcgagtgttaacatttggtatcagattcagtcatcctggatccacttgctgctgtgtcgtggcgaccccgatcttccgtgatggagcaccaagatgccgccatcctctatgttcttctccaatacatctcgctgcgttccatctcttctggtttcccctatctcgagcgttaacagtcggcccacgcattctccctcccattgccgttctcggggtcatcccgtcgcgaaatccccgcccccaaccttctcagccgccttgtcccttctcccctgccttgtggaatctgcagttcgcatttagccttgtggaatctgcggttcacaagttgtgtaatatttctagtaactggcaaggtttgcaagttcaagtttttatgatctgaagaactgacaacaaagggtaggtgtcaaatttcagaatg

SEQ ID NO: 122618 - DNA, 454 bp, Zea Mays
gcatcaagaaaccattaatctctcagtgtgaagaaaaagagcttagctagattcatggagctgctcaagacagggtccaagagtactctggttgtcgccgtcgtatggctgctgatagcaacccttgctacggctgatggcgctactcaaaagaagctccaaggggtctgcgaaaaaatagtgaaaggcgcctgtagtgagaagatctgtggcggaatgtgcgctatggtaggctccaacgctgttgggtcatgcaaggtcgatggccaggtctcctactgctgctgccaacaaaaatcccccacacacatcggtgtccactagctgggatctagcttgctttttgatccagacgtatgattgttgaactgaaatttttcgttattataagcaaagtgtatggttcgtgattggtctacgaataatacatggtaccaaagtatgttacatgcat

SEQ ID NO: 122619 - DNA, 240 bp, Zea Mays
atggcgaacggcgtacggatgcagacggtccggcaacgagcttcacgacggcgaactgtgcaaggaattgcttcgacgaagtggctggcgggcttcgccaaggggtccctggagcgacggcgcgacggcgttggattttggtgagctgaactgtgtcggtgatgacgtgacaatctgcaactactgcgtggtgacgggatcagacgacgcagggacgactgcggcgatcctcgacgtcag

SEQ ID NO: 122620 - DNA, 120 bp, Zea Mays
cgcgagtctcgccgacaccggcgaacccaacttaaagagtgtttgaatgtattagaactaatacttaggccctgtttggaagagcttcacttcaagaatttcaattttgttcgaacttct

SEQ ID NO: 122621 - DNA, 1722 bp, Zea Mays
agacatcgcggccctaccttaccgttgccggcctgcccttcccagcccggcagtccacaccgtccccgtcctcccactccccactcgcaaccatttcaaatcgctctctcgacccaactgtactcgccgtcgtcaattcatcatccatccccatccccccatcgactcccagatctctatccccctctccctgtcctcactctctcgagcgcgttgtggcggatgtcctcgtcggcgcgtttcgatctccgggcctcgtcgcatcagttgcagccgccgccgtcgcacgccagcatgagcagcgacgggggcgcgttcgcaaacgcggagaacctggagcactgcgcccggtacctgaaccagacgctcgtcaccttcggattcccggcatctctcgacctcttcgccaccgatccggtctcgattgcaagaacttgtaactgcatctatgcgctgctgcagcagcgacagagggacattgagttcagggagtctacaaatgaccagcggcagcggatgcaatctgatatctcacggctggaagctaagattgagagaatggatgctcaattagcagcgaaagatcgagagctagccactcttactcgaacggaggccaaaaacactgctgctctgaagtctcagattgataagctgcaacaagaacgtgatgaatttcagaaaatggttataggaaatcagcaagtacgcacccagcaaattcatgaaatgaagaagaaagagaaagaatacataaagttgcaggaaaagctaaatcaggtattgatggagaagaaaaaggaatcatcccgttctggaatggagataatgaacttgttacagaaagaaggacgacaacgcggaacatggaatggaaaaaagaacgacaatgattattacaaaatgattgttgatgcatatgaagtgaagaaacaagagctgatgcaagagaatgcagatttacgggcactgttacgttcaatgcagatggacatgcgtgactttctcaatgccccgaatgggtcatcacaatctactgttactgataatggaagacaggagtcagggtctcctcagtctccgcttggtggcaagacggatgtttttgacttgccctttcatatggccagagatcagatagaagagagtttgcgcacaaaaatgacttcaatcaaggcacgaatgacacaacttcaagatgctcagaaaggtgcagaagtgacttctgaggcaactgaccgggagcttgagcttgaagctcaactggttgaagcaagaagcatcatccaagagcaggcctgcatcatgtccaagcacttcaagtctgataagccaagtggcaggaggcatagcggtctggatggcgagcgtgaggcatctgccgaggtgtaaaagcatgtctgtagcaaggatatatctgttctgcaagacctcctgattttagtaagtaccgaggtagtatgttgcaggatataacatggtcctgtgctgttgtagcccgagtttaggtgctgtctatgcagtatgatgtgcaggagcatatcctccagcacatggctaacccgatcacatctaagtcacatgtagcgtaactgtaatcctattcatactatatgaagaatgtcagtgtagcaacccttgaaaaaaatggacctttcggaccttacatcttgaagctctgttcgcatgattttttttttagtttattctatcagcggtgac

SEQ ID NO: 122622 - DNA, 1591 bp, Zea Mays
ccatttcaaatcgctctctcgacccaactgtactcgccgtcgtcaattcatcatccatccccatccccccatcgactcccagatctctatccccctctccctgtcctcactctctcgagcgcgttgtggcggatgtcctcgtcggcgcgtttcgatctccgggcctcgtcgcatcagttgcagccgccgccgtcgcacgccagcatgagcagcgacgggggcgcgttcgcaaacgcggagaacctggagcactgcgcccggtacctgaaccagacgctcgtcaccttcggattcccggcatctctcgacctcttcgccaccgatccggtctcgattgcaagaacttgtaactgcatctatgcgctgctgcagcagcgacagagggacattgagttcagggagtctacaaatgaccagcggcagcggatgcaatctgatatctcacggctggaagctaagattgagagaatggatgctcaattagcagcgaaagatcgagagctagccactcttactcgaacggaggccaaaaacactgctgctctgaagtctcagattgataagctgcaacaagaacgtgatgaatttcagaaaatggttataggaaatcagcaagtacgcacccagcaaattcatgaaatgaagaagaaagagaaagaatacataaagttgcaggaaaagctaaatcaggtattgatggagaagaaaaaggaatcatcccgttctggaatggagataatgaacttgttacagaaagaaggacgacaacgcggaacatggaatggaaaaaagaacgacaatgattattacaaaatgattgttgatgcatatgaagtgaagaaacaagagctgatgcaagagaatgcagatttacgggcactgttacgttcaatgcagatggacatgcgtgactttctcaatgccccgaatgggtcatcacaatctactgttactgataatggaagacaggagtcagggtctcctcagtctccgcttggtggcaagacggatgtttttgacttgccctttcatatggccagagatcagatagaagagagtttgcgcacaaaaatgacttcaatcaaggcacgaatgacacaacttcaagatgctcagaaaggtgcagaagtgacttctgaggcaactgaccgggagcttgagcttgaagctcaactggttgaagcaagaagcatcatccaagagcaggcctgcatcatgtccaagcacttcaagtctgataagccaaggaggcatagcggtctggatggcgagcgtgaggcatctgccgaggtgtaaaagcatgtctgtagcaaggatatatctgttctgcaagacctcctgattttagtaagtaccgaggtagtatgttgcaggatataacatggtcctgtgctgttgtagcccgagtttaggtgctgtctatgcagtatgatgtgcaggagcatatcctccagcacatggctaacccgatcacatctaagtcacatgtagcgtaactgtaatcctattcatactatatgaagaatgtcagtgtagcaacccttgaaaaaaatggacctttcggaccttacatcttgaagctctgttcgca

SEQ ID NO: 122623 - DNA, 1531 bp, Zea Mays
ccatttcaaatcgctctctcgacccaactgtactcgccgtcgtcaattcatcatccatccccatccccccatcgactcccagatctctatccccctctccctgtcctcactctctcgagcgcgttgtggcggatgtcctcgtcggcgcgtttcgatctccgggcctcgtcgcatcagttgcagccgccgccgtcgcacgccagcatgagcagcgacgggggcgcgttcgcaaacgcggagaacctggagcactgcgcccggtacctgaaccagacgctcgtcaccttcggattcccggcatctctcgacctcttcgccaccgatccggtctcgattgcaagaacttgtaactgcatctatgcgctgctgcagcagcgacagagggacattgagttcagggagtctacaaatgaccagcggcagcggatgcaatctgatatctcacggctggaagctaagattgagagaatggatgctcaattagcagcgaaagatcgagagctagccactcttactcgaacggaggccaaaaacactgctgctctgaagtctcagattgataagctgcaacaagaacgtgatgaatttcagaaaatggttataggaaatcagcaagtacgcacccagcaaattcatgaaatgaagaagaaagagaaagaatacataaagttgcaggaaaagctaaatcaggtattgatggagaagaaaaaggaatcatcccgttctggaatggagataatgaacttgttacaggttgatgcatatgaagtgaagaaacaagagctgatgcaagagaatgcagatttacgggcactgttacgttcaatgcagatggacatgcgtgactttctcaatgccccgaatgggtcatcacaatctactgttactgataatggaagacaggagtcagggtctcctcagtctccgcttggtggcaagacggatgtttttgacttgccctttcatatggccagagatcagatagaagagagtttgcgcacaaaaatgacttcaatcaaggcacgaatgacacaacttcaagatgctcagaaaggtgcagaagtgacttctgaggcaactgaccgggagcttgagcttgaagctcaactggttgaagcaagaagcatcatccaagagcaggcctgcatcatgtccaagcacttcaagtctgataagccaagtggcaggaggcatagcggtctggatggcgagcgtgaggcatctgccgaggtgtaaaagcatgtctgtagcaaggatatatctgttctgcaagacctcctgattttagtaagtaccgaggtagtatgttgcaggatataacatggtcctgtgctgttgtagcccgagtttaggtgctgtctatgcagtatgatgtgcaggagcatatcctccagcacatggctaacccgatcacatctaagtcacatgtagcgtaactgtaatcctattcatactatatgaagaatgtcagtgtagcaacccttgaaaaaaatggacctttcggaccttacatcttgaagctctgttcgca

SEQ ID NO: 122624 - DNA, 1659 bp, Zea Mays
ccatttcaaatcgctctctcgacccaactgtactcgccgtcgtcaattcatcatccatccccatccccccatcgactcccagatctctatccccctctccctgtcctcactctctcgagcgcgttgtggcggatgtcctcgtcggcgcgtttcgatctccgggcctcgtcgcatcagttgcagccgccgccgtcgcacgccagcatgagcagcgacgggggcgcgttcgcaaacgcggagaacctggagcactgcgcccggtacctgaaccagacgctcgtcaccttcggattcccggcatctctcgacctcttcgccaccgatccggtctcgattgcaagaacttgtaactgcatctatgcgctgctgcagcagcgacagagggacattgagttcagggagtctacaaatgaccagcggcagcggatgcaatctgatatctcacggctggaagctaagattgagagaatggatgctcaattagcagcgaaagatcgagagctagccactcttactcgaacggaggccaaaaacactgctgctctgaagtctcagattgataagctgcaacaagaacgtgatgaatttcagaaaatggttataggaaatcagcaagtacgcacccagcaaattcatgaaatgaagaagaaagagaaagaatacataaagttgcaggaaaagctaaatcaggtattgatggagaagaaaaaggaatcatcccgttctggaatggagataatgaacttgttacagaaagaaggacgacaacgcggaacatggaatggaaaaaagaacgacaatgattattacaaaatgattgttgatgcatatgaagtgaagaaacaagagctgatgcaagagaatgcagatttacgggcactgttacgttcaatgcagatggacatgcgtgactttctcaatgccccgaatgggtcatcacaatctactgttactgataatggaagacaggagtcagggtctcctcagtctccgcttggtggcaagacggatgtttttgacttgccctttcatatggccagagatcagatagaagagagtttgcgcacaaaaatgacttcaatcaaggcacgaatgacacaacttcaagatgctcagaaaggtgcagaagtgacttctgaggcaactgaccgggagcttgagcttgaagctcaactggttgaagcaagaagcatcatccaagagcaggcctgcatcatgtccaagcacttcaagtctgataagccaaggtgatccaatatttctttcccttcgcctctcttcagactccaactagaccttcaattcatggattccgtcacagtggcaggaggcatagcggtctggatggcgagcgtgaggcatctgccgaggtgtaaaagcatgtctgtagcaaggatatatctgttctgcaagacctcctgattttagtaagtaccgaggtagtatgttgcaggatataacatggtcctgtgctgttgtagcccgagtttaggtgctgtctatgcagtatgatgtgcaggagcatatcctccagcacatggctaacccgatcacatctaagtcacatgtagcgtaactgtaatcctattcatactatatgaagaatgtcagtgtagcaacccttgaaaaaaatggacctttcggaccttacatcttgaa

SEQ ID NO: 122625 - DNA, 1748 bp, Zea Mays
cgagatcagatctgtgtgtgtgaccattcgtgccacagacatcgcggccctaccttaccgttgccggcctgcccttcccagcccggcagtccacaccgtccccgtcctcccactccccactcgcaaccatttcaaatcgctctctcgacccaactgtactcgccgtcgtcaattcatcatccatccccatccccccatcgactcccagatctctatccccctctccctgtcctcactctctcgagcgcgttgtggcggatgtcctcgtcggcgcgtttcgatctccgggcctcgtcgcatcagttgcagccgccgccgtcgcacgccagcatgagcgacgggggcgcgttcgcaaacgcggagaacctggagcactgcgcccggtacctgaaccagacgctcgtcaccttcggattcccggcatctctcgacctcttcgccaccgatccggtctcgattgcaagaacttgtaactgcatctatgcgctgctgcagcagcgacagagggacattgagttcagggagtctacaaatgaccagcggcagcggatgcaatctgatatctcacggctggaagctaagattgagagaatggatgctcaattagcagcgaaagatcgagagctagccactcttactcgaacggaggccaaaaacactgctgctctgaagtctcagattgataagctgcaacaagaacgtgatgaatttcagaaaatggttataggaaatcagcaagtacgcacccagcaaattcatgaaatgaagaagaaagagaaagaatacataaagttgcaggaaaagctaaatcaggtattgatggagaagaaaaaggaatcatcccgttctggaatggagataatgaacttgttacagaaagaaggacgacaacgcggaacatggaatggaaaaaagaacgacaatgattattacaaaatgattgttgatgcatatgaagtgaagaaacaagagctgatgcaagagaatgcagatttacgggcactgttacgttcaatgcagatggacatgcgtgactttctcaatgccccgaatgggtcatcacaatctactgttactgataatggaagacaggagtcagggtctcctcagtctccgcttggtggcaagacggatgtttttgacttgccctttcatatggccagagatcagatagaagagagtttgcgcacaaaaatgacttcaatcaaggcacgaatgacacaacttcaagatgctcagaaaggtgcagaagtgacttctgaggcaactgaccgggagcttgagcttgaagctcaactggttgaagcaagaagcatcatccaagagcaggcctgcatcatgtccaagcacttcaagtctgataagccaaggtgatccaatatttctttcccttcgcctctcttcagactccaactagaccttcaattcatggattccgtcacagtggcaggaggcatagcggtctggatggcgagcgtgaggcatctgccgaggtgtaaaagcatgtctgtagcaaggatatatctgttctgcaagacctcctgattttagtaagtaccgaggtagtatgttgcaggatataacatggtcctgtgctgttgtagcccgagtttaggtgctgtctatgcagtatgatgtgcaggagcatatcctccagcacatggctaacccgatcacatctaagtcacatgtagcgtaactgtaatcctattcatactatatgaagaatgtcagtgtagcaacccttg

SEQ ID NO: 122626 - DNA, 717 bp, Zea Mays
tctctcagttattcttccagcaaccgttcgcccaaatccattgccgctcctgcccccaacggcgcatgccttcacctcctcagccatggagctcacgagcatctccctctgtgcaccccctccgcgcgtccctgctccctcgtcaccaggtgcacgcgcgcagcttcctgcgcgccgggatggccctccagccccagctcgcccctgccctcagctatggcgccttgccgccgccgcccctgctttccatggcggcacttcctgcttcctggtggtcggcgccctccccaacctctctgctggtggttgtctccatcccctccatggcgagctcgcccctgcattcctgctcgcccaagatccccttccatgttccagccacctcccatggacgccagccctcacctcatagtcgccccagctcgcccaaccccctctctgctggtggccggccacctctgctgcttccatggtgtagcacttacggtatttaagatggagtggaatatttcagcacataacacaccaggtgttcggtgaaaggtccaagccaaaagtcgtcgtcgtttcagaatatatcgagtcgattcgattttggtgagctgattcacggtatttgtatttagtttgatgaatggattagataaatatactggttgtgcgtaaagtgtttgttgttatatattatcatttgcagcagtataatggcgttcataa

SEQ ID NO: 122627 - DNA, 1042 bp, Zea Mays
atggcgccgccgcgggttgaggattccatggcgcagttggtggccaaaatcgacgacggtaacaaggatatgagtcgacgcatggaggcaatacaagcaacgatggagaagatggagtccacagttcaggggttggtggtcgatcgaaaagaaggtgggcgagatggcggacgtgctgagtcagatgcagcaccagatgaacaagacaacatcgaagggtaccacgattccaccatctacaacgttgggcgcggtactaggggtatggttgcatcgacaacttctaccacgaacatggcatatatggagaccgcgacggggccaactctgcatcacaccgccgatccatttcggaggccgattcatgaaccagagatccatcataattcctttctgatgggaggtatgtacgcgcctcaacagtttgcacctgggtcgttcgtaccaagtcctatgagtcaatttgcttcagtcgtggacaagcacttgtcggctctggcaaaacagcacgtggagacacggttcgtgaaggtccacgccgagaaggccccctttctgacagagaagctcaggatagtcgtcctcccgaccctcgccatagttaagaacgccaaggtcgaggactacgtggtcggcttcgacgagctcggcggcaaggacgacttcagcaccgaggacctggaagagcgcctggcgaggtcccaggtcgtcttcctggacggcgaagggtccgcgcacgcttcgaagcaggccgccgccgccaccaaacggagcgtccggcagtcgggcaccggcgactcgtccgactccgagtagctctcgtgtgttgttgttgttgttattattatatatatctaaatgggtacacagcacagacatgttttggttgctatgccaacaggcaacattagcattgcaaggatatgcgtcttattgggacctggaagcaaaagtggttgtggtttgagttgctgtacagtgctgcggcgctgccgtgtggatcacatctgatctgaatatctgattgggtgggtcttgctct

SEQ ID NO: 122628 - DNA, 3725 bp, Zea Mays
accggactccctccttctctctctctctctctctctctctctcgatactaccccctccgctcccctccaagcctctcctttttccaccctcggaggcgccgacgtcctccgacttccagggcggcgccgagcaacaactactacctggtcacccagccaaaaggggattccttttcggtgcgctctccgatcgattgatgagcggcgggcggcagcgatgagggcggatctcagcaccatccagcagacgctcacgccggaggcggcggcggcgctggcgcgggccatcgacgaggccgcgcggaggaggcacggccagaccacgccgctccacgtcgccgccgcgctgctcgccgcgccggccggtctgctgcgccaggcgtgcgctcgcgcggccgccaccggtgctggacctggcgccgctggtggcgccggcggcgctcacccgctgcagtgccgcgccctcgagctctgcttctccgtcgccctcgacaggctgccggccgcggccgcggcctcggcagcggcgcatgcgtcggggccgcccgtgtcgaacgcgctcgttgcggcgctcaagcgcgcgcaggcgcagcagcgccgggggtgccccgaggccgcgcagcagccgctgctcgccgtcaaggtcgagctcgagcagctcgtcctctccatcctcgatgacccgtcagtcagccgcgtcatgcgcgaggcctccttctcgtccgcagccgtcaagaccaccatcgagcagtcgctcccgtcgccctccgccgccgccgtcgtgtccaccccgactgtcgccgcgactacgcctgtggccccgtccccctctccgttcccgcgagtcggcccaaccaacgcctacatcaaccctcgcctcgctgccgccgcaggcgttggcggcggcagggacgacgtacgcaaggtgctcgacgtcatgctcaagccggcgcgccgcaacccggtgctggtcggcgacgccgggccagatgcggtgctgagggaggcggtacgcaggatcccgacgtctgactcccatgctctcgccggagcgaaggtcttgccgctcgaggcggacctcgccaagctcgccggcgacaaggccgccatggcggcgaggatcggggacctgggcgcgatggtccagaggatcctcgctgaccacggcgccgtggtccttgatcttggcgatctcaagtggctggtggacgggccggcggcagcagcgtcagaggggggcaaggcggtggtgtcggagatggcgcggctgctggggccgttcggaagccgtaaggtctgggccgtcggtacagccgcgtgcgccacctacctccgatgcaaggtctaccacccaaccatggaggctgattgggacctccaggccgtgcctatcgcccgcagcgcgccgctcgccggcgcagctctcaggcctggaggcattggaattctgggcaactcagtggggatgttatcgcctgctctccggcctatgccggtgacgccaacggcactccgatggccgccaggggcagggagtgaccatcctctgaaggctaagcctgctatgtgcctgctttgcaagggtagttatgaccgtgagcttgccaagctgctagcggagcagaaggaaaagccagcgtcaagtcctgaggccgctaagcctggtttgccacactggatgcagcccagcagggatcaaccgcagaccaaggagcaagagttgaagcagaatgaggctgccgaggagcttgagaagaaatggcatgagacctgcgcccgtacccacagcaaccgtactgtggcgccagctctctccctgccgttggctgccttagctccacgcccgcctgttgagcccaagctacaacctgccagcggtggtgttcccacccttaagatgaacaccaattggaaggagcccgagggtacccctacgtctgagcttcgcaagagcccgccaggcagcccggtgaagactgacctcgcgcttggtcccttggatcctgatgctaccatggagaaagaccagaaggaaaactacacagaagggctaactgccatgcaaaaggctaagatagctggaatctctgatatcgagtctttcaaaaggctcctcaaggcgctcacagagaaggtcagctggcaatctgatgctgcctcagcaattgctgctgctgtgatacaatgcagaactgctagtgggaagcggcgaaacatcgggacaaggggcgacatatggctcctgttcgttggtcctgaccaggcaggtaagaggaagatggcgaatgcgttgtctgagcagatggtaaatgctgaaccagtggttataaactttggtggcgactcccgctggggcaaggatggtaacggacggcctaatccaggtttctgggggaaaacctcgctggaccgggtcactgaggcagtccggcagaatccatgttcagtgatcgttctcgagggcatcgatcaggtggatgccgttgtgcgcggaaaaatcaaccgggcaatggatacgggccgcctgccggactcccggggccgtgaggtcagcctcggcaatgtcatcttcgttctcacaacggattggttgcctgaggaactcaggagaccgaagtttgacacaccgctccaagacgaaggaaagatgctcgaggcagcacactcggattggcagctagagctttctatcggggacaagcagcagctgaagcaccaagcggattggctgtgcaacgatgctcgcccagcgaaggtagctagagaactgtctggcgggcacggtctgtcgcttgacctcaatctagcggtaggggcgtcggacgacacagagggctcgcggaactccagtgacctctccgtggaacaagagcaggagaaagggcacgtcgcggtcaagtgttcgacgccagcccccgacagcgacctgttgaacctcgtcgacgatgccatcgtgttccggccagtcgacttcgcgccgttcaggaaggctgtcacagactgcgtatcagcgaaattcgactcggtcaccaggggcagcagctcgttcagagtcgacgaggacgccgtcgaccggatggctgccagcgtctggctcacggacgagaagctcgaggactgggccgaggaagtgctcacgcccagcatcgaacggctgtggcgcaacgtgaagcgttgcagcggccgtgctgttgtccgtctcgcagcagtcgcggtcacagcagacagggcgatgccgaggtggggtggggggcgagaaggacggctaccggggacggtgccgatcgccgttgacggcatgtagagaagggtttgggggtggggggaagttcattcttttgtatggtaggtatgtacatacatatcgggaggacatgggggtaggttactgtatgaaaagcacataggggagggaagggagggagaacaacgtcccttggacttaccaaataggcgtggaggttataggttttactataacaaagatgtgatctatagtttttgatgatatgtgtagctgtgttccttggaacaagaaaaaaaaggtttctcttttgcacttgctagtatgaatcacaccagttgtgatgcataaagtattgagcttgcatcaagtggcagaggtttggcatgtgaatgtatgattactcttcttttttccctgggagctctatagattgaacggaagcaccagttgcgatttggcatgtgaatgtatgattact

SEQ ID NO: 122629 - DNA, 183 bp, Zea Mays
ttgcggccccggagagcttctgcttcttggatgagcccggcgcggggccgggcccgccgggcgacggcgctgggggaaagaacgggctgctgcagggcggaagcgggtccccgcagagctggaggttcccgacgaaggattcccgtgggaagtgcgagagcgatttggggatggggccgttga

SEQ ID NO: 122630 - DNA, 1622 bp, Zea Mays
accgtccaaaaaaaccctcacccaccctcgactcccactctcgccgccggagtgaggggctgagcacagaaccgggcaatcccccccccccccccccccccccactcttcctcgccgctgccagatgctccgccgcagcctccccgaggccgggtccttcttccgccggctccttggccgcgtctcgaacgagggcgggcttgctgccggctcctccgcgtctgtccgacatttcgtcgaacagcttgtaggcggcacggccccgatctcccgcgtcccctccgccctcgccgtcgcctccgcggagcgtgggaccggaggaagcaacggcgcttccttgacggtccacttccttcgccactcctgcggcctcgaagaagccgacgccgcgaaggcggccgagcgcgtgcacctccgctccaccaagaacgcgcacgccgtggtcgcgctcctccgcgacacgctcggcatgccccccgcctccgtcgcgcgtctcgtctccgcgtaccccgcggtcctttcctcggtcacactcggcgctaagttgaacttctacctcgcgagctcggcctctcctccgccgagttgcgccgcttcctcctcgcgagcccccaccgcttcctcctcgcggggatcgagactcgcctgcgccccaacctcagcctcctcaaggaccttctcggcaccgaagagaacgtgctcgccgccgtcaagcagtccatggagctcatctacgacaacctcgagatcgtcctgcttcccaagctccaggtgctccgcgaacacggcgtcactgaggaggttctcgtcaagctcctcaccacccaccccagggctcttgtgcacaggtctacccgctttgatgagggcttgaccgccatgaaggacctcggggtgagtccaaagtctggcgccttcccctacgcctttggggtgttcgccagaatgtaccagtccaaatgggatcgcagggtggagaattatgtcagtctggggtggaccgaggagcaggtcaggcgggcatttgtcaggcacccctacttcatgacggtgtccgaggacaaggtcaagaaacgcatgcagttcattgctgaaaagcttggctggaaccctgatgttctgtcgtcgtacccgactattctttccttcagccacgagaagcgggtactgccgaggtacagggtgcttcatatactggcgtcccgtggtgtcatcaaaaaaggcatcaggatgagccatctgacaatgccggaaaagaagttcaaggaaaggtacgttgataagcaccaggaagagattcctcaagtactggaagcttatggagcaagaacagaggcatgatgattctgcctcaactgatcaactctacattggaacaaaggcactgtatcccttgtcctcagcggtttgattctgttgggtgcttttctttctgttttttttaggatgcaaagaactcggattcacaaactttgttggcttcactgctgattttttttaataattaggcatttcagtggtaactatgcatactagtaaaactatggggatattggggttggggataacactcattcaatcagcatgttaaaactaataaatccagcctggaaaattagttt

SEQ ID NO: 122631 - DNA, 110 bp, Zea Mays
agaaaatcatcaaaatgcgcacaactatacggatacccgagaagatgtatccgaaagatatccggatattcgggaagtgaaagggaaataggcttacaccttttcctaac

SEQ ID NO: 122632 - DNA, 1196 bp, Zea Mays
catgtgagggacctccaggttaggttgttttcaaaagatcatattttggtgagcatgaatagtgcaaccgcgtcagctcttagaagcgatatgcaaccaaagaaaaggccgagaagctcaagtgaagcgattcagtgcagacgaacaggggaagcagacagataactcaagctgtttagtgcagacaggcagctcaagcaggagtcggaattggatgatgaatcggattagggagggagagatcaaaggaggggaagagatagggaggcgggggccggggagggagatgagagggtggtcaggaggattacctggtggtggtggtggccggtggcaattcgtgagggttggcggcgcgcaaccgctgacggtggcagcggcgcgtctagggttgctgtgctcgtgtgcgggagcgggagtcaccaagtatagcgaaggccatacaggaccgtgatgaatgctatacttgggtccatttttatttttagaagttgggtgatacatgaaactgacttgaatttgtttagtcaataatgtcctgtactgttttttgtcgttactgatcactacgatacaccttaatctctttgtaggtcaaggagtcgcagaaccatgcagcaccaaggacgatggatgcactctttgcacggatgaaggcgcaacgcatgaggaccgcaccacagcagcaggcaaatcctgcctctggacgtgatttcaaccagcagcgacgtgttcagcagcagcagaggcgaggtagagcatatggtggccgtgttgtcggcaaccaatgagcatatttggtgcatcgaagccccttctcttcactggtcttaaggaccttgagggctagtttgggaactctatgtttctctattttctcaagtgaaaatgagctaatttttcttgggaaaatgaggttttcaaactagccttgaatgaaaggacgccgggggaaaatctaacttgactttctttgttggatgaaaggatgtggacagaatatgaagcgaattttgtgtgactctagttgtctgcttctgttcagcatgtacactgacctacggaaattacttgctagattttgatgtcatgtttattgagttgatttggttcgtctcttcaacagaactaggagtattcgccttttaccatatgtataaaattttaaatacctttactgtgaggtagacaagctg

SEQ ID NO: 122633 - DNA, 853 bp, Zea Mays
ctgtttgattttatttcgaagcatggtatgtacttcctgactccccttgagaagtgagaattgtatccttgttttgatggggcatggtgagtttgctcagaaaacagtattgatcctggttctccattgtttatgattcatggtacttgagcactcctgctcatgtgagatactaatgtttttattttgatacagtgcaagtaccttagtgcagaggaggtcagtaggtgatgcttttcaaaataccaaggtcaaggagtcgcagaaccatgcagcaccaaggacgatggatgcactctttgcacggatgaaggcgcaacgcatgaggaccgcaccacagcagcaggcaaatcctgcctctggacgtgatttcaaccagcagcgacgtgttcagcagcagcagaggcgaggtagagcatatggtggccgtgttgtcggcaaccaatgagcatatttggtgcatcgaagccccttctcttcactggtcttaaggaccttgagggctagtttgggaactctatgtttctctattttctcaagtgaaaatgagctaatttttcttgggaaaatgaggttttcaaactagccttgaatgaaaggacgccgggggaaaatctaacttgactttctttgttggatgaaaggatgtggacagaatatgaagcgaattttgtgtgactctagttgtctgcttctgttcagcatgtacactgacctacggaaattacttgctagattttgatgtcatgtttattgagttgatttggttcgtctcttcaacagaactaggagtattcgccttttaccatatgtataaaattttaaatacctttactgtgaggtagacaagctg

SEQ ID NO: 122634 - DNA, 1409 bp, Zea Mays
atggaatcaccacccctcacagctgaagcaattgcttttaccgagaaaaagatggacatgactttggaggatataatcaagatgtcaaagaaaaagaatcctggaggcaagaacccccctaggcagccgatcaaaaagcgtccattccagaatgccaacactaataaagggaatggcaaggttcaacggtttatggaatctagatcaaccattagacaaggtgttcttgcacagagaaggtcaaatcttggtggaagtcagtttgctgctacaaagcaggctgcaaagaaggctgctgctatgccaatgcgcagcggggctgtctattggaagaagcctagtgcaagtaccttagtgcagaggaggtcagtaggtgatgcttttcaaaataccaagctcttagaagcgatatgcaaccaaagaaaaggccgagaagctcaagtgaagcgattcagtgcagacgaacaggggaagcagacagataactcaagctgtttagtgcagacaggcagctcaagcaggagtcggaattggatgatgaatcggattagggagggagagatcaaaggaggggaagagatagggaggcgggggccggggagggagatgagagggtggtcaggaggattacctggtggtggtggtggccggtggcaattcgtgagggttggcggcgcgcaaccgctgacggtggcagcggcgcgtctagggttgctgtgctcgtgtgcgggagcgggagtcaccaagtatagcgaaggccatacaggtaagttgtccgctcttcaaagtatactacttatccccaggtcaaggagtcgcagaaccatgcagcaccaaggacgatggatgcactctttgcacggatgaaggcgcaacgcatgaggaccgcaccacagcagcaggcaaatcctgcctctggacgtgatttcaaccagcagcgacgtgttcagcagcagcagaggcgaggtagagcatatggtggccgtgttgtcggcaaccaatgagcatatttggtgcatcgaagccccttctcttcactggtcttaaggaccttgagggctagtttgggaactctatgtttctctattttctcaagtgaaaatgagctaatttttcttgggaaaatgaggttttcaaactagccttgaatgaaaggacgccgggggaaaatctaacttgactttctttgttggatgaaaggatgtggacagaatatgaagcgaattttgtgtgactctagttgtctgcttctgttcagcatgtacactgacctacggaaattacttgctagattttgatgtcatgtttattgagttgatttggttcgtctcttcaacagaactaggagtattcgccttttaccatatgtataaaattttaaatacctttactgtgaggtagacaagctg

SEQ ID NO: 122635 - DNA, 1259 bp, Zea Mays
tcgtcagcaatcctaatccaaaccgccgcggccacggccgcagccttccatagttctgtcagaaattccccttctcatccctgatccctccaactcccaccccaatacatcctgccgacgccatcagccggcgggacgcacacacgaggtcgaccttcgaaccctagtccttggccgagccgccttgcgggatcgtccccgccgcgcggcagctctgcctcgacccttttagtctccgtccgacaccgcttggatcagagatggaatcaccacccctcacagctgaagcaattgcttttaccgagaaaaagatggacatgactttggaggatataatcaagatgtcaaagaaaaagaatcctggaggcaagaacccccctaggcagccgatcaaaaagcgtccattccagaatgccaacactaataaagggaatggcaaggttcaacggtttatggaatctagatcaaccattagacaaggtgttcttgcacagagaaggtcaaatcttggtggaagtcagtttgctgctacaaagcaggctgcaaagaaggctgctgctatgccaatgcgcagcggggctgtctattggaagaagcctagtgcaagtaccttagtgcagaggaggtcagtaggtgatgcttttcaaaataccaaggtcaaggagtcgcagaaccatgcagcaccaaggacgatggatgcactctttgcacggatgaaggcgcaacgcatgaggaccgcaccacagcagcaggcaaatcctgcctctggacgtgatttcaaccagcagcgacgtgttcagcagcagcagaggcgaggtagagcatatggtggccgtgttgtcggcaaccaatgagcatatttggtgcatcgaagccccttctcttcactggtcttaaggaccttgagggctagtttgggaactctatgtttctctattttctcaagtgaaaatgagctaatttttcttgggaaaatgaggttttcaaactagccttgaatgaaaggacgccgggggaaaatctaacttgactttctttgttggatgaaaggatgtggacagaatatgaagcgaattttgtgtgactctagttgtctgcttctgttcagcatgtacactgacctacggaaattacttgctagattttgatgtcatgtttattgagttgatttggttcgtctcttcaacagaactaggagtattcgccttttaccatatgtataaaattttaaatacctttactgtgaggtagacaagctg

SEQ ID NO: 122636 - DNA, 776 bp, Zea Mays
ggaggccatctcttatgtgtgttgtgtcatccttgacaactctaggaccatgggggtgaacactgaaggacttggaggaggccccaatctccttcatggtgtccttggctgcagtgcctagaaacattctctgagaagggctgtaagttaggttgcacatgtgagggacctccaggttaggttgttttcaaaagatcatattttggtgagcatgaatagtgcaaccgcgtcagctcttagaagcgatatgcaaccaaagaaaaggccgagaagctcaagtgaagcgattcagtgcagacgaacaggggaagcagacagataactcaagctgtttagtgcagacaggcagctcaagcaggagtcggaattggatgatgaatcggattagggagggagagatcaaaggaggggaagagatagggaggcgggggccggggagggagatgagagggtggtcaggaggattacctggtggtggtggtggccggtggcaattcgtgagggttggcggcgcgcaaccgctgacggtggcagcggcgcgtctagggttgctgtgctcgtgtgcgggagcgggagtcaccaagtatagcgaaggccatacaggtaagttgtccgctcttcaaagtatactacttatccccaggtaacccgtgtatccgctttttaaattaaatttctacttattccgatatgtataggatatgtatccgagctgtatcgctatccgatacggatacgagctctttgggaagtatcctggtatcataggcatcaat

SEQ ID NO: 122637 - DNA, 706 bp, Zea Mays
tcgtcagcaatcctaatccaaaccgccgcggccacggccgcagccttccatagttctgtcagaaattccccttctcatccctgatccctccaactcccaccccaatacatcctgccgacgccatcagccggcgggacgcacacacgaggtcgaccttcgaaccctagtccttggccgagccgccttgcgggatcgtccccgccgcgcggcagctctgcctcgacccttttagtctccgtccgacaccgcttggatcagagatggaatcaccacccctcacagctgaagcaattgcttttaccgagaaaaagatggacatgactttggaggatataatcaagatgtcaaagaaaaagaatcctggaggcaagaacccccctaggcagccgatcaaaaagcgtccattccagaatgccaacactaataaagggaatggcaaggttcaacggtttatggaatctagatcaaccattagacaaggtgttcttgcacagagaaggtcaaatcttggtggaagtcagtttgctgctacaaagcaggctgcaaagaaggctgctgctatgccaatgcgcagcggggctgtctattggaagaagcctagtgcaagtaccttagtgcagaggaggtcagtaggtgatgcttttcaaaataccaaggaccatgggggtgaacactgaaggacttggaggaggccccaatctccttc

SEQ ID NO: 122638 - DNA, 1371 bp, Zea Mays
tcgtcagcaatcctaatccaaaccgccgcggccacggccgcagccttccatagttctgtcagaaattccccttctcatccctgatccctccaactcccaccccaatacatcctgccgacgccatcagccggcgggacgcacacacgaggtcgaccttcgaaccctagtccttggccgagccgccttgcgggatcgtccccgccgcgcggcagctctgcctcgacccttttagtctccgtccgacaccgcttggatcagagatggaatcaccacccctcacagctgaagcaattgcttttaccgagaaaaagatggacatgactttggaggatataatcaagatgtcaaagaaaaagaatcctggaggcaagaacccccctaggcagccgatcaaaaagcgtccattccagaatgccaacactaataaagggaatggcaaggttcaacggtttatggaatctagatcaaccattagacaaggtgttcttgcacagagaaggtcaaatcttggtggaagtcagtttgctgctacaaagcaggctgcaaagaaggctgctgctatgccaatgcgcagcggggctgtctattggaagaagcctaggtaaacaatggttatcttattgcttatgagaaagtttactgcattcaaggagttgttaaatttattgtgtcatgcaccttgggttatattggctgagaatgattgtgatgctggtgtttgcatggaactgccttgacttctctggttatacacagttacacacatgttattaaagaacaatgaacttcatattcctgttctgcaaggcttgttttcttggttgaactgctacaaatacatggtgaatataacatatgagccttaaagcttcattgaaagttatggcatttccctttattctggttgagctggtcaaatttgtgaacctgctgggacaccctggatatgtatctgctgttggctgacatttttctatgcaattcagcagtattcatggtgtaatctatagctgctggatgagtgctatttttggacaccagtgtctgaggtttacgttagtgttatttgtcaactatggttggaaggaccgaaggagatgtgataatgactagcatctcatgccactggtgactgatcatccagatacagggatgctacatgcctgagttggaattggtttttactactggctccttggctgtgctcagtgtttgtttgaatgatgaatgcaatgtgaatctagggtagtgatgctatagcaggacaattgtatgcctccaaggagtacattttgcttctgcctcctattaaagttggctgtatccataacagcattctatcataaagttgttcactagtttccacagata

SEQ ID NO: 122639 - DNA, 1408 bp, Zea Mays
tcgtcagcaatcctaatccaaaccgccgcggccacggccgcagccttccatagttctgtcagaaattccccttctcatccctgatccctccaactcccaccccaatacatcctgccgacgccatcagccggcgggacgcacacacgaggtcgaccttcgaaccctagtccttggccgagccgccttgcgggatcgtccccgccgcgcggcagctctgcctcgacccttttagtctccgtccgacaccgcttggatcagtgctgtgtgctgtcaggagccgtggggcggcgcgaccgcgctggctgcctggctcggaggcagcttggcagcttgcagtggccagcgcccagcggctgctcgcgcgtaggcgcaggcgcgcacggcgcagcggccagcggcggctcggacgctcggtcagcccctggggcctggctgcctgggctcggtcgctcggaggcaggcagggaggcaggcatcggctctgcctctgctggctgcggctgctcgtggcctcgcgccgtcgcgctcgcgcgcaggggtgggaaactggggccgctgctcggtcgcgcgcaaggagatggaatcaccacccctcacagctgaagcaattgcttttaccgagaaaaagatggacatgactttggaggatataatcaagatgtcaaagaaaaagaatcctggaggcaagaacccccctaggcagccgatcaaaaagcgtccattccagaatgccaacactaataaagggaatggcaaggttcaacggtttatggaatctagatcaaccattagacaaggtgttcttgcacagagaaggtcaaatcttggtggaagtcagtttgctgctacaaagcaggctgcaaagaaggctgctgctatgccaatgcgcagcggggctgtctattggaagaagcctaggtattaatcaatcacttttttctcaatccttttctagccatgttttcatctcaataaattgttatggacaggtaaacaatggttatcttattgcttatgagaaagtttactgcattcaaggagttgttaaatttattgtgtcatgcaccttgggttatattggctgagaatgattgtgatgctggtgtttgcatggaactgccttgacttctctggttatacacagttacacacatgttattaaagaacaatgaacttcatattcctgttctgcaaggcttgttttcttggttgaactgctacaaatacatggtgaatataacatatgagccttaaagcttcattgaaagttatggcatttccctttattctggttgagctggtcaaatttgtgaacctgctgggacaccctggatatgtatctgctgttggctgacatttttctatgcaattcagcagtattcatggtgtaatctatagctgctggatg

SEQ ID NO: 122640 - DNA, 714 bp, Zea Mays
atggctatggtcgcctgtgcttttcttgttatggctagcgcatctgctctgctgcactctttgcagtgcagctactgcttcgcaaacagtgatgcaccgagaacagctgtagccgcggccaagggaagaagggcaacgtttctagctgctgcaacaagggtttcagatctggtccggtttgcgcctgtgtctgcaactgacccagcagtccggcttgcagctgcgcttgtgagtgcccctgtgattgtagttgtgcctgaggttgcggttgggaggtttgctgggctgatgattgcaactgcgcttcttggggctgcacttcgggctgctggtggacctgcacttgtgggggttgctgcagctgctgatggacctgcaattgtgggggcaactgcggctgagggtgcagatgcacttggggttgcagctgcggctgagagtgcagctgcacttgtgggagctgttgtggctgatggtggagctgcagttgaggttggaggtagtgttgtgtttgcgaatgcaactgaacttgagattgcatgggttgctgtggttcagtatgcagctgaagttggggttgtgcttgtggtagctgtggcggttcttgttctggctcctttggcttgggggctccgttattcatccttgctcgagcctcagcaaacatcctttgttgctcagcaacagcttcttcctctgtcatctcaatcctag

SEQ ID NO: 122641 - DNA, 2665 bp, Zea Mays
tgcggctcctcgcggacagctccagactccagagccgcctcttcgccctctcgccatcggcaggctacggtggctgcttccccgagcctgcaggtagaccaccttgtgttgattcctcgagtcttcacctggtgcttccgtttgcagcttcatttttaactaagatgtcacaagccaaggaagtgaggtacactgcacggtctattacacctcctgctgatagaaatggcacttcaaggtcgcctcctccaaagagacgcagcccttcaaggtcacctccaccaaagagtgcttcacggtccccacgtccaaggagtccaaagagacgcagcacttcaaggtctcctcctaggagacgtggtagatcaaggtcaagggataggagtcggtccagaaatccagggaataacctttatgtaactggattgtctactcgtgtaacggaagatgatcttgagaagttctttagtaaagaaggaaaggttaagaactgtcatgttgttcttgatcctaggacaaaagaatcccgtggctttgccttcgtgactatggatactcttgaaggtgcaagacgctccatcaagtatctgcaccgcactgtacttgaaggtcgcctggtcactgtagagaaggttagatgctgactgtactgattcattccattatgcatttttctattgtattttttgttgaatagtgctagttttgtcatgttatcgttgtatagtaatgtcaagtagtctaatactagcagtagtacagttaaaaatttaaagctactatacggtcatgcatgttttttgtcttatgcttgtccctccccttcccactttagccttgaaatcactgatgtcttagtaacataaatgcattaatcttgtgcactggaaattatattccattacattaaggggcttcaatgatgctatgctctgttcagtttaaaactctggtgaaggtccttgaggtgaggtatgttatgacttatgagtagaagattacaaatatgctctttccctatgatggaagagtatattctgtaacagacaagcctggaaaccccactcaggtgaaatgtgccagagtaaattgaaaggggatcatttatgatgtgttctgatgcaatcctaatgtggtgaatggggaaaacctcttctgtggctcttcaactggggtcttaactctcatctcgtgctgacttcctgaccttccagtttaacatggtgctgggctgcctctacgtcaacctggttggtccaggctgtgcagtctccaaccatggttgtctccaaaggatgtgcagctgacgtgatggtgcttatcaccacaccctcagagctcatcaccacttgccgtcttcacctcgctcaccgacaatgcatacatgctacatcaacacgacggctgtcgccatagagcgatcttggagtcttgttgtgcatcgcgtcaccaccatcgccaccgcaacttctaccacaaccgccatcgtcaacatcacgctcgtgatccaacaggctctacgatttgtctgcttcgactaagcttacatggtgcatgctgctgccatgtcacgacaccaaccaccaagtctgatgcgaacttcatcgaccagtatcttgatttgatggacatcacgagaggcataatctggcgcttccttggaccatggctacaccgaccacggaacaagtgcacaaaagtcatctttggtttagttggcatgcaacgtaaagtttaatctacctatatcacaagattttgatcaagagttgacaagcttaatggaccatgactatttttcaccaaaagggcaaagtttagtttcattatcaattatattaaccactctgttcaaatttaagatcgaattgggttcttcctttatttagcatacttgaagttcattgcttgtttcattcgtaccaactaatacatttgttcacgattttattccaggctaaaagaactcgtgaaaggacccctactcctggaaaatactgtggtcgaagaggaggatctcaaaggagcccatcaccttaccgccctcgcagaagggagcgttcgcgctcaagggaacgcagaagggagcgttcgcgttcaagggatcgaagggagcggtctcgctcaagggatcgaagggagcggtctcgctcaagggaacgccgaagggagcggtctcgttcaagggaccgcagggagaggtctcgctcaagggaccgccggagggagcgctcacgctcaagggaccgcagaagggagcgctcacgctcaagggaccggaggggcagttcaccccatggcagaaggcatagagatcggtccaggtcacccaccagcaatgggaaccataaggcagactaggaagcgcttttatggacttgtcgttgattgcgtgaacaaaggaacttgtaacactacctataaactggtcagactgagacggttagcatggatttttagtagtgttgctgtattttgttgtttcatacaagtactctattctgttagctttcggatcgaaatgtcggatgatgatggttgttattgttctggaaatcgtagacatgtcctccagaatacctatgaaactatggcatactcgtgtgtttgcttaaggttgctgtggtatgttctgatcttaagattgacacgttgcacggtagat

SEQ ID NO: 122642 - DNA, 2200 bp, Zea Mays
agcggtagccctgtccctgacctgatcctgacccgtgcgggcgtgcggctcctcgcggacagctccagactccagagccgcctcttcgccctctcgccatcggcaggctacggtggctgcttccccgagcctgcaggtagaccaccttgtgttgattcctcgagtcttcacctggtgcttccgtttgcagcttcatttttaactaagtctgtaatttattggctgtttatctgagtgacactacactctctgttttttcttattagatgtcacaagccaaggaagtgaggtacactgcacggtctattacacctcctgctgatagaaatggcacttcaaggtcgcctcctccaaagagacgcagcccttcaaggtcacctccaccaaagagtgcttcacggtccccacgtccaaggagtccaaagagacgcagcacttcaaggtctcctcctaggagacgtggtagatcaaggtcaagggataggagtcggtccaggagcccagatgatagaaatccagggaataacctttatgtaactggattgtctactcgtgtaacggaagatgatcttgagaagttctttagtaaagaaggaaaggttaagaactgtcatgttgttcttgatcctaggacaaaagaatcccgtggctttgccttcgtgactatggatactcttgaaggtgcaagacgctccatcaagtatctgcaccgcactgtacttgaaggtcgcctggtcactgtagagaagtttaacatggtgctgggctgcctctacgtcaacctggttggtccaggctgtgcagtctccaaccatggttgtctccaaaggatgtgcagctgacgtgatggtgcttatcaccacaccctcagagctcatcaccacttgccgtcttcacctcgctcaccgacaatgcatacatgctacatcaacacgacggctgtcgccatagagcgatcttggagtcttgttgtgcatcgcgtcaccaccatcgccaccgcaacttctaccacaaccgccatcgtcaacatcacgctcgtgatccaacaggctctacgatttgtctgcttcgactaagcttacatggtgcatgctgctgccatgtcacgacaccaaccaccaagtctgatgcgaacttcatcgaccagtatcttgatttgatggacatcacgagaggcataatctggcgcttccttggaccatggctacaccgaccacggaacaagtgcacaaaagtcatctttggtttagttggcatgcaacgtaaagtttaatctacctatatcacaagattttgatcaagagttgacaagcttaatggaccatgactatttttcaccaaaagggcaaagtttagtttcattatcaattatattaaccactctgttcaaatttaagatcgaattgggttcttcctttatttagcatacttgaagttcattgcttgtttcattcgtaccaactaatacatttgttcacgattttattccaggctaaaagaactcgtgaaaggacccctactcctggaaaatactgtggtcgaagaggaggatctcaaaggagcccatcaccttaccgccctcgcagaagggagcgttcgcgctcaagggaacgcagaagggagcgttcgcgttcaagggatcgaagggagcggtctcgctcaagggatcgaagggagcggtctcgctcaagggaacgccgaagggagcggtctcgttcaagggaccgcagggagaggtctcgctcaagggaccgccggagggagcgctcacgctcaagggaccgcagaagggagcgctcacgctcaagggaccggaggggcagttcaccccatggcagaaggcatagagatcggtccaggtcacccaccagcaatgggaaccataaggcagactaggaagcgcttttatggacttgtcgttgattgcgtgaacaaaggaacttgtaacactacctataaactggtcagactgagacggttagcatggatttttagtagtgttgctgtattttgttgtttcatacaagtactctattctgttagctttcggatcgaaatgtcggatgatgatggttgttattgttctggaaatcgtagacatgtcctccagaatacctatgaaactatggcatactcgtgtgtttgcttaaggttgctgtggtatgttctgatcttaagattgacacgttgcacggtagat

SEQ ID NO: 122643 - DNA, 1586 bp, Zea Mays
cccgtttaacggcggcacgacaagcaagcggtcacgtgagagctgatttttctcgcagcgggtagcggtagccctgtccctgacctgatcctgacccgtgcgggcgtgcggctcctcgcggacagctccagactccagagccgcctcttcgccctctcgccatcggcaggctacggtggctgcttccccgagcctgcagatcgggtggtagatctggttggcctagtcgctgtcggatgcagttgccgagctaggtcgcggctgcgcggcggcggtcggggtcttgcgtcgccagatctggataggaaaacgccgcgcacaaggtagaccaccttgtgttgattcctcgagtcttcacctggtgcttccgtttgcagcttcatttttaactaagatgtcacaagccaaggaagtgaggtacactgcacggtctattacacctcctgctgatagaaatggcacttcaaggtcgcctcctccaaagagacgcagcccttcaaggtcacctccaccaaagagtgcttcacggtccccacgtccaaggagtccaaagagacgcagcacttcaaggtctcctcctaggagacgtggtagatcaaggtcaagggataggagtcggtccaggagcccagatgatagaaatccagggaataacctttatgtaactggattgtctactcgtgtaacggaagatgatcttgagaagttctttagtaaagaaggaaaggttaagaactgtcatgttgttcttgatcctaggacaaaagaatcccgtggctttgccttcgtgactatggatactcttgaaggtgcaagacgctccatcaagtatctgcaccgcactgtacttgaaggtcgcctggtcactgtagagaaggctaaaagaactcgtgaaaggacccctactcctggaaaatactgtggtcgaagaggaggatctcaaaggagcccatcaccttaccgccctcgcagaagggagcgttcgcgctcaagggaacgcagaagggagcgttcgcgttcaagggatcgaagggagcggtctcgctcaagggatcgaagggagcggtctcgctcaagggaacgccgaagggagcggtctcgttcaagggaccgcagggagaggtctcgctcaagggaccgccggagggagcgctcacgctcaagggaccgcagaagggagcgctcacgctcaagggaccggaggggcagttcaccccatggcagaaggcatagagatcggtccaggtcacccaccagcaatgggaaccataaggcagactaggaagcgcttttatggacttgtcgttgattgcgtgaacaaaggaacttgtaacactacctataaactggtcagactgagacggttagcatggatttttagtagtgttgctgtattttgttgtttcatacaagtactctattctgttagctttcggatcgaaatgtcggatgatgatggttgttattgttctggaaatcgtagacatgtcctccagaatacctatgaaactatggcatactcgtgtgtttgcttaaggttgctgtggtatgttctgatcttaagattgacacgttgcacggtagat

SEQ ID NO: 122644 - DNA, 1521 bp, Zea Mays
cccgtttaacggcggcacgacaagcaagcggtcacgtgagagctgatttttctcgcagcgggtagcggtagccctgtccctgacctgatcctgacccgtgcgggcgtgcggctcctcgcggacagctccagactccagagccgcctcttcgccctctcgccatcggcaggctacggtggctgcttccccgagcctgcaggtagaccaccttgtgttgattcctcgagtcttcacctggtgcttccgtttgcagcttcatttttaactaagtctgtaatttattggctgtttatctgagtgacactacactctctgttttttcttattagatgtcacaagccaaggaagtgaggtacactgcacggtctattacacctcctgctgatagaaatggcacttcaaggtcgcctcctccaaagagacgcagcccttcaaggtcacctccaccaaagagtgcttcacggtccccacgtccaaggagtccaaagagacgcagcacttcaaggtctcctcctaggagacgtggtagatcaaggtcaagggataggagtcggtccaggagcccagatgatagaaatccagggaataacctttatgtaactggattgtctactcgtgtaacggaagatgatcttgagaagttctttagtaaagaaggaaaggttaagaactgtcatgttgttcttgatcctaggacaaaagaatcccgtggctttgccttcgtgactatggatactcttgaaggtgcaagacgctccatcaagtatctgcaccgcactgtacttgaaggtcgcctggtcactgtagagaaggctaaaagaactcgtgaaaggacccctactcctggaaaatactgtggtcgaagaggaggatctcaaaggagcccatcaccttaccgccctcgcagaagggagcgttcgcgctcaagggaacgcagaagggagcgttcgcgttcaagggatcgaagggagcggtctcgctcaagggatcgaagggagcggtctcgctcaagggaacgccgaagggagcggtctcgttcaagggaccgcagggagaggtctcgctcaagggaccgccggagggagcgctcacgctcaagggaccgcagaagggagcgctcacgctcaagggaccggaggggcagttcaccccatggcagaaggcatagagatcggtccaggtcacccaccagcaatgggaaccataaggcagactaggaagcgcttttatggacttgtcgttgattgcgtgaacaaaggaacttgtaacactacctataaactggtcagactgagacggttagcatggatttttagtagtgttgctgtattttgttgtttcatacaagtactctattctgttagctttcggatcgaaatgtcggatgatgatggttgttattgttctggaaatcgtagacatgtcctccagaatacctatgaaactatggcatactcgtgtgtttgcttaaggttgctgtggtatgttctgatcttaagattgacacgttgcacggtagat

SEQ ID NO: 122645 - DNA, 1462 bp, Zea Mays
cccgtttaacggcggcacgacaagcaagcggtcacgtgagagctgatttttctcgcagcgggtagcggtagccctgtccctgacctgatcctgacccgtgcgggcgtgcggctcctcgcggacagctccagactccagagccgcctcttcgccctctcgccatcggcaggctacggtggctgcttccccgagcctgcaggtagaccaccttgtgttgattcctcgagtcttcacctggtgcttccgtttgcagcttcatttttaactaagatgtcacaagccaaggaagtgaggtacactgcacggtctattacacctcctgctgatagaaatggcacttcaaggtcgcctcctccaaagagacgcagcccttcaaggtcacctccaccaaagagtgcttcacggtccccacgtccaaggagtccaaagagacgcagcacttcaaggtctcctcctaggagacgtggtagatcaaggtcaagggataggagtcggtccaggagcccagatgatagaaatccagggaataacctttatgtaactggattgtctactcgtgtaacggaagatgatcttgagaagttctttagtaaagaaggaaaggttaagaactgtcatgttgttcttgatcctaggacaaaagaatcccgtggctttgccttcgtgactatggatactcttgaaggtgcaagacgctccatcaagtatctgcaccgcactgtacttgaaggtcgcctggtcactgtagagaaggctaaaagaactcgtgaaaggacccctactcctggaaaatactgtggtcgaagaggaggatctcaaaggagcccatcaccttaccgccctcgcagaagggagcgttcgcgctcaagggaacgcagaagggagcgttcgcgttcaagggatcgaagggagcggtctcgctcaagggatcgaagggagcggtctcgctcaagggaacgccgaagggagcggtctcgttcaagggaccgcagggagaggtctcgctcaagggaccgccggagggagcgctcacgctcaagggaccgcagaagggagcgctcacgctcaagggaccggaggggcagttcaccccatggcagaaggcatagagatcggtccaggtcacccaccagcaatgggaaccataaggcagactaggaagcgcttttatggacttgtcgttgattgcgtgaacaaaggaacttgtaacactacctataaactggtcagactgagacggttagcatggatttttagtagtgttgctgtattttgttgtttcatacaagtactctattctgttagctttcggatcgaaatgtcggatgatgatggttgttattgttctggaaatcgtagacatgtcctccagaatacctatgaaactatggcatactcgtgtgtttgcttaaggttgctgtggtatgttctgatcttaagattgacacgttgcacggtagat

SEQ ID NO: 122646 - DNA, 792 bp, Zea Mays
cccgtttaacggcggcacgacaagcaagcggtcacgtgagagctgatttttctcgcagcgggtagcggtagccctgtccctgacctgatcctgacccgtgcgggcgtgcggctcctcgcggacagctccagactccagagccgcctcttcgccctctcgccatcggcaggctacggtggctgcttccccgagcctgcagatcgggtggtagatctggttggcctagtcgctgtcggatgcagttgccgagctaggtcgcggctgcgcggcggcggtcggggtcttgcgtcgccagatctggataggaaaacgccgcgcacaagctgagctaaattctgttcgattcgagttcttataggggttcttgtggctgcgtgttttgaattttttcccactggttctggggtgccgagaaagggaatcgtggctgactcttgttgccgtcgtcgagccagatctggtcatgctgctaccgtggatgtcttattgcttgatctcctttgttttttaattccttcggttcaagaatagcatcattaccatgagcatacataccagagaaacggagacagattcggaaattttcatttattgctagcttgtagttttggggtcctataatatttttcttggttctcttaattaattgagctagtaaatcaacaaatctgccactacagccgtcacgggcaaacataaaaaaactgaacaacaccaaattgaggcgcctagtccacaaacctgaactgctgaacttaaatgtctggaagccacagtttctgatttctgatg

SEQ ID NO: 122647 - DNA, 1290 bp, Zea Mays
tgttggttttgtttgtttagtaaaaattaacttttctcttgctgagtgaaatcaacaaaacccaacccatgaaagggaaagaaagaaagaaagaaaagataatgagacattaaaatgtatcctaaaagctttgctggcttctgctactgcacagttctcaggaataggctcctctgctgcagctctgctcctccctcctgtcttggagaagtggacagtgctgccgatcagttgctcttctcatggatagtagaggcttggcattgcggtgtcaatgtcgaagttctggtcgaatacgtattcgacgcattcgagaggcatgaattcgtcgtcaggcaccggaaggggcgcaaccgacgagacggcggcgaacgccgatgacaccacctcctggaggtccacgtccgaggtccagtccctgtacccgggcaccgggcaaggcgagatgccctggtgcaggcagccgttgaagtcggagccgacgggcgacgcgagggaccacggggacgaggcgccccgcacggggcagctctcgggcgtcatcggcgggagcccggcggcgttgtccgtggtggtggtggccaccgtgagccgcgcggcgaggccctgcagcgcggcctgcgcgtgcgggttgtgctgctgcgccctcttggacccgccgccggcggcggcgggcctgcaggtgtgctcgccgtggtagacgacgtcgaagagcgcggggtggtcgtcggcgcgctgcacctgcttggtggccaggcagttctgcgagttgcggtgcgtgcagcggtagtaggcccgcgggtgcctggcgccgaggatgtccttctggccgtacttgcgccagctgtggccgtcgtcggcgctgacgcgcacctgctggctggtccagcgcgccgtggccttgcgcttcttggggctggcgccggcggggcggaaggggtggtggtcggaggcggcgtcactgcttatcgggctccccgtggcggtcagcggcgagggggcgaggtccggtgacgagtggagcatgccgatggagcggtcggtgagcgcgacgatctgttgcacgaggcagcggcagaggtcgacggagtccgcgtccgcgggcgcgcgcagctgcagctcgagctggctcaccaggtcctgcacgcggcccaactccgagaccaggagcgcccgcccgccgctctccacggcttcagccattgctgcttcgaggataggtgagagctggagcaggggagtccggtcgtgaggtggcgagcgatcggagatcaggactcaggagtggct

SEQ ID NO: 122648 - DNA, 1108 bp, Zea Mays
gccaccacgatgccctcctctcccatgccccgctcatctgcaacaccaaccatcgtctccatccgctgtccgcgcccggttccgacccctgcacctccatctcccgcgctacatgcgggctcaaaaaatactttggccctgttcttgattgaccccttttcagtacagaactttttatgtggctgcaaagttctgtaattctagaggagcaaaatggagattattatcattatctcacttgtcattcttttggcactaggagctctctttgcgatcccaaaatcgcaaaataaaggtaaatcaaaaggaaccgacttaggagctggaatgacatctaggagctttacgaaggaagagatctctaaacataacacaaggaaggactgttggatcgtcatcaaggacaaggtctatgatgtcactccttatgtagaggagcatccaggcggagatgccattctaaataatgctggtggtgattccacagagggcttttttgggccacagcacggcactagggtcttcgatatcatcgaggatttctgcatcggtcagttgaaggcatagggtagcttgtattgaattcgtggaattttccggaaatcaagttttgagaagctacatgttatccaacattttaagcattgcaaccttcaagcatttgagatgtcagtgtaattgttccacaattgtcatcggggctgctaggagctgtgatgtagcactgcgtttttattctgctgttgtgtgactgtgtctttacatttctgttgttggacaagactccaaaacgcttgtaattgttctggctaagggcccgttcggttattcaggaatctactccagaaaggatttcagctggaataattgtataatttgtataacaattagtaacctggaatagttcctagttttgttccagcctaaccgaacggggcttaaatcagaatctgtttcacacgatcatttctcgagtgatgttacattgaagatgtcccgagtttgattttaacttggctgttgaatgcgttatttaagatttgtcgtgctctaaggaattgatggtatgcaaacatgaaagtgaacagtatgaagagaacataatttc

SEQ ID NO: 122649 - DNA, 187 bp, Zea Mays
agtgataagtcataaactcataagtcataacagccatatagttcaaattggaaaacaaatagcaagaaaatatagttcaaacttgaaaggaaataaactccattagatagctaagatgatgctgcagctagatagatactagataccctaaatatctcccaaatcaagatcatccattgcattttct

SEQ ID NO: 122650 - DNA, 122 bp, Zea Mays
aggctaagtatggttgtaattgtttggaatgttatttgcatccctgtaaatttgttactgtagtaagttttgttatcagcaaaaggccttattatgacccttccctactgctttttaactga

SEQ ID NO: 122651 - DNA, 119 bp, Zea Mays
aagctcactcccggccatcaggcgcacaccgctctcccgccgccgtcctgcgtcggagcgatatccctacatccccacctcatttgcacccggattggcttcttcttctactactactg

SEQ ID NO: 122652 - DNA, 578 bp, Zea Mays
ctgccccagtgacggctcgctagccggcctgcccgcccggcccacacgcgcgcatgcccagccgcgcgcctgcagtcaccaagcacgtgcatgggctcctaggcgccgtcggggccctgttcacctttccctgccatctctctcttccccaacttctctccctgctttcccatgacgcgcatcaccattttttcctctctctgatgcttgcaaccgccaatgcccctattgcctcgtcgttgccgatcccagcgcccagacgcccagatctcccctctcctcccctagccagccgggacgcccaacttggcagccttagctcgatgtccaatgcctaccgacgcggcggcgcggtggctcggcggggcaatcttcgcggctcgcccgtagcgacgcagatcgtcctccccgcagcccgcttccctccgtccctgcgcgccatccagcagcacccagcgcagtgcgcgaggcccagccccgtccccggttgggttttgcgcagccccagcgcaacagcagtctcgccattctcgtgcctcgcctcgagctcgtctggtcgtccgccgtcgttgcgaggt

SEQ ID NO: 122653 - DNA, 345 bp, Zea Mays
ctgcatcccaaattccagaaagatcaggggccaagctataaatgtttttctagacccagtgagcatacagagtggacaacatacagagtggacggcgggttaaacacaaaagacgttttagttgaagttgtatgtaattcaacatgagtcatgttggctagagggtggaaggctaggcattctgctcaatagatccaaggtttgatccctgagtagccacggtttgatttttttctgcgcgtggaacgggggagggcagaacgacagaacggggagggcagaatggcagactactcttaccttcttaataagtagtatagattacgcactagcgtctctgttgga

SEQ ID NO: 122654 - DNA, 799 bp, Zea Mays
agtgtttagaacaattcattttaggaacttgatagttttcttttcccgtttgaatgcttcttcgtttgacaaactaaactagagatccattggaaacagaacccacaagtggtatgaaccagactggtggaaatttggtgatgggaaatcgtacttccggcacgcttctagtgaaatgtttgtcatatcaagggccattgctcagttcatttctataaacaagtctgttctccggacatatgcccatgatgatgttagtgtaggatcgtggatgattggccttgctgtgaagcatgtaaatgaagcaaagctgtgctgttcatcgtggccctcaggtgcaatgtgttcagcgctataacgagcaacaatgcatgctgaggagttttgcaaacatcgtgcctggtggataatacatgcaatatgaggtcgaatacctgaggaaattttgttttcttctgccattttctgtaacgtcttttggaggaagcttttgcgagccagttcataccgaatcagatatcttgttttttttctttgcaaggccactacactagaatcgtggcttctaacaaaaagccttctgcagattttatcctgttccgtgtgccatttgtagatgccccacccttaccattctttttctgacagacactaccattgttggagtgacagaaatcaatagcaattcaggaaattattttggtccagaatatatatgtatgcgtaatgcgtgtcttcagacctgttgtcatggtggtgaagttggcacatacataaggatgtccttttgaagtcaaga

SEQ ID NO: 122655 - DNA, 1823 bp, Zea Mays
agtatatttgttccactgattcctctctttgcctggcagacaaatagcacacaatcaaccgtcgtctccttcctcgccttcataggcttctccaaattccaaatcgttgctagagaaaccaccaaaccggccggcagcccggcacctctcactcagtctctcaccccttgccaccactctcccgtggcgccttctagaagcttccggaaccagacaaccactgtgcgccgagttttctgaaggcggctttggtctttcgagatctcgttgtcggtgccatggcgggtcagtactgagtgcgcgggcgggagcaggtgaaggtctgccagctcgagatcccgatgcagatccgggagggcccggcgcggcggcaggcgccgtcggccgcgggggcgctgcggtcgccgttgtccgccatgatgctcgccatgttcgctaccatggcctccttctacgtcgccggacgattgtggcaggatgctcagaaccgagtctacctcattaaggagctagacagacgaacaggccagggacaatcagcaatatctgtggatgataccttgaaggttgttgcatgcaggcagcaagggaagcggttggcatcgcttgagatggagctggctgcagcaaagcatgaaggttttgttggcaaatatactcccgagacaaatggaactcattctgggaaaaagccactggttgttattggaataatgactagctttgggaggaaaaactaccgtgatgctgtcaggaaatcatggcttccgacaggttcaatgttgaagaaactagaagaagaaaaaggcattgtagtacgttttgttgttggaagaagtgcaaatcgaggagatacttttgatagggagatcgatgacgaaaataggagcaccaaggatttcttgatattggatgatcatatagagtcagatgaagagcttcctaagaagacaaaaagtttctttgctaatgcagcaaatacattcgatgctgcattttatgctaaggtcaatgatgatatatacataaacgttgacactttaagtgcaatgctcgaaactcactgggacaagccccgtgtatatataggttgcatgaaatcgggcgaggttttctctgactcaacccacaagtggtatgaaccagactggtggaaatttggtgatgggaaatcgtacttccggcacgcttctagtgaaatgtttgtcatatcaagggccattgctcagttcatttctataaacaagtctgttctccggacatatgcccatgatgatgttagtgtaggatcgtggatgattggccttgctgtgaagcatgtaaatgaagcaaagctgtgctgttcatcgtggccctcaggtgcaatgtgttcagcgctataacgagcaacaatgcatgctgaggagttttgcaaacatcgtgcctggtggataatacatgcaatatgaggtcgaatacctgaggaaattttgttttcttctgccattttctgtaacgtcttttggaggaagcttttgcgagccagttcataccgaatcagatatcttgttttttttctttgcaaggccactacactagaatcgtggcttctaacaaaaagccttctgcagattttatcctgttccgtgtgccatttgtagatgccccacccttaccattctttttctgacagacactaccattgttggagtgacagaaatcaatagcaattcaggaaattattttggtccagaatatatatgtatgcgtaatgcgtgtcttcagacctgttgtcatggtggtgaagttggcacatacataaggatgtccttttgaagtcaaga

SEQ ID NO: 122656 - DNA, 1596 bp, Zea Mays
agtatatttgttccactgattcctctctttgcctggcagacaaatagcacacaatcaaccgtcgtctccttcctcgccttcataggcttctccaaattccaaatcgttgctagagaaaccaccaaaccggccggcagcccggcacctctcactcagtctctcaccccttgccaccactctcccgtggcgccttctagaagcttccggaaccagacaaccactgtgcgccgagttttctgaaggcggctttggtctttcgagatctcgttgtcggtgccatggcgggtcagtactgagtgcgcgggcgggagcaggtgaaggtctgccagctcgagatcccgatgcagatccgggagggcccggcgcggcggcaggcgccgtcggccgcgggggcgctgcggtcgccgttgtccgccatgatgctcgccatgttcgctaccatggcctccttctacgtcgccggacgattgtggcaggatgctcagaaccgagtctacctcattaaggagctagacagacgaacaggccagggacaatcagcaatatctgtggatgataccttgaaggttgttgcatgcaggcagcaagggaagcggttggcatcgcttgagatggagctggctgcagcaaagcatgaaggttttgttggcaaatatactcccgagacaaatggaactcattctgggaaaaagccactggttgttattggaataatgactagctttgggaggaaaaactaccgtgatgctgtcaggaaatcatggcttccgacaggttcaatgttgaagaaactagaagaagaaaaaggcattgtagtacgttttgttgttggaagaagtgcaaatcgaggagatacttttgatagggagatcgatgacgaaaataggagcaccaaggatttcttgatattggatgatcatatagagtcagatgaagagcttcctaagaagacaaaaagtttctttgctaatgcagcaaatacattcgatgctgcattttatgctaaggtcaatgatgatatatacataaacgttgacactttaagtgcaatgctcgaaactcactgggacaagccccgtgtatatataggttgcatgaaatcgggcgaggttttctctgactcaacccacaagtggtatgaaccagactggtggaaatttggtgatgggaaatcgtacttccggcacgcttctagtgaaatgtttgtcatatcaagggccattgctcagttcatttctataaacaagtctgttctccggacatatgcccatgatgatgttagtgtaggatcgtggatgattggccttgctgtgaagcatgtaaatgaagcaaagctgtgctgttcatcgtggccctcaggtgcaatgtgttcagcgctataacgagcaacaatgcatgctgaggagttttgcaaacatcgtgcctggtggataatacatgcaatatgagacactaccattgttggagtgacagaaatcaatagcaattcaggaaattattttggtccagaatatatatgtatgcgtaatgcgtgtcttcagacctgttgtcatggtggtgaagttggcacatacataaggatgtccttttgaagtc

SEQ ID NO: 122657 - DNA, 168 bp, Zea Mays
atgtgcactgctcttggaatacattctaagagttttgaaaagccttttcttgagtgcatttttgaatttgatggtacagaaggtgttaaatatatacaacaatctgatattctagactacctgaagcatgtagaatcaaggttgcaagaacatgaaaggtgtacgtga

SEQ ID NO: 122658 - DNA, 2044 bp, Zea Mays
tgacataataccatcctcttcgtaagtgcttatatcacactttgacctgtctacaaaaatttagggaaaaaacatttgccggaattcaaaggtggaaaccaaagatggaaatatagacacgactacgatctgtccacacgagaaaaagaaaacctaacgccctcccggccttccccccccccccccccccccccccctctattccaggagcctcctccccctcctcttctagagggagggaccacagccgcggccgcaccggcgcacaccagctacaccgcccgaattcccgatcgataccggaggtggacgtggcctagggtttccgagccaggccggcgctatggtgggctgctctaggggctccctccccacctggatgaccgccgccgccgcgcgggtcgacctctcgggcggcgtaacgccttcgcaccagggcccatcctcttcgtccccctcctcgggtccctctccggccgcgggggcggaccaggagctcgggatgtacgagcgcgcgttctccgctgccggcgccgccttcgtctcagctatcatcgtcaaccctctagatgtcgccaagactagattgcaggcgcaggcggcaggggtgctgtacaaccagcctgcccagatggcggcgctcggccctgatgcgatcctgtctgaattccgatgctctccttcgtgcacacgtggtcttgtattaggaagtgagccagtttgtcctcctgactgcttccagtacaaggggacacttgatgtattcttgaaagtggttagacaggaggggttcgttagactatggagaggaacaaatgcaggcttagcattagctgtacccactgttgggatatacttgccttgttatgatatattccgcaactggattgaggatttcacaagaagtaatgctcctggcttgacaccatatgccccgctagtagcaggatctgttgcacgctcgttagcatgtattgcttgttctccaattgagctcgcaaggacgcgtatgcaggcatataaagagtttcgtcctggcgtaaagcctcctggaatgtggaaaaccttggttggtgttctcccaccacttccaagttcgagtcagaatgtacaaaattaccgtgttctgtggactggggtgggtgcacaacttgctcgagatgttcctttctctgctatatgctggtcaactcttgagcctatgcgaagaaaactacttggttttgttggagaagaaggcaatgcaggtagtgtattgggagtgaattttgctgctggttttgtagcaggcagtcttgctgctggtgctacatgccctctggatgttgcaaaaacaaggagacaaatagagaaggatactgagaaggcaatgaggatgactacaaggcaaacattagctgagatatggaggtctggaggcatgaaaggtctgttcgccggcgttggcccacgtgttgcacgcgctggtccatcagttggtattgtcatttccttctacgaggttgtcaagtacgctcttcatcaaaggcacacctcatgacctagttttgttgataagatggaagccctcccacttggtgaaaggcatggtaggctagttactctgacagggctaggtgtaagttggaagatcagagtgcccaacagtcaagacacgacaggcttttttatggacagtgtccatttcagtcaaggatagcaataccagttttgccatggagcaggcttcagtttcgcccgtgtcaggttttggaccatcgtctaagcttatgtcttggccggatctgaagctgctccggtaaacttacttggtgtagtccctgtaattgaaggaaaggagagtgtagtagcgtagatactgatcaataattttgcacacccttgaaactacagaagaaattttgcacatcctagtcttgtgtcgatgccttaaaaaaaccgttttggtcttcttgttgacttgttactgtaaaaaccaacggggatatgtttacttggcggaatcattaaattcaaaggggatggattcgttagatatatggct

SEQ ID NO: 122659 - DNA, 1437 bp, Zea Mays
tttgacttcatgtgacttattttagaaacttgagctcacaacctttctcttatttggtctctctatggtggaattatgttattttataatctctgttcgttcaatcagtcgttgtgaactcttttctaatcgctcacttcattggccgtgttgtaccaagacatattgcatggagtaaacaataatatcagttagacaaatcaaaaaatattatacagagagcggagacaataaataaaaaatcttaatttttttattgattgtttacgtgggtattgttgtaagtcgtcggaacgcacgggcaaccgactagtatctcttaaatccggttctgacataataccatcctcttcgtaagtgcttatatcacactttgacctgtctacaaaaatttagggaaaaaacatttgccggaattcaaaggtggaaaccaaagatggaaatatagacacgactacgatctgtccacacgagaaaaagaaaacctaacgccctcccggccttccccccccccccccccccccccccctctattccaggagcctcctccccctcctcttctagagggagggaccacagccgcggccgcaccggcgcacaccagctacaccgcccgaattcccgatcgataccggaggtggacgtggcctagggtttccgagccaggccggcgctatggtgggctgctctaggggctccctccccacctggatgaccgccgccgccgcgcgggtcgacctctcgggcggcgtaacgccttcgcaccagggcccatcctcttcgtccccctcctcgggtccctctccggccgcgggggcggaccaggagctcgggatgtacgagcgcgcgttctccgctgccggcgccgccttcgtctcagctatcatcgtcaaccctctagatgtcgccaagactagattgcaggcgcaggcggcaggggtgctgtacaaccagcctgcccagatggcggcgctcggccctgatgcgcatttccagatcctgtctgaattccgatgctctccttcgtgcacacgtggtcttgtattaggaagtgagccagtttgtcctcctgactgcttccagtacaaggggacacttgatgtattcttgaaagtggttagacaggaggggttcgttagactatggagaggaacaaatgcaggcttagcattagctgtacccactgtaagttctttgctacatccttttttgtggtcattgccttttttgatgttctatgctgctctgtagcctgctgaacatctatttaatagttttaatctgccctatttgaaatattcatataatttttacttagctttgaggacaaattcagtttatcttgtcctttgtatgatgagatatgtatatatccttttcattgttattaaaacgttgtttaagcgtcgtttaagcgagaaaacgtgtttaggagct

SEQ ID NO: 122660 - DNA, 558 bp, Zea Mays
atcctcaagctccagccaggttgcagcgtgtgtgtgggtggtaaatcttctgtccacaccagtgttcacctctcccctgcccaagtttgcccagtccctaggtggtgaccatcgttggcaattagtccacctcgccgtaaccagaattcccagaagaagatgaaattcaagaagtagtttctgaagaggagtctgctccagtgcctgctcatcaagtggatggagctatctaactaaaggttgggtagaaggatctagaacctcctcactgcaacaaaggcaagccccggtgcatgcaaccccttccttgtgtttttaaaagatttttatacactttaagtctagtgaaatgtgcattaagtttataggagttgcttggaaactattggatgcattgcctaccttgatatccatacctttatagatacttctgatgaagtatcaaaatatgatttacaaaaatgcttagccctgcttagatcttgtggatagaggttgtcttttgcattaatgcctagctcaggggttatcctgagaaaggacggcttctacctgcaa

SEQ ID NO: 122661 - DNA, 1137 bp, Zea Mays
ctgaaattctgaacatcgatcgagtggcccagccaattccccgacgtgaccctctcccagtacacccagcagggccactccctgaccgtgggcgtgggcacgccgccgcagcccagcaaggtgatcctcgaccttggcagcgacctcctctggacgcagtgcagtctggtgggccccacggcgaagcagctggagcccgttttcgacgccgccaggtcgtcctccttctccgtcctgccctgcagcagcaagccgtgccaggagggcacgttcaccaacaagacctgcaccgacagcaggtgcgcgtacgagaacgactacggcatcatgacgtccaccggcgtgctcgcgaccgagacgttcaccttcggggcccaccaaaacttctccgccaacctcaccttcggctgcggcaagctcaccaacggcaccatagccggggcgtcgggcatcatgggcgtctctccgggacccctgtccgtgctgaagcagctgtccatcaccaagttctcctactgcctcaccccattcacggaccacaagaccagcccggtgatgttcggcgccatggccgacctgggcaagtacaaaaccacggggaaggtgcagacgatcccgctgctgaagaacccggtggaggacatctactactacgtgcccatggtgggtatctccatcgggagcaagcggctcgacgtgccggaggccatcctcgcgctgaggcccgacggcaccggcggcacggtgctagactcggcgaccacgctggcatacctcgtggagccggctttcaaggagctgaagaaggccgtcatggaaggcatgaagctgccggcggcgaacaggagcatcgacgactaccctgtgtgcttcgagctgccgcgtggcatgtccatggaaggggtgcaggtgccgcctctcgtgctgcacttcgccggcgacgcggagatgtcgctcccgcgggacagctacttccaagagccgagccccgggatgatgtgcctggcggtgatgcaggcgccatttgaaggcgcccccaatgtcatcggcaacgtgcagcagcagaacatgcatgtgctctacgacctgggcaaccgcaagttctcctatgcgcccaccaagtgtgacagcatttga

SEQ ID NO: 122662 - DNA, 1344 bp, Zea Mays
ctatactttcccactgccgcagttcgccactctcgccatcggggacgagggactgggagccaggatacttctgccgcgcggcgaccggtcgagcgaaatcgatctaccccaggtgcggcgggcgcggctttattctcaagattttttctgtgttctttagagagcagccatggacgagtggattcgccaaaccgaggtgtgggtgcaccaaaccgacagctggatccggcagcagcccccggagcagatctatgtagcggccgcggtggttgccgtcacaatcctgttgcttatcgtagcatcttgtctgaaatcgtctagaccaaacaccatagttctatctgggcttagtggcagtggcaaaaccactatttactaccagcttcgggatggatcatcacatcaaggaactgttacttcaatggaagaaaacagtgatacttttgtgctgcattcggagcaagaaaggaaagacaaagtaaaacctgtgcatattattgatgttcctggtcatgctaggctcaaacccaaacttgatgaagtcctgcctaaagctgctgcggttgtctttgttgttgatgctcaagatttcttgtctagcatgcaagctgctgcagagtacctttatgacattctgacaaaggcaactgtagtgaagaaaaaggtccctgtgcttatattctgcaacaagacagataaagttaccgcccactcgaaggaattcatcaagaagcagttggagaaagaattgaacaagcttagggaatctaggaacgccgtatcgtcagccgacatctctgatgaagtccagcttggggtccctggagaggcattcaacttcagccagtgccagaacaaggtggctgttgcggagggtgctggtttgacaggtgatgtttcggccgtggaacaattcatccgtgaacatgtgaaggcataggttgttcttattgtttttggggctccaaatggctatcctgatgagataagatgtacattgcgtcaatgtggttgttacctttcatgcatgtacaccttcatccggtgctctgaagttgcttagagacagtgaagcacagtcatattttgaactggttcagctgaccttgttatagaggcattgcatgttgcactgcttatgcctgacagtcatcggatatgaacagagcatgttgaaactgactggctttggttgttttccacttttgctccataagttttactagcaaaaatgcctgtgctttgcaacgggtttcaaatagatgatttcatgacaataaatttctcagtgaagcaaaacaaacagaaaatgtcatgctgacagattttaatttgttctcatgt

SEQ ID NO: 122663 - DNA, 1297 bp, Zea Mays
gaggtggcacgccgcacgtgccacggcctcttgtcctgcggtcgagcgaaatcgatctaccccaggtgcggcgggcgcggctttattctcaagattttttctgtgttctttagagagcagccatggacgagtggattcgccaaaccgaggtgtgggtgcaccaaaccgacagctggatccggcagcagcccccggagcagatctatgtagcggccgcggtggttgccgtcacaatcctgttgcttatcgtagcatcttgtctgaaatcgtctagaccaaacaccatagttctatctgggcttagtggcagtggcaaaaccactatttactaccagcttcgggatggatcatcacatcaaggaactgttacttcaatggaagaaaacagtgatacttttgtgctgcattcggagcaagaaaggaaagacaaagtaaaacctgtgcatattattgatgttcctggtcatgctaggctcaaacccaaacttgatgaagtcctgcctaaagctgctgcggttgtctttgttgttgatgctcaagatttcttgtctagcatgcaagctgctgcagagtacctttatgacattctgacaaaggcaactgtagtgaagaaaaaggtccctgtgcttatattctgcaacaagacagataaagttaccgcccactcgaaggaattcatcaagaagcagttggagaaagaattgaacaagcttagggaatctaggaacgccgtatcgtcagccgacatctctgatgaagtccagcttggggtccctggagaggcattcaacttcagccagtgccagaacaaggtggctgttgcggagggtgctggtttgacaggtgatgtttcggccgtggaacaattcatccgtgaacatgtgaaggcataggttgttcttattgtttttggggctccaaatggctatcctgatgagataagatgtacattgcgtcaatgtggttgttacctttcatgcatgtacaccttcatccggtgctctgaagttgcttagagacagtgaagcacagtcatattttgaactggttcagctgaccttgttatagaggcattgcatgttgcactgcttatgcctgacagtcatcggatatgaacagagcatgttgaaactgactggctttggttgttttccacttttgctccataagttttactagcaaaaatgcctgtgctttgcaacgggtttcaaatagatgatttcatgacaataaatttctcagtgaagcaaaacaaacagaaaatgtcatgctgacagattttaatttgttctcatgt

SEQ ID NO: 122664 - DNA, 1236 bp, Zea Mays
atactttcccactgccgcagttcgccactctcgccatcggggacgagggactgggagccaggatacttctgccgcgcggcgacagagcagccatggacgagtggattcgccaaaccgaggtgtgggtgcaccaaaccgacagctggatccggcagcagcccccggagcagatctatgtagcggccgcggtggttgccgtcacaatcctgttgcttatcgtagcatcttgtctgaaatcgtctagaccaaacaccatagttctatctgggcttagtggcagtggcaaaaccactatttactaccagcttcgggatggatcatcacatcaaggaactgttacttcaatggaagaaaacagtgatacttttgtgctgcattcggagcaagaaaggaaagacaaagtaaaacctgtgcatattattgatgttcctggtcatgctaggctcaaacccaaacttgatgaagtcctgcctaaagctgctgcggttgtctttgttgttgatgctcaagatttcttgtctagcatgcaagctgctgcagagtacctttatgacattctgacaaaggcaactgtagtgaagaaaaaggtccctgtgcttatattctgcaacaagacagataaagttaccgcccactcgaaggaattcatcaagaagcagttggagaaagaattgaacaagcttagggaatctaggaacgccgtatcgtcagccgacatctctgatgaagtccagcttggggtccctggagaggcattcaacttcagccagtgccagaacaaggtggctgttgcggagggtgctggtttgacaggtgatgtttcggccgtggaacaattcatccgtgaacatgtgaaggcataggttgttcttattgtttttggggctccaaatggctatcctgatgagataagatgtacattgcgtcaatgtggttgttacctttcatgcatgtacaccttcatccggtgctctgaagttgcttagagacagtgaagcacagtcatattttgaactggttcagctgaccttgttatagaggcattgcatgttgcactgcttatgcctgacagtcatcggatatgaacagagcatgttgaaactgactggctttggttgttttccacttttgctccataagttttactagcaaaaatgcctgtgctttgcaacgggtttcaaatagatgatttcatgacaataaatttctcagtgaagcaaaacaaacagaaaatgt

SEQ ID NO: 122665 - DNA, 1076 bp, Zea Mays
gaggtggcacgccgcacgtgccacggcctcttgtcctgcggtcgagcgaaatcgatctaccccaggtgcggcgggcgcggctttattctcaagattttttctgtgttctttagagagcagccatggacgagtggattcgccaaaccgaggtgtgggtgcaccaaaccgacagctggatccggcagcagcccccggagcagatctatgtagcggccgcggtggttgccgtcacaatcctgttgcttatcgtagcatcttgtctgaaatcgtctagaccaaacaccatagttctatctgggcttagtggcagtggcaaaaccactatttactaccagcttcgggatggatcatcacatcaaggaactgttacttcaatggaagaaaacagtgatacttttgtgctgcattcggagcaagaaagggtatgcaaacttctagagctcattctttttccaacatattgagagaaaagtaatgtagatagttttgtttcttatgaaaaaacatgcatatcctgactgcgatatttctgctaaaccttcctgttgtccttccctgcagaaagacaaagtaaaacctgtgcatattattgatgttcctggtcatgctaggctcaaacccaaacttgatgaagtcctgcctaaagctgctgcggttgtctttgttgttgatgctcaagatttcttgtctagcatgcaagctgctgcagagtaaattttgcccctccccttccttaatttttaccaaatgcatttggtgtctatttctatttcatctactttcactttcctttgtgctaagtttaagttaacagtgtaattaggagcccttttcatattccgagattgcagaaacaattctgtttgaataatttcctatattatcatttgtgtgaataggaaccttctccactattcccaacattgtagagcattactctgttttatcatttcttacgttgttaacatttcataacaatattatcatctttttgcaggtacctttatgacattctgacaaaggcaactgtagtgaagaaaaaggtccctgtgcttatattctgcaacaagacagat

SEQ ID NO: 122666 - DNA, 527 bp, Zea Mays
aacaaggatcggtaaaacatccgctaaaacatagcgtctgtctggcgatcgctaaatgtggcgtttctctctccatcctctatccatgtgtgcgctcgatattttcgtacaagtcgccagcaatgctacggcagttactcatccaccaccgtgctatggctgtcgggggcggagcttccatgccacggtggtgcagctcgaggaccaacaagcggggatggaggccctcgacgccatggccgtgggggcagagcttcgacgctgcggcagcgcaggtagtagcctcggatgcgacctccgcatcagcgtgctcgagccaacaggggaggccgctattgttgccgggaaggcctactatgacggccaggtggagtagcttgcgaatgcaatgatgtgggcaaatgcagcaatagacatcgcgtgtgcgagcagctaggccgccaatagtgatctgtgccaaatgctggacgacgcatcatacatgtttgatgaaatggtcagccgacgtctagtaccagcttttgttc

SEQ ID NO: 122667 - DNA, 2103 bp, Zea Mays
atggacttgcaagcggcgaggctcgacgccgcgcgccagcgggtgtatacgggggcgccgacctcctccgcgctggggcagccccagccccagcatctcggcgccggcgaccgccgccgctgccttcctcctcgccctccgacttctagaggcaagacgcgcagcggcggcgtggggaaggcggacgaggtgcgcggtactcgggatcgggacacgcggcacggcagcggcgtgatgacgtgctactcggtggctgttgtaacgggcgacggggcgcctggggtggcgcggaaggacaagggagtcgccgagttgggcggcaagaggtgtctcgacttggcagaggagaagggagtcagcgacgcggggaggaagatgggcctgggcttggcggcgtacccactggcgccgctgcctaagcggaggctagtgtcggcgacgcgccgtttctcgctcggctacgggagagaagctgcagctacgcccgcggacgacgattctaggctcgtggttgcagttgcttctgatgcactgaagaagacggctcttcctctttcggtcggcaaggcgggttcgagtgtcatggaggtggagtcatctgctgcggttgtctccgcaccaattgctgacagtggccatcacggtctggaggctgagctgcagagatcatatgagagttcatgctggagcagtgtgcctagtgcaactggtttccttgacactggttcacagaggagttctggatttgaaaggaacgtgttggtgccaggcacacagcgtttgctacccaagccaaggatgatttctgccattcgccgcttcccacctggttgcgggagggtccgagcgtctctggttgctcgaggagtcagtaaagtgcgtttgccattgctggggaaggtggaagttatgcctgctaaacaacaagttgtgaaggctcacgcatctagaaaaaagtgcgtccgaacagaaggagatgttgctgccacaattaggaactcctttggtcccaagaagaagggaaatataaaacagaaatcgatgctgccatctaacgtggaagatggcattctgaaggcactagctgctcgtgaagaaaaatatgccatccagaatgtggatgctaggagcaaggccaagatgctgagcaggaggttcgagtttatgtgcagggctataatacaagctatgaaagaacagccattgaagttacatagaattgatcttgcagctgctgatctaatcaagaaaatgccaggatttacgcagcctgggcctattgttgggaatgtgcttggaatagaagttggtgacgagtttctctacagagtcgagttgaacattgttggtctccaccgcccataccagggaggcatagacaccacaagagataaatataatgtgcttatcgcaatcagtatcgttgcttctggaggttatcctgatcagctatctcggttgggtgaattggtatacaccggttctggaggaaagatttctggtaacaagggtgagggggatcaaaagcttgagaggggtaatctagccttgaagaactgcatccgaacaaaaagtcctgtccgagtaattcacaccttcaaatgtctggacagagaggaaggcaaccattcgatggccaaagaaaccacaatattcacatatgacgggctatataatgttgtagattgctggagagaaggccaaccaggctccaaggtgtttaagtttaagttacagagaattcctgggcaaacccaagttctgtcaaccaatcggatctagttattgtttctttgtgcactgaagcagagccttgtgaggatgtggttcaggtgaagagaactagcacaaccatgctcagacagtgaaccagctgcaggacataagccgtgaccagcttgagcagcacaaggtgtaaaggcttcttcgctcttcttggcggtgatggttcttgttgtgttacttctggagtcctggtggtggtataatggtatcttgtgacctgtgttgcgaaaaagaactagagaagccatggcgtttgtttcaacttttaatgaattctgtgctatagtgctatgtctacattgttagactgtctccaac

SEQ ID NO: 122668 - DNA, 417 bp, Zea Mays
atagatatgatgttcacaagaggttctcccaaaattttgatgttatctaaagctgctcaaaagaaggtttctcctaaagattctacatcaaagaagtgtggtgtttagagagcggcatggaattctgaattggagaagagccacgatgatttgttgtttgagcacaatgtacctccatatagggctcaaaattgctggagtccagatgcttggaacaaaattgttactaaattcaataagcatgagtatgtcacattcaacaagattcaaattcaggagaaggagagggaattgaaaagggattacaagatgttgaaagaggctagaaagcaaagtggtgtttcctggaatgagaaacgatgcatgattgttgcagatccaccaatatgggaaaatatcataaaacttttggcatga

SEQ ID NO: 122669 - DNA, 1780 bp, Zea Mays
atccgctcgctcttctcccggtcgttagccgccgtcggcggggctccgtcgggctccggcgtcgccgcgctaccggacctccgccgctgcaagtccttctcttacgggcacgggggtgacgtgctggccgccgcgggcaagccacaacggtggtcgtgcgacgtgcgcgggcggagcactctctgggcgctcttccaccaggacgaccgccaaccggttcgcgacgacaccgcgttcggcgccttcccggcctcgtcctccgccgccgcggccgcgctcgcccccgcagcctccgccgctgccacctcccacgtgcgtccctgagatgttctcggaggaggagatcgctgtggccgaggactctggcgagattgtctcagtgatggagcctgtctcggtcgtgggcacctctggggagatggagacggaggtgagtgcggagcgggatgttagggccatgaaggatcacatagatctcgaggcctcgcagtcgcagcagcccaggaagctgccgtccaaggacctcaaggagatcgtcgggagcttttggcttgccacctcgacattcagcaagaaatggcagaaatggaggggcaagcagaagctcaaagcaggaggcaaggagaatcgtgggtctgatccaccgctgccccgcggggtgcagggacggcgtgtccgacgccgccgaccgcgcgttctcggagccatggccggacctgcgcgtccgcggcagcttgatgacggttctaatgctcctgtcacatatgtgctgaaaggatcgcaggcagagcaaatgttgtgtcctcaatggcagccacaaacaatggaaaatactcctgtcactactaattcaacactcgaaaagcaaatacaagaagatttttgtcaaagagcaatgtcgcaagatggaacacaacaaccattttcatcagattggcgtctttctaattgcactgcaacttctattgatcctgcattgccgaagcctgcagctggagggtttgaacaggaccagaccatggacaacgatgatgcacaaattggagttgctaaaactcagggaaagtattggggcattttcatctgctggcttcttggaaatggatgtctatttgggttcaatgagatgcttactattgaagattactacgtgtacctcttcccgaagtaccatccaacaaggattattactctcacctatcagccctttgttctcgccacaaccgccatattcacatatcacgaggcaaaggtcaacgccgaccgctcgttctcgaagccatagtcgcacctgcgcgtccacgggtacaacgacagaatgcagcggtgcaacagcaacgccagagcgcggagctcattcagcagcaacaacggcggtctgggcagctccaggcgcagctactaggacgcccacgggaagcggaggcgcgaggagtgcgcggcgctggagcggaaccgtagcgcgcggcactcgccgggcaacgcagacaacggtctgctgcggttctacctcacgccgatttgtagcgccagcatccgccggactggcgtcagctgaggtcgcagtcgttcgcgcggacgatgctggggctgtactagagtattgatgacggcgacctgatttctggtcaagctgcttcatttcagtaggcagtagccgatggcttatatgttgagtggtttgggcgggttgtataaccaaaatcgtttacatctgtgtgtagtgcagtgatccttttgttcattcggagggctggataaaatgaagtttaatctcgta

SEQ ID NO: 122670 - DNA, 621 bp, Zea Mays
cgccgcgcccgcccccgccgcacccgccgcggccgtcgatccatcaggtcgcagcctcgtctgatttggtacggattttggcaagataccacgtccctaactccgctgtttcaaggataacaaagatggcgtcgccgcggggcgggttcgatgagcaagatcgccggacagagaagggcaccgaggtgttcgtcggcgggctgccgtggtcggccacagaaagcatgctcagacagatatttttcttcatgcggagagattattgacgcgtacgttatgaaaggtcagagtggtcactcaaagggatatggttttgtgcggtttgcaaagagggattatgctaatactgccaaaaggcaaaagaatggtattgagcttcaaggaaagaggcttgtgtttgagctttcaatggatcaagatacagttttctttggaaatctttgcaaagagtggactttagaagaatttgaagaattgattcacaaggcattcaaagatgttgtttcagttgaccttgcaatggcttcaaatcttgattcttcaaacaagaagaatatcaatcgaggctttggatttgtgagattttcttctcatgcagtatttgccaaatattattgcctc

SEQ ID NO: 122671 - DNA, 371 bp, Zea Mays
cttcgccacaaacttcgatccataccaatgcgtttttttaaacactcaccacatcgaccaaaatataattatacaaactacaaatcgcacatatcaacaaccgcttgttctttaaccgcaaatgcgatcctactaacgtgtatagccgaaacatattacacacatccacatatatacatgcattgcccgatatcaaccaaagcatatgtattataaactataaatcaatcaacctgaacgagtcgtgactagacgcatggctgtccacatggctcggtattttgtcgaacgggcaaagcgcgacatcgaccactagctgcgaaaacacacaaatttgttggcggcagttcatcgaacatcacacacatcgg

SEQ ID NO: 122672 - DNA, 267 bp, Zea Mays
atgctcgccaagtgttgtcggttgtacctcagcattcgtgcttgccgctgactcgcgttaacgctcgcgcgcctgctcgttgtcactgcgtcgcactcactctttgtccatcaggcttcacgcgtgctcgcgtttgtcgtcgagctgttgaacccgtcctcccttgctcgtgacttcatcgtcgctagaaccctcactagattcgtgtcctcgccagctcactccatattcaatctcgtcgtcgttccgcgcgtcagcaagaaatct

SEQ ID NO: 122673 - DNA, 95 bp, Zea Mays
ctcgtgcttcgaatcaaatcaaaccgtatcattaatactatcgaccctttgattattgctacaaatctcgatccaaaatatcagcgaattctgtt

SEQ ID NO: 122674 - DNA, 391 bp, Zea Mays
ctgcactcaagatctccagctgacttagacgtgcgccatcttcgctaagggagggcaccacgtcgaccacgcgcaccagcaccccgaattgggatactcacctccgagagagagaacagggagccaccggaggcctccacggtcgtccggcatgcagtgcactaattggtgccctgtgcgaggtcgggagagtccgtccaagctccaggatcgtgttgaggtggtggctgggagggagtgcgacctgggcgccgccaatttgatgccgtggccgcaaatccggggcgcgccgtgggcagggaaagacactacgtaatcatttatacgagcaagcgaccgaggaccccggtacccagcaggtggaaagtactgaggaggagctcattgaagg

SEQ ID NO: 122675 - DNA, 796 bp, Zea Mays
gcccctgttcccatggcgctcgaccaccctccctgttcgcccagccgctcgtctctggtgcccagatgtggtccgtctcctccagcagagcttcctgcgcacgcagtcactctcctcccccaagcgtcctcgcttcctccctctgtctgctcgccaggcgcccaatccatggccgattgttcctgctcgctgctctccagccgagctcccctgttggccggtgcctagccgttcttcctcccatggctgctgcgtgcgctcggctgcagatcgccggtcgagctccctgaccgccgcgtcgtggattttcctacgcgcgcgtctccttgcacatgcgtcgccgtcgagttctctggtgtttgcgcaccatgaggttcctccagcgtcgtggtctgcagcttgtctgttctagctctctggtgccatgcgttgagcttcttgccgtcgctcagctcaccggtgtgcgtcctgctccttacgcgcccagcgccatgcgccgtgaagtccctgcgcgcaagctatctgttggccgcgtgtgaagctctctgttcgtcgtcatcgctcggttgtgcgataggctgactgcgtgtcgtgtgtcgcacatcctaggtcctcgtcgtcgtgtcgtgcgtgcaacagttctggatctgtgccaccctggtcttgttgtcgacatcgttcgccgtggcgtagtcgtggaacttcctcgacgccgcgcgcgtcagatcgttgggtcgcgtcttgctcggctctctgacatctggccgtcgttgctcctatgtgcgcgcgtgcccag

SEQ ID NO: 122676 - DNA, 202 bp, Zea Mays
ggatgctaggaggcctctaagagatgaaatggaggcaaggatgggtgtggaatctttgcggaatggacttttagaagatctgaacatggaaaaatttgaggagaaacgccttagtgacctgggctatctatgtggaatgatggaagcgcttaatgttccattagcagatacacttgtagtggcattctgggaggggggatag

SEQ ID NO: 122677 - DNA, 466 bp, Zea Mays
tcttcagtagtacaccctattaaggagtggaagccaaaatcgacaaagaagtcactgaccatcgatgcagataacagtatagctgatgctacatctccttcagctagcaactgtgaaagtgccaacacactgaatgtaaacgaattgtctgaaaaaatttcacaaactaaattgcatgaggtggagcatgttattattccggaacatcttcgtgtgccagaatatgagcagaccaagttaaggtttggcagtttcatatctggtttgaattcggaacaagtatctccctcgaccccacaagacactgagcaaccagaacagttaggtggacctttcctaattcttttaatcaaaaacagataaacttgtggcaagcgtcattgcgtcaggaagttgacctcctgaagttatttgatattgtatactgataagtgataaactagattatgtagttcctataattttt

SEQ ID NO: 122678 - DNA, 635 bp, Zea Mays
gccctcggcgaagagctcgccacggacggcggcattgccaccaagcggagctccacgaccgcgaccttaccatccgcctccaactaagttgcttcacattgtcttcctcatcgtacgtcgaagcttcgacgtctcctcccgagctcgacaaaccccacacgccaccatcgacgtctcagcgcttcggttcccgccggcacgcgtggaccgagcacctccgtctttctcctgccgccctgagctcgtcaacgaggccgccttcacccaccgtcgcttgtcgtaaactcgcccagcaatttctgccaccgatggccagatgtactacgggtaccgtgagcactgcctatacccggctacaggagatgactaggcctagggcagggcttctccattctcgtctcatgcttttggtgggttggcatacccaaatgttggcatagtatttcgaaaacctcgcaagtgatgtgggtgctagttaaataaatgcttctgctaaacttatcacttcggtgattgctacttggagttatttggggcctgcgtgccatccatgttgtaataaccctatgtactccgatttatgttaaaccctgtggaatgttgtaacacttgatgcagtaaatgtcagttcatta

SEQ ID NO: 122679 - DNA, 231 bp, Zea Mays
tatagacatgcatcattgccatcaaaattcagtgtctacgctccatccagttaaggtcaggaggtctgcaacttttcacagtaacttgtggaatcaaggtttaaaaaatatgctatgctaatagttgttagaagtatgaagcttatatttcaaatgatgaatcaataaacacaccctatacatcaactacgatctgcgtggtcacattactacattagacattaacatctc

SEQ ID NO: 122680 - DNA, 1506 bp, Zea Mays
atggatatatttaagaccttcattgagctgttacgccaaactggtaatgttacgaaaggacaaggcgacatcgatgagtccagccctcgctggttgctgaagcaagaggtcccaaaagttgtcaagtctatcaacaggcagttacgtgaaaaatcaatcaagacaaaggttggggcattttcagtactgaaggagcttgtggttgtattaccagactgtcttgctgatcattttggatcacttgttcctgggattgagaaggctttgaatgacaagtcttctacctccaacctgaagattgaagcacttgtattaacaaggcttgttatggcttcacattcgccatctgtgtttcatccatacatcaaggcactttctgcacctatactgtctgttatcagagatagatattataaagtcactactgaggctttgcggaaaactgtagttgattttgagccatacattggtccaatctataatgcgatactgggacgtttggccaatcaagatcaggatcagtgcactctcatttatcatgcaaatttgtgttctcccaagagagaattaccagcatgccttcccatactcgttgataggatgggtaatgaaattacaagacttacagctgtcaagtggatgaatatgcctaatcttctggaagttatagatttcaaggacacttttcttgatgccaaccatgttcagcaaagttttccagactaccagagcagaaataatatggccgatggggagcctcagaaagagaaactaattgttgagacttacattccagctgatcctgggccgtatcctcaagataaacctaaacagaactcagtgaggttcacaccaactcaggagatgtacgaggatgcaagccaagtggcggttgatgctgtcggtagtatcagaaccgtggcgtcgttctgcgcagagaaaatagtggtcgcagcgtacagggacaagtgtgaggctctaaggaaacagggcatccgaaacggagtcatcggaggacttggttacggcttctcgttcttgatgttgttcttcacgtatggcctttgcttctacgtcggtgcgcagtttgtgcgccaggggaaaactacctttccagatgttttcaaggttttcttcgcattagttctggcagctattggagtctcgcaggcgagtgcactggcttctgatgcgaccaaagcaagggactctgctatttccatcttcagcgttctggacagggagtccaaaattgactccagcagcggcgacgggatgacgctggaggatgtcagtggcaaaatcgatttcagaaacgtcagcttcaagtacccactgtgtcttgacgtccagatattcagcgacttcaccttgcgcattccttctggaaagacagtggcgcttgtcagagagagtggcagcggcaagtcgacgataatcgctttgctggagcgtttgtacgacccagattctgtgtcccagtgggtcaagctatggtttgactga

SEQ ID NO: 122681 - DNA, 465 bp, Zea Mays
agcttccagttgtcgctgccgtagacataaccgaggagtcgaatccattgcttgaggttgctatctgggaagaagtaaaagatgcagcttttggcatcacttcaattaccatggacgcaattgccttcaccatctcatccatgtcagcgcttgggtttgcttcagacaggtcctcaagctaaatgcaaaaaaaattagagatgtcactggcccttagagctaagatacatcatcttcattatcgatacagtaagaggcacatgaagcaaaataaattgcatctgtaactgtttaccttcttctcaagatcaggcaatatgctagtaagctgttctagctctttttcaacggtagaattttctgagcctccttcagcagcagatgcatcaccaccatctataccagccaacaaagcatccttggaacttttcaggttctgtatgcgtgacttgcatagcgaaattg

SEQ ID NO: 122682 - DNA, 831 bp, Zea Mays
gttgttgcttttcactcgtgaaaaagggtcttaagtggcaggttgacttagttattagcaacagtagtactttttggaaagactaatggatctctccccttgacacgatgaagtgtgactgtgacctgttggtttggagttcagaataattgtgcttggcttggagttagaaatcttaagccttaaaatccaaaagaaggcacgagaaagtgctttgttatcacattatttgctacctttccaacgttatgatgtttgctgcctattgatgtttcaattttctcgtataaattgcaaatagaaaataggattactagttcagttttgttgttgtttattttcagtagtttgttagttcactcatctaagccatgtgatcctattttttggtaggttgtgatcatttttttatcattctggatacctaccttcgtcgtattatatatttcttataatgtctgctatgttcttggttacttggacagatagggagcattcaaccatcagcgaaaaagatcaagttcgatgaggcatagtattttattctaatgggctgttggatccttagtagacgaggcggtggaatggttgagcaatatattcaccttttgaggagacggcagacaactatgtatttcacttttgaatttctctatgttttatgaatgacaccgacacagatgttacaacttaagtatgaaaatgcaatgggcgatgtgttcttaatttgcccttggaaggttccatataacaatgtgttcttaattcacttgttcgttatatttatatactgtgctgcatcaatcgatgaaattcgacatcatagtaaaa

SEQ ID NO: 122683 - DNA, 1115 bp, Zea Mays
aaaccctaacccctccttcgtttgcccatcctcgtgacggctcctcgccagtcgcctcgtctctccctgccgcgtcgcctccagttccgcctccgccgcgcctcccgcctccgccgcgcctgacgaacgcagtataggactgtgcaggtagagaggaggagggtccggcgagatggggatgcgagataagaagcggaaccagaagcgagtgctcgcgcgccgtaccgcggcaccgcgcccaggcgagggcaaggatttcctgccgctggaaggaggccccggtaagaagcatctgaaggtgcagcagcctgaagagcccgaaaacacagccacaatcgtctacattgggcatatcccccatggtttctacgaggacgagatgaaagggttctttaagcagtttggggatattaagaggcttaggatcgctcgtaaccgcaagacaggaaagtccaagcactatggattcattgagtttgagaaccctgctgtggcaaaggtcgtagcagatgagatgaataactatctcttgtttgagcgcaccttgcaagttgcacttgttgagccagagaaagttcatcctaaattatggaaaggggtgcgaaggggatttatacctgttgatcgagtagcaattgaacggaagagacacaacaaggataagactgtagcagagcacaaaaagatggttgaaggaattgtaaagcgggatggaaagcgtcgcaaaagaatcaaggcagctggtattgactatgagtgtccagctcttatagggagcattcaaccatcagcgaaaaagatcaagttcgatgaggcatagtattttattctaatgggctgttggatccttagtagacgaggcggtggaatggttgagcaatatattcaccttttgaggagacggcagacaactatgtatttcacttttgaatttctctatgttttatgaatgacaccgacacagatgttacaacttaagtatgaaaatgcaatgggcgatgtgttcttaatttgcccttggaaggttccatataacaatgtgttcttaattcacttgttcgttatatttatatactgtgctgcatcaatcgatgaaattcgacatcatagtaaaa

SEQ ID NO: 122684 - DNA, 1089 bp, Zea Mays
aaaccctaacccctccttcgtttgcccatcctcgtgacggctcctcgccagtcgcctcgtctctccctgccgcgtcgcctccagttccgcctccgccgcgcctcccgcctccgccgcgcctgacgaacgcagtataggactgtgcaggtagagaggaggagggtccggcgagatggggatgcgagataagaagcggaaccagaagcgagtgctcgcgcgccgtaccgcggcaccgcgcccaggcgagggcaaggatttcctgccgctggaaggaggccccggtaagaagcatctgaaggtgcagcagcctgaagagcccgaaaacacagccacaatcgtctacattgggcatatcccccatggtttctacgaggacgagatgaaagggttctttaagcagtttggggatattaagaggcttaggatcgctcgtaaccgcaagacaggaaagtccaagcactatggattcattgagtttgagaaccctgctgtggcaaaggtcgtagcagatgagatgaataactatctcttgtttgagcgcaccttgcaagttgcacttgttgagccagagaaagttcatcctaaattatggaaaggggtgcgaaggggatttatacctgttgatcgagtagcaattgaacggaagagacacaacaaggataagactgtagcagagcacaaaaagatggttgaaggaattgtaaagcgggatggaaagcgtcgcaaaagaatcaaggcagctgatagggagcattcaaccatcagcgaaaaagatcaagttcgatgaggcatagtattttattctaatgggctgttggatccttagtagacgaggcggtggaatggttgagcaatatattcaccttttgaggagacggcagacaactatgtatttcacttttgaatttctctatgttttatgaatgacaccgacacagatgttacaacttaagtatgaaaatgcaatgggcgatgtgttcttaatttgcccttggaaggttccatataacaatgtgttcttaattcacttgttcgttatatttatatactgtgctgcatcaatcgatgaaattcgacatcatagtaaaa

SEQ ID NO: 122685 - DNA, 1786 bp, Zea Mays
aactttagcagcgaaattcatccaaaagaaactcctgataaatataaaaaggaggggaaaaagaaaaacacttgcagcggcatccaccaccggagctcccatcatcggtctatccctccgtgtcaaccccctcctcagaagttctaattgcagttcagcccctggccggtccgccgggccaccggaaggagccgctcgccggaggaagccccccatctccttgccctgcggcgggtttatggggttctcgctgtaccccatgaagacgtccacgcggttgctctggagcactagcttcttccgccataagctcagctcctcctcctgcttcctctgagcccgccccacccgcgtcgatcacctcggcggcggcccgctgttgctgcgcggtcctagcacccgttcgagtgtgtgtgtttgtgttctttgagtttcaagattgggttttgttgcgttattggggagacgaagggactaaggcgcagtgagcggacaagaatcagcatggatccgagcgcggtcagtttcgactctggcggcacgcggcggggcggcggcgcgcagatgctgctcttcggcggcggaggcagcgccaacagcaacggcttcttccgaggtgttccgatggcggtcctgggcatggacgacgcgacgcgcgtgggcaagcggcccttcttcacgacacacgaggagctcctagaggaggagtactacgacgagcaggcgccggagaagaagcgccgactgacggcggagcaggtgcagctgctggagcggagcttcgaagaagagaacaagctggagccggagcgcaagaccgagctggctcgccgcctggggatggcgccccgccaggtagctgtttggttccagaaccgccgcgcgcgctggaagaccaagcaactcgagaccgactatgaccgcctcaaggctgcttacgacgcactcgccgccgaccaccagggcctcctggccgacaacgataacctccgggcacaggtgatctccctgacggagaagctgcaaggcaaggagacatacccgtcggcaaccactgctgcccaagaggtcgaccagccagacgaacacaccgctgtgtcaggcacggaagaactgctggcgcagcagctcaaggacaacctccacagcagcggcgactgcactggccatggcaccctctcttcggaagaagacgacggtggcgtggtcagtgacgagggctgcagcttcgctctcccggatgccatgttcgctgccgggttcacccaccatggcgccgaggaggtgcagctggccaactggacatccatgttctggaactgatcagcggatggatgcatccaagtgcaaagatcggatcctctcctcgtctcgacccttttctgcagcatataattaccgtgttaattatgtgccgtccgatgtttttaagtgctcatgttttaagtttgtgtttttttgaagattttgtatgttcatatatataataatgtgcttcgaacatgacactcgaaaagttgaataattggacatgtcgacctgctgtgcactagcagctggcatgttttgtttagggctggtttgggaagttcatttttcaaagaattcatatttttcaaagggaaatgaactaattttacttaggaaaacggaaatccctcaagaaaatagagtttctaaactagccatgagtttattatgctgctttagacatgaaaatgtgtatcgccctgtgaataagatgatcaaggtatatccattacacaacctctgccacttcatttgg

SEQ ID NO: 122686 - DNA, 1315 bp, Zea Mays
aactttagcagcgaaattcatccaaaagaaactcctgataaatataaaaaggaggggaaaaagaaaaacacttgcagcggcatccaccaccggagctcccatcatcggtctatccctccgtgtcaaccccctcctcagaagttctaattgcagttcagcccctggccggtccgccgggccaccggaaggagccgctcgccggaggaagccccccatctccttgccctgcggcgggtttatggggttctcgctgtaccccatgaagacgtccacgcggttgctctggagcactagcttcttccgccataagctcagctcctcctcctgcttcctctgagcccgccccacccgcgtcgatcacctcggcggcggcccgctgttgctgcgcggtcctagcacccgttcgagtgtgtgtgtttgtgttctttgagtttcaagattgggttttgttgcgttattggggagacgaagggactaaggcgcagtgagcggacaagaatcagcatggatccgagcgcggtcagtttcgactctggcggcacgcggcggggcggcggcgcgcagatgctgctcttcggcggcggaggcagcgccaacagcaacggcttcttccgaggtgcgtgcgtgactcatcgggagccggtcagatctggatgcgtcttgcggttctcgattccccgattgcttacccgcggcgcggtgccatgtgggcatgtggcgcaggtgttccgatggcggtcctgggcatggacgacgcgacgcgcgtgggcaagcggcccttcttcacgacacacgaggagctcctagaggaggagtactacgacgagcaggcgccggagaagaagcgccgactgacggcggagcaggtgcagctgctggagcggagcttcgaagaagagaacaagctggagccggagcgcaagaccgagctggctcgccgcctggggatggcgccccgccaggtagctgtttggttccagaaccgccgcgcgcgctggaagaccaagcaactcgagaccgactatgaccgcctcaaggctgcttacgacgcactcgccgccgaccaccagggcctcctggccgacaacgataacctccgggcacaggtcatcgtctgaagttcgatgtcatggtgcgatgaaaagactgcaagtgcaagcatatccgtaggaaactaggaactagagttaaaactggggaataatgtaaatgagttcatgatcatcgttgtttggatgttttgaaatgccatgtatgtcaaattagtgtcatcaatgttatcaacattactgaaacgtgggctttaagatgagca

SEQ ID NO: 122687 - DNA, 986 bp, Zea Mays
acacactgttgcaggtctattagcagacccacttaataaatgtaaaacaacggagggccagagccagtttatctctgaagataatatatcatctggtcggtgtcagttactaaaggaggatttgattaatgcaacggttgatgtgagtgacatctctgagtcatttgatagttgcccatattatctaagtagtcaagtagtcgtttactgtctttggcctgatttactttggtatatggtcgaaatttttaaactttgctgctcacattctaggacaagcgcaggggagttcattgccagtggaagtgatgatggtagatggtttatatgggagaaaagaacaggaaggcttattaaaatgcttgcaggggatggagctgttgcaacaagcggaattgataacacaataaagctatggacatcagatgcaaatgctacatctatggttgctggaccagaacttgatgtattaagtgccatagagaataaccagcggacgttatgtcggaagcgtcaaattgtactgtaagacttccaaactttactacgcacttgataccttacccttaccgtgattgctgttcttgagtcaaattatcaaaattaatgtttgacacaattctgccaaaaaaaatttccaattgcagtgtgtttatattatcttttagttctgatttggaaaatactacatgctatatgcaggccttttgaatttttggaacgagttcggatgcgagagttttcagaaagtttcgagtgtaaccagagctgatttactatcgttggagttgttgaggtacttgtattgacataaaatttcagggcatccaaaggatgaaaagaatcggtttgctatggtcagtcctaggacaagcgcagattcatcaaagtttaaatgataaggccaaagacagtaaagtttaccagattcatcaatgtgagcaagtaaatcaggccaaagatagtaatgagttcacttatgacca

SEQ ID NO: 122688 - DNA, 105 bp, Zea Mays
gtgtttgcgattggaatgccaacaagtgtttgtgtgcctgcaataattcttttgtgcgtcgtagaggttggtcacggatgaattaattgtttgctaaagcacttc

SEQ ID NO: 122689 - DNA, 452 bp, Zea Mays
ttgtgaacttgtagtcaattagctgcaaactatattcatccacaaatctagatgccttgatagatgaatttgggttaacctttcttcatttgcttacagagcaaagcagaagagatgatctggaatctctttgttatgtgctgatgtatttcttaagaggaagtcttccttggcaaggcctgaaagctggcacaaagaagcaaaagtatgatagaatcagtgagaagaaaatgctgacaccagttgaggtcctctgtaaatcgcatccatcagagttcactgcatactttcattactgtagatcactacgatttgaagatgtatatggtgtataatagacattctccatgtattgtttcgttttcatgatgtaccggtacaattgcttattcattttttcctgtactggattgtactggatagggcgcccgaatgggcgccacctgatctag

SEQ ID NO: 122690 - DNA, 1334 bp, Zea Mays
atagatccaattgttccttaaaattacgactcgcacccacggacccaccaaccacgccgccgccggccggccacctttctccattctccgtcaatcgtcatcctatccgatccccaactaggcaactactccgtctcacgcctctcctgtcccctctcgccgctctcgccccgcctctgcctccgcctccgcctcctccatcgcacccagctttcctccccaccccaccgccactcctaccccgccacgtcgtgtagtcgcggcggcggatatgcaagccgccgccgccttcaaccaggcagccttcaccgtccgctcgctgcatcgccccccgaggccccctccatctagctgttgcggaggatgcttttgcggggataagaggcgcgccccttacacggccccggtgctgcgggagcctctctgtcggcgtcggcagctacgacagcgagcacactccagtatttccaagacaacaatcatgggatccctacaagcttcttggtgttgatcaagatgcatctgaagaagaggtccggagtgcacggaattttcttctaaaacaatacgccggatatgaagaaagtgaagaggccattgaaggtgcttatgacaagataataatgaatagctacacagaccgtaagaaatccaaattcaatctgaaaagcaagctaaaagagcaagttgaaggatccccatcatggcttaaggcactgtttggatattttgaggtgccatcactagagatcatttcaaggagatttgccttttttgcgttctttgccgggtggagcattgcaacttctgctgagactgggcctgcctttcagcttgcgatgtcactcgcctcatgcatatacttcctcaatgagaagatgaagaatcttgtcagggcgtccaccacagggttcggaatctttgtgggtggctggatcttgggttctcttcttgttccagtgatcccagctttcgtcatcccgcctacatggtcccttgagctccttacttcgctgacagcttatgctttcatgttcgtgggttgcactttcctcaagtgaaacttagcagcagttcaccaagtggaaattcctgcggtcatcacgaaggaaattgctcttgctaacatctccacagcagatcccaacttactgataagcggcctgcttcacaatttttttttgtccgagagagtatgatgatctttacgttattgttgttgttgttacatgtataatataacattttagcaaccagacaatttcgatggatattgaaaagggatacacgttggattcttccacatctgccgtacggaatccttgtttgtggcc

SEQ ID NO: 122691 - DNA, 1464 bp, Zea Mays
ccaggccgcaagcttttaaggggccagcgagcaggcagttctcgtgtatcaacgagcaggcgtgcacatggagcccacgccagcggcgccgcgcatccacctccagtccccgcagactgccgtgccgacgcgggcggtcgagcctgggcggacgcgccgcatcaccgtggccgcgcccccgctcccaccggccgcgctgcagcggcgcactcgcgtggtgctctactaccgcgcggacgccgctggcgcggacggccgggcctcggtgcggctgtgggaggaggcgatgtgggcgaaggagtcgctgagcgaggccgtggccgaccacccggagatgggcggccggctccggcgccacgccgacgggtcgtgggaggtaaagctgaacgacgccggcgtgagattcacagaggccacggcagaggcgaccctcgacgagttcctggcgaccgcccaggacaaggaccgggcgcctagctgggaggccgccctggcgccgtgggccgacgtgaacgcggaggaccccgacgtgagcgcgctcgtctacgtgcagctgacacggttccagggagacggaggcttcgccgtgggcgtaagctgcagcctgatgctgtccgacccgctgtcactggcgaggttcctggcgtcgtgggcgcgcacgcacgccaggatgaaggctcagaacgacgccgccgcccacccgctgatgcagtacgcgagctacttccggcgcccggacgccagggccgcgcgcgcgctcgtcaagtccgtccccctcgacgccttcgcctccgccgacgccgccgagaccgtcctcttcagagccagacctaccatgctgcccgccggcgcgggcgcaccaccggcgcccgaccaccgcgcgctcgccgtcgcctgtgtcgcccaggcgcgggaacggctcggcgatggcaaggtggtgccgccgcagttcccgctcgtcgtcttcgactgcgaaggcggtgtgagcgtcgagacgtgcgcggcggcggcttacgggcagccgccgtcgccgagcggcggcgggcggtacaagattgacgttgccctgtgggaggagctcgggctggaggagctggtgctcagggacagcaagccactgcacgtgtcgtacagcatcctcggcgctggctgcgatgggctcgccgtcgcgatgcctgccggcgctgccggtgagctccttgtcgcggcgacggtccccaaacccaagtgaagatacatcggcaggcaggctctggcagctagccggggcgcgaaagttcccgtgccgtccgatatctgtggtactgatttctacggtgtttataaattaaaattacagcaaaacaaaaaaaaattatagtatttgtgtgtgaaaatacagagaataagacaatactgtaaaccaatcacagttgtggattttcaacaatattgcccatcaaataaatgcaacgtttgtgaacc

SEQ ID NO: 122692 - DNA, 108 bp, Zea Mays
atttacttgtcggagcgaggttcgaaacaccgacagtttgtatctgtatcgtcttttagcgtccacatttatattctatatcttcgttgtgtgctttagctttctagc

SEQ ID NO: 122693 - DNA, 1587 bp, Zea Mays
aaactaaaccctatttctcaaaccctagattcggatccgccatcaacaggctccgccatcaacaggctcgaacgccctctcctcaaaccctaccagatcttgtcgttcggcgcctcaaaccccagattcggatccgccatcaccatagaggtgggggctgacggcatagcgctcatcaccatcgccaacctgcccgtggtggatgcgccatcgcctgaggtgagccgcggggaaatgagggatccttggaggcagagctggcgtcgcgtcgctggtggacgctggtgctggtgaacatggcgtcggtgctggaaaagatagacgagatgttgctgctcgccgtgtacaataaggtgtgcacgtcgctgggcgcttctcgacggcgctgggctcccaaaccctttgtcgcgcgctcgttcaagccgcctactacctactcaaagcctacgcctccgcgcgccatgatcgggcccgtgtcgtcgctgtcggagccttcacctgggccaccatcgccttcctcgtcgccatctccggcagcttcctctaggaaggccatctggtatttcgaaggaatctatgcgtactcccctcagataccaggtgttcgtttcccatgattaacccatcctggtatagtgggaactgcaccgtcagccaaacttcttaatgtatggaatgagagggagaaaagattggccgagacaagcccacagacccttaaactgtttgaagtgctacaccagaggccccttgccaatttaccgacccctgagaactgcttacttggaaagattcaggaggggactgctggatggcacaaagtggcgaatgaagcagccaggactattccgggaagggagaatggtggtaattgtgacataaaaaacctaagcagaggttccaaagtttatctgccagtatttgtcgaaggagcgaatcttagcaccggtgatatgcacttctctcagggcgatggtgaagtttcgttttgtggagcaattgaaatgagtggattccttgagctcaacttcttccagggattcatccctttgatccatccatcaaaaacaaagttcagtgcagcggtggttttgttgtaatgggtcagaggtggcagcaggaccattggcaccttcatcaatttaagttcagtgcagcggtgaggttcgacatgccccgtgcctactatcactctcgatttgaagaagagtctcaagattctgcaggtgttgtgttactcctaattcagttaccttactggcaataggatgccattgcaacttctgaaagtgcaaccatctgattgaagcggatttaattatacaagatagatctagaattgctttacttgagattcaagcaatgttggatgcttttgtgactgatcatctctggagcttttgtgaatgatctagctagctatctgtaaatgatcttgttgtgaatgatattataattgtgatgttttttgtgaatatataattgtggtgcttttgtgtttatgtgatggatctatgactgtggtatactgattaattgtgtatgtctttatgatttgtgtataaaaatctatgatttgtggtgctt

SEQ ID NO: 122694 - DNA, 681 bp, Zea Mays
ttactttatggctgttaattgggaaaaaactgaatcagtctaaattttcactttgatgtcgtctttaaatccagttttcatcgttgcgtgtatgcgtaataaaatgtcacttctgtactttgtgctattagggaaaaatccatcaccagcatgggataagttggtatttaacaagataaaagctagactctgtggacgagtgagacttatgagtttagtcgcttctccgctatcagcagatgtcagctttgcatttgctttttcttgagcactttgttgctcatttgctcttgttttattgcttgattgtggcctcatgtgcgctttgttgctgcatttctcaggttcgacatgccccgtgcctactatcactctcgatttgaagaagagtctcaagattctgcaggtgttgtgttactcctaattcagttaccttactggcaataggatgccattgcaacttctgaaagtgcaaccatctgattgaagcggatttaattatacaagatagatctagaattgctttacttgagattcaagcaatgttggatgcttttgtgactgatcatctctggagcttttgtgaatgatctagctagctatctgtaaatgatcttgttgtgaatgatattataattgtgatgttttttgtgaatatataattgtggtgcttttgtgttt

SEQ ID NO: 122695 - DNA, 1310 bp, Zea Mays
aaactaaaccctatttctcaaaccctagattcggatccgccatcaacaggctccgccatcaacaggctcgaacgccctctcctcaaaccctaccagatcttgtcgttcggcgcctcaaaccccagattcggatccgccatcaccatagaggtgggggctgacggcatagcgctcatcaccatcgccaacctgcccgtggtggatgcgccatcgcctgaggtgagccgcggggaaatgagggatccttggaggcagagctggcgtcgcgtcgctggtggacgctggtgctggtgaacatggcgtcggtgctggaaaagatagacgagatgttgctgctcgccgtgtacaataaggtgtgcacgtcgctgggcgcttctcgacggcgctgggctcccaaaccctttgtcgcgcgctcgttcaagccgcctactacctactcaaagcctacgcctccgcgcgccatgatcgggcccgtgtcgtcgctgtcggagccttcacctgggccaccatcgccttcctcgtcgccatctccggcagcttcctctaggaaggccatctggtatttcgaaggaatctatgcgtactcccctcagataccagattcaggaggggactgctggatggcacaaagtggcgaatgaagcagccaggactattccgggaagggagaatggtggtaattgtgacataaaaaacctaagcagaggttccaaagtttatctgccagtatttgtcgaaggagcgaatcttagcaccggtgatatgcacttctctcagggcgatggtgaagtttcgttttgtggagcaattgaaatgagtggattccttgagctcaacttcttccagggattcatccctttgatccatccatcaaaaacaaagttcagtgcagcggtggttttgttgtaatgggtcagaggtggcagcaggaccattggcaccttcatcaatttaagttcagtgcagcggtgaggttcgacatgccccgtgcctactatcactctcgatttgaagaagagtctcaagattctgcaggtgttgtgttactcctaattcagttaccttactggcaataggatgccattgcaacttctgaaagtgcaaccatctgattgaagcggatttaattatacaagatagatctagaattgctttacttgagattcaagcaatgttggatgcttttgtgactgatcatctctggagcttttgtgaatgatctagctagctatctgtaaatgatcttgttgtgaatgatattataattgtgatgttttttgtgaatatataattgtggtgcttttgtgttt

SEQ ID NO: 122696 - DNA, 103 bp, Zea Mays
caaggacatgtataaatacatatgtattgagcaataaagacgctgttctcattttcactttaccagtttactttcgcacaacattttctattttccacacgtc

SEQ ID NO: 122697 - DNA, 2703 bp, Zea Mays
ccaaacccaagtcctcaccccaagattttcaaaattcccgagccacagcggcacagcgcagagaagcgacgaatctcctacgaatccccaatcctccagtcgatctgatcccccaaacccacagctctcatcgtcgccgacggcgggcacaccatgcggagcgacgatgcaggcggcggcgggttccacgagctgttcgactccgtgcgccgctccatctccttccgcacgggcgccgccgcccttgacgagcccgccgcctccctctcctcctcctctgcctccgcgggcggtgctgggggcttcagggagcggatcagcaaccgcctccgcaggtcccgggggatggggttgctcggcatggcggccaagggcccctcgcccacgcgccgcctcctgccgcagccgcccccgcccttggccggggtcttggcctccgacggatgtggtagggtaggggggcaaggaactggcggaggcgaagagaacccgccgatccggtggcggaaaggcgacctcatcgggagtggggcgttcgggcaggtgtacctcggcatggacctcgactccggcgagctcctcgctgtcaagcaggttctgattggaagcagcaacgcgacaagagagaaggcccaggcacatgtaacggagctcgaggacgaagtgaagatgcttaagaacctctcccaccctaatattgttaggtatattgggacggcgcgggaggaaaacacgctaaatattctgctggaatttgttcctggaggctcgatccagtcactacttgggaggcttggatcgttcccagaggctgtcatcaggaaatatactaaacagcttttacatggactggaatatttgcatcgcaatggaatcatacacagggatataaagggcgcaaatatacttgttgataacaaaggttgcattaagctagcagattttggggcatctaagcaagtagaaaagttggcaactgcaactgctgccaagacgatgaaaggtaccccatattggatggcaccagaagtcattgttggaagcggtcacaattgttctgctgatatctggagtgttggttgcacggtaattgaaatggcaataggcaaacccccatggagccacgaatatcaagaggtttctctactttattatgttgggacgacaaaatcacacccacctataccagaacatctctccacagaagccaaggattttctgttaaaatgcttacagaaggaaccagaaatgagatctgttgcatcagacttgttgcagcacccatttgttacacgagtattggaagatttttgtcagcttaatcatgctggacccaaggaaacctccaaaaatgagcttccttcctatgtagtgcctactgttgactcggacttgagtcgccctggcaagctacgcaatctgaattcttacaagttatcagacaccagaccattatgggatcagcgatgtaatgatgatgatatttgtgagtttgctgacgaagataatgtcccaatggttggatctagcttcaatcctatgtctgaaccatctgatgaatgggaaaacaaacttgacataagcccagaacaacaatttagtcagtcaagggagtttggtggattagccaaacttgcagaaagtcagatgtctgaaaacgattttactttcccttgtgagggaagctgtgaagaggatgatgaatttacagaatcaaaaataaaggaatttctggatgaaaaggccacagatctaaagaaactacaaacacctttatatgagttttacaacacagtgaatgctggagtttctcaaggagttagtgatgtttgccgagcaaacaatgtaactaatccccagttaccccctcgagcaactaagatggtgggaggtgcagctttagagcccatttgtgttaatctgaaaaatgtcaatcccaagagttgcacaaggcgcttctcaagaggcagcgtggagagcaatcatgtcttgagagaaatagcttcacctgaactcaacatactcgaggacaaggtccatgatgatagtgaagatagtccaagcttgagcttttcggaaatacagaggaagtggaaggaagagttggaccaggaacttaaaagagagcgagaaatgaggtcgggtggctatggtaaagcaccatcaccgtcctcaacgagccggagattgactggaaaacgagatcgcagtcctgtgtattgagtagagaatcagaatacaacacagcaggactcgtatatttgactaaccgcacagtgtcatcgattggtggccattgctagtacagtgcagtgccaaccttcgtatgacctgacagaacctacttgacgaccaaatccttttggtccttgtaaggtaaattaggttgagcgagccacttgtaagcgcactgtgcatcggaggctatcatgatctgcgatgcctgccttcgcagccctttattgccagcatgaaatcattggggtggcgatttttatgcaatgttcaagcttcatgcaattttggatgacaataggtgcatgttgtacaattgtcttctctttatttttcaaatgtttgtaagtttacctgatgaccgagaatccataattcgttgaaccaaaagtatggaagtgttcgtctcgacggataatgctgattctcgacgcacgctggctaagagaatgctcttttgttggatcc

SEQ ID NO: 122698 - DNA, 2616 bp, Zea Mays
ccaaacccaagtcctcaccccaagattttcaaaattcccgagccacagcggcacagcgcagagaagcgacgaatctcctacgaatccccaatcctccagtcgatctgatcccccaaacccacagctctcatcgtcgccgacggcgggcacaccatgcggagcgacgatgcaggcggcggcgggttccacgagctgttcgactccgtgcgccgctccatctccttccgcacgggcgccgccgcccttgacgagcccgccgcctccctctcctcctcctctgcctccgcgggcggtgctgggggcttcagggagcggatcagcaaccgcctccgcaggtcccgggggatggggttgctcggcatggcggccaagggcccctcgcccacgcgccgcctcctgccgcagccgcccccgcccttggccggggtcttggcctccgacggatgtggtagggtaggggggcaaggaactggcggaggcgaagagaacccgccgatccggtggcggaaaggcgacctcatcgggagtggggcgttcgggcaggtgtacctcggcatggacctcgactccggcgagctcctcgctgtcaagcaggttctgattggaagcagcaacgcgacaagagagaaggcccaggcacatgtaacggagctcgaggacgaagtgaagatgcttaagaacctctcccaccctaatattgttaggtatattgggacggcgcgggaggaaaacacgctaaatattctgctggaatttgttcctggaggctcgatccagtcactacttgggaggcttggatcgttcccagaggctgtcatcaggaaatatactaaacagcttttacatggactggaatatttgcatcgcaatggaatcatacacagggatataaagggcgcaaatatacttgttgataacaaaggttgcattaagctagcagattttggggcatctaagcaagtagaaaagttggcaactgcaactgctgccaagacgatgaaaggtaccccatattggatggcaccagaagtcattgttggaagcggtcacaattgttctgctgatatctggagtgttggttgcacggtaattgaaatggcaataggcaaacccccatggagccacgaatatcaagaggtttctctactttattatgttgggacgacaaaatcacacccacctataccagaacatctctccacagaagccaaggattttctgttaaaatgcttacagaaggaaccagaaatgagatctgttgcatcagacttgttgcagcacccatttgttacacgagtattggaagatttttgtcagcttaatcatgctggacccaaggaaacctccaaaaatgagcttccttcctatgtagtgcctactgttgactcggacttgagtcgccctggcaagctacgcaatctgaattcttacaagttatcagacaccagaccattatgggatcagcgatgtaatgatgatgatatttgtgagtttgctgacgaagataatgtcccaatgagcttcaatcctatgtctgaaccatctgatgaatgggaaaacaaacttgacataagcccagaacaacaatttagtcagtcaagggagtttggtggattagccaaacttgcagaaagtcagatgtctgaaaacgattttactttcccttgtgagggaagctgtgaagaggatgatgaatttacagaatcaaaaataaaggaatttctggatgaaaaggccacagatctaaagaaactacaaacacctttatatgagttttacaacacagtgaatgctggagtttctcaaggagttagtgatgtttgccgagcaaacaatgtaactaatccccagttaccccctcgagcaactaagatggtgggaggtgcagctttagagcccatttgtgttaatctgaaaaatgtcaatcccaagagttgcacaaggcgcttctcaagaggcagcgtggagagcaatcatgtcttgagagaaatagcttcacctgaactcaacatactcgaggacaaggtccatgatgatagtgaagatagtccaagcttgagcttttcggaaatacagaggaagtggaaggaagagttggaccaggaacttaaaagagagcgagaaatgaggtcgggtggctatggtaaagcaccatcaccgtcctcaacgagccggagattgactggaaaacgagatcgcagtcctgtgtattgagtagagaatcagaatacaacacagcaggactcgtatatttgactaaccgcacagtgtcatcgattggtggccattgctagtacagtgcagtgccaaccttcgtatgacctgacagaacctacttgacgaccaaatccttttggtccttgtaaggtaaattaggttgagcgagccacttgtaagcgcactgtgcatcggaggctatcatgatctgcgatgcctgccttcgcagccctttattgccagcatgaaatcattggggtggcgatttttatgcaatgttcaagcttcatgcaattttggatgacaataggtgcatgttgtacaattgtcttctctttatttttcaaatgtttgtaagtttacctgatgaccgagaatccataattcgttgaaccaaaa

SEQ ID NO: 122699 - DNA, 2560 bp, Zea Mays
ccaaacccaagtcctcaccccaagattttcaaaattcccgagccacagcggcacagcgcagagaagcgacgaatctcctacgaatccccaatcctccagtcgatctgatcccccaaacccacagctctcatcgtcgccgacggcgggcacaccatgcggagcgacgatgcaggcggcggcgggttccacgagctgttcgactccgtgcgccgctccatctccttccgcacgggcgccgccgcccttgacgagcccgccgcctccctctcctcctcctctgcctccgcgggcggtgctgggggcttcagggagcggatcagcaaccgcctccgcaggtcccgggggatggggttgctcggcatggcggccaagggcccctcgcccacgcgccgcctcctgccgcagccgcccccgcccttggccggggtcttggcctccgacggatgtggtagggtaggggggcaaggaactggcggaggcgaagagaacccgccgatccggtggcggaaaggcgacctcatcgggagtggggcgttcgggcaggtgtacctcggcatggacctcgactccggcgagctcctcgctgtcaagcaggttctgattggaagcagcaacgcgacaagagagaaggcccaggcacatgtaacggagctcgaggacgaagtgaagatgcttaagaacctctcccaccctaatattgttaggtatattgggacggcgcgggaggaaaacacgctaaatattctgctggaatttgttcctggaggctcgatccagtcactacttgggaggcttggatcgttcccagaggctgtcatcaggaaatatactaaacagcttttacatggactggaatatttgcatcgcaatggaatcatacacagggatataaagggcgcaaatatacttgttgataacaaaggttgcattaagctagcagattttggggcatctaagcaagtagaaaagttggcaactgcaactgctgccaagacgatgaaaggtaccccatattggatggcaccagaagtcattgttggaagcggtcacaattgttctgctgatatctggagtgttggttgcacggtaattgaaatggcaataggcaaacccccatggagccacgaatatcaagaggtttctctactttattatgttgggacgacaaaatcacacccacctataccagaacatctctccacagaagccaaggattttctgttaaaatgcttacagaaggaaccagaaatgagatctgttgcatcagacttgttgcagcacccatttgttacacgagtattggaagatttttgtcagcttaatcatgctggacccaaggaaacctccaaaaatgagcttccttcctatgtagtgcctactgttgactcggacttgagtcgccctggcaagctacgcaatctgaattcttacaagttatcagacaccagaccattatgggatcagcgatgtaatgatgatgatatttgtgagtttgctgacgaagataatgtcccaatgagcttcaatcctatgtctgaaccatctgatgaatgggaaaacaaacttgacataagcccagaacaacaatttagtcagtcaagggagtttggtggattagccaaacttgcagaaagtcagatgtctgaaaacgattttactttcccttgtgagggaagctgtgaagaggatgatgaatttacagaatcaaaaataaaggaatttctggatgaaaaggccacagatctaaagaaactacaaacacctttatatgagttttacaacacagtgaatgctggagtttctcaaggagttagtgatgtttgccgagcaaacaatgtaactaatccccagttaccccctcgagcaactaagatggtgggaggtgcagctttagagcccatttgtgttaatctgaaaaatgtcaatcccaagagttgcacaaggcgcttctcaagaggcagcgtggagagcaatcatgtcttgagagaaatagcttcacctgaactcaacatactcgaggacaaggtccatgatgatagtgaagatagtccaaggtttgagcaaagcacattgtttgtagtgtgaaagattaaatactcgtgccattcaatataattagggtgtttagtcatgcgattaagcctacatatttgctttgtgtgaaatgtacataagaaatagtaatcaacgtactgtttcatacttctgcagaaaatataggtaaaactcagcaattcattgtttattgcaaaaagttttcatactaatttaacagagtattttgctccggaggtagcatatgttctaacagttgaaaactaattttgacagcttgagcttttcggaaatacagaggaagtggaaggaagagttggaccaggaacttaaaagagagcgaggtaaataaaaagttccactgatctgcatttcaatgtattctactctgcctactacattgatgtttcttctttgctttgcttattttcacttctgaatttgctgggcagaaatgaggtcgggtggctatggtaaagcaccatcaccgtcctcaacgagccgg

SEQ ID NO: 122700 - DNA, 2364 bp, Zea Mays
atgtccggccgccacgcgccgcacctccggctggccgtgccgccgcggctctccgcgcacccctctttccgcttcccctccacgccgctcccgaccccgtcgaaagcccgcggactcccttcctccgccgccccgccgtcctcccgctacgccgacgggctcctccgcctaatcgtgctgcacgcgctcttcctcctcgcgcccgccgtgcgcgcgctcccctccctggcccacgcgctcgcgttttccccgcccctcgcgctgctctcggccgccgccctcctcctccaccacttcgccgccgcttcccggaagacccaccagcctcaccgcccgttccccgggttccccgctctcgtccgcccggccttcctcctcgcgctttctatcctcctccggctcgtggccctccgcatcctccccgccccgggcctcctcgtcctcgcggactccgcgggctccctgctcgcccgcgccctgcgccggccctcccgccgccgagtcatctccaccgccgtcgccgccttatcccttgtctgcatctccccttccccttccgtgatcctcgcgatccccttcgccgctggcttcctttcctcgaccgaacaatcggccgcggcgcggcatgccacacgcactcggctcgcccgggcggcggcatttgctctcgctgctgcctttctctctgtgccagcgcttgtgggtctctcctttttcggtgccagcgatgcgggcgatggtcctcctgatggagcagtgccgatcggcccggtctggtggctgctgcttaactctgccttctttggcatggctttggagcgacggcaggagcatggcagcggcggcggtaggccgagtgtggattttgcactgacgttcttatgcactcttgttctggagctgctgtactacccaaagctgtctttaccaggattcttgatttgtgggttcctcttgtggatcgccagcagggagctgatccctgcaggatatgtggagcatggaactgaagatatctcagagtcagtttttgaagcaatcatgggtccagttaggcatatcttgagtgagcggaagtcgagaaagattgctgtgtttctattgatcaatacagcctacatgtttgtggaatttggctgtgggtttgtgagtgatagtcttgggctgatctctgatgcttgccatatgttgtttgattgtgctgcactggcaattggtctctatgcgtcctacattgcgagattgcctgcaaatgggatgtacaactttggaaggggcaggtttgaggttctgtcagggtatgtcaatgcagtgttcttggttcttgttggtgtgctgattgtgttggagtcgtttgagaggattcttgagcctagggaaatatcaactagtagtcttttgtcagtttcgataggtggacttgttgtaaacataatcggattggtgttctttcatgaggagcaccaccatgctcatggtggtacctgttctcactcacattctcattcacatcatggtcatgaacatcatcaacaccatggccatgaagagcacaaacatcataatcatgatcatcacggtgcgaataatgtgaaggcatgttgtgatcatcatggagatgacaaccatcgccatgatcaccatgggaatagtaaaagtgagggcattcataacaatatcatggataacacctgcaaggagaagcatggccatgagcatcatcaccatgaacattcggaacattgccatcagagcagagatcattctcatcaaaattgcaacaatattactgttgagcaacagcttcttgacattcctcttagcaatatatcttctcatgacacagaaagtcactcttcaaaagaaggattgagaccatcagattctggaaacagtaataagccaggacaccggcaccacattgatcacaacatggaaggaatcttcttgcatgtcctagctgacacaatgggaagcgttggtgttgtaatatcgaccttactgatcaagtacaagggatggcttatagctgatccgatatgctcagtattcatttctgtaatgatcgtatcttctgttattccattgttaaggaattctgcggaaattctgttgcagagagtcccaagaaatcatgaaaaggatttggctgtagcattggatgatgttatgaagatcgaggacgtccttggagtcaacaatgttcatgtatggaacttaactaacactgacactgtaggtacttttcagttacatgtatcagcagaagctgacaagtcttccataagaaataaagcttcacggatatttcaagaagctggggttcaagatctgattatcgagattgagtgtgttaaaaggtag

SEQ ID NO: 122701 - DNA, 2195 bp, Zea Mays
ggcgtctagtcatcagatcattatccgcaccgacttgcgtgcacgagcttcgcggcgagggcagcaccggggctgggaatgggaagacactgcagcccagctccagcagcactacagcagtagcgccaccgaacctgaaaactccgaccccccacgaaatcgcggaacctacccacgagccgagccatgctcagccgactcgccgcggcgaggcgacagctactgctatccccggccgtcgcgtaccgctcctcctcggcagcggcgacggcgtcggcggtccacgagagagcagcgcccgcctcggcctccgtgctcccggacaccctcgaaaggggctccgacgcgtaccagcgcaacacggccgccgtcggcgggttgctctccgacctgcgcgcccgcgtctcccaggtgccggtgctggccccacacttcctcgagcgtgctctgtgtcccctgattgaagactgggagtgtgccctctcttgtgcaggtgctgcgcgggggaggcgccgaggcggtgaggcggaacgcggcgcgggggaagctgctcccgcgggaccgcatcgaccgactgctcgaccccggcgcgtccttcctcgagctctcgcagcttgcaggctcagatgtttatgatgaagcattaccatcagcaggtataataactggcataggacctgttcatggacggttatgtatgtttgtggccaatgacccaaccactaagggtggcacatactatcctcttactgtcaagaagcatctgcgagcacaggaaatagcttcggagtgcaaactgccttgcatatatctcgttgacagcggaggtgctaatctccccaggcaggctgacgttttccctgaccgtgataattttggccggatattctacaatcaagctaagatgtcttcagatggtatccctcagattgcagtagtcttgggttcttgcactgctggtggggcatatattcctgcaatggcggatgagagtgtaatagttaagggaaatgggactatatttctagcgggtccaccacttgtaaaggctgctacaggagaggagatatctgctgaggaccttggtggagcatcagtacattgcaaggtatcaggagtctcagatcattttgcacaagatgaaattcatggacttgagttggggcgaaacattgtgaagaacctgcacttagctgctaaaggaacaaatattcagagttctgcttgtggttaccaagagccattgtacgatgtagaggaacttcgctccattgcaccagctgatgtgaaacagtccttcgacattcgttcaataatagcccgtattgttgatggaagtgaatttgatgagttcaaaaaattgtatggaacaacactagtgactggttttgcaaggatatgtgggcaaccagttggaattattggaaacaatggcattttgtttacagagtcagcgttgaagggctcccacttcattgaattgtgcgctcagcggcatattcctttgattttccttcaaaacattactgggttcatggtcggatcaaagtctgaagctagtggaattgccaaagctggagcaaagatggtcatggcagtttcctgtgctaaggttcctaaaattacaataattgttggtggaagttttggggctgggaattatggaatgtgcggacgtgcatatagcccaaactttttatttctttggccaactgctaggatatctgttatgggtggcatccaggcagctggagttctcgctcaaatagaaaagaacaacaaaaggagacaaggagtggagtggagcaaggacgaggaagaagccttcaaagccaaagtcgtggaggcttacgacagagaaggaagcccgtactactccactgctaggctatgggacgacggggtcatcgaccctgctgacaccaggcgggttctgagcctctgcctctccgcttcggccaagccggttccggaagacacaagatacggtgtattccggatgtgaataaatgtgtgtgagtaataacgcagacgtgtttaataaaaagctgcctgcacgcacccaatgtgtgtgcacaaataaaaatttcgccctggtttctgtcgtcgaaatatgttgaagagtgttgttcatttcatatattactatctgatgaatgggaagtgttcttcatttgatacgtcaataaaaaaaa

SEQ ID NO: 122702 - DNA, 1860 bp, Zea Mays
atgctcagccgactcgccgcggcgaggcgacagctactgctatccccggccgtcgcgtaccgctcctcctcggcagcggcgacggcgtcggcggtccacgagagagcagcgcccgcctcggcctccgtgctcccggacaccctcgaaaggggctccgacgcgtaccagcgcaacacggccgccgtcggcgggttgctctccgacctgcgcgcccgcgtctcccaggtgctgcgcgggggaggcgccgaggcggtgaggcggaacgcggcgcgggggaagctgctcccgcgggaccgcatcgaccgactgctcgaccccggcgcgtccttcctcgagctctcgcaggtttcgctcgccgctcccgctcggaccctcgtcttccttgcgttgatctggccgcattgtgaagtgaactctattgcctgctcagatgtttatgatgaagcattaccatcagcaggtataataactggcataggacctgttcatggacggttatgtatgtttgtggccaatgacccaaccactaagggtggcacatactatcctcttactgtcaagaagcatctgcgagcacaggaaatagcttcggagtgcaaactgccttgcatatatctcgttgacagcggaggtgctaatctccccaggcaggctgacgttttccctgaccgtgataattttggccggatattctacaatcaagctaagatgtcttcagatggtatccctcagattgcagtagtcttgggttcttgcactgctggtggggcatatattcctgcaatggcggatgagagtgtaatagttaagggaaatgggactatatttctagcgggtccaccacttgtaaaggctgctacaggagaggagatatctgctgaggaccttggtggagcatcagtacattgcaaggtatcaggagtctcagatcattttgcacaagatgaaattcatggacttgagttggggcgaaacattgtgaagaacctgcacttagctgctaaaggaacaaatattcagagttctgcttgtggttaccaagagccattgtacgatgtagaggaacttcgctccattgcaccagctgatgtgaaacagtccttcgacattcgttcaataatagcccgtattgttgatggaagtgaatttgatgagttcaaaaaattgtatggaacaacactagtgactggttttgcaaggatatgtgggcaaccagttggaattattggaaacaatggcattttgtttacagagtcagcgttgaagggctcccacttcattgaattgtgcgctcagcggcatattcctttgattttccttcaaaacattactgggttcatggtatgggcaaatcaaaattattatctacatagacttattgatgatgcaaaggtcggatcaaagtctgaagctagtggaattgccaaagctggagcaaagatggtcatggcagtttcctgtgctaaggttcctaaaattacaataattgttggtggaagttttggggctgggaattatggaatgtgcggacgtgcatatagcccaaactttttatttctttggccaactgctaggatatctgttatgggtggcatccaggcagctggagttctcgctcaaatagaaaagaacaacaaaaggagacaaggagtggagtggagcaaggacgaggaagaagccttcaaagccaaagtcgtggaggcttacgacagagaaggaagcccgtactactccactgctaggctatgggacgacggggtcatcgaccctgctgacaccaggcgggttctgagcctctgcctctccgcttcggccaagccggttccggaagacacaagatacggtgtattccggatgtga

SEQ ID NO: 122703 - DNA, 128 bp, Zea Mays
cggtggttataatgaccaattgtgctataatttgtcacctaaatacacgaggatttagtttatatactaatgcatattaggctcgtcccatatttgtcaaatatggaataaatacgggttcaatccgg

SEQ ID NO: 122704 - DNA, 510 bp, Zea Mays
atggagcgcggtgccgtcgtccttccgctccagggcgccggggttgggcgcgtcctcctccccgtgcaagtgcgggtacggtcgttcttgaggagcaggagggcgacggagcggcggcgccggctcgcgagttccgcggcgccggcgaggtgcagcaagatgtacgttcccggctttggggagggttcaccggagcggaaggcggcgatcaacctccagcacttctttaactacatcgctgtcagcattgtcctagcacagcttgagtgtatgaaattactgaggcatgtgtggtttcgtctcttggaaacaaacagccttgaggattctggagggattctcactttgtcagatgaattgatgcgactgcaggtccgatctgcatatgtgaagaacgagttcgagtgggacaatttgaaggaattatccttcaagatggttgatgaggccaacacaaagctcatgagggattacgtcgtcgaggtcagccacattgaagacgaaaactaa

SEQ ID NO: 122705 - DNA, 366 bp, Zea Mays
cacttgctaatatttattgaggggagatggccatttctggagctactctgtttgcacaatgatgataacagttctactgaacttatgctgcaccaatctgtctctagctaccaagcttctgaggacgacctggctgtctactatactattcattgttggctgctccctcgtcaaagcatactgagtggagttactggagagggcctaggtgttatggttcagccatcagcagtttcttcaggttcaactcctgatgttgctgatgcacaggccccacctgctgacaaggacgacaacgatgatgttaactcagcctatcaaagtgataaaaaacaatgtgttcagctgaaaagttaccagtgctaa

SEQ ID NO: 122706 - DNA, 1079 bp, Zea Mays
aatccagcacagcgcatatccccatccgttcctgttcccctcggcgacgccagtacggcagtacgccacgccagtgcccagttgcattgactcctccccggtccccacatcttgccgccaatggatgtcgacgggcccgcccccgccgacgcctctgccaggcccgccaccaacggcgaggccccctccggcgcccgcgaggtcgacgtcggcgaggaggacacgctcgccggcgtcctccgcagcttcgtcgacggcgtctggtacccggacgagcctctgctccggcggctccgggcggcgtcctgcgacgccgcgccgcgcctgaggggggcgtcccggaactccgcgcgggacctgcttgagtggaccaggcggggcagcggcctccgcgccatcctcgtcatctcggtcgggacaatcacgcttatagcattgactggccttctgaccttcatgttcttcctattggttgccactgctaatgcgatcattgtctcagtcttgatgtcactggccgctgccggaggattcttggccatcttctttgcttgcttggttgcagtgtatattggagcagtatcagttgctatctttgtcatttctgcgactgttatctcagcagttgttggaattttggttgctaccggttgggttgggttcttctggattatctggttcaccgcaaggaagagcatggtcctgacgaagcactccttcggcatgacgagctcggcaatccaatcgtattccgcgtcccggcaagtgaagcagaagcctgtcgactgaggctagttggttgcgtcctgtatgaagcggatatatctatctatgtgaatcacggttttgctgtttgtttgtttgtaagagtgtagaagacagcttgcttgttgcggcagctctgtttctctcggtgactaggtgtataatgctagctctgaactttggcagcatgtacgttcggcatggcggtcaatgctgttatttaaaggatagtgagcagatgttaatgtttatagcaaataaaagcatgttaatgtttattaaatttatcttgaatgaacttattatttctttat

SEQ ID NO: 122707 - DNA, 691 bp, Zea Mays
cgttcctgttcccctcggcgacgccagtacggcagtacgccacgccagtgcccagttgcattgactcctccccggtccccacatcttgccgccaatggatgtcgacgggcccgcccccgccgacgcctctgccaggcccgccaccaacggcgaggccccctccggcgcccgcgaggtcgacgtcggcgaggaggacacgctcgccggcgtcctccgcagcttcgtcgacggcgtctggtacccggacgagcctctgctccggcggctccgggcggcgtcctgcgacgccgcgccgcgcctgaggggggcgtcccggaactccgcgcgggacctgcttgagtggaccaggcggggcagcggcctccgcgccatcctcgtcatctcggtgggcgcgcgcctccttgatccgtcacatgagcatgggttttcttgccctgtttactaaatctggctctatcttctttagtttattttctgtaggtgattgcgtagcggttaactgtgccatggtcactattgcaatgttggtttagatttgtgctttttagatctcaggggcaaggatgaaagtgggtatccgaattgttagacaaatttaatattttaaaatagataggtatggaattttatgttaatctttttttatgttatcaagcatattattacagataagaataaaattttgtataaa

SEQ ID NO: 122708 - DNA, 226 bp, Zea Mays
cgggtagggacaatcacacttataacattgacaacctttctaatcattatgttcttcctgccggttgccattgctaataccatcatctcattcctgatgtcacttgcagctgctagaggattctttacttgcatagtggagatctatattggagcggtatcagttgctatatttgccatttgtgctactgtcatctcaacagttgtcggagttatgtttgctacct

SEQ ID NO: 122709 - DNA, 2269 bp, Zea Mays
cttgttgcgcgcgcccagccggctgctttatgccattggcatcgttgatctatactcaggttccgagcgccttgcttgcctgcctggaagctgcagacattgcagcggcgccggcgatggcgcgccagcggcgggcgatcggcggtgcccgcgcggcggtcccgttcgcgctgcttgcgctgctcgcctccgcgctgcctggccttatggcgcagaacctggcgggggaccgcgcggcgctgctggcgctgcggagcgcactggacagccggggcctcctcccgtgggacaccacggagctgtcgccgtgcggatggcgcggcgtcgtgtgcgacaaccagacccaggcggccgggcccgggtcccgccgcgtcgtcgagctgcggctgcccgggaagcggctggtcgggacgataccgctcggcacggtcgggaacctcaccgtgctgcagacgctgtcgctccgccgcaacgcaatcaccgggggtatcccggccgacatcggcaactgcgcccagctaaccgtcgtcaacctgacggccaaccagttcaccggcgccgtgccggagggcctcttctcgctcgcggcgctcaggcaggtcgatctctctcggaaccgccttgtcggcggcgtgtcggaggagtttaacaggctcaagcagctggacacgttgttcctcgacagcaacgacttggccggcctgcttccgccgggcctttaccttcccaacctttcgcgcttcaacgtgtcgttcaacgcgcagctcattggccccgtgccggcgtcgctcgctaggatgccggcgagcgcgttccgcggcacggggctctgcgacggccctctccccgcgtgcaccgactccacgcccccggcgcctccaccggcggcttcgtctgcgggtggcgaaaagaagaagcacctgtcccgttgggcaatcgtcggcatcgtcggcggcgcggcgctcgttctcctgctcatcatggcgctcgtcgcttgctttcgccgacgccaggcggcggcggcggcggcggcggggaggcccgcgggtgctgcggcggcaaatgtgcacgaggcaaccgcgcctgtaacggtgaccttggcgaggacggacagtgacgccgtgaagcagtcgcacgccccgccgctcgcgccggcgatgataagcgagggcaagaagctggtgttcctggggagcacgccggagaggccgtacgacctggagacgcttctgcgagcgtcggccgaggtgctcgccaagggcccgctcggcacgacgtaccgcgccacactagacggcggcgagcccgtgctcgccgtcaagcggctccgcgaggtgcacctctccgaggacgagttctgcaacaaggcgaccgcgcttggtgcgctccatcaccacaacttgacccgcctgcgcgcctacttctacagcaaggaggagaagctcctcgtctacgacttcgtcggcgccggcagcctctccgccgtcctccacgacggaggcgcggagggccgtgcgcggctggacttcacggcgcgcgcccgcatcgcgctagcggcggcgcgcggtgtggccttcatccaccactccggggccaagtcgtcccatggcaacatcaagtcatccaacatcgtcgtcaccgggacgcgcgacggcgcctacgtctccgattacggcatcgctcagctcacgggtgccgcagcgccgccgaggcggggcgccgggtacaacgccccggaggtgaacgacgcccgcagcgtgccgcagagcgccgacgtgtacagtttcggcgtggtggtactggagctgctcagcggacgcgctccgttgcacgcgctgcgcgaaggcgccgacggcgtgaacctgccacgatgggtgcgctccgtggtgcaggaggagtggacgtccgaggtgttcgacgccggcatcgccaacgagccgcgcgtcgagggggagatgatgcggctgctgcagctcggcatggagtgcacagagcagcgccccgacaggcggccaaccatgaccctggtggaggcgaggatcgagcgcatcgttgaggatgcctgccagaaagccgatttcagcagcacggacggcagccggagcgtttcggcgtgatcggggtgccctgttgcccttcgtacccagctagtttctttcattctgattttcttggtgaacgcaataaagatgctaatgggaaattgaatcaagttcgagagcaaacatagggcttgtacaacactatttaatacatagtctcttgagtc

SEQ ID NO: 122710 - DNA, 1428 bp, Zea Mays
gttttccttcccatctcatcacaagcagaagaaaatcgagataacgagagctagggttttgattccagtactcacgccgcatcctgtctccttctgcccctccctctcggcaccgcctccgccccctcattctctctcgcgtcatccggcggaggctcgaggaaactgaggccgggagcgccccgaagaatattctccacccagtcgccgacacccctgcgcgcgcgagagttaccattgtactgttgtagcttggcagttggttgactgtgtgacaactttgagctatgtcatattacgaaagaaggggtggagacaggggtagtggccgtattcaaggaagtggtgggcgaggtggacatgtcctgcgtggaagatcaggattggctccccgaggacctcttggggttaactcccgtccatctgcacgcactattgctaagtcatttagcagaaccaaagacatgacatggcgacctgatctatttagtgatagcatggcggctagtggaatagaaactggtacaaaattgtacatttcaaacttggactatggggtctctaatgaggatataaaggagctgttttcggaagttggtcatttgaaacgctttgctgttcactacgatggttatggccgcccaaatggcactgcagaggtggtgtttacacggaggagcgatgcaattgctgcactgaagcgttataataatgttctacttgatggaaaagctatgaagatagaagtcatcggaaatgacttaggattgcctatgacacctcgtataaatgttgttggggcttctaatggcagagctacaagaacagttgttatgacgcctgagtttagtcaacgtggcagaggttcaagcagtagacctctaagcaacaggtttaataaccgtggtggtttccaagctggtcgaggccgtggccagttccagagctgggggagaggccgtggtcagttccagagccgggggagaggccgtgcccagttccagggacgagggagaggcaggaagcctgagaagactgcagatgagctggataaagacctggaaagctatcacgcggaggcaatgaaaaccgattgattgcaaggccggtagtgccacaaggttgtggttttatccatcattttctgggagcaacgaacatgctttgtgctttggtttcaggagactagactcttgtagtaaattcgaacaaaagattgccagtttgtagtgtttgcatgaagtttgcaacctgatgtgtttatttttgtatcggttgctttggagattgtgttaatttttaggttcatgcttagaataaccgtaattggccaaaacatgcacccggccctgttccgctctgcgatgtgccttcgcagcattgtgttatttttagcatattgcagtttgtcggaggttagtccggtgc

SEQ ID NO: 122711 - DNA, 1636 bp, Zea Mays
ccccctcccctgttttccttcccatctcatcacaagcagaagaaaatcgagataacgagagctagggttttgattccagtactcacgccgcatcctgtctccttctgcccctccctctcggcaccgcctccgccccctcattctctctcgcgtcatccggcggaggctcgaggaaactgaggccgggagcgccccgaagaatattctccacccagtcgccgacacccctgcgcgcgcgagagtaagtcgcctcccccgccgccagtgctcttcgtgatgatatatttccagatccggtttgtccgacgcagatggtagggctggagaggctgccgatgtggtattgaagagggatttagatgcatgaattttgtgttcgtaacgtggattggtgtggggtgggagaggctcctttgccggattggccaggttaccattgtactgttgtagcttggcagttggttgactgtgtgacaactttgagctatgtcatattacgaaagaaggggtggagacaggggtagtggccgtattcaaggaagtggtgggcgaggtggacatgtcctgcgtggaagatcaggattggctccccgaggacctcttggggttaactcccgtccatctgcacgcactattgctaagtcatttagcagaaccaaagacatgacatggcgacctgatctatttagtgatagcatggcggctagtggaatagaaactggtacaaaattgtacatttcaaacttggactatggggtctctaatgaggatataaaggagctgttttcggaagttggtcatttgaaacgctttgctgttcactacgatggttatggccgcccaaatggcactgcagaggtggtgtttacacggaggagcgatgcaattgctgcactgaagcgttataataatgttctacttgatggaaaagctatgaagatagaagtcatcggaaatgacttaggattgcctatgacacctcgtataaatgttgttggggcttctaatggcagagctacaagaacagttgttatgacgcctgagtttagtcaacgtggcagaggttcaagcagtagacctctaagtaatcccagcaacaggtttaataaccgtggtggtttccaagctggtcgaggccgtggccagttccagagctgggggagaggccgtggtcagttccagagccgggggagaggccgtgcccagttccagggacgagggagaggcaggaagcctgagaagactgcagatgagctggataaagacctggaaagctatcacgcggaggcaatgaaaaccgattgattgcaaggccggtagtgccacaaggttgtggttttatccatcattttctgggagcaacgaacatgctttgtgctttggtttcaggagactagactcttgtagtaaattcgaacaaaagattgccagtttgtagtgtttgcatgaagtttgcaacctgatgtgtttatttttgtatcggttgctttggagattgtgttaatttttaggttcatgcttagaataaccgtaattggccaaaacatgcacccggccctgttccgctctgcgatgtgccttcgcagcattgtgttatttttagcatattgcagtttgtcggaggttagtccggtgc

SEQ ID NO: 122712 - DNA, 1448 bp, Zea Mays
ccccctcccctgttttccttcccatctcatcacaagcagaagaaaatcgagataacgagagctagggttttgattccagtactcacgccgcatcctgtctccttctgcccctccctctcggcaccgcctccgccccctcattctctctcgcgtcatccggcggaggctcgaggaaactgaggccgggagcgccccgaagaatattctccacccagtcgccgacacccctgcgcgcgcgagagttaccattgtactgttgtagcttggcagttggttgactgtgtgacaactttgagctatgtcatattacgaaagaaggggtggagacaggggtagtggccgtattcaaggaagtggtgggcgaggtggacatgtcctgcgtggaagatcaggattggctccccgaggacctcttggggttaactcccgtccatctgcacgcactattgctaagtcatttagcagaaccaaagacatgacatggcgacctgatctatttagtgatagcatggcggctagtggaatagaaactggtacaaaattgtacatttcaaacttggactatggggtctctaatgaggatataaaggagctgttttcggaagttggtcatttgaaacgctttgctgttcactacgatggttatggccgcccaaatggcactgcagaggtggtgtttacacggaggagcgatgcaattgctgcactgaagcgttataataatgttctacttgatggaaaagctatgaagatagaagtcatcggaaatgacttaggattgcctatgacacctcgtataaatgttgttggggcttctaatggcagagctacaagaacagttgttatgacgcctgagtttagtcaacgtggcagaggttcaagcagtagacctctaagtaatcccagcaacaggtttaataaccgtggtggtttccaagctggtcgaggccgtggccagttccagagctgggggagaggccgtggtcagttccagagccgggggagaggccgtgcccagttccagggacgagggagaggcaggaagcctgagaagactgcagatgagctggataaagacctggaaagctatcacgcggaggcaatgaaaaccgattgattgcaaggccggtagtgccacaaggttgtggttttatccatcattttctgggagcaacgaacatgctttgtgctttggtttcaggagactagactcttgtagtaaattcgaacaaaagattgccagtttgtagtgtttgcatgaagtttgcaacctgatgtgtttatttttgtatcggttgctttggagattgtgttaatttttaggttcatgcttagaataaccgtaattggccaaaacatgcacccggccctgttccgctctgcgatgtgccttcgcagcattgtgttatttttagcatattgcagtttgtcggaggttagtccggtgc

SEQ ID NO: 122713 - DNA, 1887 bp, Zea Mays
ccccctcccctgttttccttcccatctcatcacaagcagaagaaaatcgagataacgagagctagggttttgattccagtactcacgccgcatcctgtctccttctgcccctccctctcggcaccgcctccgccccctcattctctctcgcgtcatccggcggaggctcgaggaaactgaggccgggagcgccccgaagaatattctccacccagtcgccgacacccctgcgcgcgcgagagttaccattgtactgttgtagcttggcagttggttgactgtgtgacaactttgagctatgtcatattacgaaagaaggggtggagacaggggtagtggccgtattcaaggaagtggtgggcgaggtggacatgtcctgcgtggaagatcaggattggctccccgaggacctcttggggttaactcccgtccatctgcacgcactattgctaaggcaaggccaaacctgtcactatgtttttgttcatggtcaggttcctgactaaagtagaaactgaatggggagagcatgcctaagcttacattatatggaggggcaggagtatctgtgatgtctgtgactaatgtgttctctgtcagtattgtttggaggcttggaggggcagatgcaactttggtagaaattttgcagtagatcataaggttgaatttattgaggggcagaagtaaatggtggtcatctctaatgggaattttgttggaacaccaccatttcttcaaacatatggaaggaaatagatgaaaaataaagctggcggactccagtttgatgtgtctaaatcatgatatgctgaagggaagactccatcaatcttcttgccatatatggaaattgcaatgtgccccttattcaacagttctggattccatactcccatggaagttcttctagtctgcttccatagcaagtgcacaagccatttgtctcctggacttttgtgatattggtggagctctttccttctcagctgttaacttaatgcagtacttcatggttttgctatttctcggttataattattgctactcttcctctaaagaccaatgataagtcaatgtggttcgtgatgattggcatgatcatatgaaaagtttgaagagatattcttttataatgacatgttccctcacatgcttggatgtttggcatttttcagtcatttagcagaaccaaagacatgacatggcgacctgatctatttagtgatagcatggcggctagtggaatagaaactggtacaaaattgtacatttcaaacttggactatggggtctctaatgaggatataaaggagctgttttcggaagttggtcatttgaaacgctttgctgttcactacgatggttatggccgcccaaatggcactgcagaggtggtgtttacacggaggagcgatgcaattgctgcactgaagcgttataataatgttctacttgatggaaaagctatgaagatagaagtcatcggaaatgacttaggattgcctatgacacctcgtataaatgttgttggggcttctaatggcagagctacaagaacagttgttatgacgcctgagtttagtcaacgtggcagaggttcaagcagtagacctctaagtaatcccagcaacaggtttaataaccgtggtggtttccaagctggtcgaggccgtggccagttccagagctgggggagaggccgtggtcagttccagagccgggggagaggccgtgcccagttccagggacgagggagaggcaggaagcctgagaagactgcagatgagctggataaagacctggaaagctatcacgcggaggcaatgaaaaccgattgattgcaaggccggtagtgccacaaggttgtggttttatccatcattt

SEQ ID NO: 122714 - DNA, 685 bp, Zea Mays
ttttttttcattttctctttagcagtttgagatcacagcttgaatgcacaaagtgggccccattgtgaacttgaattcaagcaccatgttatttctttttccccttcctttgttgggtggtacatctgatttgttattttttttataattcaggcctgagtttagtcaacgtggcagaggttcaagcagtagacctctaaggtaaggcttctgtcaaagccgaatttttgttttagttgtcttaatttgttgcatttaatactagataaacatggtcccttttatttgcttggcttcgtccatcccatgccttattactagtagactagtagtttactacggcatcagattttcaatgttgcaatagcttgatctttattgttagctttagatgtttgacacctgaatactcttttataaacaaacatgatgtgtgctggttgctagtcgctaattaaacaatgagcaatttcttgtttatcatgcaaagaaaacatgttttgcacggtatagatgtactggaggcatgcaaattctataatgttttgagaggtcaaattttacatattgagttgtggacttggacatttgacaaaaaagagtgaggaaagaagtgcgcttcagttattaacttgttagtatggctggacatctctcttgagtggatgcacctaatacactgcaa

SEQ ID NO: 122715 - DNA, 1360 bp, Zea Mays
ccccctcccctgttttccttcccatctcatcacaagcagaagaaaatcgagataacgagagctagggttttgattccagtactcacgccgcatcctgtctccttctgcccctccctctcggcaccgcctccgccccctcattctctctcgcgtcatccggcggaggctcgaggaaactgaggccgggagcgccccgaagaatattctccacccagtcgccgacacccctgcgcgcgcgagagttaccattgtactgttgtagcttggcagttggttgactgtgtgacaactttgagctatgtcatattacgaaagaaggggtggagacaggggtagtggccgtattcaaggaagtggtgggcgaggtggacatgtcctgcgtggaagatcaggattggctccccgaggacctcttggggttaactcccgtccatctgcacgcactattgctaagtcatttagcagaaccaaagacatgacatggcgacctgatctatttagtgatagcatggcggctagtggaatagaaactggtacaaaattgtacatttcaaacttggactatggggtctctaatgaggatataaaggagctgttttcggaagttggtcatttgaaacgctttgctgttcactacgatggttatggccgcccaaatggcactgcagaggtggtgtttacacggaggagcgatgcaattgctgcactgaagcgttataataatgttctacttgatggaaaagctatgaagatagaagtcatcggaaatgacttaggattgcctatgacacctcgtataaatgttgttggggcttctaatggcagagctacaagaacagttgttatgacgtaagtggtacttaaacatttcatgtatcatgcaattttttattttatttgtagtccagtgataaactgtggtgctatacttacaaagttcattttagcctggaattagttcatttagtgcaagctaattagttcattgaggacaatcttctgtaaactgtcatgttgaatcttcttgttaagttttcaagtactgtagacttgccctacagtcctggctagatcaccgtaaccagctttgtgtgttccctttgtgaaataagacttctacttcatatcagctccatacttcatctaaaggcagtgtgtgtgtggttggcgttgttgagttgagggaggtgctggttgtgctaacaccaccttacccactccaaccttatccatctgccttgtcccaattccaaccgtaggcccgcagccccgcactcacctctccttgcgcttgttgcttgccctgctttgtctttgtccgtcttcctgtgcttgtcgtctgatgcctctacctcttcta

SEQ ID NO: 122716 - DNA, 462 bp, Zea Mays
gcaatcgtgctgctgtcatttccacttgcctcctcaatcaaggcaaccgcctcgaccactcaaatgctgccgacaaccgccacggccgccgcgccgccgccgcccacggccggccccgcctcctccccgagcgagccgcacgccgcgctcctcctggctctgacctacatgcggctgcgcgagctgctgtcctgcgctcgcacgtgccgcggcctccgcgaggccgtcgcgggggacccgctcctgtggctgcgcctcgtcgtggagccgccgctcagccaccggatcacggacgaggcgctcctcgcgttgacggacagggcgcaggggaggctccggtcactccacctcctcgggtgcccccgcgtatccgacgccggcctgctgcgcatcgtcgagcgcaaccacgacgtcaccgaggtactgtcactgtgatgctactattgtgcacaaaatggtaga

SEQ ID NO: 122717 - DNA, 1565 bp, Zea Mays
ttgacaatataacttttgtattctttcttcctcacttcagatcagatgttgcttcgctcacatggtgtgtatacatggcagtacgttgtaaattatacagaaccaagacaaacgttgagaaacatttgcactgacagccctgaggtacaaagttattgccatgttgcaatgggcacacacgactcttaaacaacgttgctcacattgtcaatgttgaattatggcagcccttcaactgtcaatgttgctcacattgtccccccttgacatggcagtcccttcattcagacaagttggatgcgcaagaccttgaggtctgcacccactttgtttgacgaaagcagtaagacaattaagcttctagttactccatcaggtcttataagctccgtccacacgagatgattgaatcaataagaaaggctgtttgttacaggggaacgagtcacgtgttaaaagtcccaattatttggttaccgagacagagcagccaacatctcttctagtaaccttctccccgacttctgagtgaggtagcaaacgctgcacactcctgacatgtgaactgcccagacgctgatagattctctttcaaatttgaatgcctctcgcagtagggacggttgcatgtgcagcattttggaagcttgagccagcaatccatgcacagaaagtcagagcaggctagtccagactcaccgagctcctccaggtcgatgcagccaccacaagtttcacatctagcaacacaaaagaagcaaccgcggcatcgagaccggccatccttcacttccctgaagtataatcaaaatcgtcagaaacgaagatacacagaaccatttttttttcaaaaatgagaatcggtataagtcagatcaaagtcaatagacctacagaacaagacttcaaaaatcagaaccaactattccgaagacaagagcaacaaaccaaaaaactaaatgccaagctgctttcatgtagcccatagggttgggggggaaatgagctacgggaccattgccaaaaagaaacaccaagtcagctataccaccacggcaccaccacaggagatccgatgcaagtaaatatctaaaagtgagactagtgactgccagaaatcattgatggagccacgcatgtagtagagaaaaggtatggcgatgccagctctaccaataaactgaaaggggaatttctaatgacaagactgattgtgaactcagaatactgaagattcagagctacagacctgcagttcttccttgtacaatcaaacacgagtctcacatttctgcacaaagggcacaaatctacatcaatagggcgaccgtcgtccgtgttcagcacttcatggactctatggttgtagtgaagtgcttgagcatcttgttgttggctacctctgcacatgagagacttgataatatcgagatggtggttattcaccttgcagataccatgcagtcgaacacgacttagattgcctttgtgctgcccatgcagaaaatgaatgattttcaccagaccatcagctgttaatcctgtgcatctgggcacaaaaagct

SEQ ID NO: 122718 - DNA, 1056 bp, Zea Mays
atgggtgatagacgtgattggatgtatgaaggtttcaagaagggtgggtgtcacacaagtgaatggtttgccaagacgcagatgtttctggaccatgcaactgctttgtcacaaatagataatattaggtgtccatgcaataaatgtagaaatatgacaagccacaccaagaggcaggtcacactacacctgtgttcgcatggtttcgtgccaggctataaggtctggtatctccatggtgaagatgttgaacgagcaacagaagtagaagttgatgacggtgaagatgatgttgataggatggaccagatgcttgaggatctgcagcctgaactggcaccagatcatcatgattcacctacaccggaggtcgcagaggtagcaaggaagcttggaatactagtcatcgctgatgaagtgtatggaaacctggtgtttggggacaccccttacgtcccaatgggtgtctttggccacattgccctgtcttgagcataggatcactatcgaagagatggatagtgcctgggtggcgacttggttgggtagttgtatgtgatcccatcaggattctgcaagaaaccaagatcattgcatcaataacaaacttccttaacgtttcaactgatccggcaacttttgttcagggagcacttccccatattcttgggaacacaaaggaagatttttttcaggaggatcattggtctgctagcagaaacctcagagatatgttacagagaaataaaggacatcaagtgcatcacctgccctcacaagccaaaaggttccatgtttgtcatggtgaaattaaatttgtatcttttggaggggattcatgacgatattgatttttgctgcaagctggcaaaagaagagtctgtgattttgtgtccaggtgagatggatttgatttgttggaaaaaatcatatctgacaaaaactcattttggctctagcagttgtctgttttgggttacaggtattccaggcctaaactgtatgtttgcgctcagaaatgctttaagaaaacagtgaattaatgctggaatacaa

SEQ ID NO: 122719 - DNA, 1694 bp, Zea Mays
ctagcgagccccacgcgtcagactgggtcctcccctctaggttgttgcgctcgtgccgaacttctcgccgcggcatgatgactggcccgtgcgccagctgatcaaccgagggaggccagtgcccctagccctccataagtttgaaccccgccgcaaccctgaaccatctctatcaaaacaccgagccgccaccgtagagaagtgccgccgcaggtgaggaaagggagtcggcatggtaaaccgagtcctcatcgttgtcgcaacctcggtgtcatgcctagaggtttcgccagatcactggaggggtgccggtggcctcggcgcgcgtgattggtggctagagaccccggaatttctcaccggcgtcgagcaggcggcgatccgcaccactccattgttgggggtgtttccgcaccaagatctcagtatgactacctcactcaattcgtcatgtcgtcctcttcacattgcactattcactagtaactctcatgcttggaggaccgatcaggagtcactctggcgggtgctccgccattgggtgctggtggcgtcgccgtcgtgcctagtaggaggtagagagatgcgcagggtcgtggatctgtttagcaacgaccgggattcgatcctgttgtaccaattcgggcaagaggatcggagccattgagatctgatcgggtggatgggacaactctggggtaattaaaaatctgaatcgtagatttcggatcgaggggtcggcgttgcgtaccagttcgttttataatagatctaatctgagtcgttcgcttcagatcgggtggctatagcaggcccgtgtccattcgattaaagaattttgcatgtgagtcctgaaagggaaatggacctaatcatttcctataatcgattttgatggttgacgtccatcacaaaccatatggactaactagattgtctagatgtcatttatctcaggtgcataaggttcaactcaaaacaagaaagaaattcagttggggacacaaacaaaatttggagcaagacatgagagtgtgctgccaagtggcgcacaggacacagcgcgctccgctataattcatcggactgttcggtgagctagcggagcaacggctaactagctcaacggtcgtctacaaaagcaaacagtaacatgaacagtgcgcggcagagtcagagcagcaaagtcagaggtcaccggacatgtccggtgcagctataggacaacggctccaacggtcaattcgctccaaacctcaacgggcgtgctgaagtggcgtgcaccggacagtgaacagtacctgtctgatgcgccatcggactgtccggtgtgcctatcgccagcagactctgccaacgactaggaagtggttggaggctataaatacccccaaccacctcattcattggcatctaagttttcagatgttctcattcaatacaagagcaatggcattcactccaagacacattccaaaagatcaaatcctctccaagtcccaaaatcaactcaaccacttagtgacttgagagagagagagagcttttatgttcatttgcactcttgttgcttggattgccttctctattcccattcttattctctaagtgctttgtaaatctagcaagagacacctaagtgtgtggtggtccttgcggggtcttagtgacccgattgattaaggagaaggttc

SEQ ID NO: 122720 - DNA, 1758 bp, Zea Mays
taccgcctgatccaccgcggtttgcttgccgcgagcatggaaattattagtcattcgacaagtcagagagattttatttcctctcgtcgtctcgtggccgctggtgcccgcgcgtcagatttggcctgctccgctccgcctccgcagtgtgaatttctgagagataggtttctgtgctgcagacagcccggcggcgacgcggtggcagtttgcggcgaggtccggcgtcgcgccggcgttcatgtcgttcaggacggaggcgacgggcgagggctctgaggcgttctcggtctccgagctccggccggccggagacgccttcgacggcatcaagaagcagagctccatgctttcgatctaccagcagcagaggcagtttggccacaacagcagccaggccacggcacagcagcagtaccctgcagcggcgcacaggcagcgctcgcaggtggcggattacggcgcggcggcaccgcatcgtctccctggtggtggtggtggtggatgcaggctagtgcagccggtgtcggtgcgccaccctgtgccgttccatcaggccaacctgatggtcaggtcatcagtgtcgcagagcttccacaaccagcagcagcctttcaccatgagcaacaacgggtttggcggctctacggccggcgtgtacggggcgaggaacccacggaaccaggcctcgacgcagctcacgatattctacaacggctcggtgaatgttttcgacaacgtcccggtcgacaaggctaaagagctcatgatgctggccagcagggcgtctgttcctggtgctaccccgtcaagtgagccggactcgccgcctgttcctgcccctgcccctgccaaggtcaacgtggccgaggtcttccctggtgctagacagatcgcagttcagaaaccggagccctgcgtgccgcatctatcaagcgcggcaactgcaagcccagtccgcatcgtcgtgccgcaagccgtggctccctccaggagcacgtctcactgcgctacagaggcctgcggttccaagcctgctgctgctcctaccagccagacagtctcgtcgtcccggcagttggcagctgcaagtgctgctgcagctgttacgccaagagctgtccctcaagctcggaaagcgtcgctcgcccggttcttggagaagcgaaaggaaagagtggctagcgtcgagccatacctgacgtccaactccaagagcccgctagagagcagtgacgccgtcggcagcgctagcgctccaacgaaatcgtcatccacagacgtcgccccggcgagcagccacaacggcggcggcgcagagcttgtgcgccatggcggatatcccaggagcatcagcttcagcacaaatttgcagatctgactctggtgttgctgtccatagactaccactaccactacgactccgtgtccgtgagcgcgcccctccctacccatcgacacgaaagctggatagctgtcttgctttgcatccggatgaggcgggaggtataggaagatacgatgagatgagagtataaagatgctgagtgctagcctagccgcccgctgtatagcttttgcagcgcgctgctgacaagatcgagggccgtgacctactcgtttcaggctcttcttgaatggtttttttgtcgtggtccattgttgtatattattcaacttgagaaacagagagtgctgctctgtctctgataaaagtttatatgaaattgataaaaagtttctgctttttccaaacaa

SEQ ID NO: 122721 - DNA, 1794 bp, Zea Mays
agagagagtgagagagagagggggagagaaaggttaaggaatccgagctaaggcgccgtttcttctcctcctgcttttttcttctcggcaccgtcactggagggagaggattcacgggacgaggcgacgcggaagggatttcgtcgcttgtgtgggcggcgcgtccgctggttgctttgcttccatggagagggatttcctgggtgcgatcgacagggcgtggaagtgcggcgaggcggcgaaggaggagagccgatcggagccagacagcccggcggcgacgcggtggcagtttgcggcgaggtccggcgtcgcgccggcgttcatgtcgttcaggacggaggcgacgggcgagggctctgaggcgttctcggtctccgagctccggccggccggagacgccttcgacggcatcaagaagcagagctccatgctttcgatctaccagcagcagaggcagtttggccacaacagcagccaggccacggcacagcagcagtaccctgcagcggcgcacaggcagcgctcgcaggtggcggattacggcgcggcggcaccgcatcgtctccctggtggtggtggtggtggatgcaggctagtgcagccggtgtcggtgcgccaccctgtgccgttccatcaggccaacctgatggtcaggtcatcagtgtcgcagagcttccacaaccagcagcagcctttcaccatgagcaacaacgggtttggcggctctacggccggcgtgtacggggcgaggaacccacggaaccaggcctcgacgcagctcacgatattctacaacggctcggtgaatgttttcgacaacgtcccggtcgacaaggctaaagagctcatgatgctggccagcagggcgtctgttcctggtgctaccccgtcaagtgagccggactcgccgcctgttcctgcccctgcccctgccaaggtcaacgtggccgaggtcttccctggtgctagacagatcgcagttcagaaaccggagccctgcgtgccgcatctatcaagcgcggcaactgcaagcccagtccgcatcgtcgtgccgcaagccgtggctccctccaggagcacgtctcactgcgctacagaggcctgcggttccaagcctgctgctgctcctaccagccagacagtctcgtcgtcccggcagttggcagctgcaagtgctgctgcagctgttacgccaagagctgtccctcaagctcggaaagcgtcgctcgcccggttcttggagaagcgaaaggaaagagtggctagcgtcgagccatacctgacgtccaactccaagagcccgctagagagcagtgacgccgtcggcagcgctagcgctccaacgaaatcgtcatccacagacgtcgccccggcgagcagccacaacggcggcggcgcagagcttgtgcgccatggcggatatcccaggagcatcagcttcagcacaaatttgcagatctgactctggtgttgctgtccatagactaccactaccactacgactccgtgtccgtgagcgcgcccctccctacccatcgacacgaaagctggatagctgtcttgctttgcatccggatgaggcgggaggtataggaagatacgatgagatgagagtataaagatgctgagtgctagcctagccgcccgctgtatagcttttgcagcgcgctgctgacaagatcgagggccgtgacctactcgtttcaggctcttcttgaatggtttttttgtcgtggtccattgttgtatattattcaacttgagaaacagagagtgctgctctgtctctga

SEQ ID NO: 122722 - DNA, 846 bp, Zea Mays
atggcggtgcgggagcggccgcccggccatagtgcgcggccacggttcgagcgcgggagcagtcgcccggcctcggcacgggcacgacggcgctggtcccggtgcgggcatagcagcgcgcggcccccggcgcgcacgggcgtgacctccccagcgcgagcgggcgcgaccaccacccggcggcatgggtgcggctcccggcggcatggtcgcggccccaacccggcggcgtgggtgcggctactgcgcgggctcgcgggcccgatgcgagcgcagcccttgcgcaggcgcgaacgcggcgtcgtggggcgcggcccactggcagcgcgggcgcgacctcggccaaacggcgacggcgcggccccggcagccccggcggcgcggggcacggcgacccagcccgcgcatgggcgtcggctcctgtggtgcggctgtggcggcctgactagcgcttgcgcggcagccccggcccgacggcgcgaggcgcggctcgcgcgggcggaggcaccagcagcgcagccgcggcggtctgggcgtggccggacccaccctcggcacggcggcccggccccgacggcgcacggcctcgcgcggcctcctgtagcgcgtgggcggccagggcgcggccagcctcccagcgacgttttgcgacggcatgcgggcgcggccgacgcgagcgcagtggcccaggcgcgtgagcgcgcagccctgcggccctggcaacgtggccacagcctggccggcgcggccggcgcgagcgcagaggcccaggcgcgtgagcgcgcagccctgtggccctggtggcactgtgtcgtcgacgacacgaagaagataaagcagtggtaa

SEQ ID NO: 122723 - DNA, 107 bp, Zea Mays
gcccaacagaaacacgccagataatctaggtaaacaaacaggactactcagattatataatccaaattatataatccagattatataatcctccaaaaataatccag

SEQ ID NO: 122724 - DNA, 1092 bp, Zea Mays
ccacagatgacagacccacacacacacactctctctcttcgcagacacaaccaaaagaccaaggtggaaaaatagtaaagaaacggagcgaggctcctccgcatttcttatctatcctgatccaaaccctccgagggggaaacaattcattccgcacggcatccgggaaggtctgcgtcgtcgccatggccaccgaggaagtcgccaagccgtccccgatcccgccctaccccgagatgatcctggcggcgatcgaggacttaggcgacaagagcgggtcgaacaagtcggccatctccaggtacatcgagggcaagtacgacggcgacctgccgcccgcgcacgcgtcgctgctggccgcgcacctggcgcgcatgaaggagtcgggtgagctggtcttcgtcaagaacaactacttccgcgccgacgcgcccgacgcgccgccgaagcgcgggcgcgggcggcccccgaaggcgcgggaccccggcgcgccggtgtcgccgccatcggggcgcgggcgcgggcgcccgcccaagcccaaggacccgctggacgccgccgtgaagcaggccaccgcgggcatgcccagggcccgcggccgcccgcccaagaaggccaagaccgagggcggcgcgtccccggcccccgccggcgacggctccacccccgtcaagcgcggccgcggccgcccccccaaggtacgccccgtcgtgcccagcgagacggccgcggcttgacggacgctgctgcatggggttagtgcgtagcgattcgtcccgccgccaccgccgcagggttgatgtttgtaggcttcgttttccttcatctaattgtcgtcgtagtcgtcgtcgtcgcgcaattaattaatggagtaagtaggaggatttgatgtgctgtgttcggttcagttcagctcacggtgctgtcttgttcgtatgtgctggatggatctgtctgttgtaagctaaactagggaggctgagtgctgtgttggtcggttcattattaagctgctaatttggatgtgtacaatacattagtggatgatgctgatgttcgtgatgttgatttgagggtttcatgaactctacc

SEQ ID NO: 122725 - DNA, 107 bp, Zea Mays
ctccgtaccgggctctttgtcaggtaaacagcccttggattcgggcctcgagttcgttgtctgttcgacctcgcattcacctgaacccactgcagaacccggataca

SEQ ID NO: 122726 - DNA, 1809 bp, Zea Mays
ctgtctcctgctactacctcacgccggcgaggatccggacgatcctggccggccagggcgtccacggcccgccgccgcgtctcctcgtcgggaacctccacgacgtctctgctctcgtctccagggccaccgccggtgacatgagctgcctgagccacgacatcgtcggccgccttctgccccattacgtccagtggtccaagatgtacggtgagtggctcacgatgcattgccggccgggcggtgggttcatggtgctgatgcttgtccggcggacctgaccggagcccggaggctttatttggttggccttgtgcagggaggcggttcgtgtactggtacgggagcgagccacgggtgtgcgtgacggacgcgggcatggtgcgggagctgctgtcgtcgaggcacgcgcacgtcaccggcaagtcgtggctgcagcggcagggcgccaagcacttcatcggccgcggcctgatcatggccaacggcgccacgtggtcgcaccagcgccacgtggttgcgccggcgttcatggctgacaggctccgaggcagggtcggccacatggtggactgcgcccggcggacggtgcgcgcgctgcgggaggcggtggcgcgggacgggaacgaggtggaggtgggcgcgcacatggcgaggctcgccggcgacatcatcgcgtgcactgagttcgacacgacctacgacacggggaagcgcatcttccggctcatcgaggagctgcagcgcctcacggcgtgctccagccgctatctctgggtccctggcagccagtatttcccaagcaaatacaggcgggaaataaagcgtctgaacggggagctggagcagctgctcaaggagtccatccagcgcagccgcgagatcgcggacgagggccggacgccgtcgtcggcgtgcggcatggggctcctcggtatgctgctggccgagacggagaagaacaggaacaggacgaagtctagcaacggcgagctgggcctggggtacgacgcccagacgatgatcgacgagtgcaagacattcttcttcgcggggcacgagacgtcggcgctgctcctcacctgggccatcatgctgctcgccacgaacccttcgtggcaggacaaggcgcgcgccgaggtagcgagtgtctgcggcgacgccccgcctaccgccgaccacctccccaagctcaccgtgctgcagatggtgatcaacgagacgctccggctgtacccgccggcgacgctgctgccgcggatggcgttcgaggacatcactctcggctccggcgccgacgagctgcgcgtgcccaagggcgcgtcgctgtggatccccgtgctggccatccaccacgacgaggccgtgtggggagcggacgcgcacgagttcaggccggaccggttcgcgcccgggcgggcccggccgtgggcgggccgcttcctgccgttcgcgtcgggcccccgcaactgcgtcggccaggcgtacgccatggtcgaggccaaggttgtgctggccatgctgctcgcgagcttccgcttcggcatctccgacgagtaccgccacgcgcccgtcaacgtgctcacgctccgcgcgcgccacggcgtgcccgtgcgcctgctgccgttgacgtgacgcgggcggcagtaggcctccctcgcacttgggcttgtgttcttggttcttgaaaatttttgggacatgtgtcttttagtttgtgcacttgactagatggcagtagcctggcatgtagaaaataacataatactacttggtgtcaacgttttgttggcggtgtttttttttgtc

SEQ ID NO: 122727 - DNA, 4873 bp, Zea Mays
atgaggaaagctggagcaaaagagggatcaattggatccaagggtgcgattgatgtgaatagtttatctgtttccacagaaatagcaggaaggccatctgatttaatgatcaaatcttgtacttgcactggaaggttatcatcttcttcagctcataatcttacagacacatatatttcaatgacctgcaaaagctgtactggtgaatcaacagaagacagaggtgggccatcgtgtagcggcaagcttaacaatatgggtttggagctcccaaggcctatagatcttgaggttaaatggatgactgtaaaaaaaaggcaaagggacaccaggagagcaagggcttcctttggcgaagacacaagcagggatggaattggatctttctgtttatctggctgtgctacaaatcaagagatggcgcaagacgctccagtctctgaatctgagaagtttggagtatccattcttggtagacgctttagtgatcccatggaaaatgttcctataaaaaagagaagatttcatatggatttttctccatcacctccattcactccattgctagtggatccatatgaaaagataccgggaagctcttctaaagctgtcagatcatatgagaaacattataagcttaagacgcaacaaattgagtataaggtgggaaacaaaggtcgttttggtgacgatgatttttctggtattgatatactagcttctgctgcctgtgaaagtgagatgagtggtggaatattagatggggagtgctcaacgttagctcacctcccagaagaaaggaaactggagaatactactggtagcagcaaattgagtctattacataacatggaggatacgttaaatattcctggtacttcacattgcatatatgatatgcctcttgggtcttctagatctgctccagatatgaagtccttatttgttgccacaccaactatcttagaaaatcttgttgaatcggcatctgctcccaaggttaattgttcattatattctgcactgaacaatgcaaacgaaatagagattgtttctgatgctaagtctacaagtgttgcaattgcaaacagttcagacaatccagaaaaaactataggatgtttaaaggatacagttgtgcaaaccaaccatgccaatgcgactaatgccaagtctacaagtgttgcaattgcaaacagttcagacaatccagaaaaaactataggatgttcacaggatacagttgtgcaaaccaaccatgccaatgcgactcgtgattctaggctgcactgggatcttaatgttgccatggaggcatggggcactgattgcggtgctgttgaggatcctttagttgctactgtaagtgatcatgatgatgccagaaatgacatgaacaaaccagggacatctcatcattttgagtcaagagatggtagtgtagttgatcactctgttgacactcatatggatgatgcactgaaacacgtgtctgctaatacaaaggatacatgtgattctcctgctgacagtccgtctcacccttcgcgcaacttgcagctattggaatctggatatgtagggagtgatgcccttgctgaaacaatggatttgcctgaccagaagaatagcaggttcgcttcagctatggattcacatattagatctgatccagaaccagctcttatcatggagcattttgcttcagcttcacatgtggagaaaatcaatggttcgcatcccgaacctgttcaatgtgatggtttgtctaatatgtcttctgtgaatgtccatattggaagtaattcactccaaacaagtgaattgggcaccacattaaagcctttggctagcatattagtttctgaggaaagcaaaaaccttccaacagtaggcacttcccataaaaaggttactgactttggctggagtgataataagcttgaagaagcttctgaacaaagcatatctgaatctaagaaccaggagcttttggatgttgattcagaaactagtaagaagggtgaacatgacactggtatattttatgccaacgaaaggacaaaatatgcagaaaatctcattcatccagaggacaaccatggatcttctaattgtgatatggctcatgtacatgaagaaaatggtgctgttgcaatgattaattctaaagactctttaattacttgtgccaacagtagcactgtagagacatattacatttcagatgcagctcctcaggttcctgttcccagttcagaatgccacaaactggaatgttttactgatgcgggcagcactgtggattcaaaatctgcagcgcacagctaccagaatggttgcgaaaatgagcttgggaaggtcatatcaaatgttcgttcagatcaatgctatgaaactgacacatcacatattagcaaaaatctagctggggttgaaaaagtttatgtcgaggaggacgattctcaatatgaggatggggaacttagagaatctggtgattgttattgggtggatgatggttatgaagatgttaaacatgccaactggcattatcaggtatcagattacaagaatgaagaagctactcctggcctcacgtctctccatactgattctgttgcaaataatgtggttattcctgttgctaatgacaatggaccacaatctagaaaggaggacattgctgtttcacctgtgtcatctaagtgttcatggttaacaaactgcttagatggtggatctatagctgatggaaagtctcaaagtattcatttgagaggtgatactaacatgtatgggtcaaacccaagccgtgtagcagttagatctgctacaacagtaagccagtctgaaaggtgcaacgatgccctaggtgatatgttaaatatcagaatgaagaacacaggttgggatatgatgcctgaagatcaaaagcactctcaacatgatgcaagggatgtgactgattcgtctaatcggtgtgttttgagctcagatgcggctagagacgatgattcactgcaaaaaaagggactattgaatagagatcttcaaggagtggaacggcaaaaatcatttgacagaccccagaggaatgaattgagcaggtacaattttctagtaactttgttttacagtcttgcaggtttttcagttcctgatgattttagtgtcttgacaccattgactaatatcatggtaacccttatttcatgcagatctgacgatggttatggctcaggctcaaaatctggaagggcaatggactctcatggatcgcatgacatgtatggcacatcccgtcatgttcagacaagcgctcgggtggagtgggtggaaagttcaaaacgtcctcgttctactcggcacaaatcacctgaatattataattatggcacatcaggtccaaggaatgctgcagaagctgctgtggcaaagatgcagagcagtggctttgttgttgcacgtgatggcactttagtaagagctgttgatgctgcaaatgctggtcagatgcccagaaggatgcgaaatcctttaagtagctcatgccacctgatttctggatggggttccccagttgacagggatgaagcctgtgggatgtccagaggccccgtgcatgctaggaaagcatctccagagcgtcactttggtgcaaatagtaaccggtccagtcgatatggttctgaaatggagaaaaatcatactactgatgcaaatttgagttctgtccattgctcgctgtccagtagacaacgaggcaccccgacatctagagcatcacttaacctttcccgtgctcacagcagatctccttctgggtccaggtctcgatccccacatgattgggcacctaggaacagaggcaagatcatggcaaatggaggttcaactttatggaagcatagtagatctccacctaatcacatgactaaaggtgaaattggtagaatggcttcacctcggagacaacctggatatgatgatcgagctatgtgttacagtccactatcaagaaacaacacatactccaagaatgcttcgacatgggttgatggaaggaatggttcagcagtggatatttctgatgatcataataaaaggtattcaaggagaagctcacctctgagaattacctcacggaatgacagatttgatgtcatggactcccaaggacgaccaaggtctggagaattctaccgtccgacacaaggaagacttctttatggttacaatagggaaaataagcatggcagaaatggtgaagatggaagggaatgcactgatagatatgcgaataattctgtcaagcgatatgaccggagtggtgcagtaaagcaatttagaaatgatactggtgataaatttcggactcgtatttctgctcccagatcgccagatctccaaaggggggtgagtcctcggagatttgacagaagctttgagaggtagctgactagctggctgtgaatttgccttatagaactaaaatggaaaataaagacctgtctggatgattgagccaggaaatgttgcaaaaccttgatggagttcaatcataggggttgatggaggactcttggcagcactgtttttttttctgcttctgctgcatatattcaaggcacagaaatgttggaccatgcacttctgtacggggaattcagattaacttcataattttcctgtttcagtctgtaaatatttatgttggtagcagaattacaatcactcctttcagctttattatagctgttcttttttttaatttctgatactttatcatgtttgtcccttttgttttttcaatgggtattgtccctgtacgaggtccattttaacatgatgaatcaattaaattttgagc

SEQ ID NO: 122728 - DNA, 1520 bp, Zea Mays
ctgcttcgccctgcccaccacagcatccgcagttccccgaccacaccgttcctccgagcccaggagcagccccgcgccaggaggaagtttgttcttttaacaatatgtcgagggaggagaatgtttacatggccaagttggctgagcaggctgaaaggtatgaggagatggttgagtatatggagaaggtggctaagactgtagatgtggaagagctcactgttgaggagcgtaaccttctgtctgttgcatacaagaatgtgattggggctcgccgcgcttcatggcgcattgtttcttccattgaacaaaaggaggagtcccgtaagaacgaagagcatgtgaaccttatcaaggaatatcgtggcaagatcgaggctgaactgagcaatatctgtgatggaatcttgaagctgcttgactcccacctagtgccttcttctactgctgctgaatcaaaggtcttctacctcaagatgaagggtgactatcacaggtatcttgcggaatttaagactggtgctgagaggaaggaatctgctgagagcacaatggtggcctataaggctgctcaggacattgctctggctgagctggcacctacccatccgataaggctgggacttgctcttaatttttcagtgttctattatgagattctgaactccccagacaaagcttgcaacctggcaaagcaggcgtttgatgaagctatctctgagttagacagccttggtgaggagtcatacaaggatagcactctgatcatgcaactcctgagggataacttgaccctttggacatccgacctcacggaggatggtgctgatgagggcaaagatgccccgaaaggtgatgcaggcgagggacagtaatcttcggagggggtgcaaagttgttcgagccccaatgttttagatgctctatgctgtcgaagctgtgctgtgccattattgtagctgatttcgtctccattcacttcttttttcttgttagtaggctggtagtggtcgaattaatttgctttgtgttgccgctagtccatgtggactggtattgttcccctggatttatttggcaagcgtgtccgtgctcgctctagcgttttattgagcttttaaagtcatcgcattcttttttgattgcaatcagttattggctggatatgcggtggctgtttggatcagaagtacagccggagtttcctcaccggagcgtgtaacatgtggaaattggaaaccacgcaaacgtctctcttatttgtacccctgagtacatagggctttttttaacagcttttctgaaaagctgcgcttgtttggtttgacttttttctgaacagcttttctgaaaagctggctgtggggagaagctggtgattagaatctgggtgttggttcgcctgctgtggagagaagctggtggttaaaatctaggtgtttggatacacagattctgagattgtaagattgtagattctgattaaaaaaggaaacagataaaaacaccgaaccaacaag

SEQ ID NO: 122729 - DNA, 1420 bp, Zea Mays
ctgcttcgccctgcccaccacagcatccgcagttccccgaccacaccgttcctccgagcccaggagcagccccgcgccaggaggaagtttgttcttttaacaatatgtcgagggaggagaatgtttacatggccaagttggctgagcaggctgaaagaatgtgattggggctcgccgcgcttcatggcgcattgtttcttccattgaacaaaaggaggagtcccgtaagaacgaagagcatgtgaaccttatcaaggaatatcgtggcaagatcgaggctgaactgagcaatatctgtgatggaatcttgaagctgcttgactcccacctagtgccttcttctactgctgctgaatcaaaggtcttctacctcaagatgaagggtgactatcacaggtatcttgcggaatttaagactggtgctgagaggaaggaatctgctgagagcacaatggtggcctataaggctgctcaggacattgctctggctgagctggcacctacccatccgataaggctgggacttgctcttaatttttcagtgttctattatgagattctgaactccccagacaaagcttgcaacctggcaaagcaggcgtttgatgaagctatctctgagttagacagccttggtgaggagtcatacaaggatagcactctgatcatgcaactcctgagggataacttgaccctttggacatccgacctcacggaggatggtgctgatgagggcaaagatgccccgaaaggtgatgcaggcgagggacagtaatcttcggagggggtgcaaagttgttcgagccccaatgttttagatgctctatgctgtcgaagctgtgctgtgccattattgtagctgatttcgtctccattcacttcttttttcttgttagtaggctggtagtggtcgaattaatttgctttgtgttgccgctagtccatgtggactggtattgttcccctggatttatttggcaagcgtgtccgtgctcgctctagcgttttattgagcttttaaagtcatcgcattcttttttgattgcaatcagttattggctggatatgcggtggctgtttggatcagaagtacagccggagtttcctcaccggagcgtgtaacatgtggaaattggaaaccacgcaaacgtctctcttatttgtacccctgagtacatagggctttttttaacagcttttctgaaaagctgcgcttgtttggtttgacttttttctgaacagcttttctgaaaagctggctgtggggagaagctggtgattagaatctgggtgttggttcgcctgctgtggagagaagctggtggttaaaatctaggtgtttggatacacagattctgagattgtaagattgtagattctgattaaaaaaggaaacagataaaaacaccgaaccaacaag

SEQ ID NO: 122730 - DNA, 1313 bp, Zea Mays
cgctgcttcgccctgcccaccacagcatccgcagttccccgaccacaccgttcctccgagcccaggagcagccccgcgccaggaggaagtttgttcttttaacaatatgtcgagggaggagaatgtttacatggccaagttggctgagcaggctgaaaggtatgaggagatggttgagtatatggagaaggtggctaagactgtagatgtggaagagctcactgttgaggagcgtaaccttctgtctgttgcatacaagaatgtgattggggctcgccgcgcttcatggcgcattgtttcttccattgaacaaaaggaggagtcccgtaagaacgaagagcatgtgaaccttatcaaggaatatcgtggcaagatcgaggctgaactgagcaatatctgtgatggaatcttgaagctgcttgactcccacctagtgccttcttctactgctgctgaactccccagacaaagcttgcaacctggcaaagcaggcgtttgatgaagctatctctgagttagacagccttggtgaggagtcatacaaggatagcactctgatcatgcaactcctgagggataacttgaccctttggacatccgacctcacggaggatggtgctgatgagggcaaagatgccccgaaaggtgatgcaggcgagggacagtaatcttcggagggggtgcaaagttgttcgagccccaatgttttagatgctctatgctgtcgaagctgtgctgtgccattattgtagctgatttcgtctccattcacttcttttttcttgttagtaggctggtagtggtcgaattaatttgctttgtgttgccgctagtccatgtggactggtattgttcccctggatttatttggcaagcgtgtccgtgctcgctctagcgttttattgagcttttaaagtcatcgcattcttttttgattgcaatcagttattggctggatatgcggtggctgtttggatcagaagtacagccggagtttcctcaccggagcgtgtaacatgtggaaattggaaaccacgcaaacgtctctcttatttgtacccctgagtacatagggctttttttaacagcttttctgaaaagctgcgcttgtttggtttgacttttttctgaacagcttttctgaaaagctggctgtggggagaagctggtgattagaatctgggtgttggttcgcctgctgtggagagaagctggtggttaaaatctaggtgtttggatacacagattctgagattgtaagattgtagattctgattaaaaaaggaaacagataaaaacaccgaaccaacaag

SEQ ID NO: 122731 - DNA, 666 bp, Zea Mays
ttgtgtgttgagtatctaacttatttaatttgtggttactggtaggcatttgagttggttgcctgataatttaactttttatattgtgcattgtgtgccattggaactttgataattgataatgattggctaatctttgcaggcgtttgatgaagctatctctgagttagacagccttggtgaggagtcatacaaggatagcactctgatcatgcaactcctgagggataacttgaccctttggacatccgacctcacggtattttcttctcccaaataaaaaaaacccaatccaatctttaagctgttgcctgtctactcttcctatctgttgctaaaaagcttgaatttgttatgtgcaggaggatggtgctgatgagggcaaagatgccccgaaaggtgatgcaggcgagggacagtaatcttcggagggggtgcaaagttgttcgagccccaatgttttagatgctctatgctgtcgaagctgtgctgtgccattattgtagctgatttcgtctccattcacttcttttttcttgttagtaggctggtagtggtcgaattaatttgctttgtgttgccgctagtccatgtggactggtattgttcccctggatttatttggcaagcgtgtccgtgctcgctctagcgttttattgagctttt

SEQ ID NO: 122732 - DNA, 630 bp, Zea Mays
atgccgcctcgtagagctcggggtagtccgcaagctcctagtggggactcgatgagtccggcggcaatgttagccgcgatgcaggccatgcagcaggagttggcccttctgaggcaagccattcttgtcgcccctgcaggtgctgctcagggtgctggaggtggagaagtgcccgggggcgctgtccctgcgggtgctgttcctggtggcggggccggggtgcctcttccagtcagtggtctttctctgatgcagtggatgggcatgaagttggattcttttgatggcagtggtactccggttgaggcggcagattggctgacttatgtggaggataagatgaatgtcttcgagattgcttatgaagatcgggttcgctttggcactcagctgctgaagggtgaggcgcagatttggtggagaggcgtgcaggcagcgcactcctcctcaccgggagtcctatcatgggatgttttcatcaggcagttcgaaaggagattctacccggtcacctttctggagaaaatgaagattgacttgcagtcctacaagcaggagaagaagtctgtcacagagtatgaggtgggcttcaacaaaatggtccgcttttgtccctcatgtggcttataa

SEQ ID NO: 122733 - DNA, 1703 bp, Zea Mays
cgcggcagaagagcccaaatcacggccgcaaaagccacgcacgcggcgcttgtcctgcgcggcgcacggaaacccacctccacggcggcaccccgtgcgtcggctgcttgctgccccagtgccgccccgcgttcccttcgctcccgccgacaccgacgccgccactgccaccgccggcatggcgaccccgctccgcgccaccgcggtcctcgcgtggggttccggggaggacgggcagctgggcatgggcgggaacgaggagaaggactggccccacttcgttgaggcgctggggccctacgccgtcaccgccgtcgtcgccggcagccgcaactccctcgccatctgcgacgacggccgcctgttcacatggggatggaaccaacgcggcacgctcgggcacccgccggagaccaagacggagagctccccgggccccgtcgacgctctcgcgggtttcaagatcgtccaggcggcgattggcgggtggcattgcctcgcagttgacgacaaggggcgcgcctacgcctggggtggaaacgagtacgggcagtgtggtgaggagcctgagaggaaggaggacgggacgagggcgctcaggagggacatcccgatcccgcagcggtgcgcgctcaagctcaaagtccggcaagtagccgctggagggacacattcagtagttttgactcaagaaggtcacgtctggacatggggacagccatggcctccgggtgatatcaagcaaatatctacacctgtacgtgtgcaaggccttgagaaagtgagggtcattgctgtaggtgcattccataatttggcactaacggaggatgtaattttgtgggcatggggtaataatgagtatggtcagctggggactggagatacccaaccaagatcacaaccgatacgtgtcgaagggctatctgatctctcactggttgacattgctgctggaggctggcattcaactgcactaactatagatggagaggtgtatgcttgggggagaggagagcacgggaggcttggatttggagatgataagagtagtcacatggtgcccctaaaggttgagcttctagctggagaggatattgttcaggtatcatgtggaggaacacattcagttgcgctagctcgagatggccgaatgttttcttacgggaggggcgaccatggccgtctaggctacggcaggaaggtgacgacgggccaccccatggaattgcccatcaacctgccgccgctcagcagcagccgcgacggtcggtggcaggcgaaatacgtggcttgtggcgggcggcacaccctcgctattgcggagtggacagaggccactgattgatcaccgtttgtggaataagcacaaggccggtgccaacgggcgtaggtggggctgcagtcgatggcgctgccggccgccgcggtcggtacttaccagaagtagttcagtaccgactgccattgccatgtgtcgtcttttaattagttgatgtccaataaattcataagttttttttaaaaaagtctaagtaatctgaaaaggtatttatgaattatgtaacttttttacttttttggtattatggtattttttatgtttatatgagttaatgtaaaattttatttatgattttataaattacatactgtgtatttatattcatgaactatataccttttttttattttggttactt

SEQ ID NO: 122734 - DNA, 1603 bp, Zea Mays
cgcggcagaagagcccaaatcacggccgcaaaagccacgcacgcggcgcttgtcctgcgcggcgcacggaaacccacctccacggcggcaccccgtgcgtcggctgcttgctgccccagtgccgccccgcgttcccttcgctcccgccgacaccgacgccgccactgccaccgccggcatggcgaccccgctccgcgccaccgcggtcctcgcgtggggttccggggaggacgggcagctgggcatgggcgggaacgaggagaaggactggccccacttcgttgaggcgctggggccctacgccgtcaccgccgtcgtcgccggcagccgcaactccctcgccatctgcgacgacggccgcctgttcacatggggatggaaccaacgcggcacgctcgggcacccgccggagaccaagacggagagctccccgggccccgtcgacgctctcgcgggtttcaagatcgtccaggcggcgattggcgggtggcattgcctcgcagttgacgacaaggggcgcgcctacgcctggggtggaaacgagtacgggcagtgtggtgaggagcctgagaggaaggaggacgggacgagggcgctcaggagggacatcccgatcccgcagcggtgcgcgctcaagctcaaagtccggcaagtagccgctggagggacacattcagtagttttgactcaagaaggtcacgtctggacatggggacagccatggcctccgggtgatatcaagcaaatatctacacctgtacgtgtgcaaggccttgagaaagtgagggtcattgctgtaggtgcattccataatttggcactaacggaggatgtaattttgtgggcatggggtaataatgagtatggtcagctggggactggagatacccaaccaagatcacaaccgatacgtgtcgaagggctatctgatctctcactggttgacattgctgctggaggctggcattcaactgcactaactatagatggagaggtgtatgcttgggggagaggagagcacgggaggcttggatttggagatgataagagtagtcacatggtgcccctaaaggttgagcttctagctggagaggatattgttcaggtatcatgtggaggaacacattcagttgcgctagctcgagatggccgaatgttttcttacgggaggggcgaccatggccgtctaggctacggcaggaaggtgacgacgggccaccccatggaattgcccatcaacctgccgccgctcagcagcagccgcgacggtcggtggcaggcgaaatacgtggcttgtggcgggcggcacaccctcgctattgcggagtggacagaggccactgattgatcacgtaggtagtgctcgacttcctgagtcctgatctgcatgcaaatctgaggctgacaagcctgctataaaattgtagcgtttgtggaataagcacaaggccggtgccaacgggcgtaggtggggctgcagtcgatggcgctgccggccgccgcggtcggtacttaccagaagtagttcagtaccgactgccattgccatgtgtcgtcttttaattagttgatgtccaataaattcataagttttttttaaaaa

SEQ ID NO: 122735 - DNA, 1911 bp, Zea Mays
atcatcggagtttccaaagccatcctcgcctcgctttctccgcccctcctcactggtttgcatccccatatacccaaccaggaccagccaaaagcccactctcctcctcgcctccgcctccgacatcgagcactcctcttcaatggcgacggcccccgcacccctctcgctctccgcctccaccctgcccgcccggctccgtgccggagtggtaccggcgggcacacggtggaggcagccgcggcgcgggcggatggtggtgcgcgccaagatccgggagatcttcatgccggcgctgagctccaccatgacggagggaaagatcgtatcctggtccgcgggcgagggagaccgcgtctccaagggcgatgctgttgtggtcgtcgagtctgacaaggccgacatggacgtcgagaccttccacgacggcatcgtggcggtggtcctcgtccaggctggcgagtcagcgccggtgggcgcccccattgcgctgctcgcggagtcggaggaggaggttcccctcgcgctcgccaaggctcaggagctctccaacgggcagccgcagcaggcgcctcctgctccgacggaggatgccgcagcggcgccgccccctcttccggctgcgacgactgctccagcgccggtggccgcggggacgaagggcattaccagcccgcacgctaagaagctggctaagcagcacagggtggaccttgccaagattactggcaccgggccgtacggtcgaattacgccggcagatattgaggcggctgccggaatcaagccgaagtcagagcccactcctgctgctgctgctgcgccaccacctgtggccgcgccttcagttggtgctgtgcctcaggcagcagtgctgccgccggttcctggcgcgactgttgttccattcactaccatgcaggctgcagtgagcaagaacatggtggagagcctggcagtgccagcattccgcgttgggtaccccattgtaaccgataagctcgatgagctgtacgaaaaggttaagccaaagggagtgacaatgacagtgctgttggcgaaggctgcagccatggctcttgcacagcaccctgttgtcaatagtacctgcagggatggaaagagcttcacatacaacagtaatatcaacattgcagtggctgtggcaattgatggtggccttattacacctgtccttcaggatgcagacaagctggatatttatttgctctcgcaaaattggaaggacctagtcaagaaagcacgtgcaaaacagctccaaccaaatgattacaactctgggacttttacactgtccaacttgggtatgtttggtgtagatcggtttgatgcaatccttccacctggccagggagctattatggctgttggagcctcgaaacctacagttgtggctgataaagatggtttctttagcgtcaagagcaaaatgctggtcaatgtcactgctgatcacaggattgtatacggtgctgatttggcagcatttctacaaacttttgcaaagattattgaggatcctgagagcttaactttgtaaggtcacttgaagagttatgatcttatctatatgcccataagtagtcttattgcagttggagttctattgttgatatccaatttttgtatctttgagcattcaatagaattcatccgatctttttgtaccggtttttatgtctcaatgttgtggatcttgttgggggagattatactgttgatattatggaattactggagagcaataagttataaactgtagaatagttctgcagattttatctctgaaatatggtttgtgtccctttaacatttatcttccgggaagtacattttcttcaaatttgaaaactgctagagatccctgttgcacttagactggcatgtaaa

SEQ ID NO: 122736 - DNA, 111 bp, Zea Mays
agtgagaaaaggcccaagcaaacaaggcactagatatatcattctaagttataaatattttgcatctataaaaaataattttcttggtggttttgtaaagtcacatcattt

SEQ ID NO: 122737 - DNA, 366 bp, Zea Mays
ttttttcatatgcatttggaatttggagattattaccggtgcctgcttttggcaattctttcctgagtaaatatagcacaactactttctcttatttgtagaagcaagcttgatttgaacatcatttgtctagatcatttttgtcacactatttgcctattgcaggaagaggaaagattctgagctgccaacttcatcggacttgttaattatgtttatgtcttcctggccaaccattttgctttcttctaaatatcagatatttccacaagaaatgcttcggtcaggaaaactggatgagctatttactaagttgtggcttctgttcttattaatatgctgtatgaactctggataagttgtgca

SEQ ID NO: 122738 - DNA, 656 bp, Zea Mays
actgttgtcttcagccaattccctctggacaagtttcctgacaacaacactcgcagcaaggactgatgctggttgtaccgcaccgtgacgaccacccgtgacgagggtgcactcctgttcaccaatgtcgcccacaacgacaaggttggctatggggcactcaaggctggtgttggcttcactattaggtgccactacctcatgttatgcaacatcacggagccgaacatggtcgggggtgtgtgggaagaggactacacggtcacctccaatgagctttggtatgccaaccccgggcgcctaccgcaagcttcctaggagcgagtcagcaatttcgctcgttttcctggtatccagactttcataggtctcgtagccaatatccctaccagacaatccaaaatggatgacattctcatgttcccccaagtcaacatggacaggccacatgtagcgcactttgtcatcagcgagttcggttacgtgagaaagaagatgtggctggtcaccattgacatgagcaccaggagagtggagtcattttctcagtataccaatgggagggaggatgtcattggaaccgaggcgcttacttgaccaatgtaaggtccagctatcccatgcccttcctcccctctcagtcctccaagtacctc

SEQ ID NO: 122739 - DNA, 552 bp, Zea Mays
atgtggctggtcaccattgacatgagcaccaggagagtggagtcattttctcagtataccaatgggagggatgatgccattggaaccgagggcgcttacttgaccaaagttggtgcacaagttgtgtactcaaaatatgcaggcacagaattgaaattcaatgacgccgaccatctcattttgaaagatgacataattggtattcttgacagtgatgatgtgaaggatatgaaaccactgaatgatcgcattctgattaagaacagaataggaaagccacacatcggacagaagccaaaaagttttattatgtctttggcagatgttctgtttattcacgatatgtctaaatgtcttctgtcaagtctggatactagagcaaagcatgtccaggaagctccaatttgtgcgttccttagccgatgtgaactctttgacttggctcagctcaccactgacccattctgagtgaaatcttgtttggcacttgtcttacatttgcaccagatcgattatgcaccgaggaacgagttatcacccattctatagtag

SEQ ID NO: 122740 - DNA, 456 bp, Zea Mays
cgcaacgacgtgtccggcgccgtcccctcggctgcgctcgcgcgcctcacccgcctcgtccgcctcgacctcgccgacaacagcctcaccgggcccgtcccacccgcaaccgcgctcgccggactcacggcgctcgtcacgctcaggctccaggacaacctgctcacgggcctcgttcccgacgtggccgccgctctgccccgcctcgcggacttcaacgcctccaacaaccagctctccggtcggctgcccgacgccatgcgcgccaggttcggcctcgcctccttcgccagcaacgccggtctctgcgggcctgcgccgccgctgccgcactgcgagttcctgccgcgggagcccgcgccgacgccgccttcgtcttcgtcttcgtccgtgttggccgccgcgtccagctcgtccatcatcctgcgcagctccacgggctgcttgccatcgtcc

SEQ ID NO: 122741 - DNA, 681 bp, Zea Mays
tttgtggattgtcttactgttgtcttcagccaattccctctggacaagtttcctgacaacaacactcgcagcaaggactgatgctggttgtaccgcaccgtgtcgaccacccgtgacgggggtgcactcctgttcaccaatgtcgcccacaacgacaaggttggctatggggcactcaaggctggtgttggcttcactatcaggtgccactacctcatgttatgcaacatcacggagccgaacatggtcgggggtgtgtgggaagaggactacacggtcacctccaatgagctttggtctgccaaccccgggcgcctaccgcaagcttcctaggagcgagtcagcaatttcgctcgttttcctggtatccagactttcatagtaggtctcgtagccaatatccctaccaaacaatccaaaatggatgacattctcatgttcccccaagtcgacatggacaggccacatgtagtgcactttgtcatcagcgagttcggttacgtgagaaagaagatgtggctggtcaccattgacatgagcaccaggagagtggagtcattttctcagtataccaatgggagggaggatgtcattggaaccgagggcgcttacttgaccaatgtaaggtccagctatcccatgcccttcctcccctctcagtcttccaagtacctctgttag

SEQ ID NO: 122742 - DNA, 90 bp, Zea Mays
attatgctttgaatcttgttccaccaaatatgtttgcagcatctccttgataccagaaacttgtcaatattacaacacttctatattcac

SEQ ID NO: 122743 - DNA, 429 bp, Zea Mays
atggccgaccctgacgccaaggctagggagccggggccggagacctgggcacgcgggcgagccgccgcgttggctatctactgcactggccggctgccgtgccacgccctgcgtaggggagctgcaggggccagagggtcatgtatggggaggctagaggagcagatcgagcagctgcggcacaggggcatgtcggtcggggctgagcaacaggctgccatgccaagttggagaagcagggcgcggctgcgtgcgtgggaggcgcaagctcgatggagcgaggatagcagcagcaacttaaccagacaacgcgcgcaggacaattcggtcatagaactgcatggcaagattgccgaggacgaaaaaagaacacgctacgaaggttcaatccaacacaaagaaacagagaaggggaactcaccgggatga

SEQ ID NO: 122744 - DNA, 957 bp, Zea Mays
gtagagatcagtggcccagaggccgggactgggaacaggtggcgctcccgcaatcccgcagcgcctaccaaactactgggccacaaataatagggtccctacaaaccgcacgtcgaccggcccacggagcatcaccaccgcggcagctaatctcggccccaagattcagaatcaccgaggcgcggcgaggcgacggcggttggcgacatgatggcctcggtgcccagccgtgttgcgctctccgcggcgagccgcctcccgaatctccacgccgtggcaggagatagatctttcatttacaagagaagatgtccaagtctttcaattcctatggctctgtcagcagctgcgccaggcaaaggtggcggtgtgcttgatcggccagtagagaaaattactcctggtcgtcagtccgaatttgatgtgaagaaatcccgcaaaatgacgcctccattccgcgtcatcctgcacaatgacaaccacaacaggcgtgagtatgttgtccaggtcctgatgaaagtgatccctgggatgaccgtcgacaacgcgttgaacatcatgcaggaggcgcatgtgaatgggttgtcagtggtgattgtctgttcccagtccgaggctgaggagcactgcacgtcactcaggggcaacggcctccgaagctcgatcgagcctgcgagtggtggctgctaaggttctagaaatgggtgtatcttgttttgccaagtatagtttgtaaatacccagcatatcaatctaagctgaaactgaaacgggttggttacatgcagttatcgatacaacgaagctaagtacttcttgggtaggtgtaaatcttgtaagggtaacctgtagaagaagaaacatagtatttttggttatgatttatgaaacatttagttacacttggtctacaccctcttttcacatagtatattttttctagcactttgcatttta

SEQ ID NO: 122745 - DNA, 798 bp, Zea Mays
gtagagatcagtggcccagaggccgggactgggaacaggtggcgctcccgcaatcccgcagcgcctaccaaactactgggccacaaataatagggtccctacaaaccgcacgtcgaccggcccacggagcatcaccaccgcggcagctaatctcggccccaagattcagaatcaccgaggcgcggcgaggcgacggcggttggcgacatgatggcctcggtgcccagccgtgttgcgctctccgcggcgagccgcctcccgaatctccacgccgtggcaggttgttcgtctccctcgctcccggttctggctcccgtttgccaatttgttggaatttggatgcgattttgtgagtacgtagttactagtactctttagtacctttcagtggataaggtcgatggggcaagtaggatgcgtgctgtccacggtgtttctgtggaggtagaattgtgggggatcccacggagtatgagagcagacaagtactcttccgcttttgcaatggttttacggttactgccaccgcacatctcatcttggagttgattttatttgagattatgtttggttgcttgtatgtgagagtcacaatctgcataggtgtatacaaaataagctattttgatgttattaatctgcatctacatatacgctcaaaattatcgtatgtagctagacaaggcggtgccatccaatcaaactgattgtgaacagagaatccttctgtttcctgctatgaaatggccgccttgtgttggctagagggcgaggacctgatgtgtggtgaaattgttg

SEQ ID NO: 122746 - DNA, 985 bp, Zea Mays
atagtcgccactagctagctaatcatatttgcatgcatggcgacgctagtttcaagcgcctaatgatggttctgatctgttctgtcgctgtttccctttcctgatgcatgcgtggtgtctgggtctggctcgctcgctgctgcagacggacaaggcgtcgctgctggccgaggtgatcgagcacgtcaaggagctgaagcggcagacgtcggcggtgctcgatgtcgagggggaggaggccgcggcggcgcggcagcgcctgcagctcctgcccacggaggcggacgacctggcggtggacgccacggaggacggcgagggcaggctggtcgtgcgagcgtcgctgtgctgcgaggaccgcgccggcctcatccccgacatcgcccgcgcgctcgccgcgctccgcctccgggcgcaccgcgccgagatcgccacgctcggcggccgcgtccgcaacgtgctgctcatcaccgccgccgccgacgacgacgatggggaaggagaaggagacgacgacgacgacgacgtcgaaggcgatggcgggtgcgccggcggcaacgcctcgtccagccggaggcacgagctcgtcgcgtccatccaggaggcgctgcgcggcgtcatggactgcaagacggcgagcagcgacacttcctcctcgtctaacggcggcgggagcatgaagaggcagcgcatgagtggtgcgcatgagcaaggttcgctttagtgtgctaaaactagctagtagctgcctccctcgatgcaagcatgaaatatgcaagcatgcgtgcatggctagctagcttctcaaactcaagttattaattagtatagttataaagctatatagccacttcaaacttgggacgagcgagctgaatcttctgtttttgttactatggtatggtgtgtgcatgagggaaagaaaatgggaacacatggacatgcaagttgattagtaggagagtttcattgtatcccttatata

SEQ ID NO: 122747 - DNA, 969 bp, Zea Mays
atgtgggaaggcggcggctttcacggcagccacgaggcgctcctgctgcaggccgccggatcaggagcggccgactacgggcacggcgccggcccggcgctcctgccgtggctcggcccggccgccggcgccgcgccggggttctcctacatggccccacaccacgcgcagccggggccgtcgggcgctgaggcggccgcgagccctttcggcttcggcggcggcgggtacagcgacggcggggtgggtggacaattcggggtgttcggcggcccagagaccgcgctgcctgcgccgcacggtctggctgccgcagccggtggtgggacgtcggcgatgcagcacgggtcgaggatggtgtccggccttctgggcaccctgcagatggagctggggcggatggcggccaaggagatcatggacgccaaggcgctggcggcctctcgcagccacagcgaggccgagcgccgccgccgccagcgcatcaacagccacctcgccaggctccgcagcctgctccccaacacctccaagacggacaaggcgtcgctgctggccgaggtgatcgagcacgtcaaggagctgaagcggcagacgtcggcggtgctcgatgtcgagggggaggaggccgcggcggcgcggcagcgcctgcagctcctgcccacggaggcggacgacctggcggtggacgccacggaggacggcgagggcaggctggtcgtgcgagcgtcgctgtgctgcgaggaccgcgccggcctcatccccgacatcgcccgcgcgctcgccgcgctccgcctccgggcgcaccgcgccgagatcgccacgctcggcggccgcgtccgcaacgaggcgctgcgcggcgtcatggactgcaagacggcgagcagcgacacttcctcctcgtctaacggcggcgggagcatgaagaggcagcgcatgagtggtgcgcatgagcaaggttcgctttag

SEQ ID NO: 122748 - DNA, 1295 bp, Zea Mays
ggcgcctttaaaaaaaaggcgtcgcacgtgacgccgacgcccgtcccggatccgacggccccgcgcgcgcgttctcacccgaccctgctcttcgcctcggctgctctaccagtctacctctaccccgcgccccctccgagatcggaatcgcggcgccccgccgccctcctccgccatggcgccgtctctgctcgggggcttcaccaagtcgctggccatgacggtgctctccgaggtcggggacaagaccttcttcgccgccgcgatattggctatgcgccatcccaggaaactggtcctggcaggctgtttgactgcactaatagtgatgacagctctatcagcttctctaggttgggttgcaccaaatctgatttcacgtaaatggactcatcatgtgaccactctattgttctttgtatttggtatttggtcattgtgggaaggcttcaaggaagatggagattcagaagaattggctgaagttgaagcagagctggatgctgtctttaagagtaataaaggcgaatctaaaactaaaactaaggcaaacgatgatacgaagaaacagcaaagaccatttctcatgcaattcttctcaccaattttcataaaggcattttctattacattctttggtgagtggggtgacaagagccagattgctactattggcttggctgctgatgaaaacccatttggtgttgtcctgggcggaatcatagcgcaagcactctgcactactgctgctgttcttggtggaaagagcctagcttcccagatatccgagaagatggtcgaactgtcaagcggagttctcttcctgctgtttggtatcatgtcattgctctctggaccaggagaattatgaatgatggcgacaaaagccatccatccatatggcgaaccggatggtgattcgatagtttagccgacacatcggaaacatttcactcgtccttcataaataactacatgttacagaagtctagcgatttcattctgttgtgctcagcatgtgaaagtcagtctactccctccgtttttttatatttgtcgcgttttagttaaaaataaactagaagacgacaaatattcgagaacggaggtagtagaagctgtctacagtatcatgaatatgatgtaagattcttgttactaaatttttgttgtcgcaattacatgcgttaacaaagcttagtttgtgaatcaactacgcaggcaaataatacggggctttgtcttttcgttgtgttactccattaatattaaatggttaatagttttttttggaa

SEQ ID NO: 122749 - DNA, 1520 bp, Zea Mays
gcgtcgcacgtgacgccgacgcccgtcccggatccgacggccccgcgcgcgcgttctcacccgaccctgctcttcgcctcggctgctctaccagtctacctctaccccgcgccccctccgagatcggaatcgcggcgccccgccgccctcctccgccatggcgccgtctctgctcggggtcacctttcctcttcctctctccccttcttcttcattcaggtgtgttaattaagcagaggaagtggcttggcttcttgctcatggttctaggtgcgtgcgtgcagggcttcaccaagtcgctggccatgacggtgctctccgaggtcggggacaagaccttcttcgccgccgcgatattggctatgcgccatcccaggaaactggtcctggcaggctgtttgactgcactaatagtgatgacagctctatcagcttctctaggttgggttgcaccaaatctgatttcacgtaaatggactcatcatgtgaccactctattgttctttgtatttggtatttggtcattgtgggaaggcttcaaggaagatggagattcagaagaattggctgaagttgaagcagagctggatgctgtctttaagagtaataaaggcgaatctaaaactaaaactaaggcaaacgatgatacgaagaaacagcaaagaccatttctcatgcaattcttctcaccaattttcataaaggcattttctattacattctttggtgagtggggtgacaagagccaggtaagttgtataaaagtactgtttatcttctagctctgcaaatcacctatttattgagtcataaatatcatgttttcgctacattgatgaacctcttgtcagattgctactattggcttggctgctgatgaaaacccatttggtgttgtcctgggcggaatcatagcgcaagcactctgcactactgctgctgttcttggtggaaagagcctagcttcccagatatccgagaagatggtcgaactgtcaagcggagttctcttcctgctgtttggtatcatgtcattgctctctggaccaggagaattgtaatccctgcttgaacccttttcagctggctgattgacatatctctctccttagacctatcttatttcagtagatgaatgatggcgacaaaagccatccatccatatggcgaaccggatggtgattcgatagtttagccgacacatcggaaacatttcactcgtccttcataaataactacatgttacagaagtctagcgatttcattctgttgtgctcagcatgtgaaagtcagtctactccctccgtttttttatatttgtcgcgttttagttaaaaataaactagaagacgacaaatattcgagaacggaggtagtagaagctgtctacagtatcatgaatatgatgtaagattcttgttactaaatttttgttgtcgcaattacatgcgttaacaaagcttagtttgtgaatcaactacgcaggcaaataatacggggctttgtcttttcgttgtgtt

SEQ ID NO: 122750 - DNA, 1377 bp, Zea Mays
gacccaaccaactcccgacccgtttcccagtgagcgcacctggcgccggcgcctttaaaaaaaaggcgtcgcacgtgacgccgacgcccgtcccggatccgacggccccgcgcgcgcgttctcacccgaccctgctcttcgcctcggctgctctaccagtctacctctaccccgcgccccctccgagatcggaatcgcggcgccccgccgccctcctccgccatggcgccgtctctgctcgggggcttcaccaagtcgctggccatgacggtgctctccgaggtcggggacaagaccttcttcgccgccgcgatattggctatgcgccatcccaggaaactggtcctggcaggctgtttgactgcactaatagtgatgacagctctatcagcttctctaggttgggttgcaccaaatctgatttcacgtaaatggactcatcatgtgaccactctattgttctttgtatttggtatttggtcattgtgggaaggcttcaaggaagatggagattcagaagaattggctgaagttgaagcagagctggatgctgtctttaagagtaataaaggcgaatctaaaactaaaactaaggcaaacgatgatacgaagaaacagcaaagaccatttctcatgcaattcttctcaccaattttcataaaggcattttctattacattctttggtgagtggggtgacaagagccagattgctactattggcttggctgctgatgaaaacccatttggtgttgtcctgggcggaatcatagcgcaagcactctgcactactgctgctgttcttggtggaaagagcctagcttcccagatatccgagaagatggtcgaactgtcaagcggagttctcttcctgctgtttggtatcatgtcattgctctctggaccaggagaattgtaatccctgcttgaacccttttcagctggctgattgacatatctctctccttagacctatcttatttcagtagatgaatgatggcgacaaaagccatccatccatatggcgaaccggatggtgattcgatagtttagccgacacatcggaaacatttcactcgtccttcataaataactacatgttacagaagtctagcgatttcattctgttgtgctcagcatgtgaaagtcagtctactccctccgtttttttatatttgtcgcgttttagttaaaaataaactagaagacgacaaatattcgagaacggaggtagtagaagctgtctacagtatcatgaatatgatgtaagattcttgttactaaatttttgttgtcgcaattacatgcgttaacaaagcttagtttgtgaatcaactacgcaggcaaataatacggggctttgtcttttcgttgtgtt

SEQ ID NO: 122751 - DNA, 1333 bp, Zea Mays
gcgtcgcacgtgacgccgacgcccgtcccggatccgacggccccgcgcgcgcgttctcacccgaccctgctcttcgcctcggctgctctaccagtctacctctaccccgcgccccctccgagatcggaatcgcggcgccccgccgccctcctccgccatggcgccgtctctgctcggggtcacctttcctcttcctctctccccttcttcttcattcaggtgtgttaattaagcagaggaagtggcttggcttcttgctcatggttctaggtgcgtgcgtgcagggcttcaccaagtcgctggccatgacggtgctctccgaggtcggggacaagaccttcttcgccgccgcgatattggctatgcgccatcccaggaaactggtcctggcaggctgtttgactgcactaatagtgatgacagctctatcagcttctctaggttgggttgcaccaaatctgatttcacgtaaatggactcatcatgtgaccactctattgttctttgtatttggtatttggtcattgtgggaaggcttcaaggaagatggagattcagaagaattggctgaagttgaagcagagctggatgctgtctttaagagtaataaaggcgaatctaaaactaaaactaaggcaaacgatgatacgaagaaacagcaaagaccatttctcatgcaattcttctcaccaattttcataaaggcattttctattacattctttggtgagtggggtgacaagagccaggtaagttgtataaaagtactgtttatcttctagctctgcaaatcacctatttattgagtcataaatatcatgttttcgctacattgatgaacctcttgtcagattgctactattggcttggctgctgatgaaaacccatttggtgttgtcctgggcggaatcatagcgcaagcactctgcactactgctgctgttcttggtggaaagagcctagcttcccagatatccgagaagatggttggaactaaactcgttcattttcatactcctttaaaatgtccgacggcatctaattcgacgcttgtcttgttgtaggtcgaactgtcaagcggagttctcttcctgctgtttggtatcatgtcattgctctctggaccaggagaattgtaatccctgcttgaacccttttcagctggctgattgacatatctctctccttagacctatcttatttcagtagatgaatgatggcgacaaaagccatccatccatatggcgaaccggatggtgattcgatagtttagccgacacatcggaaacatttcactcgtccttcataaataactacatgttacagaagtcta

SEQ ID NO: 122752 - DNA, 1189 bp, Zea Mays
gagctagaggagcggctgacacgcctccacggcgaggcgcggcgtggcaggccaaggcgctctccgagcaggctgccacggtcgccctgcacgcgcagctggtcggtcgaggagctcgccgccacagggggcgacgctggccaggcggagtcgtcggcatcggcattcgtggaccctcgctgcgccgggccgccgctagaccacacgtgcctaggctgccgcctcaggccggccttcgtggtgctcctcccctgcaggcacctgtccctctacggcgccgccatgccgtgccccgcgtgtggacggggggcgtggaggccatcctctgctgagctttccccgcctctcatcatcgatcatccggccgtccacctcatgagccgagagcaggttttccatgacatgatggtggcgtctaattttgctggccaaatgctatcgagaagggagaaggccacaaacttcaaaccagactatgatattgatatccatatgaaggtcttagctatgagtgggcaagtatccagtattcttacaggctacaaactgaagatgatacatggattcacttgttctcatttcttgttaatggtttgtgccttcgtagtcttctccgatatattgaagcgggtgccagataagctacatgtaactaagaaggcagtacttcatgtcttccctgctgctctcccgcaatcgctccgactctcatgcctgtgcccgcgccgtcaactctccgggctcgatgtgcctttccacgcagcacccacctccactcacactcccaccgtggtgaccccctgttcgtcgacgcgtcgatccatggtcagccaaccagtgaaaaccttcttcgcaatcactatgtatggtactgccaattcacattttacaagtgttgtttggaaggcatctaccaactccaatgctctcttcttgatagcggctgcacataacctattgtgtttgaagttaggaaaggagattggtgttagtatcggaaacccatgattacttggttcgaggttgctagcgtgccagcactttttgggattttagtgactccttatttaatttactcctgtagcccaacattagctgttgagaagctaaagaacatgggtccagtaacaagaaatgaatgcatcatgattggaacgatgctttttgcactctcactacagatttttgg

SEQ ID NO: 122753 - DNA, 1204 bp, Zea Mays
ccatcgggacagatgatatacactgatgaaacaatctctacaccctttatagcctccgcttcaactaatgtacatataccagtacgtcacattccttagccctcagtcgattaagaacgcatcacacgaactgtcttcgagtctcggcctttcagctcggaccacatgacctgatggaccgtcgactcaacccgacagggtctggatgatggtgttgtgccatgggtcggacaggtgctgcagcaggttgtcgaagggccccttgccggtgacgttgtgctggatcaggaaggccaggaacgccagcatggccagcctccctgcagaattaataacgtcagagaaggatcggaagtggccgacgacgaccggcggcggtgagatgagatggtgcaatgcaatgcaactcaccgttggcgagctccttctccttggcctcgagcgtgggcgcgaagttgagcgggttgaagacgctgccggggtagccgcactcgtgcggcggcaggctgtagctcttgaagatggggtcctggttgacgctgccggggttcttgatgtcctgccaccgccggatctccacgtagtgaaacaggatgaactcgatcacgaacagcgtcgacgacgacgcgaagtactccgacttgccggcgtcgtaccactgcggcgcgttgatcagcccggccttggtcagcacctccgggatcagcatcccggccacgcccagcatcgcccaccgcccgttcaccagctccgcctgcacgtaccacctcaggttctccgggtcctccgccaggcccaacgggtcgaagccattgtcacccggcaggctgacatggccatgggcgggggagggaaggcccgggagccactcgcccttggcctccgccttgaggctccgcctcgtcggcgacgcggtagcagtgcggccgaggcggctagagtggccaaggaaggccgacgacgacgacgggcgcagggctgcgaccggggcgcgggcggtgacggacgccatgcttcgtcgtagcgtagcttcccggtgagcgacggtcgagatggagatcgagcacgttggtccttgccgccaggatcagcctggtttgtactattaaactgccacctgccgggccggtccggcgggtgtggccagcaggcgccggctgcggccgacggcgtagatacgccgtgctgtcggatcggacggacg

SEQ ID NO: 122754 - DNA, 1036 bp, Zea Mays
atgcagagcagagagatgcttccgatcacgatctccgactccgtcccctacctgttgccgttgggatcgatctcagacgaagtgccgtcctctgctgccccgtgcctctgcaggaatgtactcttctccccctgcaccggctgttgctcaacggagcagtcgcgcgtaccggcgcacgtgtggagccacgtggcgccgccgacgggggcctggctctcggcctccgaagaggaggacgtcacgcagctgtcggcggagcggcggcgcgtcggggagcagcagcaggaggaggacagggacccggtgtccaccgcggaggccagctccgcctccgcgccggctgccgagcccaggccgtggtcggcgaggacctcctgcgcccggcgcagcacggactgcaggtacctcccctgcgcctcgatcctcagctgtaggtgccgctgcacctcgatctgctcctgcagcttcctctgcatccgcgccacgctcctggaagaatcgccatgcggctcggcgacggtaccgtcgtcgcactcgtccgccggctggttctccgaggacgaggacgaacgctcgtcggtgccatctccgctgtcgcccagcggggaagcgacgcctcggctcaccgcctcttgaggtggtacagcgtgagccccggcacggccatcgccctcagcacggacttgggtgtcgccttgtctgcgccgccgagctgggccacggcgagcacgaagcggtcgtgcagctggcgcgtccacctgagccgcgccctggcctcgccgtgcccgtgcccgtgcccctgctgctgaccacccactcccagcgacgatgccatttccgacgtgcccaccgcggcgcttcgtatcgcagcgtcggtggcgtggccagcatgagaggccggagtagccgcagacgagacgacggcagcaagcagctggtcctggccaagcagcgaccgcggcaggaaaacaagcaagctcagcgggtgatcgaccgacggtcgatgccaccgcgagccgcgcgggggctcttatag

SEQ ID NO: 122755 - DNA, 1194 bp, Zea Mays
atgcagagcagagagatgcttccgatcacgatctccgactccgtcccctacctgttgccgttgggatcgatctcagacgaagtgccgtcctctgctgccccgtgcctctgcaggaatgtactcttctccccctgcaccggctgttgctcaacggagcagtcgcgcgtaccggcgcacgtgtggagccacgtggcgccgccgacgggggcctggctctcggcctccgaagaggaggacgtcacgcagctgtcggcggagcggcggcgcgtcggggagcagcagcaggaggaggacagggacccggtgtccaccgcggaggccagctccgcctccgcgccggctgccgagcccaggccgtggtcggcgaggacctcctgcgcccggcgcagcacggactgcaggtacctcccctgcgcctcgatcctcagctgtaggtgccgctgcacctcgatctgctcctgcagcttcctctgcatccgcgccacgctcctggaagaatcgccatgcggctcggcgacggtaccgtcgtcgcactcgtccgccggctggttctccgaggacgaggacgaacgctcgtcggtgccatctccgctgtcgcccagcggggaagcgacgcctcggctcaccgccaccagccggtacttctgcagcggcagtgtggtgcgcgtgcaccgcatgcacacggtcgatggatcaggaaggaggaggcaaggcagagttgagcgcgcgatcgtcatcaaccaaccaagagagaaataattcggcggtggccggacggacctgcaggtgcctcttgaggtggtacagcgtgagccccggcacggccatcgccctcagcacggacttgggtgtcgccttgtctgcgccgccgagctgggccacggcgagcacgaagcggtcgtgcagctggcgcgtccacctgagccgcgccctggcctcgccgtgcccgtgcccgtgcccctgctgctgaccacccactcccagcgacgatgccatttccgacgtgcccaccgcggcgcttcgtatcgcagcgtcggtggcgtggccagcatgagaggccggagtagccgcagacgagacgacggcagcaagcagctggtcctggccaagcagcgaccgcggcaggaaaacaagcaagctcagcgggtgatcgaccgacggtcgatgccaccgcgagccgcgcgggggctctta

SEQ ID NO: 122756 - DNA, 1058 bp, Zea Mays
atgcagagcagagagatgcttccgatcacgatctccgactccgtcccctacctgttgccgttgggatcgatctcagacgaagtgccgtcctctgctgccccgtgcctctgcaggaatgtactcttctccccctgcaccggctgttgctcaacggagcagtcgcgcgtaccggcgcacgtgtggagccacgtggcgccgccgacgggggcctggctctcggcctccgaagaggaggacgtcacgcagctgtcggcggagcggcggcgcgtcggggagcagcagcaggaggaggacagggacccggtgtccaccgcggaggccagctccgcctccgcgccggctgccgagcccaggccgtggtcggcgaggacctcctgcgcccggcgcagcacggactgcaggtacctcccctgcgcctcgatcctcagctgtaggtgccgctgcacctcgatctgctcctgcagcttcctctgcatccgcgccacgctcctggaagaatcgccatgcggctcggcgacggtaccgtcgtcgcactcgtccgccggctggttctccgaggacgaggacgaacgctcgtcggtgccatctccgctgtcgcccagcggggaagcgacgcctcggctcaccgccaccagccggtacttctgcaggtgcctcttgaggtggtacagcgtgagccccggcacggccatcgccctcagcacggacttgggtgtcgccttgtctgcgccgccgagctgggccacggcgagcacgaagcggtcgtgcagctggcgcgtccacctgagccgcgccctggcctcgccgtgcccgtgcccgtgcccctgctgctgaccacccactcccagcgacgatgccatttccgacgtgcccaccgcggcgcttcgtatcgcagcgtcggtggcgtggccagcatgagaggccggagtagccgcagacgagacgacggcagcaagcagctggtcctggccaagcagcgaccgcggcaggaaaacaagcaagctcagcgggtgatcgaccgacggtcgatgccaccgcgagccgcgcgggggctctta

SEQ ID NO: 122757 - DNA, 2103 bp, Zea Mays
cctgtctcattcccacccacgcgcttctctctctcaccagcagaccgcgccgccgccgcgccaccgctctccggatcatcggccgtccacctcctcctcctcctcgcccgctcaccggccgtccctgctgagactctgcacaggatcagctttggtcaaatctatctcagcaagccaatgatgactgaagccgatggagagacagctactttatttccaaaatcagcaaggctcaggaacttgacatactctgcaccactgtatgttgatgtgtcatacagagtaatgaagaaaggacatgactgtgaggaagttacagagactgcagagtatccaaaagtgtttattgggaaggttccaatcatgttgcgctctagttactgcacactgtatcaataatctgagaaggatctcactgaacttggggagtgtccttatgaccaaggtggttatttcattatcaatggaagcgaaaaggttcttattgcccaggagaagatgagcactaaccatgtctatgtttttaagaagaggcagcctaataaatttgcatatgtggctgaagtccgttccatggctgagaaccagaacagaccagccagcggcatgtttgtacggatgctttcacgagcaggagcaaaagggtgcgttggagaagacattgatgatttgcagtacacacctaaacccgaatttgaggggtattttagagttaagaatgttcaaactgagttggatctacttaaagcatggttttctcacatgcaagaggttaagcctggcatttatgttacatacaacgatgacttttttgactggccatttttagagaagagggctgcacaccatggaataaaaatgaatgaggagattggtttccaatgtgacaataaccagggcgagtgtcgggctaaattttcttgccatcttgactgttttgcttgggtgaagcgagacagttaccttccacaaggaagccaaggtctaaagcacacttgcaggctgttacaaaagccaagctacgttacgatcctctggaggttaatccagaagatatggttcgctttgcaatggagcagccacagacaatggcttcgtattctgtatcagacgatgttgcaacatactatctatacatgacttatgtccatcctttcatcttttctcttgcaaccataatacctatgttacctgatgaggtactgtggaaaggaagtgggacactttgtgaaattctgctaatggttcaggcattcaaggctggaggcacacaactatgaatagtgcatcttctaaaatctctcactaaatcagctagctcttctcactaaatcagccagctcttctgcttgtcccattgtcatccagatacttatttgggatgttgaagtacaaccaaatagacatgctgtcctaggagcaagcgagtctcgccctgatctggtatgattcattgttttgttcagtgtgccagatttatggcttcaatgagatgttggtgctagctcatctgttaagtgatgatagataacagtatgtctacatgttgctctagcacgattactgggggtctaggaatatttgcaacattgtttccaagctggatagccacatgtcagtacttagctgaagatatgctgatggtattcatttcctagggcagctagtaacactttcctgttattccatttgaatagaatttcctactaatgccaattcgctcccgtgaatttcaggaatgggtttacaagccccatataataaatcataacagtgcgggagcattttttggatgtccttcacacagatgcaggcaatgaaagaaacagaaaatagacaatgttagcgcggagtgagacagataggaattgggatagaatcatccttgttctcagatcagctgtacattctttattaaggtagtatatcatacatgtacgagtagactgacggttgcttccaaatactccatgtgtttgaaatatgtattgtatgtgatattctgtgttgcatgtgattttatgtttgtctaattttttatttctgtattttttatttttttttctgaaaaagggataagaacgtgggtaccgtcaaacataa

SEQ ID NO: 122758 - DNA, 1911 bp, Zea Mays
cctgtctcattcccacccacgcgcttctctctctcaccagcagaccgcgccgccgccgcgccaccgctctccggatcatcggccgtccacctcctcctcctcctcgcccgctcaccggccgtccctgctgagactctgcacaggatcagctttggtcaaatctatctcagcaagccaatgatgactgaagccgatggagagacagctactttatttccaaaatcagcaaggctcaggaacttgacatactctgcaccactgtatgttgatgtgtcatacagagtaatgaagaaaggacatgactgtgaggaagttacagagactgcagagtatccaaaagtgtttattgggaaggttccaatcatgttgcgctctagttactgcacactgtatcaataatctgagaaggatctcactgaacttggggagtgtccttatgaccaaggtggttatttcattatcaatggaagcgaaaaggttcttattgcccaggagaagatgagcactaaccatgtctatgtttttaagaagaggcagcctaataaatttgcatatgtggctgaagtccgttccatggctgagaaccagaacagaccagccagcggcatgtttgtacggatgctttcacgagcaggagcaaaagggtgcgttggagaagacattgatgatttgcagtacacacctaaacccgaatttgaggggtattttagagttaagaatgttcaaactgagttggatctacttaaagcatggttttctcacatgcaagaggttaagcctggcatttatgttacatacaacgatgacttttttgactggccatttttagagaagagggctgcacaccatggaataaaaatgaatgaggagattggtttccaatgtgacaataaccagggcgagtgtcgggctaaattttcttgccatcttgactgttttgcttgggtgaagcgagacagttaccttccacaaggaagccaaggtctaaagcacacttgcaggctgttacaaaagccaagctacgttacgatcctctggaggttaatccagaagatatggttcgctttgcaatggagcagccacagacaatggcttcgtattctgtatcagacgatgttgcaacatactatctatacatgacttatgtccatcctttcatcttttctcttgcaaccataatacctatgttacctgatgaggtactgtggaaaggaagtgggacactttgtgaaattctgctaatggttcaggcattcaaggctggaggcacacaactatgaatagtgcatcttctaaaatctctcactaaatcagctagctcttctcactaaatcagccagctcttctgcttgtcccattgtcatccagatacttatttgggatgttgaagtacaaccaaatagacatgctgtcctaggagcaagcgagtctcgccctgatctggtatgattcattgttttgttcagtgtgccagatttatggcttcaatgagatgttggtgctagctcatctgttaagtgatgatagataacagtatgtctacatgttgctctagcacgattactgggggtctaggaatatttgcaacattgtttccaagctggatagccacatgaatgggtttacaagccccatataataaatcataacagtgcgggagcattttttggatgtccttcacacagatgcaggcaatgaaagaaacagaaaatagacaatgttagcgcggagtgagacagataggaattgggatagaatcatccttgttctcagatcagctgtacattctttattaaggtagtatatcatacatgtacgagtagactgacggttgcttccaaatactccatgtgtttgaaatatgtattgtatgtgatattctgtgttgcatgtgattttatgtttgtctaa

SEQ ID NO: 122759 - DNA, 1828 bp, Zea Mays
cctgtctcattcccacccacgcgcttctctctctcaccagcagaccgcgccgccgccgcgccaccgctctccggatcatcggccgtccacctcctcctcctcctcgcccgctcaccggccgtccctgctgagactctgcacaggatcagctttggtcaaatctatctcagcaagccaatgatgactgaagccgatggagagacagctactttatttccaaaatcagcaaggctcaggaacttgacatactctgcaccactgtatgttgatgtgtcatacagagtaatgaagaaaggacatgactgtgaggaagttacagagactgcagagtatccaaaagtgtttattgggaaggttccaatcatgttgcgctctagttactgcacactgtatcaataatctgagaaggatctcactgaacttggggagtgtccttatgaccaaggtggttatttcattatcaatggaagcgaaaaggttcttattgcccaggagaagatgagcactaaccatgtctatgtttttaagaagaggcagcctaataaatttgcatatgtggctgaagtccgttccatggctgagaaccagaacagaccagccagcggcatgtttgtacggatgctttcacgagcaggagcaaaagggtgcgttggagaagacattgatgatttgcagtacacacctaaacccgaatttgaggggtattttagagttaagaatgttcaaactgagttggatctacttaaagcatggttttctcacatgcaagaggttaagcctggcatttatgttacatacaacgatgacttttttgactggccatttttagagaagagggctgcacaccatggaataaaaatgaatgaggagattggtttccaatgtgacaataaccagggcgagtgtcgggctaaattttcttgccatcttgactgttttgcttgggtgaagcgagacagttaccttccacaaggaagccaaggtctaaagcacacttgcaggctgttacaaaagccaagctacgttacgatcctctggaggttaatccagaagatatggttcgctttgcaatggagcagccacagacaatggcttcgtattctgtatcagacgatgttgcaacatactatctatacatgacttatgtccatcctttcatcttttctcttgcaaccataatacctatgttacctgatgaggtactgtggaaaggaagtgggacactttgtgaaattctgctaatggttcaggcattcaaggctggaggcacacaactatgaatagtgcatcttctaaaatctctcactaaatcagctagctcttctcactaaatcagccagctcttctgcttgtcccattgtcatccagatacttatttgggatgttgaagtacaaccaaatagacatgctgtcctaggagcaagcgagtctcgccctgatctgcacgattactgggggtctaggaatatttgcaacattgtttccaagctggatagccacatgtcagtacttagctgaagatatgctgatggaatgggtttacaagccccatataataaatcataacagtgcgggagcattttttggatgtccttcacacagatgcaggcaatgaaagaaacagaaaatagacaatgttagcgcggagtgagacagataggaattgggatagaatcatccttgttctcagatcagctgtacattctttattaaggtagtatatcatacatgtacgagtagactgacggttgcttccaaatactccatgtgtttgaaatatgtattgtatgtgatattctgtgttgcatgtgattttatgtttgtctaa

SEQ ID NO: 122760 - DNA, 1120 bp, Zea Mays
cctgtctcattcccacccacgcgcttctctctctcaccagcagaccgcgccgccgccgcgccaccgctctccggatcatcggccgtccacctcctcctcctcctcgcccgctcaccggccgtccctgctgaggtgccgtccacttcctctccctgccgccgtagctcgcacaacccccatctcgccctcttccttcttgccacaccgtcgctaccaccgccccgcgctgagagggaccgacgccatggacctcctcgagaagatgatggcgcttggtatgacgtggtgtctcggtagcatttgccggctcatcactttgccatctgtacacctgcttgattagatgtccacctagggttttgggtctagtgcggaaacaggtgcccacggggggtacgacgcggaggaggacgacgaggtggggtacggtggcgggggcggggaagagatggatgaggatgcggacggggacgctgagcagtaggaggatatcactcaggacgacgcctgggccgtcatatccgcctacttcgaggagaagggcctcgtgcgccagcagctcgattccttcgacgagttcatccagaacaccatgcaggagattgttgatgagtccgccgacatcgagatccgccccgagtcgcagcacaaccctggccgccaggccgaatttgccgagactctgcacaggatcagctttggtcaaatctatctcagcaagccaatgatgactgaagccgatggagagacagctactttatttccaaaatcagcaaggctcaggaacttgacatactctgcaccactgtatgttgatgtgtcatacagagtaatgaagaaaggacatgactgtgaggaagttacagagactgcagagtatccaaaagtgtttattgggaaggttccaatcatgttgcgctctagttactgcacactgtatcaataatctgagaaggatctcactgaacttggggagtgtccttatgaccaaggtggttatttcattatcaatggaagcgaaaaggttcttattgcccaggagaagatgagcactaaccatgtctatgtttttaagaagaggcagcctaataaatttgcatatgtggctgaagtccgttcc

SEQ ID NO: 122761 - DNA, 1782 bp, Zea Mays
atggcagcagatttggtggagacggaatgccaaagatggaagagcaaaggcgtgaatataaagtacgaggtgagggggaaccggaaggggtacaaggccggcgcgctcaaggaaggactgaagcatgactacgtcgaagactgcgagtacatcgccatgttcgatgctgacttccagcccgagcctgatttcctcctaagggctgtcccattccttgtgcataacccggagatcgccctcgtccaagctcgctggaaattcgttaattctggtgagtgtctgctgacgagattccaagaaatgtccttggactaccatttcaagtatgagcaagaggcaggctcctcactgcattcattctttggcttcaatgggacagccggtgtctggaggattgcagctatcgatgacgccgggggctggaaggaccggacgacggtggaggatatggacctggctgtccgtgcgatgctgcagggctggaagtttgtttacgtcggcgacataaaagtcaagagtgaattgcctagcacgttcaaggcataccggtttcagcagcacaggtggtcttgtggaccggcaaacctgttcaagaaaatgatggtagagattttagaaaacaagaaagtgtcattgtggagcaaaatctacttatggtacaatttcttcttcgttgggaaggtcgctgcccacacggtgacattcatctactactgctgtgcgatccccgtgtctgttttgcttcctgagattcagatacctctctggggagttgtctatatcccgacgctcataaccctcttgaaggctcttggcacaccaagttcgtttcacctggtgatcctctgggttctgtttgagaatgtcatgtcactgcaccggattaaagctgcagcaagtggtcttctggatgctggtggacgagtcaatgagtgggttgtcaccgagaagttgggcgacaccagcaaggcaaagcctggcgccaatggatcagatgatgtaaaggtgatagatgtaaagctaacagaacccctcgttcccaagctagtgaagaggcgagcaagattttgggagaggtacaactgctcagaacttttcgttggaacctgcatacttctgtgtggtttctatgacttgctttttgcaaagaagggatactacatttttctcttccttcaaggcacggctttccttgttgttggctttgggtatgtcggcacactacctcattgcaatgcataagctggcatggacaattcatataccttcttactagaaacagatcaagcaaagttcctctctcctgcccatatggaacttcaatgatagttgagcaatattcccatgatcagtcttggccagacatgattcactgccaagaaggttgttcagatgtcgtcgtcactcttctgtcagtctttattgtcaagaaggccattcaaatagtgtcaccgttccaaatttataataacagtgtttactgaagcatcatgacatacaagaatgattggtgcagcagcatttagtaaacatcccgtagagatgcagttcacagtcgtgaaagaactgcagctgctgtaaatggaatagcaccagttgccaatttctgtagatctccgaacttttttttggaaattttgtgatattactcagagttcagatcaataatggaagattgttggcttcctcagttcataacctgtgtatgcttaaaacttgtaaatgtaaattgttattgacactaataattttgtcgaacccaggcagttcttgaaatgcaaa

SEQ ID NO: 122762 - DNA, 163 bp, Zea Mays
taaaaagtcttactccggtgagcgatgtgtcgatttctcttgaattcgtgcaagtattcacaatctcaaacggaacatttttcccattaaaacataagagcaactctaataaatctcaatatctaattcttaaaccatattataggggaaaaaataaaaaaac

SEQ ID NO: 122763 - DNA, 868 bp, Zea Mays
atccactagctgcccggccggccggctagcggagaaacagcccgcccgctcgcctctgcctctgcccctgcacgcccaagatcctcaggccgggccggccgcgtggcagtgccgcgcgcgcgcgagagcgagagggatccatgggcgtctccgaggaggcggcgcgggtgtgggcggagctgcccgtgcgggtggactgggcggccgcggcggcgcaatgcgcgtccctgtgggcgcacgcgcgcgcgctgctggtcgcgccagcggtgcgggtcctggtgctcctgtcgctggcgatgaccgtgatgatactggcggagaagctgttcgtctgcgccgtgtgcctcgccgtgcgggcgctccggctcggcccggaccggcgctaccgctgggagcccatcggcggcggagtcggagacgaggaggaggagtccgggtccggccacggcgccaagtaccccatggtgctcgtgcagatccctatgtacaacgagcgggaggtgtacaagctgtcgatcggggcggcatgcgagctggagtggccgtcggagcgcttcatgatccaggtgctggacgactccacggaccccgttgtaaagacgtactgggctggatgtgggctatacaatcatagtgtgccattagctcgccctgcaagaactccggccaggccccgccgccagcgcgactggcaggacggcggcgccggggtcccggggccgcaccgctcgagcgccgcgtgcgctggagacgttggcgtcttggcgagggcgtctgttatgccccgtggccgtcgagagtcgccgacggcgtgaggagatcggaaagggagaagacgaggcttgcgggagggggacaacagctcctg

SEQ ID NO: 122764 - DNA, 105 bp, Zea Mays
ttatttttaactataatataacttattttaaacagaactctgggagctccaatcaaggcaaagggaacatggctaataattcaacgggcaaaaatgtcaagaaga

SEQ ID NO: 122765 - DNA, 799 bp, Zea Mays
ccacatcgagccaatgaatctagccgtccgctccctgttgcctcccaagccaaccatatccactctcggcgccgccgcgcatctctcccctcttcttgcccttccttccccccaggccccaacccacgcagcctcactaggggtctaccggcggcggcgacgagatggtgcagcgcctcacctaccgaaagcgtcacagctacgcgacaaaatccaatcagacccgggtcgtgaagaccccaggttcgccccatctggtgggaagcttgtgtaccaatacaccaagaagagggcgagcggtcccaagtgccccgtcaccgggaagaagatccaggggatcccccacttgagacctgccgagtacaagaggtccaggttgtctaggaaccgcaggactgttaaccgtccttatggtggagtactctctggaattgctgttagggagagaattatccgtgctttcttggttgaggagcagaagattgtcaagaaggtcctgaaaatacagaaaaccaaggacaagacagctgcaaagtagagctccaggaatggaatggaagcctagacactgcgagaagtaattttggtggatggaaaatctgtttgccttgtgtcgagcatttagcctgtgagacatgcctgttgaagtgtttgagtttagagactggaatccctttctcctttgaattgttgctatgtcgggacatctgctcccccagttgctttgttatgaattgagatcatatctgggtaagataatcttgtctaacaccttggcttgtagcatctttttcgtcca

SEQ ID NO: 122766 - DNA, 785 bp, Zea Mays
ccacatcgagccaatgaatctagccgtccgctccctgttgcctcccaagccaaccatatccactctcggcgccgccgcgcatctctcccctcttcttgcccttccttccccccaggccccaacccacgcagcctcactaggggtctaccggcggcggcgacgagatggtgcagcgcctcacctaccgaaagcgtcacagctacgcgacaaaatccaatcagacccgggtcgtgaagaccccaggtgggaagcttgtgtaccaatacaccaagaagagggcgagcggtcccaagtgccccgtcaccgggaagaagatccaggggatcccccacttgagacctgccgagtacaagaggtccaggttgtctaggaaccgcaggactgttaaccgtccttatggtggagtactctctggaattgctgttagggagagaattatccgtgctttcttggttgaggagcagaagattgtcaagaaggtcctgaaaatacagaaaaccaaggacaagacagctgcaaagtagagctccaggaatggaatggaagcctagacactgcgagaagtaattttggtggatggaaaatctgtttgccttgtgtcgagcatttagcctgtgagacatgcctgttgaagtgtttgagtttagagactggaatccctttctcctttgaattgttgctatgtcgggacatctgctcccccagttgctttgttatgaattgagatcatatctgggtaagataatcttgtctaacaccttggcttgtagcatctttttcgtcca

SEQ ID NO: 122767 - DNA, 794 bp, Zea Mays
ccacatcgagccaatgaatctagccgtccgctccctgttgcctcccaagccaaccatatccactctcggcgccgccgcgcatctctcccctcttcttgcccttccttccccccaggccccaacccacgcagcctcactaggggtctaccggcggcggcgacgagatggtgcagcgcctcacctaccgaaagcgtcacagctacgcgacaaaatccaatcagacccgggtcgtgaagaccccaggtgggaagcttgtgtaccaatacaccaagaagagggcgagcggtcccaagtgccccgtcaccgggaagaagatccagggggtgagtgattacttgttagggcagctctactctgcttttgtcttcactgcggatgagtgtagtctcgggtgcttggtacaatattgaagtaattggtgtgaattagtagatcttatccattggttgcttaaatggtttacagtgtattttgtcctgtgatggtatatcagtatatggattgctgtggtactggcaatttgctgccacattgtggtatatgtctattggacgatgtgtattgctgtagtttacaaaatagtgttattgcttacctcatactttattcagagtgacacattattgagctgtcaagtaatcttttctgctgtttgcttcagattcatcattttgtgtatatttaaatttttttaggcgaaactgagtgcattaagctgataattaggagaatgtgcatgctatgtttaaaaccctgctgagttatgacttactccctccgtcccaaaataaatg

SEQ ID NO: 122768 - DNA, 855 bp, Zea Mays
atggccgtgcgcgccatcgatacgccgctcctcctgtgcaccatggtggtggtgctgaccggcctcgtgtccccgtccaccgccgggctcagcctggacacggtgagggacttcctgacgcgggaggaggacaccattgtgttcagcctcatcgagagggccaagtacccgctcaaccggccggcctacgaccccctccactccgccgccggccgccgcctcaacgcctctttcgtcgagctcttcatccgcgagtccgaggccgttcagtccaaggccggaaggtaccaaagcctacaggagattccattcttcgcttacagagttccttccgctctggcgcctccatacaacttcacaagcgatctgtatcccgctgccgcgtcagtcaacgttaacgacgccatatggagcatgtacttcgacgagctgctccctcggctggctaagaatggcgatgatggcaactacgccgtagctgctgatgcagatcttgcgtgtcttcaggtgctttcaaggaggatcaactacggcaggtacgtagctgaagtgaagttcagaggagaccagcagacctataccagcttaatccaggcgaaggacagagacgctctggtgaagctactgacgtctgaagcccaagaggacgtggtgaagagaagggtagagaagaaggcggccgtgttcgggcaaagcgtaacgttggacggaccagtccaaacggatgccaacagccaggctaactctagcttattcaaagtcgacccttcggtcgtttacgagctgtatggccagcgggtgattccgttgacgaaacaggtggaggtcgagtaccttctccatcgcctcgactga

SEQ ID NO: 122769 - DNA, 115 bp, Zea Mays
ttttcatttttattaatttcgttcttaatatatatatatatttcttaattcttgttcatcgcagacaccagacggttcctacaatggagcggttcttcaaaagaaaattgccatc

SEQ ID NO: 122770 - DNA, 2934 bp, Zea Mays
ggttgcaacttgcaagcagatctcaactggtgcgcgcgcacacacacgcacagatctgagccacgcgcacaggcagtactgccccctttcttctccaagtccggccggctgatcggtcgttatgtatatgaacgtggtggtggggttctttttatggtgagtggtttcgagctaggtggtggcggccggctgggttttcgttccgtggctaactgacagaagagagtgagcacacagcgggcagactgcatcgatcgatctgcatccgagacggcgcacgtacgaatgatgatgcagctgctgctgcgtgctcacttctctctctgtcagtcctctagctgctacggcctctctcccggcctgccaccactataacttcaccttgccatggtggccggccactactctactctactctctctctctttttgctgcatgcgttgttgcaactcgaagttgcaggccggtgaatgaatgaacgaacgggtgggtcagctgacttttactgcgacgggacagcaggggttcgcaggggagggatagaggaatgcaaagataaggccggccaccgatcgatttgggcggggtctcgtccttatcttgtacgactgcggctggacggccagcctctcgccgcccgaggagcggtggtgcagtcggacccgttctttggagcaaggccgtgcgtggtctcgatcggcttcccaaggtcgagggagagggggggacatgcctcgggcgaaggaaggaggtgcccgcgcgcgtgatctcaccgatctcgctgctggcgcggctttccaaagcacgcctgcgtaggagtagtagccgaacctagctcggtgtccggctgccggtacggtaccgtctcctctccctccctagctccctctctccatctgctacctgtagctaacgtacttgttctcacgtgtctctccgcagcttcgagatctgttgataactcgaagaaaaatacccaagatctggacttttaccccgagtccccgacccttccctgtcttgctggctgtttcttttcatcaccctcagtggtgccatcatctcatgtgctggaggtaggtttttgggcgggagccatggtggtgccgccttctgcaggaggtagatctgcctgtccggaagaggaaaggagaatcagtgcgcctgacttccagatctggaagctgctgttcgtacttgcggatctcaacatgtacggtgactgcactgcacatacgtttgcttgctcttctaacagtcgtttccttgcaggcaagggcaaatttccacatactgctgctaaattcttacttttctacatatatatagtttgatacagtaaaccaaatcagcgttaatatggcttttgttgatcctgatctttgaaattgacatttgttgtgcacagataaattcaatttttttaatgtttgaagatgtagtggatcttttcagatcttatatatgcatgtatatattcctgtacttctgttttctcttgaacgaggcgtagatggccagcaacaatctggcatacatgaataaccaatattttcattttatggcactagcataacatggttttctttgtgtagttctccagagattcctaattaattatatgcacatctggacctagcttggcaactgtatactcctaattaattaattaatcgattaagcatcaaattgttctttcgtttgcctgcagggattttctaaattcttatcatccacgcgttttttactgcacaaaaaacattatccaatcgaatgtgtcatcaaatatcctcttataaagtcataattagcttcttcaaaagtgctacttaagttttgtcattcttaattaatgcttttgaacaaaatatgaaatggacgctcattacaatttcatgtggtcctgccagttccaggcctagaagtacatatcttttgcaaagattgagatgttttttttccaaaacaagaaatagttgcaattttatgtggaccttcacataattgctttgttaaactgaataggctagggtatactcctatatatgcaagtcacccttatttcatctgtatttttgttctatataggcatatatttcgtctaacaccttgtctcaaatcaactgcgctctacacagccatgcatatataactattacattttagtttggaatctgaaaaaaacctattttttcactatcattatttgctctcatgattaatatgatcatgttattcatttataccgtatataattatgatagctaagtctttgcatgatttgtataattgtttccagtgctcctatttgtatatatatggtctataaggagagggggttacattaatttgtactataaggtgttttacaaaatggattttctcctaataatgtttggatttctgtccatctgaattcgagataaggcataccaaacatttacactgtggatcacagtttgtgtgtctcctcctaagcttatccacatggccggaactgaacaggcatagccttcctgagcatggttcctgggcacgtgttgccaatatttggacatctggagataaaactctgattgcatgaggtcgtgaatcaggagcgccgatcgccaacgcctttctctggtcccaagattatgaaacttgcatgctctccagagaatagtgatgacacaacagggctgcatcagactgtgtgcacatatagacttgttgcatctgtgcttgaaaaattgaacagtagcctagctagcttgtatatattttggtagcaggttgttagttatccattcggcgaaatctctagttgccccttgaattcgttaatcttatgtagcaggcatctttaaactttttagcaggtctgcagaatattttgtcaatatttattcaattttgtacatttgaaattatcaatacaatgttatatttcag

SEQ ID NO: 122771 - DNA, 866 bp, Zea Mays
gtgtggccttattataaataaagttgcttctgcagtttagtgatgggattggcttcatagcttaattttacataattgaactatagaatcttatcttattgctttgtgttttgggacaatggaactgatataacttttagatcttgtgatcgcactgaaatatagtgctgcagtgatgccactctgaaaattagtaagcgctcctttttaaccgtgctttccttgtgatcattcttctgaaaattgcaggatagcatactcatatagtaatactactgcatgtcgatcttaacaaatttcattcaagaaccaggccatgttgatgttcaaaagagttgtcagcagttcacgacatctggtatttattatatcttcttttgtagagggccagtgtggtctgcttagcagtaggtaatttttcttatctattaccgtaataagcttggtgactgaggtagacatctgatttatatttaatctaactgtttctctatgtgaatggatacatatattaactcaggtagcactacaactagcaatgtatggatgaattgaaggaagtaaaagaaggcagacaatcttatagaaactctgcatcttgaaaccaccatgattggcaaagaagttggatgcatcctttgcattggtgtgttcttatcaccaagcagtaatgtgaagcaagttcatttgttgactaagaacggatcaacacaaattagtaaagatttcgttcacaagagatgcaggatggagaggtggtagatttcaatatggctttgataatattttttccccttacaatcttttgtatggaacaagaaaaaacaatgtatgtggttactattgtaattcaagaatttattttt

SEQ ID NO: 122772 - DNA, 1985 bp, Zea Mays
cgtatggccaccgcctactgcatgccctagtaggcccctgtaccgccgccgccacagttcagtcataataaaggcggacgccgcggagctgagccattcacagttcacatcacacacgtatatcgttcgccacgcaaaaccaccgccgcccccctgcttcctccgatctactcccggcgagactcaggcgccccggcgccccccagggaatgcggagcgatgaggcggcgctcaggcactgacgtcgccggccagcgcgagctgcgcggcgaccgaacctgccaccgcaagcacgttgaggacgggtagatcatatccatccttccttccttctgctagtcgtcgtcttcgtcgtagggtgtagtagtttgcagatagttctgtcgtttctagtagcgaatcgatccagcgatcagacatggttgagggggaggcggaggcggaggcggaggtgaagaagggcggggtgctgcagggccgatacgagctgggccacgtgctggggcacggcaacttcgggcgcgtccacgaggcgcgggacctgcgcaccgggcgtggcgtggcggtgaaggtgctcgccaaggacaagttgctgcgcacgggcatgatggagcagatcaagcgcgagatcgccgtcatgaagcgcgtgtcgcaccccaacatcgtggagctgcacgaggtgatggccacgcgcaccaagatctacctcgcgctggagctcgtccgcggcggggacctcttggctcgcatcgcgcgctccggccgcgtcagggaggacgtggcacgccgctacttccggcagctcgtctccgccgtcgacttctgccacgcgcggggcgtgttccaccgcgacctcaagcccgagaacctcctcgtcgacgaagcgggcaacctcaaggtcgtggatttcggcctcagcgcgctcgccgaccacgcgcgcgccgacgggctgctgcacacgatctgcgggacgcccgggtacgtcgcgcccgaggtgttccggaacaggggctacgacggcgccaaggccgacgtctggtcgtgcggcgtcgtcctctacgtgctcctcgccggctcgctgccgttcccaaaggacagcatcgccgccatgttcatcaagatgagccgcagggactaccgctgcccgccgtggctgtccacggaggcgcgcaggctcatccccaagctgctcgaccccgacccggacacccgcatcaccgtcgcccagatcgtcgagacgccgtggtttaacaagccgtccgtctccagggccgttacagccgccgccgccgagccaccggccgaggctgcctgctccgcaaaggacagcggcggcggcgacaaggacgagctgccggagacgctaaacgcgttccacctgatctccctctccgcagggttagacctctcgccgctgttcgacgtggaaggcggtccggcgagggggcaccgggaggacggcatgcggttcgcgacgcgggagcccgcgagcggcgtcgtctcccgtctcgaggaggtggccgcccgcagcggcgggcggatgcgggtgaccaagagcggtgcccgcggcgttcggctcgagggcgccgggcgcgggggccgcaagggccgcctagccgtcgcggccgacatattctgcttggcgccgtccgtgctcgtagtcgacatcaagaaggacggcggcgacacactcgagtaccgctccttctgcagcgaggtgctccggccggcgctcaaggacatcgtctgggcggccgacccccaccccgccgccgccgccgttgacgccgtgcggccgccttctgatcattgttctggatcatagtgccatttgtttagtcagtatcaattccattcccaagtgatatgcgtcactgttctcgattcgataatgacgtgagatgtactgcttatgggggcgacatgaatctgtatctccatggcagccggctccctcggcacaattgacttgtttatgtgatggt

SEQ ID NO: 122773 - DNA, 550 bp, Zea Mays
actgatatggataaactcatggtcttctttagcttcagagcccactgtagctatattgttggcaccactatttatgagcccactgacctcttacttcatttcagaggaagcgcccttcgactgcaaatgattcagctttattgtggcgagtttcttcttggcaatctcgttctgcctcgcttggatgcttaaaccaggaatcaaggacaagggcacaaaagctgccgtttcagacagcactgatgaggaagcagcgcaagcaccattgttggcaaaatggaccagaccatgactccaggaaactgagctataaagctcagctggagtgtgcataaaattgtaggatatgtgaattagagtgccaacaacatagggcttgcctgtagtatggtgtttgtacataccccagaacgagaaagctgatgacttgtatcagtatcagcaagtgccaagtgatagattttgggttggtgctaaaagcctaaagctcggtgttttgtgcgatccagccttcactgtttcaggcaaatggatctttatattatgtgct

SEQ ID NO: 122774 - DNA, 1609 bp, Zea Mays
gtccgtttccgtcgtcttcctcctccctccgtctcccttcacccggcctcggtgggtccgctccccagccacgcgccgctctcttatttaaccccggccccggcctccgctccgccactcgcgcacccatcacaccccctaaccactccacctccctcagcagccctcacggccactacccactgcggctgtaccacctgtacggctgcactgtccgtcgatcggctttgcaccacacgtccgcgcgctcgctccgtcggtgtcggtagccatggcgctggcggggacgggggtgttcgcggagatcctggacagcgaggtgtacaggtactacgccgacggggagtggcgcagctccgcctccggcaagtccgtcgccatcgtcaaccccaccacccgcaagacgcagtacagggtgcaagataccccttggagtagttttggcaatcccgccgttcaactatcctgtcaacttagcagtttctaagattggcccagcactaattgcaggcaatgctcttgtgctaaagcctccaactcagggcgctgtggctgcacttcatatggtacactgcttccacctggctggtttcccgaaaggtttgatcagttgtgtgactgggaagggttctgaaataggagattttcttacaatgcatcctggagtcaactgcataagttttactggtggcgatactggtatagccatttcaaagaaggctggaatggtccctcttcagatggagcttgggggaaaagatgcttgcattgtgctagaggatgcagatctggatttggtttccgcaaatatagtaaagggtggcttctcatacagtggccagaggtgcactgctgtcaaagtagtgctgatcatggaatcgattgctgatgctgtggtacagaaggttaatgccaagttggcgaaactgaaagttggcccacctgaggacgactctgatatcaccccggttgtaacagaatcctcagccaacttcatcgagggtctggtgatggatgcaaaggagaaaggagcaactttctgccaggagtacaggagagaaggcaaccttatctggccgttgctgctggatcatgtccgccctgacatgaggatcgcatgggaggagccttttgggcctgtcttgcctgtgattaggattaactcagttgaggaaggcatccaccattgcaatgccagtaatttcggcctacagggatgcatttttacaagagacatcaacaaggcaatcctgatcagtgatgcaatggagactggaactgtgcagatcaactctgcaccggctcgtgggcctgatcatttccccttccagggactgaaagacagtggcattgggtcccaggggataacaaacagcattaacatgatgaccaaggtgaagagcactgtcataaacctgccgtcaccatcctacaccatgggctgagatattcttgttaagtgttctatagctccatgagcaatgtagagagttaaatgtttcatagccacgtgagatttggacgctatttacacctcagttcttcctgcagaagatcttttgcagtttaaagaataaagtgcgttgaaagtatggagtcgatgctttta

SEQ ID NO: 122775 - DNA, 2031 bp, Zea Mays
acaccgatcgcggggccgatcgagtctgctgaagcctcgcctcgcctcgcagaagaagcagcgtgagtaaaaaacccgcagggtgcagacgaaaacctcgtccgtttccgtcgtcttcctcctccctccgtctcccttcacccggcctcggtgggtccgctccccagccacgcgccgctctcttatttaaccccggccccggcctccgctccgccactcgcgcacccatcacaccccctaaccactccacctccctcagcagccctcacggccactacccactgcggctgtaccacctgtacggctgcactgtccgtcgatcggctttgcaccacacgtccgcgcgctcgctccgtcggtgtcggtagccatggcgctggcggggacgggggtgttcgcggagatcctggacagcgaggtgtacaggtactacgccgacggggagtggcgcagctccgcctccggcaagtccgtcgccatcgtcaaccccaccacccgcaagacgcagtacagggtgcaagcatgcacgcaggaggaggtgaacaaggcgatggacgcggccaaggtcgcgcagaaggcatgggcccggacgccgctgtggaagcgtgcggagctcctccacaaggcggccgcgatcctcaaggagcacaaggcccccatcgccgagtgccttgtcaaggagatagccaagccggccaaggatgccgtttctgaggttgtccggtctggggatttggtgtcgtacacagctgaggagggtgtgcggatactcggggagggcaagctgcttgtttcggatagcttccctggtaatgaacgaaacaagtactgtctgagctccaagataccccttggagtagttttggcaatcccgccgttcaactatcctgtcaacttagcagtttctaagattggcccagcactaattgcaggcaatgctcttgtgctaaagcctccaactcagggcgctgtggctgcacttcatatggtacactgcttccacctggctggtttcccgaaaggtttgatcagttgtgtgactgggaagggttctgaaataggagattttcttacaatgcatcctggagtcaactgcataagttttactggtggcgatactggtatagccatttcaaagaaggctggaatggtccctcttcagatggagcttgggggaaaagatgcttgcattgtgctagaggatgcagatctggatttggtttccgcaaatatagtaaagggtggcttctcatacagtggccagaggtgcactgctgtcaaagtagtgctgatcatggaatcgattgctgatgctgtggtacagaaggttaatgccaagttggcgaaactgaaagttggcccacctgaggacgactctgatatcaccccggttgtaacagaatcctcagccaacttcatcgagggtctggtgatggatgcaaaggagaaaggagcaactttctgccaggagtacaggagagaaggcaaccttatctggccgttgctgctggatcatgtccgccctgacatgaggatcgcatgggaggagccttttgggcctgtcttgcctgtgattaggattaactcagttgaggaaggcatccaccattgcaatgccagtaatttcggcctacagggatgcatttttacaagagacatcaacaaggcaatcctgatcagtgatgcaatggagactggaactgtgcagatcaactctgcaccggctcgtgggcctgatcatttccccttccagggactgaaagacagtggcattgggtcccaggggataacaaacagcattaacatgatgaccaaggtgaagagcactgtcataaacctgccgtcaccatcctacaccatgggctgagatattcttgttaagtgttctatagctccatgagcaatgtagagagttaaatgtttcatagccacgtgagatttggacgctatttacacctcagttcttcctgcagaagatcttttgcagtttaaagaataaagtgcgttgaaagtatggagtcgatgctttta

SEQ ID NO: 122776 - DNA, 1634 bp, Zea Mays
acttgtcacccaactcccgcagtcccacccacaccgatcgcggggccgatcgagtctgctgaagcctcgcctcgcctcgcagaagaagcagcgtgagtaaaaaacccgcagggtgcagacgaaaacctcccatggcgctggcggggacgggggtgttcgcggagatcctggacagcgaggtgtacaggtactacgccgacggggagtggcgcagctccgcctccggcaagtccgtcgccatcgtcaaccccaccacccgcaagacgcagtacagggtgcaagcatgcacgcaggaggaggtgaacaaggcgatggacgcggccaaggtcgcgcagaaggcatgggcccggacgccgctgtggaagcgtgcggagctcctccacaaggcggccgcgatcctcaaggagcacaaggcccccatcgccgagtgccttgtcaaggagatagccaagccggccaaggatgccgtttctgaggttgtccggtctggggatttggtgtcgtacacagctgaggagggtgtgcggatactcggggagggcaagctgcttgtttcggatagcttccctggtaatgaacgaaacaagtactgtctgagctccaagataccccttggagtagttttggcaatcccgccgttcaactatcctgtcaacttagcagtttctaagattggcccagcactaattgcaggcaatgctcttgtgctaaagcctccaactcagggcgctgtggctgcacttcatatggtacactgcttccacctggctggtttcccgaaaggtttgatcagttgtgtgactgggaagggttctgaaataggagattttcttacaatgcatcctggagtcaactgcataagttttactggtggcgatactggtatagccatttcaaagaaggctggaatggtccctcttcagatggagcttgggggaaaagatgcttgcattgtgctagaggatgcagatctggatttggtttccgcaaatatagtaaagggtggcttctcatacagtggccagaggtgcactgctgtcaaagtagtgctgatcatggaatcgattgctgatgctgtggtacagaaggttaatgccaagttggcgaaactgaaagttggcccacctgaggacgactctgatatcaccccggttgtaacagaatcctcagccaacttcatcgagggtctggtgatggatgcaaaggagaaaggagcaactttctgccaggagtacaggagagaaggcaaccttatctggccgttgctgctggatcatgtccgccctgacatgaggatcgcatgggaggagccttttgggcctgtcttgcctgtgattaggattaactcagttgaggaaggcatccaccattgcaatgccagtaatttcggcctacagggatgcatttttacaagagacatcaacaaggcaatcctgatcagtgatgcaatggagactggaactgtgcagatcaactctgcaccggctcgtgggcctgatcatttccccttccagggactgaaagacagtggcattgggtcccaggggataacaaacagcattaacatgatgaccaaggtgaagagcactgtcataaacctgccgtcaccatcctacaccatgggctgagatatt

SEQ ID NO: 122777 - DNA, 72 bp, Zea Mays
atgtcgtcgaccccgctagccgtcaatgccatccgtcgcgcacgcgtgttcgaggcaagaccggtcgggtga

SEQ ID NO: 122778 - DNA, 1387 bp, Zea Mays
ctcgactccagggtggctcaaggtcggctcgttgagtcgttgacagccgtagcccccacccccagcacgccgtccccgctttcctctcgccatcttccccagaattccgacccgctagatccgcaccctgttctttcgcctcgctcctcggcacctgcccgtctcccatgggctcttgccgccgctgacactggggcccaacgctctcctccgcgtccgcacccgcctccgcctccgcctcctctccctccccttccacctcctcctattgcctccactaaacctagccgaccgcctccgcccgccgacatcggaagccctagttgctgcgggaaccgccctgccggcccgccgctcctccgccccaagtgtccctggtttcttggatgcaccgactgctccgatggatgcccctgcgcccgccgtggagatccgcgaagtctgggcgagcaacctggaggaggagttcgaggtgatccgcgacgtcgtcgacgcgtacccgtacgtcggcatggacacggagttccccggcttcgtggtgcagccgatcgccgagtaccggttcacctgcgaccgcatctacgccggcctcgagggcaacgtcaacgtgctcaagctcattcagcttggcctcaccttctccaacgaggcaggcacactcccaccgtgtggcacggggggacagtgctgcatctggcagttcaatttccggggcttcaacccgcacacagacccttacagccccgactccatcgacctgctccgccgcagcggcatcgacttcgacctctttgcggtggagggggtcgattccacccgcttcgccgagctgatgatgtcgtctgggatcgtgctgaacgacgatgtccagtgggtgaccttccacggtagccacgacttcggctacctcctcaggttgctcaccggacgggaaatgcccaacaccttggatgagttcttgaagctcaccaagatcttctttccggtgatgtacgacgtcaagcatctcatgaagttctgtggccctggcctatatggtgggctgagcagacttgggaagctgctcaaggtcgagcgtgttgggaccggccatcaggctggttctgattgtctgctgaccctgcagtgcttcatgaagctcaagcagttgtacttaaaggagtctgtcaagttgtatgatggtttgttgtttgggcttattcctggggaagtggagatcaaaactgctcccccgcccattggatgagtaatggtagttaaataacaagattctgattgagaaaaatagggaacaaaatctatcatcggcgaatatatgactgatctgaggatttcctgtgcttgttatgatatatgccttctctcctggctattcttcccattagtc

SEQ ID NO: 122779 - DNA, 2550 bp, Zea Mays
aacgcaacgccgatcgtgcgcctcctccctcaccgcgcgccgccgtcgctgccatcggttcctttcaaccggtggatcaccccgctttccataaccgtttatccttggttgtgctcagcgtctggttccgccattggtcccatggctgccccgcgcgccgcggcggcgtcggcgaagcaggtgacgaggcagaactttgcggaggccgtgctggagctgagggcccacctggaggcatgcgactacgtggccgtggcggcgcagaagaccggtgccccgacgggatggcgccgcgcgttgccggtggacactgcggaaacggcgtatctcaaggccaagctcgccgcagagtcctttcagccactccagatcgccgtctgccccttcaggcagcgcaactcttacccgtctaccctcgtcgcctacccgtacaattttcacttatttcctagagatgaactacagctcggaatgccttcatacagtttctcttgtcaaccatgttatttatcaactatagctaatgatggttttgatttcaatatgtgcatatatgatggtatttcttatctatcaagggttcaagaatccttagcaagggaaaagatctttactcctcgtcctcaccaattgttgtcatcaccaaacacatcagttgctgactcagttttcatgaatagaataaagtctaggatagtgaactggcgaaaaagatatgctgacccaagtaaaaaacatgatggctctttggttagttcccttagcagattaatattgggtgctgaaacgtatggttccaggcccagtatgagtattgatgtctgcagtgatcggcaagttcaattggtcttggaggcagtaaacccatatctctgatgaccttgtatctctcgttccacacaaagctggagttggtagggctgtgcgtgtgatctttactaattcgaaagaggataagaatcttctcctgatggatatccagaaattagaagatgaacaaaactttaaattccgtgggtttcgagaagttattgatctactatcatcttcacagaagccaatcatatcatacagttgcttgaatgatctgacaatgctgcacaccaaattcattgcacctcttccgccaaacatgcatgaatttatgtgttctctaaaaatggtcttccctaatgttgttgatatcagccacctgtggaggcaaattggccctttgagaaaagcgaagaatatacaagccgctctcagttacttacaaagacagtactttgtgccaattgaaatagaaataccacagcaagatggtacaagcagtataacaaaaaatgagcaaaatgttctgagaataacaaagttatttgctaaactaagcaatttactgaaaatcagtcctgagtgccaactgcaatctcgtgaacagtgcactgcagttgaagagtattgtaacatcttctatccaagttgtgtggtcggaggttctgacgatgctaactttgcttttgagtcagacaccacagaaactgtgagcactgataacatcatcttcttgtggggctttagggaaaaatctgtgaaggagttaaaatcgtaccttattggcttacatcaagccttttcagaggattttgaggtcaagttgttggataagacatgctcagcttttgatattccgtgattctaatactgcaatgcagttactaaaagaaataggctcagaaggcccctcactaaacagattcttctcagaaggtctgaaagctgcaggttttgaagtgtacaaaaaggtctgcaggttaggactttgggattcagatttagctgaggtcctcgaggatgtttcatctgagctaggtgttccgacacttcctgagtgcagcacctctcagatatactggaatagtgaattaatgctggatctgaaggagtatctggaatgatagaacattatatagcccttaatatatttttaccaggttctaagattaatgagagctcccctcaagaagcagtagcaggccacagcaggtgagtgaagccagaggtgaagcttgcattttcaggacatttgatattcagtttgggtcaaacttgatttttttggcattgttacaagatatgagcaagggtttcagcataatggttggcctatctttgaactgcaggcacctccatgttcaaagatgattattgctttattatgatgttacatgactggcttgaatgtcatcattttggagtgtctgacctatatgcttctcgtgctttgtgcagcccgaatagtagcaatgatattctggcatcagtccggcttaaatgaacagtatgtatgtacgagggcagtgaggtacccttgtgacgaccacggagatatagagagtttgtattgtattcttcatctgtgttgggctttggttagctaagtcattagcagtaatctcgtgtatttgggcctaggtttagcccggcccaaacgttttcgtataaagagtctgtaatagggaggatttgaacagaatagaaaatacagaaagaaaaggcagttgaacctcc

SEQ ID NO: 122780 - DNA, 126 bp, Zea Mays
cttgggttgctgatccatttttgtttacatggatatgaagacccagaaccatcctttattttggtggaaaatctttggttgtccattatccaagttgtcctatggaaaatattgaaagaaaaaata

SEQ ID NO: 122781 - DNA, 1227 bp, Zea Mays
atgcccagccggatcgccgcctgcttccgctgcgccgcggcgccgtcctcgggcgcgggcgcgggcgcggcggggcccagcctggcgacctccatctacgagacccacctcggcttggtcgcgctctcctggtcccggacctcgctcggcctctccctccgcgccgtgctccgcctgtcggccacgcccccgcccggctcctcctcctcggcgtccggagcgggctacctcgacgatgacgcggacgaagagattctcgccttccgcgtcagcccatggctattctggcgccgccgcgggtccagacggttccgcgctggcgaccgcctcgtcgacctggcgtgggatctctctcgcgcgcgcttcccggtctccgggtcccccgagccctcatcgggcttcttcgtcgccgtcgtcgtctgcggcgagatggtcctcgcggccggggacctgaccgatttggcctaccggaggacccgggcccggcgcccatcaggcccgcgtccggtcctcctctcccggcgggagcacgtctcgctacgcgacgcgggcgccggccgaggccgcagccacaccacctgggtgaacgtccagggcaaggagcgggagatctccgtggatctcgtggctcgcggccgtggcagggacaaggccaccgccggcaaggggaaggagaaggaccgggctgatgtcggcatgtcggtctctgtcgacggcgagcgagtgctgcacgtccggcgcctgcgctggaagttccgcggcagcgagcgggtcgacctcgggggcggcgacggcgtccaggtctcttgggatctccacaactggctcttccccccacgcgagccgccccccacggaggcctcgacgcacgcccacgcggtgttcgttttccggttcgaactcgccagcggcggcgaggagagcgaggcggatttggggaagaatccctcccccagcaaggacgcaaggaggaacacgggcgtttggggaggctacctcgcgcggtgggggcaacgggactggagcgagacgggcagcaacggtgagaggaggaagggcagggggcggaggctggccaaggagagctcgtcgtcgtcggcgtccgtggcatcctccacggcgtcgtgggccagtggctccacggtgatggactgggccagccccgaggaggtcgagatgcagcgcggcgacggcttctcgctgctgatctacgcctggaagagctaa

SEQ ID NO: 122782 - DNA, 507 bp, Zea Mays
taggactaaccagtgtttctagctgtagacataactatatatcgaaaaagaaatccttttatacacttaacaaatagggggaaaactttgccttaattttttttgtaaaggttcaattaagtatacaagaaatcaatctggtttggcgaaaaaagaagcagataaagaaaaaccttaaatctacctcttgtcgaatctgcatgcgctccagcaacttgatcacatccagaccgaccttgtacgcgtacaccttgcactccacaagacctaccatggtggatgcgatggtgatctggttgcccagcttcgcgagttgccgcacaacgaacttgcccatgtaccacgtgtttccttgaagagcgtcgacaagcgagcaacgatggcagcctcaccgctagcgaagatgctgagggtggaattgcaaactcagtcaccggcacaccaccagggataactgagcagtgcgacaacagtggctatcccggtggcggcggtgagggtgggatc

SEQ ID NO: 122783 - DNA, 402 bp, Zea Mays
atggagatgcacgaggacagtcgatcgccagtggtgtgtgcgaactatgaagtcggcggcggtgcacgaccgcacagatctgagctacgaccagatcacctacagggaacggtagtggcaccgccgcactggtcgtatgcaagctggaacgcatggggagtgaaggaccgccgagcgcaggaccgtggtcgtggtggccgcctggccgggtggcaggtggtcgtcgaggcggtcgagggtagggatggatactatactggggttgtggactcgtggggagaattggggaatagggaggcaagacaggctagacggggttgccagattggggaggctagacagacagccgagatgggccgcaacgggaaattagactatctatggtctgtgaattggttctaa

SEQ ID NO: 122784 - DNA, 110 bp, Zea Mays
aaatccgccaaattcaaatatttgtccagcaaaattgtccaccaaatttaaatatgataaaaacatacaaccatacaaaatttgtccaacaaatcaaatctaacacatgc

SEQ ID NO: 122785 - DNA, 1449 bp, Zea Mays
atgtacgctgaagttcctcaagaagctatatatacacttcaaccacgactacaggaaagcaagattttaatcatgagaaaaatttatgttgacaacgcaaagctatccttcaaacctgtgcatggaaagtatatgatcaggctacatccaaagactttgcttgaggaagtaaatgaggatccacaagattttccaaaatatacattccatctaacaccgttcccagaactaccccaacttgaaggaaacaatgagtatttcatcgatgtcattggatgcattacagctctttctgatgcaacaccatttcagactagcagtggaatagttcgcatgaaaaggctgatccaccttgtggatctaaggggaaataaaattgaggtatcactatggggacgaagagcagaggaattcccaggacaacaagtctttaaagccagtgaaatgaatcatgtaattgttatctttgttggaacatcagtcaaatcctatcgtggatcaccaccttttcttagtggcacagctgcatgccgctggtatataaatcttccagagatccatgaaatcaatactttctatgcaagtatcggtgaacaataccaatcaatccaaaagcttcatattcagacaatgaacgagatgcagaacaagattgagcaaaagacatttttagaaatgaaattagtcgacccatttgatgacatgagcaaacgtttcgaatgcaccatgattgtaacaagaattgctgacaataagccctggttctatcaaggatgcacaaaatgcaatacatcaacaagatatgaaggaaaaacatacatttgtaaacaaggccacatctcctctcagatggtccacaggtataaaatatctctatatgccactgatggcacctatgagctagaattcgtgctctttgatgagagagcgacatcacttattgggaaaaccgtagagaaattactgagacaaagcaacaaatctgaattgccggaagagattaaagcaattgtgggtgagaaattgactgttgtgaccaagttgtttccaggaaaaagtattaaaaagagaggacctaataaggacaacaaagatccaacatttgatattcttagtatcaaaaagaggcatggaaaagacctactcctttccgtgttcaaaaaagaagagcctgttgttctccacagcgcaagctcatctcaacttccaaagctaccacccctagtaccaatagagccaaagacacaagatatacagacctctggttcagaagcagcatcaccacatgaattacagcttatggagattgatcagactagttgctttgacaacctcagtgtatcatacaagagaaatttcaatgcaattgatgactccgacaaggaagaaacacatggtgctgaccaactttcagtctttgcaaaaagaccaaagatgaagaacaattag

SEQ ID NO: 122786 - DNA, 225 bp, Zea Mays
atgtggctcaagagtgatatcccttatatatcgtcatcaatatcatccattgaagatctttgcaacatgaaattgtgtcttaatagtgaaagactgaagaaagggcctttaactcttatgaatgacaagataatccttgatgttgtagagcgaggtacctgggctctacatatgctcaaatatgtaccctctcttctatttcaaaacacctctcttctgttttag

SEQ ID NO: 122787 - DNA, 2306 bp, Zea Mays
atctttttgttcttgcataatggattagttcatggatggggtctcgattttgctctgtggaaatgtgtggtggtacacacttcacaacatagttacaacattgaagagaatcgtgactacaatgagtggaactgcactatcactataggtctatagcagtagagttatgaaggaactttatcattcactgactcataattgctgcatgttttgtataatgagtttttggttgatggagctcgggttgtgggtaatagatgcttccagtcagatcgtgttcacttggggaagggtacatggattttgtgctgaacacaaacttacaaaggcgcatgtcttaactcttaatacaagttttgcttaatgacttcatgtgagtaccaatgtttatagcaaactttggtgaatattcacctttcgcatatcaattcttagtttcaacagattaacatgtttcgtggacatggaatggagaagatctaccccctcctgatactaaagctattagggatatctgtgtactgcctggtgggcatgttgttattgcatcactaagcaggaagttcccttttcaggtctataaagaaagtgtgcaagttctattcttcactgtttttttgctacatttactgaaatatgacctttgttcatatgatctactggtaattcttcgacctttcaatttcacaaaacttgcaactatttttatgctctgcatcctaccaaaagtatacattgtctttctactacttagacctgggtatgagcaagtctgttgcatttctattctttctactacttatacatgcactgcattatgtatttaacttttaagaagatcaagcaggtgcttggtaatcaaagcacttgtttttgatagagacatgcattctttttccttaaattgattttaaagtaccgaataactaagggttgcttaagtaggagcaagtgaactagtaaaaatgtgaaattatttatgctgaactgctaactctgtattgtgatgacttgtaggctccttgatgccgtaagagaatgttactgaaatgccttctacttcttcattagatttctgtttgattattttccatacttttatttactaaccactttatgttttttaaatggatcaattaacatggtttttaaatggagcatctaacaacattcattagattctgtttgattatttaattactcactctaatgtatgaaaaggcaaggtagaagatgctaccaaagtacagacgcttctgttcagtgccactctgccagattgggtgaataagctctctatgaggtttctgaaagttgacaggaaaacagttgatcttgtcggtaatgagaaactgaaggccagtgcatctgttaagcaccttgctcttccttgtaacaaggcagcaagggcacaagttattccagacattatccgatgttatagctaggatgtactaccccatagatggttgtttttcagtatgctgtttgatttccaatgacttcgctaaacttttttgtgctttagtggaggtcgaaccatcatcttcactgagacgaaggattctgcatcagagctttctggtaatactggtgttgctgtcatgctttatgagcccagatataagcacagtgtcagcagactagaatgggagtctggggttaaatttgagcatatctctgtgccacaacccactgatgtagcacaatctgctggcagtgaagctgcagatgccattgcgagtgtgtcagacagtgttattcctatcttcaggcagcaagcagagcagttgctaagctcttccagtctatctgcagctgacttgcttgccaaagcacttgcgaaggcagttggttacacggacttaaagaaaagatcattgttatcttccttggaggattacagtacactacatcttcaaactggcagaccgatgtggtcacctggtttgacatcggcaacgtggtcatggtgactggcgggaggaacatcgggcgtgtaggagtgatcaagaactgggagaagcacaagggcatcttcgaggtcatcgacgtgctgcttggagttttttgcatgctatgtctagttttctcctatttgttgtacatgaaaacatagaatggaattcaaatttggtggtcgcaaaagtgtggagacttgaattcatataaagttaggcttaacattagtgcaaacagttgtattttagtttagatttagagtacacttatgtatatatgccttgtttgacaatgcttatttatgatatattgaatggtacttatttatattatatgaattataa

SEQ ID NO: 122788 - DNA, 86 bp, Zea Mays
catcatgctatatttaatgtccatcaatcaatattggtatatagtattttaagagcttgcatgtcgcaaatatttccattccttat

SEQ ID NO: 122789 - DNA, 1161 bp, Zea Mays
gcccctcctagtcttccactcttcctccccttctctccggctcccccgaggcccccgacagcgaactcgggactcgccaaccgagaaggaagaactagtcgcgaggtgaagaggagaacctgaggtggtcccgaatcagagacggaagaaggtgggttcaggagcaagccagcctgccgccgccatgaggcgcacctcgaagaaatcgtcgtcgtctacggcgaccgccagcgctggtgtggaacaagtaaatgaaaaacaaaacagaaaaagaaaaggagtcagtacaaacctgaccagcaggaaagcacaacgtggccctactaaagcagtttccaaggaagtagaacggattgatcaatttttctatacttacgctgataactcatctggcatgattgacccagaaggcattgaaacactctgttctcaccttgaagttccccacactgatgttaggattctaatgttagcatggaaaatgggctgtgataagcaaggttattttaccttggatgaatggagaactggcttgaaagctcttcgagctgacagtattagtaaactgaagaaagcatttccagaactggtccaagaggttacaaggccatccaatttccaggatttctacatatatgcatttcgttattgcctcacagaggataagaagaaatgtatagaaataccagttgcttgtgagttgctgaatctagtattaggcttgcagttccgccctcaggttgacaagcttaataattacctcatgtaccaaaatgactacaaggtgataacaatggaccagtggatgggatttattcgtttctgtaatgagataaacttcccatcgcttgacaattatgattcagaccttgcctggcctttgattctagacaattttgttgagtggctacgagaaaataaaagctagatattctattcctgtggtgaagttgtcatccaaaatgtaattttcaagaatgtaggtgactatatcattgtttgcgtttgtaagacatcaattttggaccacccacatgtatatacttcggcagtagtgcaaactcactgataactcccttaccgaattttgtgtttagtagcagttttgggcagccacgttctattccatttaggccttgttctaatattctaattccatat

SEQ ID NO: 122790 - DNA, 1080 bp, Zea Mays
gcccctcctagtcttccactcttcctccccttctctccggctcccccgaggcccccgacagcgaactcgggactcgccaaccgagaaggaagaactagtcgcgaggtgaagaggagaacctgaggtggtcccgaatcagagacggaagaaggtgggttcaggagcaagccagcctgccgccgccatgaggcgcacctcgaagaaatcgtcgtcgtctacggcgaccgccagcgctggccctactaaagcagtttccaaggaagtagaacggattgatcaatttttctatacttacgctgataactcatctggcatgattgacccagaaggcattgaaacactctgttctcaccttgaagttccccacactgatgttaggattctaatgttagcatggaaaatgggctgtgataagcaaggttattttaccttggatgaatggagaactggcttgaaagctcttcgagctgacagtattagtaaactgaagaaagcatttccagaactggtccaagaggttacaaggccatccaatttccaggatttctacatatatgcatttcgttattgcctcacagaggataagaagaaatgtatagaaataccagttgcttgtgagttgctgaatctagtattaggcttgcagttccgccctcaggttgacaagcttaataattacctcatgtaccaaaatgactacaaggtgataacaatggaccagtggatgggatttattcgtttctgtaatgagataaacttcccatcgcttgacaattatgattcagaccttgcctggcctttgattctagacaattttgttgagtggctacgagaaaataaaagctagatattctattcctgtggtgaagttgtcatccaaaatgtaattttcaagaatgtaggtgactatatcattgtttgcgtttgtaagacatcaattttggaccacccacatgtatatacttcggcagtagtgcaaactcactgataactcccttaccgaattttgtgtttagtagcagttttgggcagccacgttctattccatttaggccttgttctaatattctaattccatat

SEQ ID NO: 122791 - DNA, 1075 bp, Zea Mays
gcccctcctagtcttccactcttcctccccttctctccggctcccccgaggcccccgacagcgaactcgggactcgccaaccgagaaggaagaactagtcgcgaggtgaagaggagaacctgaggtggtcccgaatcagagacggaagaaggtgggttcaggagcaagccagcctgccgccgccatgaggcgcacctcgaagaaatcgtcgtcgtctacggcgaccgccagcgctggccctactaaagcagtttccaaggaagtagaacggattgatcaatttttctatacttacgctgataactcatctggcatgattgaaaggcattgaaacactctgttctcaccttgaagttccccacactgatgttaggattctaatgttagcatggaaaatgggctgtgataagcaaggttattttaccttggatgaatggagaactggcttgaaagctcttcgagctgacagtattagtaaactgaagaaagcatttccagaactggtccaagaggttacaaggccatccaatttccaggatttctacatatatgcatttcgttattgcctcacagaggataagaagaaatgtatagaaataccagttgcttgtgagttgctgaatctagtattaggcttgcagttccgccctcaggttgacaagcttaataattacctcatgtaccaaaatgactacaaggtgataacaatggaccagtggatgggatttattcgtttctgtaatgagataaacttcccatcgcttgacaattatgattcagaccttgcctggcctttgattctagacaattttgttgagtggctacgagaaaataaaagctagatattctattcctgtggtgaagttgtcatccaaaatgtaattttcaagaatgtaggtgactatatcattgtttgcgtttgtaagacatcaattttggaccacccacatgtatatacttcggcagtagtgcaaactcactgataactcccttaccgaattttgtgtttagtagcagttttgggcagccacgttctattccatttaggccttgttctaatattctaattccatat

SEQ ID NO: 122792 - DNA, 177 bp, Zea Mays
ttttttggtcctttgtgtcagaaaggaattccggcctatactgctccataaccagaagaggcaatgactgctctcaaacaaagagcttcggagttgggtatctctctccaagtcgttggtcctctggagccccatcacctaaaagatcaacatcttgggctccatggataacggcaa

SEQ ID NO: 122793 - DNA, 1184 bp, Zea Mays
aagtcatcggcggcggtgccttcgatgttgaagttagagtggacaggcacgggcggtggagcggatgggtgggcaacgacggctgctgctggggcgccatcgccgtgggaggaagggtagacagcggcggcgtcggacctttgctgcatggccgggttggccgcggcagcagaggctgaggctgaggcgctgcggcgcgcgctgtggccgcccacgaagttgtgcttgttgttgtgcatccagaccttgaagacgcccttgctgacgccgatctcctggcagcactggtccaccgccgcctcgtcgcacttctgcagccgccaacccagtcgcgacgacagagcctgcatcctctgcttctgctccgggctgaacttcgtgcgggaccgcttcctcgccgccgccgccgcggcggcggcggcaccgggagcagtcgcgggcgccggcatcgggcccacggaggtgggcgggggcggccgcggcgccgctgcgggggtttgggggctcggcgcgccgatgatcagcgcgaggagcgtgtgcgtcgtggcctggcggtagccgggcgacacaattgccgcctgcgccggcatcggcgacagcgggcggtcctcgtagaaatccgagctcgcgtccgactcctccgcctcgtcgtcgaatgcggccggcaggcgcgcctcctcgccgcgcatcgtgcggcggctgtcacgcattacgtgcgacgcgacagccggcgccggcgccagtggtggcggcaaggcgaggagaggcggtggcagtggcagctcgacgagccggcggtggaagttgcggtggcatccgcacgcggcgcacctgagcgaactcgggtccgcccggtcggcctccggcgacggcatgaattcgccgcacccgtccagggcgtgacctcccaggctcgccgcgtggttcttgaggcactcgcggtacacccacgtctctccgccggccgccaccctgagcctcgtcttcttggtcgccgatgacacgccgccgttcgggaacagcggctcgtacttgaggtcgaccgtcgcctccatcctttccctcgcgcccttcttctcggagagagacggcgtcaccactgtctgcagcagagcacgcccacacaacggaagattaccgcttgcgccttggctgttttgtcccggaggacagcgagccagcga

SEQ ID NO: 122794 - DNA, 320 bp, Zea Mays
aggtttgtttctcaacattttcagtagccctccaataggttttgccctaccagacttgagagctactgctgttaattccttggatgcatgagccattcatatttatgtgtaacctttttttcttctctaagtgtttcattcattgtttgtcatatttttattgcaaatgatgatgaaatcaaggcttgtttctctacattcttagttgccaccaaagagctttcgccctgccaggtttgagagctaatgctgctaattccttccttggatgtgtgagggaaattttgctttgcaatcttttaaatctttactttgtgctt

SEQ ID NO: 122795 - DNA, 568 bp, Zea Mays
ctccccctctcctcaagcgttgctacggtgataatttgctgcaccgttcactcttattcttgtggataatattttttcttaaatattcttttcagtacgcactgttagtcttcagaacgctggtgcaactagcaataaaaaagaaagagtgaaggacttggcgactggcgcctgacagtgagggttctccatcgctggacttctcccttttgtgcagacgccatcgggtgctgcgacacgcgcttgctgtagcaagcgaggaataggctacggtcaccatcccataccggattttgtttgggccacgccgcaagcaacaggatgatgacaccactgcggggtgaagcgacaatcccatctccgctgtgggaatcatgggttagcgcttcattcttggtggtttcgcatgtttttcctggtagtcttaggtactattcttgcttacctggacatcgctggcactattttttgcggcatctggtgggttcgactatgacgattaccctcacctttgtaaaccctggattgatggattttttaatagctaaatagcagttctagccgacta

SEQ ID NO: 122796 - DNA, 735 bp, Zea Mays
atgggagacgggggtggcgctctcgaatccgcggcgacggatgcggctcgatccgtcaccaacttctccaccgggctccgcgctgatgtcgaagctcacctcacggcgtccgacgcggctactgatgcccgcctgcgccagatcgaggtggataccggctctcgtctcaccgccatagagtccgcagtccagctgttcgactgctggcgcccccgagtggactcctccctcgacgccatgaagacgaacctggatcggctctgttcggaggcgtccaggatggaggtcgtaggcttccaaggtgtgttcggcgggtttccgggcgtactcggatctcccggttccggcgcgacttcgtcaggcctcctcggatccccgccttccttcgctcctaccggagcggtaccggtgcgcccatctgccaccgtcgaccactccgacgcctatcgttttgggcccagctacgaaaactatctccgagacagtgggcttcggtatcctgactgccgatggccgcttcccggtcacgggattagtcgtcttgtgtcttcaacattacgaagtgatgatggccttctttttcctgaaaggtgttgtttgtggcgtttaaatctctacttaagtcacttagggtatcatacacagtttgggttctttgtaatccaattgcacgatgatgactatcttgctcctctccaagctgatcgagaaaaagaggtgaagcttgtgcaatag

SEQ ID NO: 122797 - DNA, 902 bp, Zea Mays
atgttcctcttcttgtatccttcgtttccgttcctatccaagctgctaacaaactagtatcagattaggcgattccttgctctgtcccatggcgccgccatctccatctgatgatgcgtccctcactcttgccttggaaaaccaaacccgggaggtccttgccaaattggataaacggctccaaaccctcgacaacaaatgggagacgggggtggcgctctcgaatccgcggcgacggatgcggctcgatccgtcaccaacttctccaccgggctccgcgctgatgtcgaagctcacctcacggcgtccgacgcggctactgatgcccgcctgcgccagatcgaggtggataccggctctcgtctcaccgccatagagtccgcagtccagctgttcgactgctggcgcccccgagtggactcctccctcgacgccatgaagacgaacctggatcggctctgttcggaggcgtccaggatggaggtcgtaggcttccaaggtgtgttcggcgggtttccgggcgtactcggatctcccggttccggcgcgacttcgtcaggcctcctcggatccccgccttccttcgctcctaccggagcggtaccggtgcgcccatctgccaccgtcgaccactccgacgcctatcgttttgggcccagctacgaaaactatctccgagacagtgggcttcggtatcctgactgccgatggccgcttcccggtcacgggtatgtggcgtcccccgtctccactattttcctttccatagccaggtcattctgtaggaagtgatttggatccacggggcaaaccaaccactccatgcaatcgtgcaaacttttaatcagtaccatatgatgttgatccaatggacacaagggcgtggataattttacacttaa

SEQ ID NO: 122798 - DNA, 918 bp, Zea Mays
gctggcactcgtgacatgggcattgggaaggatggggtcttgccatggaagcttcctggtgatcttaaattctttaaagagcttacactaactacatctgatcttgtcaaaaagaatgcagttataatggaaaggaaaacatgggagagcattccagttaagtcaaggccattgcctggtcgtttgaatgtcatacttactcgatctggtacttttgattttgcaacagtagagaatgttgttatctgtggaagtatggagtctgccttagaactgctagcatcaactccatattgcttatcaattgagaaagtgtttgttataggaggcggacaggtactgagagaatatcttaaaggacctgcatgtgaggctatccatctaactgacattcagtcgagcattgagtgtgtcactttcatccctccggttgacttctcagtgttccagccatggtattcatctttcccggtgatagagagcaacattaggcatttgtttgtgtcttttgttcgtgttagaaagtcagtggcagaaactcatgagtcaaatggcaaggaatcaaccgaggttgataccaagaatgacaaatttgaaaaagagaatttctcttttctccccaagatggtatatgaccgccatgaggagtaccaatatctcaatcttgttgaagatattataaggtctggtgctcagaaaaacgacaggacaggaactggaacattgtcaaaatttgggtgtcagatgcggttcaacttaaggaaaaaaattcctctgctgaccacaaagagggtattttggcgtggtgttgtcgaagaactcctttggttcatcagtggctcaacaaatgcaaagctgcaaaaagaaaaaaaagcttccgaacaggccccgggggctgcaattgctcatgctccttag

SEQ ID NO: 122799 - DNA, 789 bp, Zea Mays
gcggtctctcctttctctccctcgcggtgtcttcttcaccgcgcggcgctttcatcttccagccatctctgctcgcctccctgagcttccatcgccgcgcgcccctgcctttcgttggccgcagcttcctcctctccctgccatggccgcgtcctccctccactccagccctgagctcctctcggtgaatccctctaatgccccttttctcgccggtggtgtccgcctcaagctcgtcttcttcgtgcttgcccctgctcaatcgcgccctctactccatcgtcaccaacgtcggccaaagctcggagtccctcccatggcaagctcgccggtcatccctaccccatctcggatcccctccctcatccctttcccagccaagctcctcccctgcggctccctcatggcgcccagaatatcctcccacgcatctccctactagagctcgcgtccacccccaactcggtctctagctcccccttgcgcggctccctggagctaggctcccaccagcggtcgccccatcttcttggccatggtgcttacgcccctcctcggtcctcgacgtcgaacgccgctggctcttgacgcccatggtcgtggatccctccctgctcgaccctgcttctgccccaagcacctccggcgctcttgctcatcttgcggccaccagaaaacaccatcgggacatcgtgcaggtctgcagaagcaatatctggccgcgctctgtgctactctagttcgcgttcatgcctaggctcgagtttgtgtaccacatgttcagcaaaa

SEQ ID NO: 122800 - DNA, 530 bp, Zea Mays
cgcccagctcgcccaagtcacccatggctacgcacggtgttcttgtcgatgccatgccgttgccgatgctgtagagctcgccttgctcctcgcgtcgtcgttcgtcggtctcggatacttgggtctctagctgcgcgttcgtctctagtcctaaccgcattccaaaagctcttttcggttggtcgtgttggccttgctagaatggagctcgccccgcgtacgctcgccaattttcttggtcgcgtctgccgagcttcccagcgctccagctagctgatatcgtcaggtccgattgtcccagctcgtcctggtggccgtcgatttggagctctgcgtggactcggccatgcccaacactatccatgtaactgtcgtacgtctccgcgtcatgtacaacaacatcaccgatcgtgccttcgcatgctttgtcgcgtcgagctctttcccgttgtgactcacgcgctatctattcgtcaatggaatactaatgagcttctcctcgcgacgcagtttttttgtgtcgttgttgc

SEQ ID NO: 122801 - DNA, 789 bp, Zea Mays
gcggtctctcctttctctccctcgcggtgtattcttcactgcgcggcgctttcatcttccagtcgtctctgctcgcctccctgagcttccattgccgcgcgcccctacctttcgttggccgcagcttcctcctctccctaccatggtcgcgtcctccctccactccgtccctgagctcctcttggtgattccctctactgcaccttttctcgccggtggtgtccgcctcaagctcgtcttcttcgtgcttgcccctgctcaatcgcgcccactgctccatcgtcaccagcgtcggccaaagctcggagtccctcccatggcaagctcgccggtcatctctgccccatctcggatcccctccctcatccctttcctagccaagctcctcccctgcggctccctcatggtgcccagaatatcctcccacgcatctccctactggagctcgcgtccacccccaactcagtctccagctcccccttgcgcggctccttggagctaggctcccaccagcggtcgccccatcttcttggccatggtgcttgcgcccctcctcggtcctcgacgtcgaacgccgctggctctcagcgcccatggtcgtggatccctccctgctcgaccctgcttctgccccaagcacctccggcggtcctgctcatcttgttgccaccagaaaacaccaccgggacatcatgcaggtctgcagaagcaatatctggccgcgctctgtgctactctagttcgcgttcatgcctaggctcgagtttgtgtaccacatgttcagcaaaa

SEQ ID NO: 122802 - DNA, 410 bp, Zea Mays
ggtggactttcgaatcgtacttagggatttgcccaaacttccggtgaaggcacctgatctttgctttgggaaagaagggatgtagcagcacggccaccacacttttaaataaaggaaccactgcttaataatgatgttaaacagggagggtgaagtttaggggattattacattctaatcttttatggtagttgaactgtttagtttggtgggctgagttgtctatcttttgtctagtcatgaatgttcatttctaccgttgcaattcgattatactatgtcaattatctttcttttatatcctgtataaactctatgcttcccttgttatgctactttcaaagtaggtgctgccggatttttgcaatactttctttctctatgtgtttgcataagtttttgtagaaaag

SEQ ID NO: 122803 - DNA, 1746 bp, Zea Mays
ggcgagagattattcgttctttgggcacggttgctagtgtagagtatgtaggccgtggagaccttcgtcgtttgccttcgcctatatataatcacctacacaaagatggcgaggatgcaaacagcaccattcggtcgctccagcttttgtgcacgtccactgtgtccctcctcgctacccccgctttttgtgcgcggtggcaacgtgcgacagccgagaggcagaatgacgaagcaagtggtggtggtggacacagctctggtggcgccgagcgaggagacgccgcggcagccgctgtggctgtccaaccttgacctggccgtgccgaggacgcacacgccgctggtctactactacccggcgccgggcacgggctccttcgcgccggaccggctgagggccgcattgggcgccgctctggtgccattctacccacttgccgggcgcctcggcgttggcccggacggccggctgcagatcgagtgcaacagcaagggcgcgctcttcgtcgtcgccaacgcagacctcaccggcgcggacgtcttcgacgactacgagccgtcgtcggagatcaggaacacttttgtgccgttaggggagtccggcgaggcgaacaacagccccatatccatgttccaggtgacttttctcaagtgcggcggcgtggtgctaggaaccgccatccaccacgcggccatggacggcgtgggcgcgttccagtttatgcagacgtggtccggggtggcacgcggcctggacgtggcggaggcgtgcgggccgcagccgttccacgaccggacgctcctgcacgcgcggcgcccgccgtgcccgacatccgaccacttcgtctactccccggcgttcctcagcggccgcccccggccctacgtcacccgcatctactccgtctcgccgaagctcctcgccgacgtcaagtcgcgctgcgcgccaggcgtgtccacctactgcgccgtcaccgcgcacctctggcgctgcgtgtgcgtcgcgcgcgggctagcgccgggcgcggacacccgcctcggcctgccggccaacgtccgccaccgcctgcgccccccgctcccgcgcaccttcttcggcaacgccgtcgtgcgcgaccacgtcaccgcccccgtcagcaccgtcctcggcgcccctctcgggtccgtggcggagaccatcaagaaggcggtggaccgcgtggacgacgccttcgcgcggtcggtgctggactacctggagctgcagaatgcaggcggcaagcagctgagcggccaggctcaggcccaggcgcccagggagcagctcgtaccggcgacggacctgtgggcggtgagctggctggggatggccatgtacgacgccgacttcggctcaggcgcgccgcggttcgtcgcgccggcgcagatgttcggcatcggcacggcgtatatgacgccgcgcggtccggacagggacgacggcatcgccgtgctcatctctctggagcccgagtacctgtcgtgctttgagaaggtcttcttctataacgagtgatgtctcaggtctggagttcaaggatgtgaacgtgtgaatctccgttcgagtagtaagctatttttcctttccctttttttttgtacgtctgagcggtcccaccgagtattctaggtattccttgaaatacttattgttttggtcaaataaataaatatctgccttgcgttattgaagaaagctataagcctataaaacattctcttttat

SEQ ID NO: 122804 - DNA, 111 bp, Zea Mays
aaaatccaagagggctagggagaacccctactgtaaattttgtattaagatgattaattacaagagtgtcgagagctaaatgtatagtctgttacaagggtatcaggatag

SEQ ID NO: 122805 - DNA, 86 bp, Zea Mays
ttttgtttatttttttatatcttctaattaaaagatttaatcatcgaatcgattttatatctttgttcttgacattttagcgaatg

SEQ ID NO: 122806 - DNA, 1744 bp, Zea Mays
gacatgtagactacttcgcattcgtcgtctcacttcactgggaagccgcctgtgcgcgcgccgcgcgtcaagatggagcacagctgcaagttcggcccggacggcggctacgacagcagcagcagcggtggcagcagcccgccggcgtccccgcgctccggaccctcggacagcgacggctccagcagcagcaacgccgacgaggtcgaccgcggcactagccgccaactggtgactgtgtcggagtcgtccgcctgcgtgctgcacgacatcgacaggcaccagcagcgcatgctcgccctcctcccagccttctcccctcccgcaagagccggcgcgcgcgcggacgccttgtctcgctggctcgccgggttcgacgccggctgggttctggacgtgggcgcgttggacgggggccgcgatggtggtggtctcttgtcacggcgggaggtcgggaggagggtcaaggcgtgggtgcaggcgctgagcaccatggagcacgtcttccgccttcgccaccagaagctcaaggccgcgcacgtggtcgctatgggggagttcgcggcggcgagcgccggagcgatgctgaagctggccggcgccgtggccgcgctcgggagctccccgtcgaagctgctcgcgacgctcgacgtgtacgtccctgtatcggaagcgttcccagtcctcgcgaggctcttctcctggggccccgcgcatccggtctcggttgccgtcgagaccgcgctcgcggagctggtggatgcggcccggcgctgcaggcgcgacctcaggtcgtctttcataaggtcgcactacccatggcggatgccacagggtggcgaggtgcacccgtgcgtcggcttctggatgggctactttcgctgtctgctgcgcaaccgcatctccctctacttcatcctcggcggcggcgacgaccacagcgacagcgaagcaccgccgccgcgcgctccagccggcggcctcggcctggtggcggagctcatatcgtgcctggagaccgtgctggaggagaagtctgccgctctagcgtttccggggctgagacaggtgttcatgctcaacaacacgttcgccatcgtgtgccgcgcgatgcgctccgagctcaagctgttgctgccgccggggtgggttcgcgtccgagagcagcgcatggaagcatacatcaatggctacatggacgcgtcgtggaagcccgtcgtgtcgctcttggacggcggcggcaccaggaccaagcctggcgctgctctcgggcgccgaagcaatcggctgagcgcgttcttcacttcgttggagaacgcctgcagcgcccagagatgctggaagattccaaacccggtgatccggggtatccttcggaaaaccgtcactgagaatgtcatgccggtgtatcgccggtacttgcaagaacatccggaggtagaggtggccaaagggcgcaccgcggaggagctggagcagcacttgtcagatttgttcgaagggtagaaggtggtgtgaaatacatttttggctagtttggaaccctatttttccaaggggtttttcatttttccaaggaaaattagttcatttttccttagaaaattgaaaatcccatgaaaaaatagggttgccaaattagctcttaggtttttaattttatttttttctccagcaacggctaatgtatatattttatatttaaattatagagtgtggttcatggaggcacgcaagtgcatcg

SEQ ID NO: 122807 - DNA, 526 bp, Zea Mays
tctcccacgaattgccaaaacaccaggggaacgctcccccgagccgcgaccccgggcaggtttccccatggacggggcatccgaccgcgacgacctcccgccgccaccgcgacgaatctctggcctcccactgccgccgcgacgtccagctttgctctactccaaggtccagctctggcttgccgtcctccgcccgtactccacgctactggatctctagcttgctcgtacgggatctctacgggatctttgtactccacgctactggcttgaggtattcaaactttgcgacactacagagattaaagtggcagtatctctgttttatctttccggaagcctgcatgcggtcaatcaagtcagttcttgcaaatcaaactttgcgacacttcaggcactcctcaagcatttctatgttgttgcaaatgaaaaccagcataagtagtcaaatgatatgttgcttctgttctgtgatttacaccattttaaatgaaacttctggacctgttgggttaattgtcgcgaa

SEQ ID NO: 122808 - DNA, 196 bp, Zea Mays
aaacacttataccttcgtctcaggtctcacaagcctcattgcaacttctgttgttgtgttggtcgcaggaagaacatcagctaataggcccatttgcaattacatgtgtatgtgccatcacagcaataaaggcatcaatatgacccactatttcagtcctacgaagttcatgagtagacgagatgtcatagagtac

SEQ ID NO: 122809 - DNA, 1708 bp, Zea Mays
atggtcgggcgtcgtcgtgttgccttggacttatgcggtgttcggcacaccagcatttcgaaactggctaccggattgagtggtttcattgcgcagaagaggaggacagtgtgcgtgttgaagctgtcggaggtaaggctcggcaacggcgacggctaccagcacggccagtgctggcgcgacgtctacgatgccatatgccaggcccggaggctcatctacatcatcgggtggtccatgttccacaccatccacctggtgcgcgacggccacgatgacatggcactcggcgacctgctcaggaggaagtcgcaggagggcgtgcaggtgctgctgctcgtgtgggacgatcccacgtcccgaagactccttggcatcaagatggaaggttacatgggcacaagggatgaggagacccggagatttttcaagcactcttcagtccagatactgctttgcccacgatctgcagggaagaggcacagctgggtgaagcaacaggaaacaggcactatccttactcatcaccagaagacagtgatcttggatgctgatgctgggaatcatagaaggaagatcgttgctttcatgggaggacttgatctatgtggaggccgatatgatacaccaaagcacactctatttcgaactcttcagacatttcacaaggaagactactacaacccaaattttgcggttgaagatgctcgcggcccaagagaaccatggcatgacttgcattccaagatcgacggtccagaagcatacgatgtcctgaaaaactttgaggagcgctggttaaaggcatcaaagcgcagtgccgctaagaaactgtcaaaattgtcgaggtcgcataatgattcgctgctgtggatcaacaagatacctgatattattgctattgacgacgaaatctattcaaatgacgatgatccagagagatgggacgtgcagattttccgatcaattgattcgaattctgtcaagggttttccaaaagatccacggaaggccactagtaagaatcttgtttgtgggaaaaatgtactgattgatatgagcgtgcatacagcatatgtgaatgccatccgaggtgctcaacatttcatctatattgagaaccagtacttccttggctcttcatttaactgggattcacatagagatgttgattttcgggtacaggatgtctctatgggtagagcaaataagggggacggtgcactccccccttcgtgtgtgttttaatcaccatttctaaaatttattctattgtgatgatgacagtccatcgccgccaagaggtcacaggagaagaactcgcagcccaagtcctcgtggtagttatggaggccatggcaagcgccccacaactaatcttatggtgacgaatcttggtccggattgtaggagttatcaccttcgtgaaccattttggtttattttgtaggattccgactctcatcaagtgactcctcccctcacgatgactttgcggacagatgtctcaattatagtggtggagctacgaacaacaatccgatgtcctgatcgagagcgatggagctaatgtttgaacttgtgtgtttgaccttgtgaactaaaaatgtgaactatggatgtgaacttatatgaatttgtgaacttatgtatttggacttatgtgaatttgtgaacttatgtatttggacttgtgtgaatttgtgat

SEQ ID NO: 122810 - DNA, 848 bp, Zea Mays
cgcgcgcgcatctctctctcaccctgtctcatcctgcgcgcccacacgcgctcctctctcactagcgccaggccgagccgccgccgcgccaccgccgggagcccgcgccgccaccgcgccgtcaccgcgacctagacaaaaacatgtacgcctcgtctgatttgcgtcagggccctcgtctgatttgctccgccgagaagaggaggacagtgtgcgtgttgaagctgtcggaggtaaggctcggcaacggcgacggctaccagcacggccagtgctggcgcgacgtctacgatgccatatgccaggcccggaggctcatctacatcatcgggtggtccatgttccacaccatccacctggtgcgcgacggccacgatgacatggcactcggcgacctgctcaggaggaagtcgcaggagggcgtgcaggtgctgctgctcgtgtgggacgatcccacgtcccgaagactccttggcatcaagatggaaggttacatgggcacaagggatgaggagacccggagatttttcaagcactcttcagtccagatactgctttgcccacgatctgcagggaagaggcacagctgggtgaagcaacaggaaacaggcactatccttactcatcaccagaagacagtgatcttggatgctgatgctgggaatcatagaaggaagatcgttgctttcatgggaggacttgatctatgtggaggccgatatgatacaccaaagcacactctatttcgaactcttcagacatttcacaaggaagactactacaacccaaattttgcggtgagcgtagttttccacatttaccgtatcaaactgaatttactaagaacc

SEQ ID NO: 122811 - DNA, 264 bp, Zea Mays
atgaccagactctgtaacaatatctgcacaacaataccttggcagactctccaagcatcaaacaaagtgaaggctatcaggaggcttagggaactcttgacaaccaaactttctacaggcacatttccagtcaaggtaaactatctggcaccttgattacattacccgtgcttccagcatattacatcttgccatttattctaatcacaatgcatggttcaatccaatcatgagaagtggcaatctgtgaggtttttgcaaggt

SEQ ID NO: 122812 - DNA, 867 bp, Zea Mays
atgctggacttcgggggaaccagctgcatagggtttaggccgtctgagatcgcggccgcagttgcagctgctgtggtcggagaagtggacgttgcaggcattgagaacgcctgcgcccacgtagataaggagagggtgttgcggtgccaggaggcgatccagtccatggcgttccctgtgcctgtgccgcagagccctgtgggggtgctggacgcgggctacctcagctacaagagcgaagacgatgccgcggcagcagcgactgctgcttcacatggggcctctggctcttcaagctcctctccggtgaccagcaaaaggagaaaactcaccagccgatgatgggttgcagtgacctgccaaaccgcgccactcgtctccgtgatgtgtgaagtgcaacgacgctggtgatgtgtgaagtgccttagcggcaaaaagacgggattttgacatgtcgaggggggcaagaagttgatgaataaaggtgtgaggtggacaacacctaaattgctgagctcttctttgcaagcaccggaggaggtagacagccagcacaaacttggtgtgccacaaagggcgcaccattgctttgtaggaacacaaagctggagggagatcgatgagatgatcagaataaagatggtgtagtcctggagtgggccagatcgtaggcaataatatctacaagaactaggcacactgaccagcctatgttggagtatctgataaattgctttagtaggttctagtattctttctttctttagtttcatcctgaagagaatctcggtgaccgagaaatgtatgtgacaaaataagagaagtcgacactgatgattaaactaagagctaacataaggaaaggaa

SEQ ID NO: 122813 - DNA, 444 bp, Zea Mays
ggtggacttctggatcgttcttagggattttgcccgaacttcggtaaaggcacccgatctttgctttgggagaagggatgtagcagcacggccaccacacttttaaataaaggaataactgattattaatgatgttaaacaggaagggtcaagtctagggaattattacattctaatctttcacggtagttgaactgtttagtttggtgggctgagatgactatcttttgtctggtcatgaatgttcttttctaccgttgcatttcgattatactatgtcaattatctttcttttatatcctgtataaactatatgctttccttgttatgctactttcaagggaggtgctgccggatttttgcaatactttctttctctatgtgttgcataagttttgtagaaaggtttcttttggtatcaacccttgtgtgggatcagtgggg

SEQ ID NO: 122814 - DNA, 118 bp, Zea Mays
ctatttcaattttaattcaaaaccaagttgtgacttccaaatttcaaatttagattataaattcaaatatgaatgcaacgtatattttatttaacttctattattattctattctttt

SEQ ID NO: 122815 - DNA, 1167 bp, Zea Mays
ggctcgggtttcacttcgacttcactcatggcggggagcctgagcttctcgtccgcgctgctgctcctgctcaacatggcgagcgcgttgctcgccccttccgctcttccccgcgccccggcctccgtgggcgccaccgccgacggcggggacggggacatcgacttcttcttcttcccgttcctagtcttctacaagagcggccgcgtccagcgcttcatgggcacggacaccgtgccggcctccacggaccccgccaccggcgtggactccagggacgtcgtcgtcgacgccgccgcgggcctcgccgtgcgcctttacctgcctagtctcgccaccaactgtacgggcacgacagtgacggacgacgacggctgtggaaggggaagactgccgctgctcgtgttctaccacggcggcgcgttcgtcacggagtcggccttctcgccgacgtaccacaggtacctgaacgcgctggtgtccagggcccgagtgctcgccctgtccgtcgagtaccacctcgctcccgagcaccgcctcccgacggggtacgacgacgcgtgggcggcgctccgatgggcgctcactaacgcgaggtccgggcccgatccctggctgtggcgccacgccgacctggcgcggctgttcctggccggcgacagcgccggcggcaacatcgcacacaacgtggccctgcgcgcaggccaggagggcctggatggcggcgccaccgtccggggcctcgcgctgctggacccctacttctgggggaagcgccctgtgccgtcggagacgagcgacgaggacacgcggcgttggcacgagcggacgtggagcttcgtgtgcggcgggcgctacgggatcgaccacccggtgatcaacccggtggccatgccgcgggaggagtggcagcggctcgcgtgcgcgcgcgtgctggtcaccgtagcggggctggacatgctcagcgcgaggggccgtgcgtacgtccacgcgctcaaggcaagcgagtggcgcggcgacgcggagctgtacgagacgcccggcgaatatcacgtctacttcctggacaagccagacagcgagaaggcggcgaaggagatggacgttgtagtgaacttcatcaatggcggtcaagtgaacaaaccagcttcaagaatgctcacctga

SEQ ID NO: 122816 - DNA, 421 bp, Zea Mays
aagctctgcaaggtgagctctgttcagtttggccagagaggcatcccctacctgaacacctacgatggccgcaccatctgctaccccgacccgctcatcaaggccaacgacaccatcaagatcgatatggagaccaacaagaacacaagggcagcttcgagaccatgcacgtgctgctttgagctttttgctatgtctagttttctcctatttgttgtacaggaaaacatagaatggaattcaaatttggtggccgcaaaagtgtggagacttgaattcatataaagttaggcttaacataagtgcaaacagttgtattttagtttagatttagagtacacttatgtatgcgttgtttgacaatgcttattatgatatattaaatggtacttatttatattatattaattataatgttgtt

SEQ ID NO: 122817 - DNA, 2600 bp, Zea Mays
gctcagtgatgtgctaggcggggtagcgtgcggatgactgcgggtgacggcactgaggcaggtgatggtggtgggtgagggcgttcacagattaagcagaggcgaagacgatccaagaagtggagccctatctctatcaaacgtggtgtaaggaaacctgtacgtaacccttccaaacgggcagctggacgtgtttttttatcggtggaccgcccgtccggtttcggtgttcccaaaagaagcgcataatttgatcatggataggttctcgtaacaaaatgttttttttctggattccgaaggaaaaaggacgaacagagaacccgtgttttaacttttttgtttacacacccgccgtacagtgatgtatgctgtagtaccaccatcctttcctctagagttcaaaaatctactgatctagaggcgggccggcctcccatgccgccaccgccgcctccaggaccacctcaccagcgccgtcgccgcggcgcttcttcgcagcttcgccctctggccgtgggatatggtccagtcacggcggcgcagcggcaactaccgttgcccgcgccgcgccgcactgccggcggcagcgctcctgctcttcctcctcgccgccgtcgcgctgctctacgtctccccgccgccgctcgcagaccaccccgtgctcgcttcctcccgccgccgccgctcggcccataccttgctgaacagctccggcgccggtagcatggaggagttcgagcgccgcgagatttcccgtgctccgacgaatggttcggccgtcagggatgacctttggggttcaaagcttgctagcaaattttatgggtgcagcaactcaagcagcaggtttcttgactcaaatattactacccaaccagagcgctatttgatgattgttacaagtggaggcctgaatcaacagagaacagggataatcgatgctgttgttgctgcacgcattttaaatgccacacttgttgttcccaaactagaccaagcatccttctggaaagattcaagcaatttttcggatattttttacgccgactggttcatctcatctctatcaaaggatgtaaagattgtgaaagagcttccacatataggaggtaaacttcgggctcctcacagaatgcgtgttccccgaaaatgtactgagcggtgttacttgaaccgtgttttgcctgcacttcttaagaaacatgttattcggttgacgaagtttgattatagattagcaaataggttgcaaactgacttgcaaaagttgagatgtagagtcaactatcatgcattgagatttactgctccaatacaagagatgggtgaaaagctaatacaaagaatgagggagaggagcatgtattttattgctcttcatttgagattcgaacctgatatgcttgccttttcggggtgctattacggtggtggagagaaagagaggagagaacttggtgctataaggaagaggtggaaaggcttgcatcctaacccagagaaaggaagaaggcaaggtagatgccctctaactcctgaagaggtgggtttgatgttgagagcgctgggctacagaaaggatgtccacatttatgtagcttctggagagatatatggaggtgcaaggactctggcacctcttaaagctctcttccctaatctccacacaaaagaaacaatatctagcaaagaggagctggctccattctctaaatattcttctcgcatggctgcacttgatttcattgtctgtgatgaaagtgatgcttttgtggctaacaacaacggcaacatggctaaaattttggctggacgaaggagatactttgggcacaagagaacgatccgaccaaatgccaaaaggctctatcccttatttttgaacagaggaaacatgtcgtgggatgcattctcctcaaaagtacacatggttcagaaaggatttatgggagagcccaaagagctgaggccagggaggggagagtttcatgagaacccttctacctgcatttgtgaaaggactgatggcaaagcagtagccagagccaaatctcaagatgatcaagtattgaatagtgttgctgaccaaggcaaaggcattggcgagccagctgttcccaatcatacggatgaagaggcgggcgaacctgatgatgacgaagatgtccctgctgacaaagaggttgttgacgctgaaatggttgacgatgtattggccggggatcctgagttagaacagattctttcagactagtatccatcatcagagatgtttgcacaaaccaatttttggccgagtgattgatgaattttgccacgtccctcgaaattgtacatactttttttttgcgatgtaaatgtacgtatacatccaatctactctagcttagctcgcagcctccttacacagtagctcttttgtaacgtttgtggattgttatagcttgtatcatgggttttgctttttgtgtagcaactctttgacgccctttttgtgtaagcatcttttggcatgtaggatgtgaggtgcttaagcacggataattaaggagagaacgttgttataccattttcataaatgagttacttgcctagat

SEQ ID NO: 122818 - DNA, 1443 bp, Zea Mays
cagcaacatcaacatgcagcagaggtagaaattgggtggcagacggtaatgagccatggattgaacgtatacagcagttctcaaagacaaggaaaattaaccccatatgaagctgacagtagtgtcctatccttatacaactcaagtctgaaccatagtgggcataaatggttcacaagctaaagtacagcttcctgaaaaatcaggaaaaaaaaacagtggaaaatggaggccgcttcagatcagcatactctgcaaggtcgtgcaacttgcctagtcgatcttcacagacgaataaatcaatcttgtgaaccagaagcaagcgcaaaagccgatcgtaccggtgagcacacagaaggcaaacgaggcaagaagcatgtaaccaaagtatagtatccccgacaccaccttggtgatctgcagcttagtgaagaagtagaaccccgcatacaggaagaggtagattgcagatgatcctgatgtgagataggacctccaccaccacatgtagtcctcgctgcacagttggaaatagcacagcacgatcgtgatctccgcacaggtgatgatgaggataatgaacaccaggaagagaaagccaaagatgtagtagaactggtgaagccagattgatgtcaggatgaagaagagctcaatgaaaactgctccgaacggaagaataccaccaataagaatggtgaaggcagggttcatgtaccaagcctgctcggggacctgtctggggatcttgtttgtcttcaccggagcctcgatggcaggttgcttgaaacccagatagctcccaacaaatacaagaggaaccgagataccaaaccaaaggaggaccaaggcaaacattgtggtgaaaggaacagcaccagacgacttctccccccatataagagcattcagaatgaagaaaataccgaaagcaatcccgggaaacaggaaagcggtccttagggtgatgctcttccattctgatcctttgaacatcttatataggcgtgaagaagcatagccagcgaacaaccccatcaagacccaagtgagcagcatggcagtcatcagtcctccccggtttgatggcgaaagaaaacccaaaacagcaaaaatcatggttactagcagcataccaaagaactgaacaccagtcccaacacagacacagagtaaatcagagtttgcaggaggtcggaatacatctccatgaacaagcttccaccctgtctcctcttgggcttcttcttcagtttcaagctgattgtatctagagatatctctatacagggtgcggagcataatcatggccaccatcccagataagaagagtacgatcatgagagagttcacaatagaaaaccagtgaatttgatcatctgtcattaacaggtatgtgtcccagcgagaagcccacttgacatcactctcctgcaaagaaat

SEQ ID NO: 122819 - DNA, 2393 bp, Zea Mays
ttgccatcttcctgccgagctccctgcgcgtgctgccgcaagaccctctgcccggccaccgtcgagctccctggctcgcctggccgcgcccctgcttcccctccctagccgtgcgtcttccctgctcgccgagcttggtttgcgcccaacttccagcgccgcagtcgtcctctctgctctccacgcgcggagctctccccccagctcctccctgccgcgttcctgctcggcgcccatctccatgtgctctgtgcgcgcgcgcccatatcccctgctcctccggcgtcgcggcttcccagcttctgccagccggccgagctctctcgccaagaccccatccgaagctccctggcttgactctgcccagttcgtgccctgctcgcctctgcgtcgcgcgctctccctgctatctcccatggcgctctctccccgctcggcctccggctccggcactgtgccgagctccctggccatcgcgcccatgtcggccagagcttgctcggccgcggtctcgtcccggctccctgctgcgcttgtcctggcagccgcgcccagccgaagcccctttcctgcgagctcctccctgctagccgcaagctaccgagctcctatctcccgtgcgcgcgcccctggccgcatcgctggccctcggacccggccatcgtttgccgcttaaccactggcgaattaatttttagctcctctcgcgcagctctctagagctaagctcctcaccggctgtcgctcccaatcttcagctcaccgactgaccgtcgtgttccttgttttgcctcgtcggccgacctcgccgcgactaagttcgtccatcgtgctatgtgcctcggtctctggtcgagggacatcggtgccctctgccccttgctcacctccctggtcatgctcgccgggacattattctctagccaactgtcgctgtgagctctcctagacatctcacctccccgtcgcatcatgcgctattccccagcaacgtgtgtacgccaagtccgtgtagcccgttgccacaccttgtagctgcttccacgacgttatcgtggggacttctttacgtcacgagtgcttctgctcatcgcgttaaaccaatctgtttccattatgtcgtcatcaaaccgtgaagatgctcttgtgctggccacgcaccaccagctcgacaaaatgcatcccctgagtatctagtaaaaaacgagattatgtgcatcgctcgtcaggtgtgtgcggtcaaagacgtcaagcgaaaaccattgtcgttcttccgactatcgtgtcagatcggtcatggtaagatgatctattattcctgctagctaaattgttgaatgtggtgattttcttgatttagcatatgtgtgttgaaatcaagattttagatgtgattcatatgaaaggtaagggtagacacatctaaattatgtgaccaaattaataataaaaaattataggactagtgtttctaaggtctggcagatagatgttgattaaattgctttggatttatttcgtcgatgcttgaagtagatcttaagtaaaatccgagaatttcataatggccagtgtacataagtactctcgatatttaagttgttgagaatgtagttttatcaaacgctatattatttgataatgttttatccgttagagcgaatagtgtaatgtcctatttaattagtatgtaattcaaattaatctaaaaacctgatttaaaaggttagttaaattattcctgcatgtactataactcagggtgtccaataataggagtttgaatattgttagtctttcggtgttatgcgctatctaaggaaaatataggactcgtacaaggtttagggtttcttgatgtatgagctacctccgactagactggaatagcgtaattattataattagtcctataccgttagctagtatttgcttaatgctttattataagtctttcatcctctttggtgtagattatttgtcttatgctattcctatgtacattcatacatgtgcatcatgcatctcattaggtacggtagttgatcacgtgatgcggaagacaagaactgagtcgaccccaagatgacgtaactagtggactactccgcatagtgaagctgatggacgaacctgaagatggataatctgaacgagtgccaacacaaaaaactagtcgccaagtgatcgacgtctaacaaacacaaacctagtgttatccaggcaagccccggtgcatttgccacctccttgctgttttaaaatcttttatcactttgtttgatgcattaggtgatatgagttgtgtgctaaacaattgatgcatttccttccatagaaaattgattacccttccttgatacccttttatgaaaaggatttttatgatgctt

SEQ ID NO: 122820 - DNA, 869 bp, Zea Mays
ataccactgccgccgtctcttggtgccttcgttgccgccgcagcctagcctgcctctccgtcatttccaaagaccagaccagagagatccgaacctgagagggaggggggaaatttggagccctcgggggggtctaaattgcagcggatttgcgcgggtgaggtgggaatcggggctcggatccggcgagtaggagcggaggggccgagatctatgcgcggagggggaggaggaccgggctgaggaggaggaggaggggagttgcaggggcccaatggaggaggaggaggcggaatcgtcctctgcggcggtcctggtgctagcgctggtggcgctcgtcctggtgccggcgatagtgctgttggtgcggagccactggcgccgggccgcggcgcggagggaggaggtgcgtcgcctcgcgcggctggcggccgaggagtccgagctggcggagcgggagtccgtgctggcctactactccgagctgttcccgggcgtcgtgcacgctgcggaggtgcccgaggcgcccgagtggggcctgccgccggtggtcgtggcggcggctcaaggcccggtgcaggaggagttcgacgcgcagccgcagccgccggtcggggcaaagggggtctgtgcggtgtgcttcaaacagaccacgttcaggtgcaagcagtgcaaggccgtcaagtactggtgagtgggttgaatccgtggcttcgctgccccttatttcatctccagactccagtttgtcatccagtattccagtgactggggaactgtgggaaggtactccgtgatttgtacaatttggagtggagtggtcctgtatttggtttggtaattccaccaaatttacactctccaccaaa

SEQ ID NO: 122821 - DNA, 835 bp, Zea Mays
ctacgtcgatcccgtggaatacgtgacatttgttacaggttcctcgggattatatcaccaagttggggattcaacttttatggactacgacatctctcttctctttttacacaatgcagcgagataatattacaggctacattacattatttctctacagcccaaaccctgcacatcaataaaatgtttgagcggtcctgtccctagatggtcttctcaataagacaccgcccctggtttctccagggtcatgtccgctcccatctaactgcctatattggtctgttaacttactgctcaactgctgattacttctgtcagtatacaacaaggacgtgctctcatcgccctcaacctgcccaccggaaccgacgacctgatgcttgtggtcggcagagctagccgcactgtatgcatcccggcctgatgagctggtattcaagctggacctggatcgggaatacgtagaatagtcactctccacaggtgctcctcccatggggcctcctgggtacatctgatcagcagctccgaacacatactcatactcctcggtgctggtcgagttcctcgtgctctcgctgctatcggtgcttacagtgctgtgcgaccctgcatcagagttgctaaagagggatgaactctcactaggactcggagaatctgaaggcgaatatggtgcattcctatattcgtcaaatgcatgggtaaggtcatctgccgtgtggttgctatgccgctgaccatcttggtgcctgttgaaagaacctcctcgccatgttgttcctcctggaaccaccttctgtttggccttcttcgggcgtgctgggtccga

SEQ ID NO: 122822 - DNA, 1612 bp, Zea Mays
gtcaactacataacccaacgactcttctgtaccagagccggacctcctaaccgcacacagtcgaacattgttgcttgctcggcccagatctccaatggccgccgcacccgtcgctccgccgctagcctccacggacgacgagatcgtctacgagtccatgccctgcattcgcgtctacaagaaacgcgtggagcgctacttcggtaccgagttcgtcgccgcctccacggacgccgccaccggcgtcgcctccagggacgtcgtcatctcccccaacgtctccgcgcgcctctacctcccccgcctcgacgacgagagcgccaagctccccatcttcgtctactaccacgggggcggcttctgcctcggttccgctttcaaccccaccttccactcctacttcaacagcttcgcgggccttgccaacgttctcgtcgtctccgtcgagtaccgcctggcccccgagcaccccgtccccgccgcctacgccgattcctgggaagcgctagcctgggtcgtgtcccaccttgccgccgccggcgacaacgtccgggacccatggatcgcgggccacgccgacttctcccgcctctacctgggcggtgagagtgcgggctccaacatcgcgcaccacatggcgatgcgcgttgcagcggagggcctggcccacgacgcccggatccagggcctcgtcatggtccacccctacttcctgggcaccgacaaggtgccctccgacgacatcagcctggaggtgcgcgagagcctgggatccctatggcgcgtcatgtgcccgaccaccacgggggaggacgacccgctcatcaaccccttcgtggacggcgccccgccgctggcttctctggcgtgcggccgcgtgctcgtgtgcatcggcgagggcgacgtgctccgcgaccgcggccgcgcctactacgaccggctcagggccagcggatggcccggcgaggcagagatttggcaggcgcccaacaagggacacacgttccacctcctggagccgtgctgcgacgaggccgtcgcgcaggacaaggtcatcagcgacttcctcaaccgctgactcgcatcgccggtgatggcggcgttgttgggcttggatcaaatttagcttcgttcattgtatacctggagattggaataactgcagcttcgtcaccggtgaagaatgctggcgctacactacactcctactagtacgtttcaggttcaaagttgtgtttgtattatttgaaattgggtctaaggatgaagggggctttgccattgttagtaatttgggtacgatgatacagtcatatgtcatacacatgaaattatacttgttagacacacgtaatttgttgaaacatttattccatctttcactacttacaagtacaactgaaatgaaaatcgcctcattattatttgtagcagctattgctcttggaaccacttctcaacttgggcagaaatgtcagctgaacttgccaattctcgggcacaaaatttggaaacattgattgcatccttttactggtatataactgaaaatcaggcctttaatatttgtagcagctattgttcttgattatttcttaatttggggagaaat

SEQ ID NO: 122823 - DNA, 1988 bp, Zea Mays
gtccatctttgtagccgcgatttccgtgctcggcttctccctcccgctatctctatctctgcgcgcgagctcgcccctgctcgccctgctctcccatggccgcgcccaactccgtgcgctcgccggatcccctgctcggcttcgactgccgttccccgtgctcgcgttatctccctcctctctgccgcagctcgctgagtccctctgtttcctcccatggcgcggggttccctgcaggctgctcgcggcacccatctcctctgctcgaccgcgagctcgctccctggtcatgccgctccctcgcctaatcgtggtcgcgcgcgcgtgtgccttctcttggtggtgctcgaccccggcctcaggcagccacgtccgtggtcgtcgggcatgctagccgtcgtggctccccttgtgcgctgtccttgctgctcgctctgcgcgcacggtcctctgtcccctgcgcgtagccggtttctcggttcgccgtggagcctgcgcgctcggttctgtccagttcgtgtcctgctcggccgtccgcgcgacacgtcatccatggccgctgtccgtcgtcgagtccctacgtgcgcaccagctccctgtgtcgcgttccattcacctaaaccggagttcgccagtcgtccctgcttgtcgctgtgctgctgctttagtttgaatctcgcccaagtcgctgccatggttgtacggtgtttggcccgcgccgattcgcgttcgctcatatcgccatcatagtgttgtcgctggtgatagcttcgcgtgcgtgtcaaactcctgcgtcgagtctttttcctgctcgccggtgcgccctctcggctcgcttggccttaattctcatcgcgtcatcgattccgctggtcagcgtcgttcgtcatcgtgtcgcgtgtgtagctctatatacgtcaccctcctgtgtcgtcgtcgttccatgcgtcatcaagaaattccaagaatcgagtgaaaacgaagccagcagcgtgatattcaccaagtgcgcgaccaaaaagctcggacatcctgcgcgactcaagttcaattcgtcgaaattattcaatcgaagaaaagatcttcagcaattaattaccgaagaaaagaaggctcctggatgacatcaaccggaacccgtagtcgtgcttgcgactatcgcgtcgaattagtaagggtaagttggttcgtattcccattaactaggtctataaatagattaaatagaattattggtcacaataaatattattaatttagcatgcgtatattgtgatgattgatttagatagctcgctaaatcaactaattaagttacacagtttagagagttaataaaaagcttagaataaaaatagattttctagtgtaatatgtcaatttgattaatggatatagtcgatgtcctgctgtgatatccatggtgcttaatgcttggttttaagtgtttcatgctttttagcgtagattatctatattatactcgttatacatgtgctcatacatgtgcatcatgcatctcatgaggtacgataaataatcgcgtgatgcggaagaagaaccaagccgaccccaagcgtgggctaatctgcaagctgaagctgatgaatcaacctgaagacggttaaatcaagcaagtgctcggtcgaaggatactcgtcaagcggacgtcacctaacaacactaacctagtgttactcaggctctcggtttgcgtgaacctgatctggtcttaagaaccccggtggcgggttgacatatgcaagggttaagtgctacatatgtcatgtgattggagatcctcagctgagtataatcaattcggatcgccgtaccttcgcggttatgaagacttggtcacttccctgcaacctaagtcaggatgtgaacattatgaataaaaaggatgttgtattgatgagatgatgaaattagactagatgcaaacagtgtctattaatattcaatctggcgttaaaatattgaaa

SEQ ID NO: 122824 - DNA, 1024 bp, Zea Mays
gtccatctttgtagccgcgatttccgtgctcggcttctccctcccgctatctctatctctgcgcgcgagctcgcccctgctcgccctgctctcccatggccgcgcccaactccgtgcgctcgccggatcccctgctcggcttcgactgccgttccccgtgctcgcgttatctccctcctctctgccgcagctcgctgagtccctctgtttcctcccatggcacggggttccctgcaggctgctcgcggcacccatctcctctgctcgaccgcgagctcgctccctggtcatgccgctccctcgcctaatcgtggtcgcgcgcgcgtgtgccttctcttggtggtgctcgactccggcctcaggcagccacgtccgttgtcgtcgggcatgctagccgtcgtggctccccttgtgcgctgtccttgctgctcgctctgcgcgcacggtcctctgtcccctgcgcgtagccggtttctcggttcgccgtggagcctgcgcgctcagttctgtccagttcgtgtcctgctcggccgtccgcgcgacacgtcatccatggccgctgtccgtcgtcgagtccctacgtgcgcaccagctccctgtgtcgcgttccattcacctaaaccggagttcgccagtcgtccctgcttgtcggtgtgctgctgctctagtttggatcttgcccaagtcgctgccatggttgtacggtgtttggcccgcgccgattcgcgttcgctcatatcgccatcatagtgttgtcgttggtgatagcttcgcgtgcgtgtcaaactcctgcgtcgagtctttttcctgctcgccggtgcgccctctcggctcgcttggccttaattctcatcgcgtcatcgattccgctggtcagcgtcgttcgtcatcgtgtcgcgtgtgtagctctatatacgtcaccctcctgtgtcgtcgtcgttccgtgcgtcatcaagaaattccaagaatcgagtgaagacgaagccagcagcgtgatattcaccaagtgcgcgaccaaaaagct

SEQ ID NO: 122825 - DNA, 1189 bp, Zea Mays
gcccaaacctaatggcgctggcagcctctagccctctacacgccgtccctcctgctcctgctctccacacgccgccggagaaacgcggcggaacgcccagcacgggctgcacggcaggtcggcactcggtagcacatccctcccggtggtccggccctccgccgtcccagcacgacagcacttccggcgaccaggtcctaggctcccagcgtccggcggtcccagcagtccagcacgacagtgacagcacttcgggaccacggctccgcgcgttctgctgtgcaggttctagcctctgccgtgctcactgcctctgcctctgccgttctgctgtgcaggtcacctccgcgcgttctcccaggctcactgcctctgccgtgcaggttctagcgttctgctgtccacggctccgcgcgtccaggaggatgtgtattccaagttttggtattccaagtttactgccttgttggtattcaaagttaaatgtacccctctggtcacaaaaaagtgttttggacagggtttggtcaaaaccgtaaaaactacgaacatcagtaactaaattatttaggtgaagcatgtaagttatctatctttgttcgaaataattgcaagcataaatttgaaggatattaagaaattaatggtaaaaagatatgcattgaagtaaaatgtgacaagtatttttacctggaggaagtattactttatgtaagccgttaaatgctaacaatataatttgacatgttttattcagggagggaaaatcctttttggaggatctgccattgaatcagaaggaaactttgtgcaaccaacaattgtggaaattacacgttctgcaccagttgtgaaagaagaactctttggtcctgtcctttatgttatgaaatttcagaccttgaaggaagcaattgaaatcaataactctgttcctcaaggattgagcagttttatatttacaaagtggccagatattatttttaagtggctcgggccccatggtagtgattgtggtatagtgaatgtgaacatacctactaatggtgctgaaattggtggagcatttggtggagaaaaagcagctggtggtggacgagaagcagggagtgattcctggaagcagtacatgaggagggcgacttggagggaggtcctagaggtagtaagtcacttgtttactccatga

SEQ ID NO: 122826 - DNA, 111 bp, Zea Mays
accttggcttgtcatgcacatataatggggagaattgcccaaaccctaattcaaacccctttggactagtggagcactagaagtaagtatgatcaaaaggctatgaaaacc

SEQ ID NO: 122827 - DNA, 773 bp, Zea Mays
atggatccccttgggatcccttaccaccaaattagcctgaaccgggttcattctcccctactcccacattccagcgtcgagagcagcaagttggctgtccacgatatgggaggccgatgcaggcggtactgcatctcacgaattggagccccgtccactctcttggacagccgagtcatggtcctcgttgacgggcgtcgtcctagatctactgccgtcatcgacgatgtctggaccaccaccacctcaagcaccgtcgtcgccgtcgaggaacctcagccggagcatcagcgtcatcggagttaggataaggtgaagtaccttggagtagaaggagagatgactcatgttctccgtgggatttgtttgttagttgctcgattattatttacttggaacacttttctagaatttttctcacaccgtatgttctcagaacaatctattctacttttgtgagtgttgtaatgaaactgaactagttgttgagattggtaattttgttgagtgaaaaagaaagaatgataggtagttatgttctatgttgggggtatgcttcgtagccgaagatcctaaagaaagataacaccttcggaagattctcttaggagcatgtgccgaagctattacctatagagcttcggcacaatgacagatctcaagacgaaggatcgaaccaacttaaagatggattgacttaaagacccatgatgttttgtgtcattattgtagtcgattgtaaagggcataaatgtaattttacataggttgca

SEQ ID NO: 122828 - DNA, 797 bp, Zea Mays
atggatccccttgggatcccttaccaccaaattagcctgaaccgggttcattctcccctactcccacattccagcgtcgagagcagcaagttggctgtccacgatatgggaggccgatgcaggcggtactgcatctcacgaattggagccccgtccactctcttggacagccgagtcatggtcctcgttgacgggcgtcgtcctagatctactgccgtcatcgacgatgtctggaccaccaccacctcaagcaccgtcgtcgccgtcgaggaacctcagccggagcatcagcgtcatcggagttaggataaggcaagcgcccgccaccccgtcctagatctggtcttctccaccactcccctccagccaccaccgcttggtgaaactagtgtccgctgccctggaaaatgttcaagtttgttagtgatgatttattggttagggctgagtggtaatctcaaatctgagtgctccgatctgcttgttgctcagacctggttcgctagtatcgacaaagcacagatcaaataatctaacatgtgaagtcgattgttttgtgaaatcagagcacttcgatctgcatggttgatggttacaacattgatcgaggtctttatttgcatatattagttgtcatacttgtgattattctagtgatttttattgttgagtatgcactcaatcccctgctgttcatgctaattatttcaattcctccatcggacaagagcaatttactgtaaaatgatgaatttttatagtgcataatttgttttcagaacatgataacaatacat

SEQ ID NO: 122829 - DNA, 129 bp, Zea Mays
cgtacattattctcaggtatacattgttttcgtaatttcggttaatgtgtcatttattatttactatatagttattagtaaataagtagttactatttatttattatttagtaagttcctcgcccgccc

SEQ ID NO: 122830 - DNA, 364 bp, Zea Mays
gagctctctctctcacgctctcctctctctctccctgaccgcaccgagctctctatgccgctgttcgcccacatctcgccaccgtgccagcacctcgccggacgttcccgaccgccgccgctgattccgttccattcgaagcccctatacgtgttgttgctcgcgccgactcgtccttggacttcgctcaccgtcgttcaaccaagcccggagttctttgtgccgcacgcgttgctcgttagaaatcgctgacgacaaccacgccatcgcctcttccccgctctgtacctgttgtacgccatgaccaaggtagaagacgatgtctattttacaatctacccctaaggactacggttaataacaa

SEQ ID NO: 122831 - DNA, 1533 bp, Zea Mays
gcgccttctggaaccttctttgaaccatctgccttaaccactttgtcctctctctctgctcttgcaggcacggtgtatcgccgacgtgcgcgcggacgccagctcgaccaccttcctcgccgggaccctcagcctcaaggaggagaacgaggtgcacctgatccggctttcgccggcggagagtgagctggtgtgcgatggagtcttctaccaccccaacgagatctgggatctcaaatcatgtcccttcgatcacagggtcttctccacagtctacacatctggtgagggctttggtgcgtcagtttggaagatcccagagcttaatgggcaatcaaactcaccgcagcttgagcagctctttgagcttagtgggcatacgggcaagattagacgtgtgatctggtggccacttggaaagcatgataaactaattagcattgatgaccgaaatatttttctttggaacgtagacatgtcaaataaatcagctaaggtgatctcacagggatcagctgacatgcttccaaatttgagtggtggggcttgggatccacacaatcataattcaattgcttcaatatctgattcatcacttcatttgtgggatctacgttctatggaaaaatcatctgcaattgaacatgcacatatacgggatgtggattataaccccaagaagcaacacattattgcaacaacagaagatgactttggaatttgcttgtgggatctcagaatgcttaagcttcctctgaaagacctccctgggcactcacattggacatgggctattcagcacaatcctgagtatgatgagctgcttctgagtgctggaacagattcaactgtaaatttatggttggctaaagttagcaacaatgattctgaacctaatagcccttctggttcacccaatagacaagaagaaccattacttaactcatatactgactatgaagacagcatctatggtattgcatggagctcccatgatccatcattattcgcttctttgtcctatgatggaagggttgtcttggaatcagtcaagccctacttgcagagaaaatgaatcttgctggtctaacttttggattgtaagcaatggcagaaaaaacataataaggatgttgcagaaatcatcctgcttgacatcaggtcttcaaccctcttgattgaagccagcaatggctccaaaacactcagatctagcttcagttgagatattacagcacagttgagattgtcagcagtttcctttcctgtatcttcaaattttgtccactaggatttcatgttcagttgctagaaatttggctgtgaagatctgatctgtatgttaataactgttgcccatctgtctgaaatagttttctatacttgattcttaggatgttgtatatttgaaaagtgttcacaaaaagatattgcggtatatgatgaggtggagttggactgaatttgtaaaaccattcagaatttcaaattcccaggattagcttgttttatgaaatattctgttgcgcattg

SEQ ID NO: 122832 - DNA, 1622 bp, Zea Mays
gcgacatctaaaggagtgtggaaggcggctgccttgtccgcccggcctcttccgtctcggagcgagaaatcagcggcatcgccgcgcgcatccgaagcgcacacgacaatgcagggcggatccagcggcatcgtctatggtggcctcaagtaccaggcacggtgtatcgccgacgtgcgcgcggacgccagctcgaccaccttcctcgccgggaccctcagcctcaaggaggagaacgaggtgcacctgatccggctttcgccggcggagagtgagctggtgtgcgatggagtcttctaccaccccaacgagatctgggatctcaaatcatgtcccttcgatcacagggtcttctccacagtctacacatctggtgagggctttggtgcgtcagtttggaagatcccagagcttaatgggcaatcaaactcaccgcagcttgagcagctctttgagcttagtgggcatacgggcaagattagacgtgtgatctggtggccacttggaaagcatgataaactaattagcattgatgaccgaaatatttttctttggaacgtagacatgtcaaataaatcagctaaggtgatctcacagggatcagctgacatgcttccaaatttgagtggtggggcttgggatccacacaatcataattcaattgcttcaatatctgattcatcacttcatttgtgggatctacgttctatggaaaaatcatctgcaattgaacatgcacatatacgggatgtggattataaccccaagaagcaacacattattgcaacaacagaagatgactttggaatttgcttgtgggatctcagaatgcttaagcttcctctgaaagacctccctgggcactcacattggacatgggctattcagcacaatcctgagtatgatgagctgcttctgagtgctggaacagattcaactgtaaatttatggttggctaaagttagcaacaatgattctgaacctaatagcccttctggttcacccaatagacaagaagaaccattacttaactcatatactgactatgaagacagcatctatggtattgcatggagctcccatgatccatcattattcgcttctttgtcctatgatggaagggttgtcttggaatcagtcaagccctacttgcagagaaaatgaatcttgctggtctaacttttggattgtaagcaatggcagaaaaaacataataaggatgttgcagaaatcatcctgcttgacatcaggtcttcaaccctcttgattgaagccagcaatggctccaaaacactcagatctagcttcagttgagatattacagcacagttgagattgtcagcagtttcctttcctgtatcttcaaattttgtccactaggatttcatgttcagttgctagaaatttggctgtgaagatctgatctgtatgttaataactgttgcccatctgtctgaaatagttttctatacttgattcttaggatgttgtatatttgaaaagtgttcacaaaaagatattgcggtatatgatgaggtggagttggactgaatttgtaaaaccattcagaatttcaaattcccaggattagcttgttttatgaaatattctgttgcgcattg

SEQ ID NO: 122833 - DNA, 1504 bp, Zea Mays
cttgtccgcccggcctcttccgtctcggagcgagaaatcagcggcatcgccgcgcgcatccgaagcgcacacgacaatgcagggcggatccagcggcatcgtctatggtggcctcaagtaccaggcacggtgtatcgccgacgtgcgcgcggacgccagctcgaccaccttcctcgccgggaccctcagcctcaaggaggagaacgaggtgcacctgatccggctttcgccggcggagagtgagctggtgtgcgatggagtcttctaccaccccaacgagatctgggatctcaaatcatgtcccttcgatcacagggtcttctccacagtctacacatctggtgagggctttggtgcgtcagtttggaagatcccagagcttaatgggcaatcaaactcaccgcagcttgagcagctctttgagcttagtgggcatacgggcaagattagacgtgtgatctggtggccacttggaaagcatgataaactaattagcattgatgaccgaaatatttttctttggaacgtagacatgtcaaataaatcagctaaggtgatctcacagggatcagctgacatgcttccaaatttgagtggtggggcttgggatccacacaatcataattcaattgcttcaatatctgattcatcacttcatttgtgggatctacgttctatggaaaaatcatctgcaattgaacatgcacatatacgggatgtggattataaccccaagaagcaacacattattgcaacaacagaagatgactttggaatttgcttgtgggatctcagaatgcttaagcttcctctgaaagacctccctgggcactcacattggacatgggctattcagcacaatcctgagtatgatgagctgcttctgcccttctggttcacccaatagacaagaagaaccattacttaactcatatactgactatgaagacagcatctatggtattgcatggagctcccatgatccatcattattcgcttctttgtcctatgatggaagggttgtcttggaatcagtcaagccctacttgcagagaaaatgaatcttgctggtctaacttttggattgtaagcaatggcagaaaaaacataataaggatgttgcagaaatcatcctgcttgacatcaggtcttcaaccctcttgattgaagccagcaatggctccaaaacactcagatctagcttcagttgagatattacagcacagttgagattgtcagcagtttcctttcctgtatcttcaaattttgtccactaggatttcatgttcagttgctagaaatttggctgtgaagatctgatctgtatgttaataactgttgcccatctgtctgaaatagttttctatacttgattcttaggatgttgtatatttgaaaagtgttcacaaaaagatattgcggtatatgatgaggtggagttggactgaatttgtaaaaccattcagaatttcaaattcccaggattagcttgttttatgaaata

SEQ ID NO: 122834 - DNA, 1658 bp, Zea Mays
ctttgaaccatctgccttaaccactttgtcctctctctctgctcttgcaggcacggtgtatcgccgacgtgcgcgcggacgccagctcgaccaccttcctcgccgggaccctcagcctcaaggaggagaacgaggtgcacctgatccggctttcgccggcggagagtgagctggtgtgcgatggagtcttctaccaccccaacgagatctgggatctcaaatcatgtcccttcgatcacagggtcttctccacagtctacacatctggtgagggctttggtgcgtcagtttggaagatcccagagcttaatgggcaatcaaactcaccgcagcttgagcagctctttgagcttagtgggcatacgggcaagattagacgtgtgatctggtggccacttggaaagcatgataaactaattagcattgatgaccgaaatatttttctttggaacgtagacatgtcaaataaatcagctaaggtgatctcacagggatcagctgacatgcttccaaatttgagtggtggggcttgggatccacacaatcataattcaattgcttcaatatctgattcatcacttcatttgtgggatctacgttctatggaaaaatcatctgcaattgaacatgcacatatacgggatgtggattataaccccaagaagcaacacattatttaatcggttatacgcttcaggcaacaacagaagatgactttggaatttgcttgtgggatctcagaatgcttaagcttcctctgaaagacctccctgggcactcacattggacatgggctattcagcacaatcctgagtatgatgagctgcttctgagtgctggaacagattcaactgtaaatttatggttggctaaagttagcaacaatgattctgaacctaatagcccttctggttcacccaatagacaagaagaaccattacttaactcatatactgactatgaagacagcatctatggtattgcatggagctcccatgatccatcattattcgcttctttgtcctatgatggaagggttgtcttggaatcagtcaagccctacttgcagagaaaatgaatcttgctggtctaacttttggattgtaaggtgtaggatatgattcctcatttcctttatcttgtccttattgccaaagttatctcatgtcctaataaactgttctctgtccctgcagcctacaggcttgcttgttgtttatatttgatgcgttatagttttgccttatattctgtaccctcttgacaaccatttatgtgatgatgtgttttactgttgtagcaatggcagaaaaaacataataaggatgttgcagaaatcatcctgcttgacatcaggtcttcaaccctcttgattgaagccagcaatggctccaaaacactcagatctagcttcagttgagatattacagcacagttgagattgtcagcagtttcctttcctgtatcttcaaattttgtccactaggatttcatgttcagttgctagaaatttggctgtgaagatctgatctgtatgttaataactgttgcccatctgtctgaaatagttttctatacttgattcttaggatgttgtatatttgaaaagtgttcacaaaaagatattgcggtatatgatgaggtggagttggactgaa

SEQ ID NO: 122835 - DNA, 1509 bp, Zea Mays
tccgcccggcctcttccgtctcggagcgagaaatcagcggcatcgccgcgcgcatccgaagcgcacacgacaatgcagggcggatccagcggcatcgtctatggtggcctcaagtaccaggcacggtgtatcgccgacgtgcgcgcggacgccagctcgaccaccttcctcgccgggaccctcagcctcaaggaggagaacgaggtgcacctgatccggctttcgccggcggagagtgagctggtgtgcgatggagtcttctaccaccccaacgagatctgggatctcaaatcatgtcccttcgatcacagggtcttctccacagtctacacatctggtgagggctttggtgcgtcagtttggaagatcccagagcttaatgggcaatcaaactcaccgcagcttgagcagctctttgagcttagtgggcatacgggcaagattagacgtgtgatctggtggccacttggaaagcatgataaactaattagcattgatgaccgaaatatttttctttggaacgtagacatgtcaaataaatcagctaaggtgatctcacagggatcagctgacatgcttccaaatttgagtggtggggcttgggatccacacaatcataattcaattgcttcaatatctgattcatcacttcatttgtgggatctacgttctatggaaaaatcatctgcaattgaacatgcacatatacgggatgtggattataaccccaagaagcaacacattattgcaacaacagaagatgactttggaatttgcttgtgggatctcagaatgcttaagcttcctctgaaagacctccctgggcactcacattggacatgggctattcagcacaatcctgagtatgatgagctgcttctgagtgctggaacagattcaactgtaaatttatggttggctaaagttagcaacaatgattctgaacctaatagcccttctggttcacccaatagacaagaagaaccattacttaactcatatactgactatgaagacagcatctatggtattgcatggagctcccatgatccatcattattcgcttctttgtcctatgatggaagggttgtcttggaatcagtcaagccctacttgcagagaaaatgaatcttgctggtctaacttttggattcaatggcagaaaaaacataataaggatgttgcagaaatcatcctgcttgacatcaggtcttcaaccctcttgattgaagccagcaatggctccaaaacactcagatctagcttcagttgagatattacagcacagttgagattgtcagcagtttcctttcctgtatcttcaaattttgtccactaggatttcatgttcagttgctagaaatttggctgtgaagatctgatctgtatgttaataactgttgcccatctgtctgaaatagttttctatacttgattcttaggatgttgtatatttgaaaagtgttcacaaaaagatattgcggtatatgatgaggtggagttggactg

SEQ ID NO: 122836 - DNA, 911 bp, Zea Mays
ctgccaaagcgtagttctgcgacatctaaaggagtgtggaaggcggctgccttgtccgcccggcctcttccgtctcggagcgagaaatcagcggcatcgccgcgcgcatccgaagcgcacacgacaatgcagggcggatccagcggcatcgtctatggtggcctcaagtaccaggcacggtgtatcgccgacgtgcgcgcggacgccagctcgaccaccttcctcgccgggaccctcagcctcaaggaggagaacgaggtgcacctgatccggctttcgccggcggagagtgagctggtgtgcgatggagtcttctaccaccccaacgagatctgggatctcaaatcatgtcccttcgatcacagggtcttctccacagtctacacatctggtgagggctttggtgcgtcagtttggaagatcccagagcttaatgggcaatcaaactcaccgcagcttgagcagctctttgagcttagtgggcatacgggcaagattagacggtggactcctgtttctgttggtttttggctgctctagagatatttgatctacttactgtactaaattctcatatgttttgaatttgagactttgtgtccaacatttgttggatgaaatgcaactctgtggttaatgttccttcctgacccacatggtgtttatttgtagttacttgatgattgtggccgcacttgtgtgactgcattacttgttcttgcatcacttgttcactagtcactacacatgaacattgagataagagtatagttactaagaaagatgcaataaatgttctgtcctgtcttccatgctgcacctgtttcacattacaccagcacgttttaaacaatatacaaggattatgtcccacagtgctcatgaaggacataatggatgagaatatttta

SEQ ID NO: 122837 - DNA, 874 bp, Zea Mays
ctgccaaagcgtagttctgcgacatctaaaggagtgtggaaggcggctgccttgtccgcccggcctcttccgtctcggagcgagaaatcagcggcatcgccgcgcgcatccgaagcgcacacgacaatgcagggcggatccagcggcatcgtctatggtggcctcaagtaccaggcacggtgtatcgccgacgtgcgcgcggacgccagctcgaccaccttcctcgccgggaccctcagcctcaaggaggagaacgagtaggtgcacctgatccggctttcgccggcggagagtgagctggtgtgcgatggagtcttctaccaccccaacgagatctgggatctcaaatcatgtcccttcgatcacagggtcttctccacagtctacacatctggtgagggctttggtgcgtcagtttggaagatcccagagcttaatgggcaatcaaactcaccgcagcttgagcagctctttgagcttagtgggcatacgggcaagattagacggtggactcctgtttctgttggtttttggctgctctagagatatttgatctacttactgtactaaattctcatatgttttgaatttgagactttgtgtccaacatttgttggatgaaatgcaactctgtggttaatgttccttcctgacccacatggtgtttatttgtagttacttgatgattgtggccgcacttgtgtgactgcattacttgttcttgcatcacttgttcactagtcactacacatgaacattgagataagagtatagttactaagaaagatgcaataaatgttctgtcctgtcttccatgctgcacctgtttcacattacaccagcacgttttaaacaatatacaaggattatgtcc

SEQ ID NO: 122838 - DNA, 571 bp, Zea Mays
cccaaggtccattggacaaggagaactgtaggtgggcctaatgacttaggaggttccgtcacatccttgctccgtgaaacgctcatttgccttcaagttgtttccagtccttcgacatgcacctcaccgatatataaaaatatcgtaatgtcaagtaataataataataataataataataataataataaaaaaattaaaaagccactgcaagtagcctcaaaaagtaacttccatgataaattatgagcaccaaaaattagttcaacataagcggttcatgatgtgaattacattagaattgatgcaggttacaactgagacctaacgactacatcaaagcggcactcaattatgccaaccaaccgtatcaggtacaaatcgcaagagcatctgtttgtccaaactaaaaaagttacattggcatctaacaggcttccatagatatatagatagaataagtcagacccaacaaaaacttgtcatgtgcaaaaaaccataaatcaaccccatttgtaaataaacctcttttttctcacttaattaagcagcagagctcttgccttttcca

SEQ ID NO: 122839 - DNA, 472 bp, Zea Mays
aacatcagagtgtttataacatagcggaagacattgaaaaataaaagataaatataacaggatctaaaatccatccttggcgccagaaagtgaactgggagacgccacctagatcgaatcgaactcctcgatacttggctccacttgaaccacctattcttctccagtgtagcgtagagacctacccatgccaaggcgtcaactatgatggaggaagaaagccgacgatgaagtcctcgaacaggtggtggtggtgtcgcggtccgtgccgactgcggctccacaacgaaggacttgctctgatgatcctcacaccgagcacgagtctgcagcgagaccacacatgtgccggcgacgtccagagcaacaccacgaggatggaatggctacatagagaaaatttaccggtggcggctccaggtagttccttgcctctctctcctatctctcgcgttccccggcagctgcacgc

SEQ ID NO: 122840 - DNA, 2436 bp, Zea Mays
atggctagatcgttcaacatttgtccgcagatcgacccattggtggtcacgcgcgtccccggcgtggccctcgacatgctgttcctcgtaatcatccaagcgcttgccgtcatcctcctcgccaagttcatccacctcttcctccaacgctacaactagccgagcgcagtctctcagatcctcgccggagttgcggtgggcggcatgggcctgcgcaacgccatcctgcacgtggacgtggacgacgtcgaggacatgtacggcggctacatcaccgtggcgcgcgtcgtgtacatgttcctcgtcggcctcgacctggacctcgccgcgctgcggaactccacgcgccggtgcgtcgccctggcctacgcgaccgtggccgccagcctgctcgtggccgccatcgtgtccagcgggatgtacggcagcatgatgcactccccagtgaagacgcccgagctgctcgccgccactctcatgctggcgctcaccaacacctcatccatcaccatctcgcgaatcgccggcgagctcaacctcacagtgacggagaatggccggctcctcgttgccgcggccatcatcacgaacctcatctgcgtcgtcggcgacagcgtcctgtcgtccacggcactggccaaggagaagagccaggacctgtaccatacctcgccccagatcaagaagggcttcctggagctcgccgtggcaggcgtcgctgtgtggcaggtgcgccccgttgtgacgcgcatcaaccagcgcaacgttgggcagcaccacgtcaggagccgcgacctggtgatcatactcctgggcatctggttcatcagcaacatacagcaactgttgggtttcgcgctggggatggcgttcccgagggaaggccccgccgcgcgttccgtcgccgacgcgcttatgccccccatcaacggcttggtcctgcccttctacttcgctaccaccgggatgaggctcgactacaactccatgtccggcgcgatcatcgtgaccggcctgctactgatgctgctcggcctggtggcgaaggccatcggcgccacggccgcctccacgtacctcaacatcccaatctccgacgcgctccgctacagcgtactgctcaacgtcaagggccacgtcgacaccatgaacatgaagttcaccaaatcggaaggggtgtgggcggagcaggcgctgtacgcgatgatcatcggcaaccttatcagcaccatcatcaccgggctggccgccgccgcggttctgaggagggaaaaggaagagtacaagacaaggcaccaagccatggaatcgttgagcgcagagaaagagctgcgcatgctcgtctgcgcccacagcgcgcatgccgcacccggcgtcctcagcctagtcgagctcctggtgatcacgccccacgagcagccggtcgtgccagtcctccatttcttcgaggccccccgagaccgatccgcaaggacgccgtatcaccagcggacgcggggtgacgaaggcgccaaggataaagacggccccgatcccgttacgcagatgaacatggtggtcgacgtgttcttcaagacgacgggcatctccttccgccagatcgacgtggtgagccttggcgcgtctagggacgcggccgtcgcctgccgtggcgcggaggaagcgcacgccagcctgctactcctcccctgctacaaggagcagcggttcgacggcaagatggcgtgctgcctcgaggagcggtggaagctgaaccacgacgtgctggagcgggcgccctgcaccgttgggctcctcgtggaccgcccgtactgtggcggcggcactagcttccaaacgcccatcgacattgcctcggagaccgggaggacgctggtgcatccgtgcagcgaccgtacggtgacccacgtgatagcggccgtgttcctgggcgggcccgacgaccgcgaggcggtgtcgttcgcgtgccggcttgccgagcacccggccatcgggctgacggtgttccgtttcgtgaagcgcagcacgtacgacaccgtgatgtcctccacctcacgcgccgccgcggcggtggcggccggcggcgacgagcttgacgtgccgttcaaggaaggccacgtggacgagcggttcctgtggcggttctacgagaactacgcgtcgcgagagctggccatgtacatggagaaggtggtggagagccccgcggacgtggtagagacgctagaagggatggccggaatgttctcgctggtggtgctggggcggggcggtcggcagccggtggagctgatggccgggctggagtggtggtcggaggccggcagcgaaatagggcctgtgggagagatcctggcgtcccacgagtcgctagagatgggctccgtgctcgtcatgcagcagcacacggtggcgctctcgccgccatgccaatga

SEQ ID NO: 122841 - DNA, 458 bp, Zea Mays
atcctttttccctgaatcgttctgcgcaaaagaaaaaaagggctcaggaagcaccaccgccatcgggagcaattgagagctgagtgagctagtggtgggcgaggtgtgaaattgcggtcgccgacggtgtggccctttccctcctctattctgcgcccagaatcaattccggggtcttgtgcgcgctgaatcgtagatcccagaagcctgtgcaccaccgtcagtcgtctcatccgctgcacctttcctcgccatagctgggcaggttgaaggttccgccgccagggaggttggagaggagtacctgatgcgcgcgtttcggttcctggagctgtgggcgacgggaggagcagcaattactcgtcgtagctccatcgccgtcgcggatccacgggtcaccacggacggggattctagcgcatcattagtcgtgaagtcacgaggatctaaagaatcat

SEQ ID NO: 122842 - DNA, 1113 bp, Zea Mays
tctgctgtgccatctgttgtaccacgactaaaccacagctccaccgtcaggtcttcttcccctttcgtgtcctctcctgcgcgcgcaccgacaagtgaacgagcgagcgagcgagcatcatggacatggaggcggccgcgatctccgggaccgccagcgcgtcgtcgtccacgtcgcggcgcggcaggagcatctcccgcctgccagcgcgcgtcgccggcgcggtgatccgcggcctggtcaccttcgtcttcgcggcagtgggcatggtcctcggggccgtcacgggcgcgctgatcgggctcgccacggagagcggcctggtgcgcggcgccggcatcgggtccatctccggcgccgtcgtgtccatggaagttgtcgattcctccgtcgccatctggcgctccgacgagtccgggatctggagcgtcctatacgtgctcgatgtcctctggagcctgctgaccggccgcctggtgcgagagaaggtggacccggccgtgcaaagcgccgtcgacagtcagatgaacaccgcggactcgcaggacatggcgccgacactggcggacatgttcgagacgggcgccgccgacgccaagggcatgccggccgccgccgtcgcggcgctccccatcatggccttcaccgagcacaccgtcgccgacgcctccggggagcccatcggctgctccgtctgccttcaggacttcgaggcaggcgagacggcgcggagcttgccggagtgcgggcacacgttccacctgccgtgcatcgacgtctggctgctccggcacgcctcgtgcccactgtgtcgtcgcgcggtctaagccggtgcgcacacttttcgttaggatgtctttgggcaaccgtgagccgatgcgcgtgcacacgtgtcccagaccaggagcagagtattgtagggtagtaggagtgcaggacacctggttctttcttgcataccttgattatttttttcttcttttttctacgtcttgggcacgcatgtacagatacagtacgtggctcacattgtctcacacactatgtggatgtaaatatgtatagggtaaatgttgtaaacaatgtaatatacttgtacattgagatttcttt

SEQ ID NO: 122843 - DNA, 100 bp, Zea Mays
tcggatgtcaattataatcccttgattatcagcctcgcgcattattcttctcagacactgcgtgattcaaattattttgccccgaacattttagtcgtcg

SEQ ID NO: 122844 - DNA, 285 bp, Zea Mays
atgggaagggaagagagagctctgctgggcgccatgggagctgagggagaaaatacggagttccagttggacgccaggaagaagaccgagctaggaaccgcggaggaagtccagggcgcgctgagggcgggggccgagcagggccgaacgccatgggaagggagaaacgccggctggagaaggggctggatgcggctagaaaacatcagaggaggcgcgcgcggaagagaagataaggagagggagacgtcgtggaaaaaaatctgcaggggagacgacggctaa

SEQ ID NO: 122845 - DNA, 345 bp, Zea Mays
atggccggcaaatcgcgcgcatcagcgaagcctagcagcagcggccagcttccacgacagggaaggggggcggcaagctggagcgagttgggcaccgagctggagcaagcgcacggtcggctaggagcaagcagggagcagggcgcggctgggtgcagaggcgagggtggccagtgccatggaagaagcagagggactcggcaagctggagcaccgcggctgacgacgcggacgagccgcacggccgggagggcacgcatcagggagccggcatgggctgaggcaagcaccggggcaagccagggagctctgcgagctggagacagatgctcgcagctgggataa

SEQ ID NO: 122846 - DNA, 318 bp, Zea Mays
tgtgtattgtaaggagaaagaggacaattcaaactagaaaatcaaatacccaaggtagaaggaatcaagagaatgaatgctatgatcctgggaaactggaccgtgtggaagcaccgcaacaatattgtgctcaatggagcattggagctaaccctagtgtagagcttgtcctcaggcagattttagagcaggtcatgtctgggaaactggaagcagggtttgaaatcggtggacactctgatcctaggaaacttgaagcggggtttgaagtttgaacccactgatcactctaggtgcatgaaccgtacaagggcaggc

SEQ ID NO: 122847 - DNA, 2257 bp, Zea Mays
aaaccttccctcttcaccttctcctctcctgtctcgtcttccgttgaagagaggcatgcgctcgggcggcggttgggtgcttcatcatcgtacgtagctgcctgccaaggcgcatcttatctttagaaggcgacgaggaggagaagggcagggagaggaggtgtgtgtgcgcgcgcgcactgtgcagtgatggaagcggcgggggacgaggtggtgcgggcgctcggtgccgggtttgacctcacgtccgacttccgtatgcggtttgccaaggccagcgaggggcggcgcctggtggagctcggcgaggagacaagggacgtgccgctcccgggcggcggcggggcaacgctccgcgcggtgccgcgcgacgtcggcgtcgacaagggagaccgcatccgctttcgctccgacgtactcgagttcaaccagatgtcagaattgcttaatcagaaatcttcagtccaagggaaagttccttcaggctattttaatgctctctttgaattaagtggagcttggttgactgatgccaaagagaccaagcatctagcattcgacggatatttcatttctttgtacaacttgcatctaaaggcttctccattagttcttcgagatgaagtaaaaaaggctgttccatcgaagtgggatcctattgcattatcatggtttataaagaattatgggacacatataattgttgaaatgggaatcggaggtcaggatgtcatatgtgttaaacaaagtcattcttcaaccatttcaactgtggatcttaagttgcacctggaggaccttggcgatttcttgttttctgatgggaagaaccactctccaatacatcgcaagacaaaggatggcaagagcaaggtgcctgatgtttttgtaaggatagtgcagcaaccaaataacctgcacctttctagctactctgaaacatcaaccaaggatggcctgacagttacatgttcgaagaggggaggagaagcatacctacccaaccactccaagtggctgcaaacagtggcaaagaaacctgatgccattatgtttaaatttgtccccatcacctctcttctaactggtattcctggtagtggttacctcagccatgccatcaatctatatcttcgctataaacctgatcttcaagacttgcaatatttcttggagtttcaagtgcctctacaatgggcacctatgtttaacgagcttgtccttgggccccaaaagaggaaaagctcttatccttcaatgcagttcagatttctcggccccagactccaagtcagcacttctcaggtatctagttctcagaaaccggtggttggcctacggctatacctggagggcaggaagtgcaaccggttggccatccatgtccagcacctgtccagtgttccaagcatgattggagactccgtggcatcttcaatgtcagaatggcgcgagtcccaagacagcgacccggggtacgtcgaggccatccagtggaagaagtactcgtgcgtctgcacctccgtcgtcaagtacaacccggagtggcacaagagagctcccggcggagtctttatcgtcactggcgcgcagctcgtcacgaagggggcctggtccaagaaggtcctccatctgcgcctcctctacacccacatccccaactgcaccatccagaggaccgaatggacgaacgctccggcggcgtctcagaaggggagcttcctgacgacgatcagcacgacactgagctccccgttcacgcagcgtgacacccaccaggggaagcatgagccggtgcagctgaactcaggtgtctaccccgacggaccgccggtcccgctccggtccaggaagctcctcaagttcgtcgacatttcggaggtggtaaaagggccacacgacgtcccaggccactggctggtgatcgcggcgaagcttgtgaaagagagaaggaagatcgggatccatgttaagtttgcactgctgggctatgaaggcctgtcgcagaatgatagtttcatgggttgagtctgtacataacaacagctggctgatcttcgtagatttcaggattttagaaaaaagcataggatgaggatttgttattagttttttttttgggagggtcgacaggaagtgtatagagggcagtcagactcacagtaaaaccaatcacggctgtgttgagttgttccgtgaattagagaccatacttgtaaattacttcttttttaaatcacttcggttaagttactct

SEQ ID NO: 122848 - DNA, 1052 bp, Zea Mays
actcttctctgcgccttaccagaaggcggacacaatcgtcgttcccttgcgacctcaccgtctggctgcctctgcctggagtaggaagacctccgcactaagcaaagtagcaaagccagagcccgatcggatcgatggcggcggtgccccgcgcttccagcttcttctcgatgctactcgtcctcctctcattgctgtcggtggagcgcgcggccgccaccggcctcttccaggtgcgccgcaagttcccgcgccacggaggcggggacgtggtggagcaccgcctcgcggcgcttttgaggcacgacatgggccgcaacggccggctccttggtgccgttgacttgccccttggcggcgtcgggctccccaccgcgaccggcctgtactacacgcggattgagatcggctcgccgcccaagggctactacgtgcaggtggacaccggcagcgatatcctttgggtgaacggcatcagctgcgacggctgccccaccaggagcggcctcgggatagagctgacgcagtacgactcggccggcagcgggaccacggtggggtgcgaacaagagttctgcgttgccaacagcgcggcgagcggcgtgccccccgcgtgcccctcggcggcgtcgccgtgccagttcaggatcacctacggagatgggagctccacgaccggcttctacgtcacagatttcgtgcagtacaatcaggtgtccggcaatggccagaccaccccgtccaacgtcagcatcacgtttgggtgtggtgcgcagcttggtggggatctgggatcgtcgagccaggcgcttgatgggattcttgggttcggccagtcggatgcgtcgatgctgtcgcagctggctgctgcttgtaaagtgaggaagatttttgctcactgcttggacactgtgcgtggtggtggtatcttcgctattggcaatgtggtacagccccccatagtgaagacgacgccgttggtgcccaacgcgcgctttagtttgtttgattttccctgccatggcttatcagccggaactcttggtagttag

SEQ ID NO: 122849 - DNA, 246 bp, Zea Mays
atggaggagtggaagttgttgtatgggtctcgcgaccgctttaccaccgcgaaccctctgtgcacctgctcctccgtcgttgacaccaccatggttgaggtgatcgacaacaatggagatcgacttggttcggccgacaggtcacggcacaaggaggcaacaaacaagtccctgtcaatggcgccattcacggccagcagtgcgcggctggaggagccttggtcgtcgcctacaggagatgagtag

SEQ ID NO: 122850 - DNA, 764 bp, Zea Mays
aggcatatctttagtgtagccccagatggaaagtattcagctaaaatagcttacaagggcctcttcctgggttcctgctcatttggccactataagcgggtttggaaaacttgggctccagcaaaatgtcgtttcttcctctggctggtggctcataacaggtgctggactgctgacagattggaaaaaagggggctcattcatccaagcacctgtccattatgtgaccaagaacctgaatccattaaccacctactggtctcatgtgtgtttgcaaggagcttctggtataatctgcttagaaaatttgggttggataaccttgctccccaaccgggcctaacatcctttttggaatggtgggagacagcttctgaaacagttcatggaatgatcaagaacggattgagctctctgatctctttgggggcctggatgatctggaatcaccgtaatagatgtgtgtttgatggtcaaactcccagtctcccatctatccttcggcaggcggacgacgagagaagactttgggaattagctggggccaagggtctctcctttttggcagcccctttgccggatggctgaccccccctggtctccttcatctctagtagtgtttttgagtccggtttccatggattctttcgtttatgtgcgttactggcctccgtaaggagtcattgctgtaatctgtggtctattttagaccttattatctccttcttaatatatttaaggcgcagttcccctgcgctttcgag

SEQ ID NO: 122851 - DNA, 106 bp, Zea Mays
cccaattattactcttgtgctcgccaaaacagcgtgctggaggataaattgggtcataacctcgcgtgcacgattttactcagacgacgcgcgatcctaattaatt

SEQ ID NO: 122852 - DNA, 1352 bp, Zea Mays
atggcagcatcaaggagggaccatcagcagaacgctagtctcaaccggggcatccagaatatattcccagggctcaaacccagtgagtctggccaagggctacggcgtgcaaggtccgtcccaacctctcctggtcgcagattatccccccatcccccgcctcaatctcatccaacacctgtcgacccacatcatcattcaacagtcggacgacctcatcccggtccacatctagctcagcctcttcaagtcacagcaagacactgtactctgcttcgtccatggctgctggtgcaaggcagggaaacacagtgagaagaaaagcagaaaggcctggtgccacatctgtgtggcctccagcccttgcagttccaagcacctcgtctaaggatatcaccagagcaacgaaatcaccatccaccatgcagaagagtaataatctctctacaaggcccggcattgagaaggcggcggcagcgtcttctgtaaagctgaaatctcagaaaacagtagtaggacctgaaaaaactcaagctgcagcttcgactcgtgctcctggcgctataacaaagaaaagaatgggagccgagaattatgtctccatccagaggacaacaagtgtgccggtaagacaaacagagacaccgaaaatggtggaacgagacgttgagttgttgatagagtttgatgagacggagagcataagcacctcttccatagaggagcacttgcatgaacgactccctgaccctgttgatatgaaatctgcggatctcaatagcaagacatcctcttgtccggaggaacacaagaatcgagacaacacagggggcattttgggggagaaacagggtggaaaggacaatgaagacctcagcacaggcgacagtgcttctgctggaaacagaaacagtgatacaaacatccctaaagaagcagtcgatgaatctgagttggaggaagctgttgatggacctgggtcgaataaagatgcctgtgcatctgagctaaatgaaactgtaggtcggactgaactaaacgaagctgtcagtgaaaccgaaccaaaggaagctaaagatgaagccaagctaatacaagttgactgtgaaattgtactaaaagaagctgccagtggaactgagttaagagatgattttattgaacatgagttgatagcgcaagaaaataccaaaactaaggagaacataaccatggaattagcacagaagtggaggaaggatgaaaggaggagcaatgaagctacagaggagggcaggggcaaacctatccacgagaggaagaacaaggtaatggccttggtggggagatttgagactgccatgtctggctga

SEQ ID NO: 122853 - DNA, 508 bp, Zea Mays
acaggtggggccaacgcatggtttcgcttttgacttcttctctgttgaacggcacgcgcggcaagcggttctgccggccaggggaagggggcgcggtaggggtttcggcctagggagcggagcgtggagggtgctggagatggccacgcctgctcggctgctcctgcaggggccgcgcagggcccttgccgctgggggctggccggggaggctcggctggggccgaccgccgcgcgcgccgcgctggctgtgcaggcaggctgccgcgccgactggccgccggggcctcgatcatgggaacgcagagaggggcatggaagagagggagaagaaggggattcctcacctgcgcacgacgaacgacggaccaagcgcgcaaggaagacggcgattttggacggatgctccggggagtccggacacaggctcctactgcacggacgtcgatggcgagacgagggtgctgcttgacgcggcaaacggcgagccggtcgctgggcggttatag

SEQ ID NO: 122854 - DNA, 432 bp, Zea Mays
gttttagagaaagcaatattctaacatggcatggtcctaccttgctttcttatttgtctgtgttgtctcctgcatgttctacacaaaatctttgtatgcccacaatctttgtattctaacatcgataagtgcccaaaatctttgtatgcttctaaacagacctttggtattgttgtacacattggattcaataccacttctgttgtccccgtaagtaattgtccatatttatattattaagggttttcaattatttacagtgtgttcccatgcgtttggtgaacattagccatgctgtttggcatatacatcttttagctgcacttatcgatgtcatttacatttcaccattttgataatatgttttctacaatctttcaaggtagggtaatgtataagaaatgtgttgaaactgtggggcaagatgccctt

SEQ ID NO: 122855 - DNA, 447 bp, Zea Mays
atgactcggcttctaagcattggcaaagaccgccagcacttggaggaggccaagcacatgaagacgagctccacaaacattacaagcaacaacaactttgcatcctttaagccacttggccttactcttgaggtggccaaggacttggccaaaaagctttgtttggctaccaaggctaggaactcggccctagttgagaaggttaagttaagccaacataatgacgagctgaagaaatctttggctaagttcaagagggatctcaacaaagagaaggccaccaatgaaatcatgtccaagaagctaaaactggccataaaggataaagacatggatgaggaacaattatctaagagcaaagaatatttcaagttgtataaccgcttggaggcgatactggatcaactatacaactctgatgatgcaaaagagtggtcgatcccatag

SEQ ID NO: 122856 - DNA, 2277 bp, Zea Mays
tatttactaattttagagtcttttaatcaagaccaactttaatgctacatctgcattcaggtatacttttttttgctgctgggaactgcctcaacttcatgtcatttgcttatgctgcacaggttcttttcgttgtcctcgagacctcaaaagaaaaattagtttaacatgtaggatgtaatataatatgggaaactcatgaatggttgtgtaaacatgtaaagaataaaactctcatggagactgtatttgcgccctgtatttgcgccctgtttttttccattagttcttgggggtaaaaagataagagcttatcagtcatacagtttccatctctccttgtttcttagagctaataatgccatccaatcatattttcttttctctttctagcccagtgttttggtttgaacattgattatttacttgctatattacagtcactacttgcagctcttggatcaatccagtttgtgtccaacattgcttttgcctactttgttttgaacaagactatttcagtgaagtatgtatgattctcactttctggtagctggaatgaaaattacaataactacatggaatcatgtgactatgaagcttctgctattctttccagagtcatggtagccacaacatttatagtctttggcaacatcttcttagtatcctttggcaaccatcaatcacctgtttacacgccggagcagctgatagcaaaatacagcaatttggtgtttgttctttattgcatgtcattggtctttgttgttgcatttaaccactatctctacaggagtggagaaactattatttcaaatagttcaaaaaatgctggcacatattggcgaacaatgttgccattttcttatgctgttgtatctggtgctattgggtcttgctcagtcttgtttgcaaagtcattgtaggttatattttattttgtaaacatccatgcatctaggatgctgattctttcagatttatttggtgctgactgccatgtgttatccccactccttcctgttccctgtctaggtctaacatgatgaggctgactatgaacagcagatacgagtttcatagctggttcacatactcaattgttcttctgtttctgtgtaccgctggattttgggtatggctaacctaatgcgttgttcatgaggctactctgctgctcttatttgtctaattcaactccatatgccctatgtgacagatgggaagattgaatgaagggttgtcattatttgatgcaatactgattgttccaatgtttcaaattgcttggaccttcttctctatctgtacaggatttgtttactttcaagaatatcaagtaggttcctgtttgagataatgggataatgaaaagtgaatcatgcattgcttaattagaaactgggtattctgtttttcctctgtcaggtatttgatacgctcaggataattatggttgtattgggcatgacatttgtctttgttgggatctccttgctagcacccgatgacactaaaggtttgtaaaaggttgattttcatgtgctttcacacagaagattttgactcttggacaattgtcaccagctgatacgaaagatggttcgagcactgccgaggaatctataattgatatggacaggttctattccacgaaattgtagaaaatttcatgttttgctctgatgcattctttgttcagtatcacattcagtgttgtgatatgtaacttggacactgcagaaatggaaagatgcagatggaggagacagacacagatgatagcaactcgtttgtcacttctgtaaaagcaaaagcaaaacgtgtactgttgaaggcaaagtctgcatgctccatgtcccttggccttggggaggacacaataagcgcttcgtccgtgcttgccatgcctatggtctcatcaagaacaaccggcttcagaggaattgaagatgaccgttcaaagtacgttcctttaagaaccacagattggagtaatctttagcggacggtgatatatagatacacagcaaaggtctttacttttgatgttgcatagcgggtggcagtaaagtattttgttgctccagaggctattgtttgttgtaatcatagttagctgtaacacgagtgtatagttcaacgtttctcccttcaaaacactgtccatagccagctgcatagtacatttgtaagttttagaatacagatcaaatgattcaattcgcttcttatttgctcaaccactcctacggttgcatgtgctgtgatcat

SEQ ID NO: 122857 - DNA, 1891 bp, Zea Mays
ctcccgagatctcctcccttcccccccttcttctctcccttgccgacgattacgccaggtgcccaggtcttcttcgggccgaggtcgctgccgccatacacttggtgcccaggtcttctccgggcccttcgccagcgtcgagcagcaccaggctgagctccacagtggttcttggagaggtctgtgatagactactaggctgaatacctcatggaatcttggagagaaaaggggatcttggagaggtttgtgacacactactgtggtgaatagacctatgcagaagagaaaaagggaaagagagaatgttctcaatgaattgaagtccctatgtcaaaaacaagagcaaggagctgttgtacaagtggcttgtggaaggagcatatcatatatttgtaggagataactttacacttgattcatgggcgactggattataggggcgttgataaacatcgtggggagtgttggcataaactttggtaccaaccttctgaagttgggccatgatcagagagaaaagctttccttaattaacaacagcgagggaaatgaaaaattcgttccaaagtctgtaatgcatttccagacttggagaatagtcactacttgcagctcttggatcaatccagtttgtgtccaacattgcttttgcctactttgttttgaacaagactatttcagtgaaagtcatggtagccacaacatttatagtctttggcaacatcttcttagtatcctttggcaaccatcaatcacctgtttacacgccggagcagctgatagcaaaatacagcaatttggtgtttgttctttattgcatgtcattggtctttgttgttgcatttaaccactatctctacaggagtggagaaactattatttcaaatagttcaaaaaatgctggcacatattggcgaacaatgttgccattttcttatgctgttgtatctggtgctattgggtcttgctcagtcttgtttgcaaagtcattgtctaacatgatgaggctgactatgaacagcagatacgagtttcatagctggttcacatactcaattgttcttctgtttctgtgtaccgctggattttggatgggaagattgaatgaagggttgtcattatttgatgcaatactgattgttccaatgtttcaaattgcttggaccttcttctctatctgtacaggatttgtttactttcaagaatatcaagtatttgatacgctcaggataattatggttgtattgggcatgacatttgtctttgttgggatctccttgctagcacccgatgacactaaagctgatacgaaagatggttcgagcactgccgaggaatctataattgatatggacagaaatggaaagatgcagatggaggagacagacacagatgatagcaactcgtttgtcacttctgtaaaagcaaaagcaaaacgtgtactgttgaaggcaaagtctgcatgctccatgtcccttggccttggggaggacacaataagcgcttcgtccgtgcttgccatgcctatggtctcatcaagaacaaccggcttcagaggaattgaagatgaccgttcaaagtacgttcctttaagaaccacagattggagtaatctttagcggacggtgatatatagatacacagcaaaggtctttacttttgatgttgcatagcgggtggcagtaaagtattttgttgctccagaggctattgtttgttgtaatcatagttagctgtaacacgagtgtatagttcaacgtttctcccttcaaaacactgtccatagccagctgcatagtacatttgtaagttttagaatacagatcaaatgattcaattcgcttcttatttgctcaaccactcctacggttgcatgtgctgtgatcat

SEQ ID NO: 122858 - DNA, 1979 bp, Zea Mays
gaacgcccagggctagctctatctccctcccgagatctcctcccttcccccccttcttctctcccttgccgacgattacgccaggtgcccaggtcttcttcgggccgaggtcgctgccgccatacacttggtgcccaggtcttctccgggcccttcgccagcgtcgagcagcaccaggctgagctccacagtggttcttggagaggtctgtgatagactactaggctgaatacctcatggaatcttggagagaaaaggggatcttggagaggtttgtgacacactactgtggtgaatagacctatgcagaagagaaaaagggaaagagagaatgttctcaatgaattgaagtccctatgtcaaaaacaagagcaaggagctgttgtacaagtggcttgtggaaggagcatatcatatatttgtaggagataactttacacttgattcatgggcgactggattataggggcgttgataaacatcgtggggagtgttggcataaactttggtaccaaccttctgaagttgggccatgatcagagagaaaagctttccttaattaacaacagcgagggaaatgaaaaattcgttccaaagtctgtaatgcatttccagacttggagaataggtatacttttttttgctgctgggaactgcctcaacttcatgtcatttgcttatgctgcacagtcactacttgcagctcttggatcaatccagtttgtgtccaacattgcttttgcctactttgttttgaacaagactatttcagtgaaagtcatggtagccacaacatttatagtctttggcaacatcttcttagtatcctttggcaaccatcaatcacctgtttacacgccggagcagctgatagcaaaatacagcaatttggtgtttgttctttattgcatgtcattggtctttgttgttgcatttaaccactatctctacaggagtggagaaactattatttcaaatagttcaaaaaatgctggcacatattggcgaacaatgttgccattttcttatgctgttgtatctggtgctattgggtcttgctcagtcttgtttgcaaagtcattgtctaacatgatgaggctgactatgaacagcagatacgagtttcatagctggttcacatactcaattgttcttctgtttctgtgtaccgctggattttggatgggaagattgaatgaagggttgtcattatttgatgcaatactgattgttccaatgtttcaaattgcttggaccttcttctctatctgtacaggatttgtttactttcaagaatatcaagtatttgatacgctcaggataattatggttgtattgggcatgacatttgtctttgttgggatctccttgctagcacccgatgacactaaagctgatacgaaagatggttcgagcactgccgaggaatctataattgatatggacagaaatggaaagatgcagatggaggagacagacacagatgatagcaactcgtttgtcacttctgtaaaagcaaaagcaaaacgtgtactgttgaaggcaaagtctgcatgctccatgtcccttggccttggggaggacacaataagcgcttcgtccgtgcttgccatgcctatggtctcatcaagaacaaccggcttcagaggaattgaagatgaccgttcaaagtacgttcctttaagaaccacagattggagtaatctttagcggacggtgatatatagatacacagcaaaggtctttacttttgatgttgcatagcgggtggcagtaaagtattttgttgctccagaggctattgtttgttgtaatcatagttagctgtaacacgagtgtatagttcaacgtttctcccttcaaaacactgtccatagccagctgcatagtacatttgtaagttttagaatacagatcaaatgattcaattcgcttcttatttgctcaaccactcctacggttgcatgtgctgtgatcat

SEQ ID NO: 122859 - DNA, 2539 bp, Zea Mays
gaacgcccagggctagctctatctccctcccgagatctcctcccttcccccccttcttctctcccttgccgacgattacgccaggtgcccaggtcttcttcgggccgaggtcgctgccgccatacacttggtgcccaggtcttctccgggcccttcgccagcgtcgagcagcaccaggctgagctccacagtggttcttggagaggtctgtgatagactactaggctgaatacctcatggaatcttggagagaaaaggggatcttggagaggtttgtgacacactactgtggtgaatagacctatgcagaagagaaaaagggaaagagagaatgttctcaatgaattgaagtccctatgtcaaaaacaagagcaaggagctgttgtacaagtggcttgtggaaggagcatatcatatatttgtaggagataactttacacttgattcatgggcgactggattataggggcgttgataaacatcgtggggagtgttggcataaactttggtaccaaccttctgaagttgggccatgatcagagagaaaagctttccttaattaacaacagcgagggaaatgaaaaattcgttccaaagtctgtaatgcatttccagacttggagaataggtaaccctgtctgctagaatttatttactaattttagagtcttttaatcaagaccaactttaatgctacatctgcattcaggtatacttttttttgctgctgggaactgcctcaacttcatgtcatttgcttatgctgcacaggttcttttcgttgtcctcgagacctcaaaagaaaaattagtttaacatgtaggatgtaatataatatgggaaactcatgaatggttgtgtaaacatgtaaagaataaaactctcatggagactgtatttgcgccctgtatttgcgccctgtttttttccattagttcttgggggtaaaaagataagagcttatcagtcatacagtttccatctctccttgtttcttagagctaataatgccatccaatcatattttcttttctctttctagcccagtgttttggtttgaacattgattatttacttgctatattacagtcactacttgcagctcttggatcaatccagtttgtgtccaacattgcttttgcctactttgttttgaacaagactatttcagtgaagtatgtatgattctcactttctggtagctggaatgaaaattacaataactacatggaatcatgtgactatgaagcttctgctattctttccagagtcatggtagccacaacatttatagtctttggcaacatcttcttagtatcctttggcaaccatcaatcacctgtttacacgccggagcagctgatagcaaaatacagcaatttggtgtttgttctttattgcatgtcattggtctttgttgttgcatttaaccactatctctacaggagtggagaaactattatttcaaatagttcaaaaaatgctggcacatattggcgaacaatgttgccattttcttatgctgttgtatctggtgctattgggtcttgctcagtcttgtttgcaaagtcattgtctaacatgatgaggctgactatgaacagcagatacgagtttcatagctggttcacatactcaattgttcttctgtttctgtgtaccgctggattttggatgggaagattgaatgaagggttgtcattatttgatgcaatactgattgttccaatgtttcaaattgcttggaccttcttctctatctgtacaggatttgtttactttcaagaatatcaagtatttgatacgctcaggataattatggttgtattgggcatgacatttgtctttgttgggatctccttgctagcacccgatgacactaaaggtttgtaaaaggttgattttcatgtgctttcacacagaagattttgactcttggacaattgtcaccagctgatacgaaagatggttcgagcactgccgaggaatctataattgatatggacagaaatggaaagatgcagatggaggagacagacacagatgatagcaactcgtttgtcacttctgtaaaagcaaaagcaaaacgtgtactgttgaaggcaaagtctgcatgctccatgtcccttggccttggggaggacacaataagcgcttcgtccgtgcttgccatgcctatggtctcatcaagaacaaccggcttcagaggaattgaagatgaccgttcaaagtacgttcctttaagaaccacagattggagtaatctttagcggacggtgatatatagatacacagcaaaggtctttacttttgatgttgcatagcgggtggcagtaaagtattttgttgctccagaggctattgtttgttgtaatcatagttagctgtaacacgagtgtatagttcaacgtttctcccttcaaaacactgtccatagccagctgcatagtacatttgtaagttttagaatacagatcaaatgattcaattcgcttcttatttgctcaaccactcctacggttgcatgtgctgtgatcat

SEQ ID NO: 122860 - DNA, 2517 bp, Zea Mays
gaacgcccagggctagctctatctccctcccgagatctcctcccttcccccccttcttctctcccttgccgacgattacgccaggtgcccaggtcttcttcgggccgaggtcgctgccgccatacacttggtgcccaggtcttctccgggcccttcgccagcgtcgagcagcaccaggctgagctccacagtggttcttggagaggtctgtgatagactactaggctgaatacctcatggaatcttggagagaaaaggggatcttggagaggtttgtgacacactactgtggtgaatagacctatgcagaagagaaaaagggaaagagagaatgttctcaatgaattgaagtccctatgtcaaaaacaagagcaaggagctgttgtacaagtggcttgtggaaggagcatatcatatatttgtaggagataactttacacttgattcatgggcgactggattataggggcgttgataaacatcgtggggagtgttggcataaactttggtaccaaccttctgaagttgggccatgatcagagagaaaagctttccttaattaacaacagcgagggaaatgaaaaattcgttccaaagtctgtaatgcatttccagacttggagaataggtaaccctgtctgctagaatttatttactaattttagagtcttttaatcaagaccaactttaatgctacatctgcattcaggtatacttttttttgctgctgggaactgcctcaacttcatgtcatttgcttatgctgcacaggttcttttcgttgtcctcgagacctcaaaagaaaaattagtttaacatgtaggatgtaatataatatgggaaactcatgaatggttgtgtaaacatgtaaagaataaaactctcatggagactgtatttgcgccctgtatttgcgccctgtttttttccattagttcttgggggtaaaaagataagagcttatcagtcatacagtttccatctctccttgtttcttagagctaataatgccatccaatcatattttcttttctctttctagcccagtgttttggtttgaacattgattatttacttgctatattacagtcactacttgcagctcttggatcaatccagtttgtgtccaacattgcttttgcctactttgttttgaacaagactatttcagtgaagtatgtatgattctcactttctggtagctggaatgaaaattacaataactacatggaatcatgtgactatgaagcttctgctattctttccagagtcatggtagccacaacatttatagtctttggcaacatcttcttagtatcctttggcaaccatcaatcacctgtttacacgccggagcagctgatagcaaaatacagcaatttggtgtttgttctttattgcatgtcattggtctttgttgttgcatttaaccactatctctacaggagtggagaaactattatttcaaatagttcaaaaaatgctggcacatattggcgaacaatgttgccattttcttatgctgttgtatctggtgctattgggtcttgctcagtcttgtttgcaaagtcattgtctaacatgatgaggctgactatgaacagcagatacgagtttcatagctggttcacatactcaattgttcttctgtttctgtgtaccgctggattttggatgggaagattgaatgaagggttgtcattatttgatgcaatactgattgttccaatgtttcaaattgcttggaccttcttctctatctgtacaggatttgtttactttcaagaatatcaagtatttgatacgctcaggataattatggttgtattgggcatgacatttgtctttgttgggatctccttgctagcacccgatgacactaaagctgatacgaaagatggttcgagcactgccgaggaatctataattgatatggacagaaatggaaagatgcagatggaggagacagacacagatgatagcaactcgtttgtcacttctgtaaaagcaaaagcaaaacgtgtactgttgaaggcaaaggtcattggctttctttctggatctgattccaccattgatctgtcacaaatctgcctctcacctgatcttgtttgcagtctgcatgctccatgtcccttggccttggggaggacacaataagcgcttcgtccgtgcttgccatgcctatggtctcatcaagaacaaccggcttcagaggaattgaagatgaccgttcaaagtacgttcctttaagaaccacagattggagtaatctttagcggacggtgatatatagatacacagcaaaggtctttacttttgatgttgcatagcgggtggcagtaaagtattttgttgctccagaggctattgtttgttgtaatcatagttagctgtaacacgagtgtatagttcaacgtttctcccttcaaaacactgtccatagccagctgcatagtacatttgtaagttttagaatacagatcaaatgattcaattcgcttcttatttgctcaa

SEQ ID NO: 122861 - DNA, 990 bp, Zea Mays
cccacagcctccccagcatcagtgaagctcgctcaccgtcattcgacgacgccctcccgcacacacgaccatggccgcggcgatgaccggcagtgctcgcgccagcaccggctccttgctcgtgcttctcttcgtcgcgctggccggcgcggccgccggggcgagtgccaccgttgccttcagcagcggcgacagcaacgcggcggcgctgctgacgacgccagcatcggcgtccccggggcagctgaacggcatcatccagtgccttatgggctgcttcacgcaggtgttcggctgttcgttcggatgcatgggcaagcagggcgctgacctgccgctctgcatcatcagctgcgaccagaagagcgtcgtgtgcatggtcagctgcggccttgcgccgtcaccgccatcaccgtcgccgcccacgcccaaaccaccagcacccaagccgcccacgcccaagccgcccggcccgccctacaccccgccgtacgccgccgctgccgtcaccggacgcacatctgcctgaatatgtcgacatgtgcctgccagctctcaaccgatccatcgtaccagtacgtagtaatgtacctccataatatgagcaaatatatatatatatatatatatatatatatatatatatatatatatatatatatatatatatatacacgtatatttatttataaccattaagaaaaaacatactaatctcatgctataccttattattaacccggtccattcgactgctccaatgcgttactcgcgttattagtatatatgttctgtgaagcaggccaaattatgtcaaatgagtagctagtacatgtacgtaatatgatcgtcagtgtatttattttgatctttcagtatgatgaatgcactttgctctttttatccaaaatgtaatgctatttgtaattaagtatgtaacgcaagaaccattatgctatttatgctggaggccggaatatttccttattc

SEQ ID NO: 122862 - DNA, 522 bp, Zea Mays
atggcagatcgtaggattataacttgggagttctggaaagatgctattaggtcgaagtctggcgagcatggagtgaaactgaaggaaaagccggaattcacgaacccggatgagttctattttaagatgatcaacagtaggactgttggtggaatccatagacctaagcctgaagataataagtatactgaagaggaacttcttctgttgaaaaataaagatatgggatatatccttcagagcattcaatgtgaaaaaaggtggctcttttatttcagagaagaagcgaaagaaatacaatcaaggataggacaaagcaacaaaatgcgtgatcttgacaacatcccttctcgtacaaagaagaaaatagcctcttcgtacagggagttagaagagatgaagcagcggcttcaaaagcttgagaaattgtatgcaacggctacgagttcggctactcaaccgcgatgggcgggtctggcgctgtctccggcctcgggatgctcggcatcagcctattcttga

SEQ ID NO: 122863 - DNA, 935 bp, Zea Mays
aacgcgtgctgatgaagatacaccatttcatattactctttcagacgaaaatgcttgttttaatatcaaaccatgcctaaacagtctagtgaggtcccaggaaactaatctttggctggcccattgccctgttttgaagccatggcaggcaggtttcactgccacattgcatattcagaaattagaaccatttgttataaatctaatgaccttagctcgtaacactagccactattgagctattatgctgctgctgctcctcccatggctcaacatcgtagaggccgacgtcgttgatgttgtaccgctgcttccttgtggtgctctcctgcctccggaagtacttctgtgcatggctggagacctgcaccggcgtcttagtggtgacgaagtccttggagatgttcttccaattgccgcacatgtacacacgcaggccacgcaggaaattcctgtaggccgggctcaatgacataaacaacactagctagtagcatgcatgcgcaatggcaaacagttagaaagaaagaaagaaagaaacaatgcttgtgctcctccagagtccaaaacctccctgcacgttgttggttatcctgtcgaggaacaacaactaatttcctacggcgctgttcctccagcagcatcctcttcgccttcatctcgtctgctaaatacccatccatcgtcctactgtgcaccccaccagagttgagcaggagctggttgctgctcatctctgccccactgtttatcatctccaccacaagctcaacgtacaagtcagttacttggcgcttatccttccctgggaacattgcctggagctcatccacaatgtcgtcgtttgtgctgttgctggcgccgtgacaagcgatgagagatctcaccatctcgatctcattggcactccagtcgacgttgaacctggggtccat

SEQ ID NO: 122864 - DNA, 460 bp, Zea Mays
acccgactcccttctctcccaattctcagcgggcgatgcaggcgaagaagctgaccctgctgcagacgatggcagctacgggagtcttctctgccatctccttttggtatggcttcatgtttggaagggagtccgcgcggcgcgagcttggtggcatcatagatgacctccgcagcaacaagcccaccaatactcctgccggtcccgatgctcattcgaagccatggtggggtatggtattctgttgttcctcctttgccatactaaatctaaatgtggtcaagcttgtcttgtggatcctgctaggctgtagacggaagaacaagccttggagctaccagtttttccccttctttcataatgtgtatacgacttgaacatcagtttttagactgaaaaaaaaagttaatctgccacaaaagacaaggaagaaaaacaagttaaaacctcctttgattca

SEQ ID NO: 122865 - DNA, 941 bp, Zea Mays
atgtccactgcaagctgggaaatcgacggcgagcagggagcctgcgggtgtgggggctggggaaggactcagcaagcgacgacgcgatttctggaattcggcgacgaggcgagccagcgcgagggagacggaatccgagcgcggcgcgcaggcatgagcgagcagaacaggcagccgaggctacgcgaatctgggagcattgtgtgcggtactgggcgcgcagggaactgtgcacatggagcagagaaccaggcgcggctgtgcgcggccagtgagatgagcagtcagcggctcggcgcagggaaggaagagaagcaagcgccgagcagggagctccggcgagctggagaacagaggcagccgagtgtctgggattgagagaaaagaaaggactccgagctgcaccggagagagaggatctgggcacgccagcagggaagctccacgacgctggggctggggctcggccggcgagtcaagagctgcgcggctggatgttgctgccggcgagcagggaaagagtttccccggcgagcagcgagggacgccgagcagagggcgctccggccaaaaagaaacaggggcgctgtcgaggagaagctccacgagctagaggagcaagggaggggcgctcgagactggcgagcacgcggcctgggatatccgagctgcggctgtcgctgggcgtcagggagaaactcgtggtgcgcaggcagtaccacgaccggacaccgagcgagcagcggagagagagaaacagggaagtccggcgagcttcagctgggcgcgatgagcagcggccgtggcagaagagggagaccgaggagtagggcaggggcatcccggcgagcagactggcgatggaggagcagccaacgcggtggagaagctaggcgctggaagtagacgtcggagaaagactcgatcctgtcctccctgcg

SEQ ID NO: 122866 - DNA, 588 bp, Zea Mays
ttgtgtatcaaatatatattaataacttcccatttttaacacctacaatcccgcaaacactaagacttattgagatctttttcattactaactccatcgtacttcacatatatataatcctaccacgacgcgactgcttcaaaattataaaaataaacacatcacattcattgaactacttcaataattaagctaacgaaaattttgaatcggcttaccattctaaatttgacgtgttatccacgaacacgacaaggattctggttccgctcttgtgtcgagcacttggggaataccacactactagcttcgtcttcatccgattcttgggattccttgatgacgcacgaaatgatgacgaccttcgatcaaagtcttcgaccgagcacttgataagcgatgcacatggacctcgcttatttttgtttgaagtccgggcttcgggttcgacgagatcgagcagggaagaacgaggttcgacggactcgacgacgatacgaagctatcactagcgacgatactacgatggcgacatgggcgagcgcggatcagcgccagagaaaccgagtacacagtgttaacaacaaa

SEQ ID NO: 122867 - DNA, 788 bp, Zea Mays
atgagcgagcagaacaagcagccgaggctacgcgaatctgggagcattgtgtgcggtactgggcgcgcagggaactatgcacatggagcagagaaccaggcgcggctgtgcgcggccagtgagatgagcagtcagcggctcggcgcagggaaggaagagaagcaagcaccgagcagggagctccggcgagctggagaacagaggcagccgagtgtctgggattgagagaaaagaaaggactccgagctgcacgggagagagaggatctgggcacgccagcagggaagctccacgacgctggggctggggctcggccggcgagtcaagagctgcgcggctggatgttgctgccggcgagcagggaaagagtttccccggcgagcagcgagggacgccgagcagagggcgctccggccaagaagaaacaggggcgttgtcgaggagaagctccacgagctagaggagcaagggaggggtgctcgagactagcgagcacgcggcctgggatatccgagctgcggctgtcgctgggcgtcagggagaaactcgtggtgcgcaggcagtaccacgaccggacaccgagcgagcagcggagagagagaaacagggaagtccggcgagcttcagctgggcgcgatgagcagcggccgtggcagaagagggagaccgaggagtagggcaggggcatcccggcgagcagactggcgatggaggagcagccaacgcggtggagaagctaggcgctggaagtagacgtcggagaaagactcgatcctgtcctccctgcg

SEQ ID NO: 122868 - DNA, 588 bp, Zea Mays
ttgtgtatcaaatatatattaataacttcccatttttaacacctacaatcccgcaaacactaagacttattgagatctttttcattactaactccatcgtacttcacatatatataatcctaccacgacgcgactgcttcaaaattataaaaataaacacatcacattcattgaactacttcaataattaagctaacgaaaattttgaatcggcttaccattctaaatttgacgtgttatccacgaacacgacaaggattctggttccgctcttgtgtcgagcacttggggaataccacgctaatagctttgtcttcatccgattcttgggattccttgatgacgcacgaaatgatgacgaccttcgatcaaagtcttcgaccgagcacttgataagcgatgcacagggacctcgcttatttttgtttgaagtccgggcttcgggttcgacgagatcgagcagggaagaacgaggttcgacggactcgacgacgatacgaagctatcactagcgacgatactacgatggtgacatgggcgagcgcggatcagcgccagagaaaccgagtacacagtgttaacaacaaa

SEQ ID NO: 122869 - DNA, 2342 bp, Zea Mays
atgtcgagcaccggagctggcgatgacatgccacctgtagcatctgtaaatacgccagcaggtacgtctgtttcaatagacataaatcctgtagtgtctgtgatcgccccatacacagagggtgtctccgttactcccccggcagcattgagggcacctggacatatcgatgagcaaacaaaaacggcagatgtggtcggcgcggagaagcacatccccatgagacatattaggccgcatgaacaggacacacctcatattcttcaaagccatccggacaatattgatataagattgatacctaaagtcgaaatgcatggtggcccagaaaacgttccaataaccgtgcaggacatgagtaacctgtatatgccccacttgaatgaattatatgcaagatttgaggagatggatttcaaaacaaggttccaatctataatacatcatccattgaatgaaatggagttcgaggctgcctggcaaatgatgctagatgatttccagctacacgagaacaacacccttgccagattatatgaaatacgcaaagattgggtacctgcatttttcaaaggagactattgtggtcttatggtctctacacaacgaagcgagagcatgaacaagttggtgaagagtgcccacgtggatgcaaacacaccgcttcatcaatttgcaaagcaaatgatgaagctcctgcatagtaggaagatgaaagaggccaaagaggcactaggatgcatggtcgaagcgtatgaaacagacgaaatggctatagacaacttacgcaaattagatgatgggaacgaggaaattttaatggggtctaatacaaatgaatgcaatactaaggatgatcaatgtaatatgccgatattaacattggaacataacactgacattcggctggttgatagtagttctacggatgtggaagctagaaagaaactggaatttcatatggaaggtgtaaacttagcaataccagataaggccaagcctaagggaagaacaatcaaaagtagtgagcaacaagttttaaaattgggtgtgaaaggagctaagaagatgagcaggaaatgccagaaatgtggcatagctgatggtcacaacagtcacgtaagcgaggacggcctccctggttcaaggaacaaaatcatagctgcagccccacaatggaatgagacatcaacgtcgaaaaaacgaacggtggatgtcggagatgatgattcatctggtagagagtagaagaccataagatacaaatatttccttatgtaaatgtgattcctgtgtttatttgacaaattccagaaagtatcataaatatacttgcaaactggcataaatgtatgtgtaatttgtcataagctattaataggtatgcagcaaactgagtgtacatagacttagcatacatgtatgtgaaaaaatgcataacactgcgttgtgtaatgcataagatggttagcctatgaaccatgactgtacaaaaatgagcctatttccagtatataacgctgataattgtatcatacacttgagacaaaactataataatgtatgggcatagaatgatgactattgtatcataagtgtatgggcaaacatgcataagacccgcaataattatatcgtaaacttcggacagaaacatgcatacttcgaggttattgacagaacaatattgtacaggaatctggcagaatcaaatgcaagaaacacacattactatcaaacacatttggtacaatattccagtttagaggttagctgatccccaaagttgtcattgacataaactaagaaacgtctactgtggcagaacctccaagttatcgggcccacatgcacctgtccttgtcccaaagacctcagacagccatgcaggtgcaccagataactcaacaggatctgtccgattgccccaaggacatcggataaaccactttcaaccagaaccgcgggattaagtaacacaaatcacacacaccaatattattgcagcggaaatcttactaccaaattttacaagttacaaaaattttatattattttatcggagtgattacaaaagtataagttcgaaatatattctagcttaagtgaccatcctcaataagaagtatagaaggagtacttagacttataagaaggccgagcccaccggcacttaacaccatcaatagcatcacaaagttaggacctgaaaaacaacagggaataaaaccctgagtatggaattactcagcaagtcttacccgactaaagaaaagactctcaagggtatgctggttatatgggagtcaaggaaaggcttatcaagaatcaaggactctgtt

SEQ ID NO: 122870 - DNA, 359 bp, Zea Mays
gcagtcgatgtttcattccactgtggagcagttgttttattgtttagtcttgatccgaccggtcgtcctctctttcgattagccagttttgctagtcttgccctgttctcttccacagacagacacgttctactgttatgtccatctgctattccacacaattggcatctcctattcttcttttttctcctttcgcacctagtttcataatcctattttctgtattttttattgtccgtccttttggtcttgcacgatccggcatactcagatttataacatccacattaaaattcaacctctgtataataaaagaagttattaattagtatacacatatttacataaagtatctttct

SEQ ID NO: 122871 - DNA, 141 bp, Zea Mays
agctcctagcagaaggagtgtaaattcaagatgaagtggttgtggaagaggagtttgctccagtgcctattcatcaagtggatggagctatctaactggttattgggtagaaaggtcttgagcctcttcactgcaacaaag

SEQ ID NO: 122872 - DNA, 706 bp, Zea Mays
gtgttttttattgaaccctaaaacgggaactaggagggaagcaagggattaaatcatccgtcatgtcttgcactttccggaaccgggaggagagcaaggcgtgcgacgtttttcctgccgattggctctcgtcgtacgccgtcgctgcattaggatctggatgaggtaggtgaggtagagaaggccacaacatgggccgaggcggtgctactcctcatcatgtgcggcgatcaccagacatctggcgaggccatcaaggatgtgctttcagtctttcacccagaagcttggcgatgactgtcaggctgcgctaccaaactgccattatgaaactatgtttcatcaagctgcacccatttctactgcaggaccatatgttttatttcttgacatgtgattgtgatgtcctaattattagttgaattgtatttaattttgttattgacacatgttacttgaggactgcttcatttactgttttatttaaatgctttagcgctatttatatctaaaatgtattttgaattgttattttgaaatcaaacttgtaacttatttcaagaccttcattctcaccagactcattttatatcatttcagaagcaagaaaaatataaggatgttgaacctagtggaatagattttttaaaggagatgcattgcaacaaaaagaaaggttttagtgaaaatgttgagaaagctattg

SEQ ID NO: 122873 - DNA, 354 bp, Zea Mays
atgggaggaagatcgagcttgaagacgcagctgcgcgcgagagctggagcaacacgtggcaggaacagagctctgctgagcgcgagctcacggcgggggaaggtgcgcggtgagcgggaaagacgcgcggctgggctggagcagggacgcgacaggaaggagctagagggtgtttggcggccatggctggacgcgcgcagggaaaacaccagagcagtagccgcggcttgggaaaggctccggccatgggggaagcttcggctgggctgggcgactggaggagcgccggctggagagttccatggctgggaggagcaggaggccgcagcgcacagggaagagagatgcggctag

SEQ ID NO: 122874 - DNA, 615 bp, Zea Mays
atgggcatgctcatacgcgtccagagcggcagcacggaggcggccttcctcggcgcggcgggcgtctttggcacgcgtcgtggtcgtccgccatcgggagggagacgcgacggctgggcagccgagctggagccgctgcagactggacgggagggaggcgcgacggggattagcgtggtctggaggctcgaccgcgcccgaccagagggaacgaccacgcgatctggacgggaatcagccgagggagacgcgacggggatccgccgatctggtgccgcgtcggatcagcgagcgtggcgggcgagcggatcagcggccgcgctcgcggtctggagctgcgaccgcgcgacgaggcgggtgagcggatcagcggccgcacccggcagcaacaacgacggggcgggtgatcgaacggacggcgcaggcgatgggatcagcgacgctccaggcgacgaggaacctttccctatgggtacaaacatccgagccaggtctgggagatcccggacttcctctggtgaagaaaatcaccatgatatccagacagtcttgaccaacggtgacacttcttccaatggagctgacacttcaggtcccaccaaggacactgagtag

SEQ ID NO: 122875 - DNA, 3369 bp, Zea Mays
gttgctgttcccctgcgaggcccgcgtctccccttcgtctcaacacccaccgcctcctcgccggagccagtaagcttccggcgaagaaatccggcgggcacatcacaagggggccgagcagggggacctaggcgagcgccggaatgggggccagcgcccgggggctcgccgtcgtcgtggctctagggttagataggtgtccgtagcttttttcttcgctcgccctcccccacgcggccagggtgtgcagccccggcgtcgcattgggtcccgggacgaccgtaaggccgcgtgatccacccgtgctcgagctcggacagggtcccggttgcgtggcatgggggcatctcttccgcctgctcccgctgcctgcgagtttggcaccgtttttgagctctgaagaggaggaggtggtggcagcaggcaccgatctggatgccatttcaagtcatggatccgaggcaccacctctcccagttcaccaatacaaccgtagctgcgtcctccttctctgaggagcagcttcgccttcccacagagaggctggtgggtttttggaagcaggagtcgttgcatcacattgggagcaagtcagttgcatcttctccaattgaaaagccccaacccattggtacaaaaacaatgggtcgggtagatccacaaccatacaagccgagaggccagaagtctgcatttagccttgaacacaaaacttttggtcaagagaggcatgttaacatgccaccatctctgtggagagctgatcaagacccttatgttcaatctgattcatctttatttcccgatggaaggagtactaatccatatgaggcctacaacgagaatgggcttttctcaagctccctgtcagaaatttttgacagaaaattgggactgagatcaaatgatgtgcttctacatcaaccacttgaaaaggttgaaccaactcatgtagatgatgagccctttgagttaacagaggaaatcgaggctcaaataataggaaacatacttcctgatgatgatgatctactatcaggtgttgatgttgggtacacagcccatgctagcaatggtgatgatgttgatgatgatatattttacactggaggtgggatggaactggagaccgttgaaaataaaaaaagtacagaacctaacagtggagctaatgatggtcttgggtcgctaaatggcacaatgaatggtcaacatccatatggggaacacccttcaagaactcttttcgtccagaacattaatagcaatgttgaggattctgaattaaaggtcctatttgagcattatggagaaatcagcaacctttacactgcctgcaaacatcgcggttttgtaatgatatcttactatgacataaggtcatcatggaatgccatgagggcacttcaaaacaagccactaagacatagaaaacttgacatacattactccattccgaaggataatccttcggggaaggatattaaccaggggatgcttgttgtatttaatgttgacccgtctgtaacaaacaatgatatccataagatatttagtgactatggtgaaataaaagagattcgtgatgcaccgcaaaagggccatcacaaagttatagaattttacgatgtcagagcagctgaaggtgcagttcgtgctttaaacaggagtgatcttgctggcaagaaaataaatttggggactgttggtctgagtggtgttagacgattaacacagcacatgtccaaagagtcggggcaagaagaatttggtgtatgcaaactgggcagtctaagcacaaatagccctccattgccttcattggccatgacatcttctggccgtgaaaatgggagtattcatggtttgcattctggactgctcacatcaatgagcccgttcagagaggcttcttttccgggcctatcatctaccataccacagagcctgtcctctcccattggaattgcatctgctacaactcatagtaatcaggctccccttggtgagctcagccactcacttagtcggatgaatgggcatatgaattatggttttcaaggcttgggtgctcttcatccccattctcttcctgaagttcacgatggagcaaataatggcaccccgtacaatctaaacaccatggtaccaattggtgtgaatagcaactcaagaacagccgaagcagttgactgcagacatcttcataaagtgggttctagcaacctcaatggacattcatttgatcgtgtcggtgaaggagctatgggattttcaagaagtggaagtggtcctgtccatggtcaccagctaatgtggaataattcaaataacttacaacgtcatcccaattcccctgtgctgtggcaaaatccaggatcatttgtaaataatgtaccgtctcgctccccagcacaaatgcatggagttccaagagcaccatcacacatgattgagaatgtccttccaatgcatcatcatcatgtgggctctgcgccagcaatcaatccatcactttgggacaggcggcatggctatgcaggggaattgacagaagcatcaagttttcatcttggcagtgttgggagcttgggatttcctggtagccctcagcttcatggcctggagctaaataacatattttctcacactggtgggaatcgcatggatccaaccgtgtcttcggctcagatcagcgcaccatctcctcaacagagaggtcctatgttccatggaaggaatcctatggttccccttccatcatttgattcacctggtgagcggataagaagcatgagaaatgactcaggtgctaaccagtctgataataaacggcagtacgagcttgatgttgaccgcataatgcgaggggtagactcacgaactacactgatgataaagaatatcccaaataagtatacctccaagatgctcttggctgctattgatgaaagtcataagggcacttatgactttatttacttgccaattgattttaagaataaatgtaatgttggctatgctttcatcaacatgaccaatgctcagcatatcattccattttatcagacttttaatggtaaaaagtgggagaagtttaacagtgagaaggtggcatcacttgcttatgctagaatccaagggaaaacagctctgattgctcatttccagaactctagtttgatgaatgaggacaaacgttgccgccccatactcttccactcagatggtcctaatgcaggagatcagtcatattacaataagtttacaaattacaatatcgaaaagggcgtacccaatgctacggtaggctctaccgctgcactaggcctgcccttcacaaattacaatatcgaaatgagtacaaat

SEQ ID NO: 122876 - DNA, 1475 bp, Zea Mays
ctctctctctctctctctctctctctctctctcggcctccgtctcgttgctttctctccgccgcctcccccacgcgcccccgcccctcccctccgctctttctttctcctaccgtcgttaactctccgttacatcaccagcctcacgccgtcacgtcaacttccgccacaaaaagcacccgcccctgcccagccccagccatgtccaccgccggcgaccccgccgtcgcagcagcagcagctgcggcagcggccaccccgtcaggtcgcgcgccgaggctgccgcggtggacgcggcaggagatactggtgctcatcgagggcaagcgcatggtggagggacgcggcgggcgcggcgcgcggggccgcgcggcggcggcggcggcttctggagaggcctcggcggtggcggcgctggagcccaagtgggccgcggtggcagagtattgccggcgccacggcctcgagcggggccccgtgcagtgccggaagcgctggagcaacctcgccggagactacaagaaggtgaaggagtgggagcgtgccgctgcggcgtcgcgcgagccgtccttctgggctatgcgcaacgacgcgcgcagggaacgccgcctcccgggcttcttcgaccgcgaggtgtacgacatactcgagggccggggccgcgcgatcgtcgacggccgctccgcccggaatgccgcggcggagcagccggcgccggtgcgcgtcgacgaggacaaggaggcggaggtgccggaggccgtatttgacagtggccgcccggctacggaggaggccttgttctcggaggatgaggaggaggaagaagaggacgcaccgccggtggccccacctccccctccaccaccagtcatcgccgtgcctgtatctgagaagcccgaggcatcaaggcaacaacagagtgctgagcaaggcacatcgaaagacacacagcctgagcaaagctccgagagggatgcaccggctcagcagggaggtcaaaagagaccgcggaccgtcgaaggcgctggagaaggcacggcagaccttgagagcaagctggtcgagatccttgaccggaacagccggttggtggctgcacagttggaggcgcagaaccagaactgcgagcttgacagagagcagaggaaagaccaagctaacagcctagttgtcgtgctcggcaggctggccgatgcccttggcaggatcgccgataagctatagtcagtcacctaggtgtatatgttgacagaaataattacagcgggaaatgtaagtgaatgtacagattggtatagggctattggcattcgattctttttcttttttttggtattgggagcggtgttatatactagcactcaaatgatgtggggactagcagaattcagttgtgggtggattctggggctgtgttatatagggaggcgagtaattattctcagcaatgcaattgtgtatagttgagccttttgt

SEQ ID NO: 122877 - DNA, 108 bp, Zea Mays
ctaaaattagctggccacttggggctacgagggagagggagttcggaaggtatcaatctctcttcccgctacttataatagaagctgacgctgctttgtttaatcgcg

SEQ ID NO: 122878 - DNA, 726 bp, Zea Mays
atgggccccatatcgaatcaccaagcagagcaccagggcgacagcgaggtgggtcgacagagcgacacgacggaaatgaaagttgtgcactgctcgctgggaattgaacgcgagttggaacctgggcacgtgcgcacacaggagcagcgacgaccgagtgccagagagccgagcagggcgcgcgcagggaagaacggatcgcgcgcgcaggggcgagctgaagcaggagcaccgagcagaggaggaaaaagcacggcgcacagagacttcacagcgcaggggcgagccaggcgcggcaacaggatgggcgcgcgtcaggaactcgacgcggcggccacggcggacacggcccggcaaagcgatggccagggccattgcgagggagctctgagcagagggagaccgacggtcaggccaagcagggagaaagcgcgtggctgggctggagcaggaacgcgacggaatgttgcgcgcggggaaggaggcctcggtacggcggccatggaagcaagctgcacggctgggagcgtgcagggatccggaggaagatggggcaggggcaccatggccagcagggagatggaggaggggccgttggggaagaacctcggctggctgggcgaacgcgccaaggagcctcggatcaagacgcagggagcagggcatagaaactggagagagatgggggagggagagaggaaaccacgaccatggactaggaaatag

SEQ ID NO: 122879 - DNA, 1195 bp, Zea Mays
tgtggaatcgttcgttccaagtttattactgcgacgacggcatcaatggatgaaaacaatcagaataggacaggaaaggcggcaagctgatggagtcgattacagacacacacacacagagagacctagagacagaaactatcagcttgccgtcttctgaatgtgatgaaccaacgtccctctcgctcgcgttatcagcttgccggttcatgacacaggccagtacgtctgggctactcggcccggctactccaaccatctcgaccggtcaagtcaacgagcctgcatgaacgctgccagtacatctggccgccgcggctgtactgtaggtaggcagatcgatatcgactcactctgctactacttaaccaacctacgcctccgccgcaatgacggtgaccatgtcgggcttgatcaccagctcctccggcgccctaggccttccgacactgccgtcgaccataccggacgcagcggcgtaggtgacaggctccacgtctacgtcgacgaccacggtctgcaggtcgtggacctccgcgatgtcgatggggtgcacctcggcgccgccgcagcttgccttgccctcggccacctcctccttggactgctccggtattatcaccagcgccgccgcgggcttcctgtacgccatgtacagcgccatctgcgcgaggccgaagacgaagcccagcacgttggggaacgccacgaacacgtccttcttcagcgcgccgtacgcgaaccagaccaccgcgctgagcaccaggaagaaggagagcgagataggcatgaactccacgctcttggtccggatcacctgccgcattatgctgagcggcgcggcgaagacgctgagcgagacgctgacgcagatccagccgagcacgtgcacgcggaggccggcgtcggagagaagcatggtgacgagcgcgacgaggccgaagacggcgacgttgagccccagcagcatcttggccgccagcacccgggcggccttgggcgcgtacaccaggtacatggccaggtacacggtctcgacgacgcagcccacgccgttgatggtgaccagcagctcggcgccgggcttgagcagggcgtacaagatccacagcatgcagctgaagagcgtcaccacgtacggcgtcgactggaacccctccgtcgacttgttgcggtacacgcggtagaacgtcgg

SEQ ID NO: 122880 - DNA, 1710 bp, Zea Mays
aaaggttgtggggtgataaactcgtggactgatgcaaccaggacatgctattttgaatagtgattctcttttgtctgagtcggactgctgatgagcttactgaatctacctcttgtacttgtctatgtgtgcagcggctgagaaagcaagagtaaagagcaatgggctcaccaaagaggctttggtgccaaaggatgccaatggcaatgccatctcagcgcaaactttcaccttccgtgagcttgctaccgccaccaggaacttcaggcccgagtgcttcctgggagagggaggttttggacgtgtttacaagggccgccttgagagcacaggccaggttgttgctataaagcagcttaacagggatgggcttcaaggaaacagagaatttctagtagaagttctcatgctcagcttactacatcatcaaaacctggttaatttgattggttattgtgctgatggagaccagagacttcttgtttatgaatatatgccttctggatcacttgaagatcatttgcacgatctacctcttgataaagaggccttggactggaacaccaggatgaaaattgcagcaggtgctgccaaaggactggagtaccttcatgacaaagctaatccaccagttatttatagggatttcaagtcatcgaacattctgttggatgaaagtttccacccgaagctgtctgattttggacttgctaagttgggtccagttggcgacaaatcacatgtctcaacacgtgtaatgggtacatatggttattgtgcaccagaatatgctatgacagggcagctgacagtgaagtctgacgtgtatagttttggggttgtcttgctagagttgattactggccgtagggctattgacagcaccagaccacatggagaacaaaatcttgtctcatgggcacgtcctctgtttaacgacagaagaaagctccctaagatggctgacccgaggctggaagggcgataccccatgcgtgggctttaccaagcccttgcagtggcttcgatgtgcattcagtcggaggctgcttcacgcccactgattgcagatgtcgtgactgctctgtcctacttggcatcccagccatatgatcccaacgcagctcttgcttcaaggaagccaggcggcgatcagcgaagcaagcctggcgagaacggcagggcagtttccaggaatgatgaaactggaagctccggccacaaaacacctgccaaggaccgagaggactcacccagggacctcccagcgatcctgaacaaggaccttgaccgggagcgcatggtggccgaggcgaagatgtggggcgaccgggagcgcatggtggccgaggctaagatgtggggcgaccgagagcgcatggtggctgaggcgaagatgtggggtgaaaattggcgtgacaagcggcgtgcagagattgggcaggggagcctggattcggttactgggaacagctagggggcaattaagcgaacagaaacgtgacatccacccatgcatttcgtttgtttatttccaggtccattttcgttctggcggcggtcggcaggccccagggttgtacatttctaggtcagggaagagtgggaaagcggcagcgttgtactggacagtgaatgcatgtggttgtacatgtaaattctcagaaaagttttgtgagaatgaaaggacatatttgagttccacttgta

SEQ ID NO: 122881 - DNA, 2053 bp, Zea Mays
gagtccaccttccctgaattcctgttcgctaccttcgcttccgctccaaaaaccaaataaaaaacgcacctttccttcccttctcctccccttcgctttcccccgtcctcccttccctcgatcccctcgccggaaaagatcccattccatccacctccacgtcccggcgcaatcagagtttccggcggcaaagcaggaaggcggaagcgaaaggaatgttgcacctttaagtagcgcggcgacctggtgtttcttcctggccggcgatgggctgcttcccgtgcttcgactccccggcagatgagcagcttaaccccaaattcggtggcgccggtgggtacggcggcacgtcctctgccgtcgcggcgtacggaaacggcacaggcgccggcgtcagcatcggccggcacggggacagggggtacccggacctgcagcaggcgcccatggcggctccgcgcgtcgagaagctctcagcagcggctgagaaagcaagagtaaagagcaatgggctcaccaaagaggctttggtgccaaaggatgccaatggcaatgccatctcagcgcaaactttcaccttccgtgagcttgctaccgccaccaggaacttcaggcccgagtgcttcctgggagagggaggttttggacgtgtttacaagggccgccttgagagcacaggccaggttgttgctataaagcagcttaacagggatgggcttcaaggaaacagagaatttctagtagaagttctcatgctcagcttactacatcatcaaaacctggttaatttgattggttattgtgctgatggagaccagagacttcttgtttatgaatatatgccttctggatcacttgaagatcatttgcacgatctacctcttgataaagaggccttggactggaacaccaggatgaaaattgcagcaggtgctgccaaaggactggagtaccttcatgacaaagctaatccaccagttatttatagggatttcaagtcatcgaacattctgttggatgaaagtttccacccgaagctgtctgattttggacttgctaagttgggtccagttggcgacaaatcacatgtctcaacacgtgtaatgggtacatatggttattgtgcaccagaatatgctatgacagggcagctgacagtgaagtctgacgtgtatagttttggggttgtcttgctagagttgattactggccgtagggctattgacagcaccagaccacatggagaacaaaatcttgtctcatgggcacgtcctctgtttaacgacagaagaaagctccctaagatggctgacccgaggctggaagggcgataccccatgcgtgggctttaccaagcccttgcagtggcttcgatgtgcattcagtcggaggctgcttcacgcccactgattgcagatgtcgtgactgctctgtcctacttggcatcccagccatatgatcccaacgcagctcttgcttcaaggaagccaggcggcgatcagcgaagcaagcctggcgagaacggcagggcagtttccaggaatgatgaaactggaagctccggccacaaaacacctgccaaggaccgagaggactcacccagggacctcccagcgatcctgaacaaggaccttgaccgggagcgcatggtggccgaggcgaagatgtggggcgaccgggagcgcatggtggccgaggctaagatgtggggcgaccgagagcgcatggtggctgaggcgaagatgtggggtgaaaattggcgtgacaagcggcgtgcagagattgggcaggggagcctggattcggttactgggaacagctagggggcaattaagcgaacagaaacgtgacatccacccatgcatttcgtttgtttatttccaggtccattttcgttctggcggcggtcggcaggccccagggttgtacatttctaggtcagggaagagtgggaaagcggcagcgttgtactggacagtgaatgcatgtggttgtacatgtaaattctcagaaaagttttgtgagaatgaaaggacatatttgagttccactt

SEQ ID NO: 122882 - DNA, 2192 bp, Zea Mays
aattaggtaatctagacagattataacaaacaccctccttgtcccgccccataaaaaatggttaacaaagtgaagtacgtatcccgcaccccagtctgaacacgggcaaaaccgcgtgttggacggctgccttgcccctccccgcgccgcgaatacactcgagggccagccgagcccagtgcccgagtccaccttccctgaattcctgttcgctaccttcgcttccgctccaaaaaccaaataaaaaacgcacctttccttcccttctcctccccttcgctttcccccgtcctcccttccctcgatcccctcgccggaaaagatcccattccatccacctccacgtcccggcgcaatcagagtttccggcggcaaagcaggaaggcggaagcgaaaggaatgttgcacctttaagtagcgcggcgacctggtgtttcttcctggccggcgatgggctgcttcccgtgcttcgactccccggcagatgagcagcttaaccccaaattcggtggcgccggtgggtacggcggcacgtcctctgccgtcgcggcgtacggaaacggcacaggcgccggcgtcagcatcggccggcacggggacagggggtacccggacctgcagcaggcgcccatggcggctccgcgcgtcgagaagctctcagcaggtgcgcgacgtgctccgcgctgagctacgtgttccacggtttggggtgggtgggtggactggatcccggcaaggtggttgatctcccgcgtggtggttcaaccgcaccgggcctgcctgatctgatttagtagtgctccgtgtagcttgtggccatctttgcgtgttgaattagcgtcaggttctcgatagcggctgagaaagcaagagtaaagagcaatgggctcaccaaagaggctttggtgccaaaggatgccaatggcaatgccatctcagcgcaaactttcaccttccgtgagcttgctaccgccaccaggaacttcaggcccgagtgcttcctgggagagggaggttttggacgtgtttacaagggccgccttgagagcacaggccaggttgttgctataaagcagcttaacagggatgggcttcaaggaaacagagaatttctagtagaagttctcatgctcagcttactacatcatcaaaacctggttaatttgattggttattgtgctgatggagaccagagacttcttgtttatgaatatatgccttctggatcacttgaagatcatttgcacgatctacctcttgataaagaggccttggactggaacaccaggatgaaaattgcagcaggtgctgccaaaggactggagtaccttcatgacaaagctaatccaccagttatttatagggatttcaagtcatcgaacattctgttggatgaaagtttccacccgaagctgtctgattttggacttgctaagttgggtccagttggcgacaaatcacatgtctcaacacgtgtaatgggtacatatggttattgtgcaccagaatatgctatgacagggcagctgacagtgaagtctgacgtgtatagttttggggttgtcttgctagagttgattactggccgtagggctattgacagcaccagaccacatggagaacaaaatcttgtctcatgggcacgtcctctgtttaacgacagaagaaagctccctaagatggctgacccgaggctggaagggcgataccccatgcgtgggctttaccaagcccttgcagtggcttcgatgtgcattcagtcggaggctgcttcacgcccactgattgcagatgtcgtgactgctctgtcctacttggcatcccagccatatgatcccaacgcagctcttgcttcaaggaagccaggcggcgatcagcgaagcaagcctggcgagaacggcagggcagtttccaggaatgatgaaactggaagctccggccacaaaacacctgccaaggaccgagaggactcacccagggacctcccagcgatcctgaacaaggaccttgaccgggagcgcatggtggccgaggcgaagatgtggggcgaccgggagcgcatggtggccgaggctaagatgtggggcgaccgagagcgcatggtggctgaggcgaagatgtggggtgaaaattggcgtgacaagcggcgtgcagagattgggcaggggagcctggattcggttactgggaac

SEQ ID NO: 122883 - DNA, 688 bp, Zea Mays
gagcactaggcatgtctatgcgtgttgaaagggcatcacttgaacaggtccagaaaaggtttgaggcacttaagaaaaggaaggatccaagtgcctttactgaagaagatttggatgagagaataatgaaacaacagcaagaggaggaggaacggaagcggcagcgcaaagaaaagaagaaagagatgaaaagagaacaggcaacccaacatgaacctgaggacgttgatcctgacatcgctgccatgatgggttttggtgggtttggttcctcgaagaagtgacagctctgtgttggccgcatccctttggtgaccttctgccctgaggatattgctcaaccccataaacacctgtgctatgaaaaatcgtttttgccagaatcctcataagatttgaacgaagtgcactggatgcaagggtactacgttttgacactgggatattgaactgcgtgtatgggagttgattatcaaaaggaatatctaagggtgttttggataaacctgtttatttgctacttctggtattcctgcttagaaacagttgatggtcgtgattgtttgttgtgggaatgaagatgtgcgaagtggaactaaccaaaagaattgtcgtctcattttctagaggaataaacttgtgtattgcagttaacagctcccttgattctgaatcttaatttccagga

SEQ ID NO: 122884 - DNA, 1029 bp, Zea Mays
atgacgaatctcaacgccaccgtcgctgctgtgctcgtgatgctcgccttcctcgccgggcagtcggttgccgggcgctactactacgacaaagtgcaggacaaggtgagaaaggaagtggagaaggccatggcgaaaaaccccagcgtcggccccgcccttgttcgcttggtgttccatgactgctgggtctatggttgtgatggctccgtgctcctagacagcacgcctactgacggcaccaacaccgagaagaaggcggcgaacaacatcggcctcgctggcttcgaggtgatcgacgccatcaagcagaaggtcggcactgacgcctcctgcgcagacatcgtcgccttcgcggcgcgcgacgcggccgacatcctcagcggcggcaagatcttctacaccatccccggcggccgcaaggacggcgtcgtctcgtccgccgcggtggcggacgccaacctcccgcaccccgacttcaacttcgacgagctcaaggataacttcaacgcgtccagccgaggcagcagcttcaccgtcgaggagctcgtcgtcctctcgggcgcgcactccatcggcgtcgctcacctctcgtcctaccaggaccgcctggggcccgactccactccaatcgattccgactaccaggaggcgctcaacaaggccacacctcctggtttgctgaagactgggcagaacccgacggtgacaaacaacgtccgcgacgagactgacgcgttccagaaggacgctgcctacaaccccgtggccatgggggtgaaccccaagaggggcgtcctcgacaacagctactaccataacaacctcgtcaacaaggtgctattcaagtctgactgggtactacgcacggatgacttcgccgccagcaagctcgatgaatacaagaacaacccagcggagtggaattccgacttcgccgccgccatggtcaagctcagcagcctgccagcccaaggaaacaagttggagatcaggaagaactgcagggtacccaacccgcagtactaa

SEQ ID NO: 122885 - DNA, 2280 bp, Zea Mays
ctgaaccacacatctctgaacaaaagtaggggaggcgccccgcgtagccccctttcccacaatcccactccgtgccaggtgccaccctccccaagccctcgcgccgcctccgagacagccgcccgcaaccatggccaccgccgccaccgcggccgccgcgctcaccggcgccactaccgctacgcccaagtcgaggcgccgagcccaccacttggccacccggcgcgccctcgccgcgcccatcaggtgctcagcgttgtcacgcgccacgccgacggctcccccggccactccgctacgtccgtggggccccaacgagccccgcaagggctccgacatcctcgtcgaggctctcgagcgctgtggcgtccgtgacgtcttcgcctaccccggcggcgcatccatggagatccaccaggcactcacccgctcccccgtcatcgccaaccacctcttccgccacgaacaaggggaggccttcgccgcctccggctacgcgcgctcctcgggccgcgttggcgtctgcatcgccacctccggccccggcgccaccaacctagtctctgcgctcgcagacgcgttgctcgactccgtccccattgtcgccatcacgggacaggtgccgcgacgcatgattggcaccgacgcctttcaggagacgcccatcgtcgaggtcacccgctccatcaccaagcacaactacctggtcctcgacgtcgacgacatcccccgcgtcgtgcaggaggccttcttcctcgcatcctctggtcgcccggggccggtgcttgttgacatccccaaggacatccagcagcagatggcggtgccggcctgggacacgcccatgagtctgcctgggtacatcgcgcgccttcccaagcctcccgcgactgaatttcttgagcaggtgctgcgtcttgttggtgaatcacggcgccctgttctttatgttggcggtggctgtgcagcatcaggtgaggagttgtgccgctttgtggagttgactggaatcccagtcacaactactcttatgggccttggcaacttccccagcgacgacccactgtcactgcgcatgcttggtatgcatggcacagtgtatgcaaattatgcagtggataaggccgatctgttgcttgcatttggtgtgcggtttgatgatcgtgtgacagggaaaattgaggcttttgcaggcagagctaagattgtgcacattgatattgatcctgctgagattggcaagaacaagcagccacatgtgtccatctgtgcagatgttaagcttgctttgcagggcatgaatactcttctggaaggaagcacatcaaagaagagctttgacttcggctcatggcatgatgaattggatcagcaaaagcgggagtttccccttgggtataaaatcttcaatgaggaaatccagccacaatatgctattcaggttcttgatgagttgacgaaggggaaggccatcattgccacaggtgttgggcagcaccagatgtgggcggcacagtattacacttacaagcggccaaggcagtggctgtcttcagctggtcttggggctatgggatttggtttgccggctgctgctggtgctgctgtggccaacccaggtgtcactgttgttgacatcgacggagatggtagcttcctcatgaacattcaggagctagctatgatccgtattgagaacctcccagtcaaggtctttgtgctaaacaaccagcacctcgggatggtggtgcagtgggaggacaggttctataaggccaatagagcacacacattcttgggaaacccagagaacgaaagtgagatatatccagattttgtggcaattgccaaagggttcaacattccagcagtccgtgtgacaaagaagagcgaagtccatgcagcaatcaagaagatgcttgaggctccagggccgtacctcttggatataatcgtcccgcaccaggagcatgtgttgcctatgatccctagtggtggggctttcaaggatatgatcctggatggtgatggcaggactgtgtattgatctaaagttcagcaagcactgcctacctgcctatctttgacatgcatgagctagtacaagtgtgatatgtttttatcaatgtgatggtactctgttatggtaatcttaagtagcatccaaccctgtgtgtagtatgttgttttcgtgttggcatatgtttcagaagccatcatgtaagtgccttttactacatataaataaggtaataagcattgttatgcaccggttctgaa

SEQ ID NO: 122886 - DNA, 1158 bp, Zea Mays
cagcggccttgtctccagtgcgcgcctccttgcgcctagccaagctccgtgcgcgcgcgcccatctccctcctcatctcccccgcgcgcgcctggctagccctagtgctcggcctctagcccacccgcgtgcccgcgtgctcctccctgctgccgcgtccatggcgcccagctcggatctcacccaagtcgccactgtcgctccgctcggcgccttccctgctccccaagtctcgtgccttgccgagctcgccctccactcggctcatggcgctcggcctccagctcggccctaccctctgctcggcgcccgggccgctcctctcccttccccgcgagctcctccctgtttccaagtcgtagcgcgtccctggcaccagcttggagctcgcccggccgcgtccttgaccttgctccctgttgcgctcgctggccgactgctcgacccgagcagcggctcgtccccgacacctagtctccgcaccgcggttcccccagctccagctcggtttcgaccagagtagctggttgcctggtttgtgtcgtgtgtgcctgggcactaccctagttggtcgcctcagtgtgaattcgtcgtcgcgtccaggatttcggcatgtctccctgctcgccgtcagcccaagcgccacatcagacttaccctgtatgatgttcaccaagtgctcgacaaaaagctcgaacgagtcgtacagccattgtcttcgtcgaatggaaatcgtcgcgctggcacgtcgatgtcgtcgatcgccatcctcgtctacgccaagtcccaagccgtgaagacgctcttgtgctggccacgtgtcaccagctcgacaaaatgaatcccatgggtatctggtcaagaataggaattgtgtgcatcgctcgccagacgtgtctgatcaaagatgtcaaccggaaaccgtcgtcatgcttccgactatcgtgtcggattagtcagggtacgctagctaatcacgtgatgaggaggacaagagccaagctaacctcaagatggtgcaaggagtggtcttctccgtacgacgatgtcgtcagtcggaccaacctgaagatggttaaatcaagaaagtgctcggtcgagggataatcgtcaagcagacatcttctaacaaacactaacctagtgttatttcaggca

SEQ ID NO: 122887 - DNA, 100 bp, Zea Mays
gtggtgccatcatttgaacatgttcatgtttcatggatttcatatgttgagtttgaggtttgattatgttactcaagtggttattatgtggaatgggtgg

SEQ ID NO: 122888 - DNA, 136 bp, Zea Mays
gttgattcattaatcttttcttttgtcattccgatagaagcgtcagaattcgaggtcgaattctttttaagaggggtagagtgtgatacccggtttgcaaagaagagaagttaggggttgttttttttgttttttt

SEQ ID NO: 122889 - DNA, 339 bp, Zea Mays
ctatccccatgacgcccagcagctctgctgtccccctccccatgacgcgacgtctctgctcggctccctctcccggcagcatagctcctcgcagccggatttcccccgcagcccccagctcgagcagtgagctcgccgtcgcccattggctgttcgacagaatgcctgtgggaaaacatcgtgttgtgcgcagccccatccgcgacaccgtcgaaacccgtgctagccgtcaatgccatccgtcgcgcacgcgtgttcgaggtaaggccggtcgggtgaaccacatgcatgcccaactcagatccgattctgttcaggttgattgatttatagtttaca

SEQ ID NO: 122890 - DNA, 321 bp, Zea Mays
atgaccagaggacttcgaagattaaagaatttgaacattgatggagatggtgcagaagctgctcaggaggagcacgaaaatgtgggtggtgatagttatgaccaatgcaatgaagatgacaaatctgaaaattatgctgccaaagatacgagtagcatccaagaagattcaaatgatgacgtgacctctcgaacaaatgaagtgcataacatggttcatgtcgagcagcagcaacaacaatctggccatagaagtcttggacgaactcaagtccatacatctgcaccacatgagcaaacaccttcaaagcacttttgctag

SEQ ID NO: 122891 - DNA, 350 bp, Zea Mays
atgtgcctggtggtggtctgcgacgagccggagcgcgtggtggcgacgtaccaggtgcccgggcggtgcccgtactgcggcggcgtggtggtagcggccgacgtggagagcacgccgcggctctgcttcgttccgctctgcttccgcatccgacgccgcttctactgctccctctgctcacgtcgcctcgtctccgtcgcctgaacggtcgccggaacaggaaggcaggcacgcggacgcgacagagctctgtctggcggcgcgttgtcaagcgctctgtacgtatgcgcttatggagtattttagcaaggtacctcgaattccccatgtgctaaaaccatttgtatgag

SEQ ID NO: 122892 - DNA, 605 bp, Zea Mays
aatctccctcaaccttatgtcttctctctcttatctcacctttctcaacgtctctatgtctccacgcgcgtctgccgcctctcccgcgcccgcctctcccacgcccggccagccccgacgagccctcggccctggccgccactcccgcgcccagccgaccctgccccctgccacgaccacccccgacgcgcaaggccgcccccacccgccccggccgccgctgcggccgcatccgccgcgttgcgctccacctattcgccgacatgcgcaatctcctcggtgtgcccaacacgctcaacgtgctcaccgcctacccgcttctactcgtcggggttccgggcctcgtcctctgcctctacgacagcgggtgcttcggcgtcagcttgaggtgggaggcctcgggatggttcctcttttatgctgggaatgtagcagcagcatttggctcagcttactatcacctcaagccagatgatgaccacttaatatgggacaggttgccggtacatgaacactactttcttgttgtcatcttttcctctatagtttactcattcctttttgttttggcatggtttggattcctttttgagaaattagtgttc

SEQ ID NO: 122893 - DNA, 421 bp, Zea Mays
caaacttctccctataaacagtatcaaatagtccaaatcacctattgcagtatgtatacaaaatttgccagttgcagagtcgtgcattctctctatttaaaactctcttctatatacaacagcaaccaatgaattgcaaatacagacaaaaaaatataaaaaaacaagagcataaataaccaaatccggaaccagctggatacaggcaggcactcacagatgcgctgtcgaccaaggtctacctttaactgtacagggctccaaagcaagcacaactatgtatcttaaaaagaaaccaagctcaccatataatcaatcgtgcgccaacctaacaactctgctcacccttgccaatgtgcaatgcaagcactccatctggcctgatccatgtgactagatcctcagaaaatggcaattgtcg

SEQ ID NO: 122894 - DNA, 122 bp, Zea Mays
tgggcggtccaagtacataatatctagtataaagaaattcgtttctatcagaaaatggattcattatgtttcttttacagacaaaaaagaaaagtttagagttaaaaactatagacaaagtg

SEQ ID NO: 122895 - DNA, 696 bp, Zea Mays
cttgattcgtttccgcaggtcatctccatcctggaccgcaccggccatgcccgcttccgctgcgggcccgtcgtcgagccgccactggtgcctctccccgtggcgcacgtggtggctcccgtcggcgcggcgcagccccagagcctgaccctggacttcaccaagccgaacctggccgtgtcggccggcgccacctccgtcacctccacgtccttcttctcctcggtcacggccggcgagggcagcttgtccaagggccgcatcctggtgtcctccggcaagccgccgctgtccggccacaagcggaagccctgcgccggtgcagggacgctgcccgcgcgccagtgcagcctgtactgccatcgggggggacgcgcgcccacgccgggcggcctcgctcgcgccgagtcactggggccgcgccctgcgctgctgtggtcgggctaccgcggctgcgcccgcaccgacgccgcgcgacgcgcgcgagctccaggagccgcgcccagcgccctgcacgggcgccccgcgcccgtcctgctcgcgcccgtcgaacctgcgccgtccaggagcaccagcccggaagacccgcgcccctgctgttccgcgccaagcagtgcccctgctgtcccgtgtcgaggacgcccgacaccgagcactcagccgcccctgctgttccgcgcccggctgtccagtccg

SEQ ID NO: 122896 - DNA, 249 bp, Zea Mays
atggaactgatcaacgaggtacctccaatcaaggttgatggtcgcattgccgtctgtgaagggacgtcttcagttatccccaaccccactggtcaacaacaacaaccatttaatagtgcattaggatattattccaggttgcaggccaacactgaatttgttcttgctcatactgtcaagggaccaacagacaagtattcactgcccacagaacggtccaaaaacctgggtattttcaatagagagtaa

SEQ ID NO: 122897 - DNA, 1360 bp, Zea Mays
cattcacgtgtttccaaaataccgcacgtgtctaggataataagagagtttaaaccttttttaatagtaccaatcacaactgaactacccctgcaccaccaatcgtcaaaagacatgaccatggtctgaggtgaaaggttagtgaggcccaccctttgaagtaatagaaaccaaatttgtcaggtgaaaacacaagtaaccaagagatgctggatggtctcttgttggtcacaaaccgatctgctgttcagaaggtccctccacactaaccgatctgctgttcagaagcaattatgagccgcaaacgaaaggaacaaatgacattttgtgggagccaattcacttataagtcttcaacacaactgttgggtgctgcagatgtgattattcacaatgtgatagtgccattgagttcccacaaaatgtcatttcatatttcacttctttccttggcttgtggctcataatcacaaatgttttatggcttgcggctcaatcacaattatgaaccacaaatgcttcttgccatacaccaggaatttagtgatactgccatgtgattatttatgttaatcttaagatgtgatttttgagtagtttcatctgcctagtatccattgtttcataaattgttgtaatgctagttgcatttgttagtcttttggccttgctagttggcataagaatgcagcttaactgggaatttctgtttactcaacctctatttactaagtagacttgtgcaatacattgacttgtgacattccaagcaaaatgtttttgagcagtatatcatcattttctgcagtatttgcttgtcttatggtgttatatgtaaacaaatccagctagctgttttgtattcatgttcatcttttgcttcccagacatggcaactatggagaagcaaggaggtttttggaccaagcctctgatggtagagaaaggggcagcatattggaagttagatggttactgtgataactcagcaatattgcttcaagagtatggtggcgatgaattaatggcaaataaagacaagtggtttatgtttactgaagacgaggagaaaataattgaaaaacatttagccactaggtaatgagtttgtcttgccacgtttggatgtgtttctacctttccaatgatggtgaacttctcttttgttgcttgtatatcatgaaatttatctgttggaaaccctatctgtattttcttctgttgttgatcctccaactattgctatcaaaaaccattttatgtagtagcatcctaacaaatgtggcatacaattcattccagtatacctgaactattgtgatcaatgaactccaacatgtaacgaatgattagagttgac

SEQ ID NO: 122898 - DNA, 857 bp, Zea Mays
aggcctctggcttacacaagagacggagatgcatgggtaattgatattggcaaatatataagtgaatcagcttctatatcaaaagggtttcctctcaaccatatcaatcaggggatatcaggatataaaaacttgagcccttcttcaagctgaggaactggattgacatgcaaaatgacatagctgctgaaccagtgaatgctgctagagaaaaggcgcgtgctgcaaaagaaatggtaaaggagctaaaggaaaggctaaaggacaacatgaacaaaataattgtttcaccaaatgaagcagcagcctctaacagtgaagcaaataagtatattatttcccaaataaaggaggcacaggaagtcaagcgtgcagccataaatgacatggcaactatggagaagcaaggaggtttttggaccaagcctctgatggtagagaaaggggcagcatattggaagttagatggttactgtgataactcagcaatattgcttcaagagtatggtggcgatgaattaatggcaaataaagacaagtggtttatgtttactgaagacgaggagaaaataattgaaaaacatttagccactaggtaatgagtttgtcttgccacgtttggatgtgtttctacctttccaatgatggtgaacttctcttttgttgcttgtatatcatgaaatttatctgttggaaaccctatctgtattttcttctgttgttgatcctccaactattgctatcaaaaaccattttatgtagtagcatcctaacaaatgtggcatacaattcattccagtatacctgaactattgtgatcaatgaactccaacatgtaacgaatgattagagttgac

SEQ ID NO: 122899 - DNA, 2047 bp, Zea Mays
atcttcttttaactggagcagcagagaactgaaaagtgcccgcctctcgctcgcatcaggaaatcaacgactgagtctccacgactgtcggtcacttcggatggcggcaccaccggaggggaatgtccgcttaggcgaggggtgggacgaggacgacgtgctggagccgcagccgctggaggtcatagcgccggatgtcaagtccaagaagcgcaatccggcgcccggagttcgggttgttggtcgccggatctacgatccagagaatggcaagacctgccaccaatgccgccagaagacaacagacttcgcagcggcgtgcaagcaagtcaagaagaagggtccgtgcccagtcaagtattgcctcaagtgcctccttaacaggtatggcgagagtgccgaggaggcggccggcaaggaggactggatctgtcctaagtgcaggggcatctgcaactgcagcttctgtagaaagaagaaaggcgagatgccaactgggataatggcccacatcgccaaggcttccgggtgcacctctgtccatgatctccttaaaaaggggtcagatgtggtttctgctgcacaggcgattctcaaggtgaatggtagtgacaagggcacaaagagatcccgagggacagatgctgctgctgaggtggcgactgaaaaggatgtaaatataggcattgatatcaatacagttatagcagatgaaggagatgaaaatataggtgttgatctcaattcacttccttctgttgataccaagaaaaggcagaagcggcagaagctcaagcacaggacaaagaaggatcctgctgatgcaacgtcacatggagtcaatactgaaccattgcagatggatgggaaccttgattttctcaatagtaaaactgtgcgacccaggggtaccccagtcactaaaattgcaggcgcagagcttgatgacgaggatactggggctgcaattcagtttatagaattctgccgtgcatttacagagatttttcaaataaagaaagggcaaccagaaaaaattcttcaagatttagttggaggccgtgaacttcggtttgtatcctcagttgttgctgggtttcatataaatttgttatctgtcattcaagaaggaaaggggaagaagcctctggcttacacaagagacggagatgcatgggtaattgatattggcaaatatataagtgaatcagcttctatatcaaaagggtttcctctcaaccatatcaatcaggggatatcaggatataaaaacttgagcccttcttgtaagctgcgtgttctgaattttctttgtgatgagaccctctctactgacaagctgaggaactggattgacatgcaaaatgacatagctgctgaaccagtgaatgctgctagagaaaaggcgcgtgctgcaaaagaaatggtaaaggagctaaaggaaaggctaaaggacaacatgaacaaaataattgtttcaccaaatgaagcagcagcctctaacagtgaagcaaataagtatattatttcccaaataaaggaggcacaggaagtcaagcgtgcagccataaatgacatggcaactatggagaagcaaggaggtttttggaccaagcctctgatggtagagaaaggggcagcatattggaagttagatggttactgtgataactcagcaatattgcttcaagagtatggtggcgatgaattaatggcaaataaagacaagtggtttatgtttactgaagacgaggagaaaataattgaaaaacatttagccactaggtaatgagtttgtcttgccacgtttggatgtgtttctacctttccaatgatggtgaacttctcttttgttgcttgtatatcatgaaatttatctgttggaaaccctatctgtattttcttctgttgttgatcctccaactattgctatcaaaaaccattttatgtagtagcatcctaacaaatgtggcatacaattcattccagtatacctgaactattgtgatcaatgaactccaacatgtaacgaatgattagagttgac

SEQ ID NO: 122900 - DNA, 4207 bp, Zea Mays
atgagcaccgttgacaagatgctgatcaaggggattcggagcttcgatccggacaataagaacgtcatcaccttcttcaagccgctcaccctcatcgttggccccaacggtgctggcaagaccacgatcatcgagtgcctgaagctttcttgcaccggcgagctgccccccaactcccgctctggccacaccttcgtccacgaccccaaggtagctggcgagacggaaacaaaaggacaaattaagttgcggtttaagactgcagcaggaaaggatgtggtgtgcatccggtccttccagcttacccaaaaggcatcaaagatggagtttaaggcaattgaaagcgtcctccagactataaatccacacacaggggagaaagtctgcctcagctacagatgtgctgacatggatagagagattcctgccttaatgggtgtttcgaaggccgtactggagaatgttatatttgttcaccaagatgaatccaattggccattgcaggacccgtcaacacttaagaagaagttcgatgacatcttctctgccacacgctatacgaaagctcttgaagtcataaagaaacttcacaaggatcaaatgcaagagatcaagacttttaggttaaagctggagaaccttcagactgtaaaagaccaagcacataagctgcgtgaaaatattgctcaagatcaagaaaagtcagatgcctcaaaatctcagatggagcaactgaaggaaaagatctgtggtaccgagagagaaatcctgcaaatggaaacaagtttggatgaactgagaagacttcagggacaaattgacatcaaggcaacagagagaagtacattacttacgcagcagcatgaaaagcttgctgcactttctgaggaaaatgaagataccgatgaggaactaatggaatggcaaacaaaatttgaagaaaggattgcgttactagaaacaaaaatcagtaaacttgtaagagatatggatgatgaagcatcttatagctccgttctgtccaaacaaaattctgaattaacacatgaaattggaaagctccaggcagaagctgatgctcacctgactatgaagcatgaacgagactcagacataaaaaatatatgcactaaacataatcttgggccggttcctgaacatccctttacgaatgatgttgctatgaaccttacaaacaggattaaagcgagactatcaagtcttgagaatgatttgctggataagaagaaatccaatgaagatcagttagatgttttgtggaaacactatcttaaaataaatgctcgctactccgaagttgatggtcagatacaatctaagattgaatccatgtcaggcattttaagacggagaaaagataaagagaaagaacgcgatgctgcagaagtggagctttcaaaatttaatctatcccgtatcgatgagagggagagacatatgcaaattgaagtcgagaggaagacacttgcgcttggagaaagagactatgattcaattataagtcagaaacgaacagaagtatatagtttggaacagaaaataaaagtgcttctgcgggagaaagatataataaatagaaatgctgatgaaagagtaaaactgggtttgaagaaggatgcattggaaagcagcaaggacaagctcaatgagatagttaatgagcataaggataaaatcaaaaaggtacttagggggaggaatccttttgagaaggatatgaagaaggagatcaatcaagccttttggcctgtggacaaggaatacaatgagttaagatcaaaatcccaggaagcagagcaagagcttaaatttactcacagcaaagtaactgatgctagagaacaattgacaaaacttcgaagagatatggatgcaaaaagaagattcctggactcgaaacttcaatctattttacagatatctgctaatgttgacatgtttcccaaagttctacaagacgccatgaacaaaagagatgaacagaaaagattagagaatttcgcaaatggaatgcgggaaatgcttgcaccttttgaacatttggctcggaagaatcatgtatgcccatgctgtgaacgtgctttcacacctgatgaggaggatgagttcgtgaagaaacaaaggatgcaaaactcaagtactgcagagagatctaaagctctggcaatggaatcatcaaatgctgaagctctttttcagcaattggataaacttcggactatctatgatgcttatgtgaagctggtagaagaaaccatacctctagcagagaaaaacttgaatcaacatttggcggatgaaagtcagaaggcgcaggcatttgatgatcttttgggtgttcttgcccatgttcaaatggacagggatgcagtggaagccttattacaacccactgatactattgacaggcatgtacatgaaattcaacagctagtcaaagaagtagaagatcttgaatatgcacttgattctagtggccgaggtgtcaagtctttggaggaaattcaactggagctgaactttctgcagagaacaagggacacattgattgtcgaagtggatgatcttagagatcaacatagaatgctaaatgaagatatgtcaagtgctcaggtgagatggcacaatgctcgggaagagaaagtgaaagcttctagcatattggaaagattccaaaaatctgaagaggaattggtgcttctagctgaggaaaaagaacaactgattgtagaaaagaagcttttagaagagtctcttgatccattgtccaaagagaaagagagcttgttgcaagagtataatgctttgaagcaaaagctggatgaagagtatcatcagcttgcagaaagaaaaagggagttccagcaagaacttgatgctcttggaagacttagtatgaagataaaagggtacttggattccaagaaaaacgaaaagcttaaggaattgcagggaaggcatgttctttgccattctcagttacagagttgcatggcaaaacagcaaagaatatcagctgagttaaacaagagcaaagaactactgcagggccagggccagttgaaaagaaacattgatgacaatctcaagtacaggaaaacaaaggctgatgtggaacaacttactcgtgatatagaatcacttgaagaaaggctgctttcaataggtagcttgtctgctatagaagctgatctgaaacgccattctcaagaaaaagagaggcttaattcagaatttaacaggtggcaaggaacactttctgtttatcaaagtaatatttcaaagcacaaacaagagcttaaactgtcacagtacaaggatatcgagaagcgatatactaatcaatttctccagcttaagacaactgaaatggcaaacaaggacttggacagatattatactgctttagacaaggctcttatgcggttccacagcatgaagatggaggagataaataaaataatcaaggaactgtggcaacagacatacagaggccaggatattgattacataagcataaattctgattctgagggtgctggcactcgatcatacagctaccgcgttgttatgcaaactggtgatgctgagctggaaatgcgagggcgctgcagtgctggtcagaaggttcttgcttctcttataatcagactagcacttgcggaaactttctgcctgaactgcggtatattggctttggatgagccaactacgaatctagatgggccaaatgcagagagtcttgctgctgcgctgttgagaataatggaagccaggaaagggcaggagaacttccagttgattgtaatcactcatgatgagagatttgcccatcttatcggtcaaaggcagcttgctgagaagtactatcgagtctccaaggatgagaaccagcacagcataattgaatcccaagagatatttgactaagggtgttctaggaggctgtagcacgcactcgtttgctagtcgaatccagttaatttatgccaagtactggtgccagagcaatgttaacaagctttaggaggctctgttacgccgttacgtcagttgcgtgaaacctatccttcgttgttgtatacttatttaatctggccagaggatggaatgtgtgcactgggtgatggatgtttcacgacatcaatgaatgtttcacaatctagcatccgttttttttgcttca

SEQ ID NO: 122901 - DNA, 1080 bp, Zea Mays
atggccgggaggcagcgtcgtggccagaatgagcgtgttcccccaccgccgccaccgcctcccactctgcaggagctgatggctcagcagaacgagatcttgaggcagctggctcagcgccagccaccacctcagcattatggtggtggagaccatcagcaacaccccgcggcagctacctaccaggagttcctcagtactcggcctccattgttcacaagggcagaggatccacttgatgcagatgtgtggttgcgagtggtggaatccaaattcccgctactccatggagcttgttcagaggtcactaaagtcaggttcgccacccagcagcttcgcggacccgcaaggacttggtgggaccattttcttgccatgcagccagaggatcgagaggtggaatggagggagttcaaggcagctttcaggggacaccatataccagccgggattatggaccggaagctcaatgagtttttggcactcactcagggtaacaggacagtgttgcagtatgcccaggcttttaatgacttgtgctagtatgctgggtatcacgcagacacggatgagaagaagagagacaggttcaggagggggctcagcacgaagctccgtgatcgtctcaacaccgtcagggccaacagttacaatgagttggtcaacatggctatctcccaggaggactgcatttcagctcgacaggcggagaagaagaggaagacccctgtggcaggaccttcagctcagccacagcgcttcaggattgtgtccgacactcagaacaggggaccccagcagcaacaaggaagatgggtgatccgaccacagcagcagcagcagcaggcacccaaccgcacccagtttccagctcagagggccaatcagcagcagcagcagtaccgccaggcaaatgacaacaggtgtttcacgtgtggcaacaccgggcattatgccaagaattgccccaggaaccagcagaggcaggggcagaatgtcaatcagaaccaaggcaagaggcagaaggtgcaagtgaggcagggcaggctgaacttcaccaccatggctgatattccagag

SEQ ID NO: 122902 - DNA, 102 bp, Zea Mays
ctcaactatattccccatagaaaagtactcatgatatatccatatgttttttattttaataacaagagtgtggactcaatactcaattatattccatatcag

SEQ ID NO: 122903 - DNA, 1234 bp, Zea Mays
caagcaagatcattatcaaaccaatctctctcccttgcaatgaccctctcaagcgtctagggctgctaccctagaaccaagcctgcggcagaggggtataacctcgccggagaagacagctatccccatggaccgaaggtccatgtcacctggtatcagctccaggttatcctcaccaccaccagccgcccatccctcaccaccaccagccgccgcgcaatcagccgccgcaacgccctcccacccgccctctccaactccagatgcattcactcggctcgaagagagttttggtcgtctcacagagaagtgggatcagtttgttgtgatgttccaccgctacaaggagaagacagagaaggaactccaagcagcggtgcggcttcaggcggcagcgcgagggttcctggcacgccgccaggtacagtcccttcgtggggagaagcacctttgctgtggccttcagggccaccccatggccgtcatcacatgagcaggccgtggtgcgcctgcaagccgcagtgcgtggcttcctttgttaggcgggcggtgcggaagctgcacttgctgatcagctcatcgctgcaccaactcgcagcctgcgcgcccaaccaccaggtctcgtctatactttttgaaccccctgcagaagtcgaggtctgggtatgcagccccctgcacggccaaagagggtcgtctccttcattcgggcaactgccttggtgctggacagacccaacataagaacaggctggttcctccttcacctttcatccaacgtgaagtccgcagttcagctctttccttgggatccaggaggacatagttgcagttcaaatttatattttagttccacaattattttgtattttcatcttaaataataaaggtaagccgagatgtaaaaggcttaaccttaaatcgtgtcaggtaagtctatggtagctcgaggacgagctggtcctcaagggagggggagatgtcatgggcatcatagggagcgagaggcaacaaccaggctgggataaggctagagaataagattgagatgagctgggataagactagagaataagattgagatgagagaattgtggagagttggttagcatcagataagtccaagaaagtaggagttagttaagagtttgtaggagaagttggttagctacagggctatttataagacacatggcagcagggaataaatcaagtaaagatcattatcaaacca

SEQ ID NO: 122904 - DNA, 747 bp, Zea Mays
atgcagtttttggctgaagcttctgtaacaaggacattagcagcttcaactaatggacctactttgcgatcaaggactgaaagggatattgttgatgaagaatctgaaaatagttacgaagaatctgaaaaccccatcaatgatgaagcaaaaaagtggagagagtttaaggctgacctaaagaacaaatattttgatggaacattgagttttgaagagcttattgctaaaagggatgaaagggtgaaagaatctgattgggagtggttgataacttattggatgtctccagaagccgaggttcgtacaaacagagatgacttgcagcttactaggcgagttgcaagcactgtgggtcgtctaaggaatcgtgaagatgttaatattattgaagagcaaagtcgcaggcgagacattgcaacaatggttggtaaagaagtcatattatattctatgatgagatcagaagttcctgttgcaatagcaaatattatctcaaccgacccaaccactaaggttgcagatgttcctcttggaagggagttcacacaggtttttgtgactcgcgtgctaaaaagggaaagtactctgccacgaccatacttaggtgtagagagtacgggggatgctctttttatgcccgttgcatggcgaacaaacaagatgggtcataacaaaaaatcaacattgacccaaggttctacagcagcaggggaggtgctggaagcaaggatcaggagtgcttga

SEQ ID NO: 122905 - DNA, 1801 bp, Zea Mays
ctgcagacacgggccacgctatactgcccggccggcggccagttctcgtagtagtcagctacttaatgatcaggtactttacttaccgattacatacggcattggagtttgaattgccggtcgctcgctcattgcattgttatgtactgtagctagctagagcatcgcggagattacaagtggcggcgggcatggcggtggcggcgttcccttcctgcggcgccttcgcccctccttgcctagtgagtacaaggagagccttctcctcggtggtggccatggcttccgcagcccccaggaagcccttcgcccctcctcgcgaggtacaccgccccgtggcgcactcgctgcccccgcagaagcgggagatcttcgagtcgctcgagtcgtgggcggcggacaacatcctggtgctcctcaagcccgtggagaggtcctggcagccgcaggactacctgccggacgccgcctccgagtccttcgacgacgaggtccgggagctgcgagagcgcgcccgggagatccccgacgactacttcgtctgcttcgtgggcgacatggtcaccgaggaggcgctgccgacgtaccagaccatgctcaacaccctggacggcggcgtccgcgacgagaccggcgccagctcgaccagctgggcggtgtggaccagggcgtgggccgccgaggagaacaggcacggcgacctcatgaacaaatacctcttcctgacggggagggtggacatgaggcagatcgagaagaccgtccagtacctcatcgcctcagggatggatcccaagacggagacgaacccgtacatgggcttcgtctacacgtcgttccaggagcgcgccaccttcatctcccacggcaacacggcgcgccacgccaggcggtacggcgacaccaagctggcgcagatctgcggcacaatcgccgccgacgagaagcgccacgagtcggcgtacgagcggatcgtcgagaagctgttcgaggtggacccggactacacggtgcgcgccttcgcggacaccatgaggaagaaggtggccatgcccgcccacctcatgtacgacggccaggacgacgggctgttcgcgcgcttcagcgctgtcgcgcagcgcatcggtgtctacacggccagggactacgtcgacatcctcgagttcctggtccgccggtggggcgtccaggaactcacggggctgtccggggaaggccgccgcgcgcaggagttcgtgtgcgagctggggccccggttcaggaggctggaggagagggcgcacgacaacaaggccaaggatccggagttcgcgccattcagctggattcacgggcgccaggttcagctttgattaaagatgatgactgggggattcgccgactctctccgtcctcagatgatatgttgtactgtactagcatataactaagaattgattgaagttgctgtaaaatgcatcaaagtacatccgctcttgtttttggtgctagagcattgtaaaatgcagggaggccgggagagcgatgaaaacagaatggaagatatattgcctcagcgatgcacgcaagtactagtctgtatgcaacaataataattcatgaaatcagataccgaccacagacttacaaatctacagttggcgcccagttgatgtcaaacaaagtgagaaaccaagagttttgagtatacattgtactggttttttacgactcaaaggaccccaaagaaaggattggtgatggcagaattcagctcggctccagctgtgttcaggatagccttgtcgactttttcccttgc

SEQ ID NO: 122906 - DNA, 1638 bp, Zea Mays
atggcggtggcggcgttcccttcctgcggcgccttcgcccctccttgcctagtgagtacaaggagagccttctcctcggtggtggccatggcttccgcagccccgtgagctctgccttgtcctcctctgaatcttgcggtgcctcaattgaatttcctttagctttgtgataatcttgcgatgatgctgatgatgaatgaagggtgagagctcccagcaggaagcccttcgcccctcctcgcgaggtacaccgccccgtggcgcactcgctgcccccgcagaagcgggagatcttcgagtcgctcgagtcgtgggcggcggacaacatcctggtgctcctcaagcccgtggagaggtcctggcagccgcaggactacctgccggacgccgcctccgagtccttcgacgacgaggtccgggagctgcgagagcgcgcccgggagatccccgacgactacttcgtctgcttcgtgggcgacatggtcaccgaggaggcgctgccgacgtaccagaccatgctcaacaccctggacggcggcgtccgcgacgagaccggcgccagctcgaccagctgggcggtgtggaccagggcgtgggccgccgaggagaacaggcacggcgacctcatgaacaaatacctcttcctgacggggagggtggacatgaggcagatcgagaagaccgtccagtacctcatcgcctcagggatggatcccaagacggagacgaacccgtacatgggcttcgtctacacgtcgttccaggagcgcgccaccttcatctcccacggcaacacggcgcgccacgccaggcggtacggcgacaccaagctggcgcagatctgcggcacaatcgccgccgacgagaagcgccacgagtcggcgtacgagcggatcgtcgagaagctgttcgaggtggacccggactacacggtgcgcgccttcgcggacaccatgaggaagaaggtggccatgcccgcccacctcatgtacgacggccaggacgacgggctgttcgcgcgcttcagcgctgtcgcgcagcgcatcggtgtctacacggccagggactacgtcgacatcctcgagttcctggtccgccggtggggcgtccaggaactcacggggctgtccggggaaggccgccgcgcgcaggagttcgtgtgcgagctggggccccggttcaggaggctggaggagagggcgcacgacaacaaggccaaggatccggagttcgcgccattcagctggattcacgggcgccaggttcagctttgattaaagatgatgactgggggattcgccgactctctccgtcctcagatgatatgttgtactgtactagcatataactaagaattgattgaagttgctgtaaaatgcatcaaagtacatccgctcttgtttttggtgctagagcattgtaaaatgcagggaggccgggagagcgatgaaaacagaatggaagatatattgcctcagcgatgcacgcaagtactagtctgtatgcaacaataataattcatgaaatcagataccgaccacagacttacaaatctacagttggcgcccagttgatgtcaaacaaagtgagaaaccaagagttttgagtatacattgtactggttttttacgactcaaa

SEQ ID NO: 122907 - DNA, 1617 bp, Zea Mays
atcatgcattcttcatggcgacggtgaccagtttgagcttctcaggcagctgcagacacgggccacgctatactgcccggccggcggccagttctcgtagtagtcagctacttaatgatcagctagctagagcatcgcggagattacaagtggcggcgggcatggcggtggcggcgttcccttcctgcggcgccttcgcccctccttgcctagtgagtacaaggagagccttctcctcggtggtggccatggcttccgcagccccggtgagagctcccagcaggaagcccttcgcccctcctcgcgaggtacaccgccccgtggcgcactcgctgcccccgcagaagcgggagatcttcgagtcgctcgagtcgtgggcggcggacaacatcctggtgctcctcaagcccgtggagaggtcctggcagccgcaggactacctgccggacgccgcctccgagtccttcgacgacgaggtccgggagctgcgagagcgcgcccgggagatccccgacgactacttcgtctgcttcgtgggcgacatggtcaccgaggaggcgctgccgacgtaccagaccatgctcaacaccctggacggcggcgtccgcgacgagaccggcgccagctcgaccagctgggcggtgtggaccagggcgtgggccgccgaggagaacaggcacggcgacctcatgaacaaatacctcttcctgacggggagggtggacatgaggcagatcgagaagaccgtccagtacctcatcgcctcagggatggatcccaagacggagacgaacccgtacatgggcttcgtctacacgtcgttccaggagcgcgccaccttcatctcccacggcaacacggcgcgccacgccaggcggtacggcgacaccaagctggcgcagatctgcggcacaatcgccgccgacgagaagcgccacgagtcggcgtacgagcggatcgtcgagaagctgttcgaggtggacccggactacacggtgcgcgccttcgcggacaccatgaggaagaaggtggccatgcccgcccacctcatgtacgacggccaggacgacgggctgttcgcgcgcttcagcgctgtcgcgcagcgcatcggtgtctacacggccagggactacgtcgacatcctcgagttcctggtccgccggtggggcgtccaggaactcacggggctgtccggggaaggccgccgcgcgcaggagttcgtgtgcgagctggggccccggttcaggaggctggaggagagggcgcacgacaacaaggccaaggatccggagttcgcgccattcagctggattcacgggcgccaggttcagctttgattaaagatgatgactgggggattcgccgactctctccgtcctcagatgatatgttgtactgtactagcatataactaagaattgattgaagttgctgtaaaatgcatcaaagtacatccgctcttgtttttggtgctagagcattgtaaaatgcagggaggccgggagagcgatgaaaacagaatggaagatatattgcctcagcgatgcacgcaagtactagtctgtatgcaacaataataattcatgaaatcagataccgaccacagacttacaaatc

SEQ ID NO: 122908 - DNA, 1529 bp, Zea Mays
ctgcagacacgggccacgctatactgcccggccggcggccagttctcgtagtagtcagctacttaatgatcaggtactttacttaccgattacatacggcattggagtttgaattgccggtcgctcgctcattgcattgttatgtactgtagctagctagagcatcgcggagattacaagtggcggcgggcatggcggtggcggcgttcccttcctgcggcgccttcgcccctccttgcctagtgagtacaaggagagccttctcctcggtggtggccatggcttccgcagccccggtgagagctcccagcaggaagcccttcgcccctcctcgcgaggtacaccgccccgtggcgcactcgctgcccccgcagaagcgggagatcttcgagtcgctcgagtcgtgggcggcggacaacatcctggtgctcctcaagcccgtggagaggtcctggcagccgcaggactacctgccggacgccgcctccgagtccttcgacgacgaggtccgggagctgcgagagcgcgcccgggagatccccgacgactacttcgtctgcttcgtgggcgacatggtcaccgaggaggcgctgccgacgtaccagaccatgctcaacaccctggacggcggcgtccgcgacgagaccggcgccagctcgaccagctgggcggtgtggaccagggcgtgggccgccgaggagaacaggcacggcgacctcatgaacaaatacctcttcctgacggggagggtggacatgaggcagatcgagaagaccgtccagtacctcatcgcctcagggatggatcccaagacggagacgaacccgtacatgggcttcgtctacacgtcgttccaggagcgcgccaccttcatctcccacggcaacacggcgcgccacgccaggcggtacggcgacaccaagctggcgcagatctgcggcacaatcgccgccgacgagaagcgccacgagtcggcgtacgagcggatcgtcgagaagctgttcgaggtggacccggactacacggtgcgcgccttcgcggacaccatgaggaagaaggtggccatgcccgcccacctcatgtacgacggccaggacgacgggctgttcgcgcgcttcagcgctgtcgcgcagcgcatcggtgtctacacggccagggactacgtcgacatcctcgagttcctggtccgccggtggggcgtccaggaactcacggggctgtccggggaaggccgccgcgcgcaggagttcgtgtgcgagctggggccccggttcaggaggctggaggagagggcgcacgacaacaaggccaaggatccggagttcgcgccattcagctggattcacgggcgccaggttcagctttgattaaagatgatgactgggggattcgccgactctctccgtcctcagatgatatgttgtactgtactagcatataactaagaattgattgaagttgctgtaaaatgcatcaaagtacatccgctcttgtttttggtgctagagcattgtaaaatgcagggaggc

SEQ ID NO: 122909 - DNA, 1774 bp, Zea Mays
accaccacacatgccaccttcgcttctcccccttccctttctttggtcagtcccaaaccctaacagcccaccaccctccgcgacgaggaggcagagtggggcttaaaccctaccgcccccgaagcccagcggcggccatgaagacgctgtgccccaagcccggaaagggcggcaagatccacccttcgcccgccgaggaccccaccgcggcggcattccgcctcctcccggccgccatcctcgtcctcgtcgccgggctgtgccccgaggaccagcgggtgctggcccacctcgtcacgcgctcgttcctgctgggctgggacaccatcacggcgccgccgccggagcaggcgcgcgggggcccgcgtcgcaggcgcggccacccgcccaccgtcgggtgcctgtgcttccagtgctacggcagcttctggtcgcggtgggactgctccccgcagcacgaccgcatacacgccgtcctcgacgccttcgaggagcacctcaacgccgccgagtccgccgccgccgccaccgccacccctccctcctccaagcgccgcgacaagggaaagcgcagcagggctcctgccgctactacacctccgccacagccgccgacgcggggcagccccgagtcccaggagcccccatccgaggtggcgcatgaaccctcggcgccgctcctcccttcctgcccttgtaccccgccaccaccggcccccgcggcgtgcctctccgagaacaaggagaatgtcccggaagagactggcgcggaggccaaagcggagcaatgcggcggcgaggtggcggcggaggccgatgaagagaggaagcgcgggtgggcggacgtgatgggcggggtgctgaacctgcgccgctgggggatttggagccccgccgtggagagcggcgccacctaggtgcggcaggcggccaatggcattcctgtaaatgctgggcctgtctagggtacttttggcaatagatcggactgcgcacgcagcagcagaggtagagagagagagagagagagagagagaagcgctggtaactcttttctctcctctgttgggggcagggaaatggtgatctgcaagcgcgggtagctactgtattttgttggtaattatggcaactaatgatggtgcaactgcaactgaaacaagatggacatcacttggtgcttgataactgtgtggattctggtcttggccaatgccgctggtcgatccggtcctgctggtttctccagctcttgatgcactataggtgaactggtgtagtagttcatcatttccgtctggtatttgccttatccgctagtacacccttcggccccagttcctttttcttccccttctgagtatccattatcttttgttttgcctgatctatctttatagcattgtattctttcgtcccagtaccattctcagctcgagagatggagagtggtggggcatggtgacatgtgcttatcagctggacaacacgagctatcgctatcagagagaggagtagcatcggccattgtttggcggcagcactggtggggattgttttgggatccaagggggttcattactccgtccccgagtacaccgtggaccagtcgtccataaaaccggagcagtcctgaatctcatctaggttcactcgtacacatcctgggtcgtcgtacctggagtactactctccagtccagtccttatatactctacgcagcttgccgaatactacaaattgtggcatttctgttttctttatatagataata

SEQ ID NO: 122910 - DNA, 1090 bp, Zea Mays
actacttcctagctcaaacgtctggtccaccagctcgtcacacgctccgatctcctcccacacctctccacctccgacgacgaccaccaccatggcggccgcttccctcgcgcgcctctcccgccgcgccaccacttccacctccgtggcggcgcccgccttccggcgcctcctctccgccacctccaccgcccccgccgcggcatccgccccgccgccgccccccagcgcggccgccgccgcggccgtgggcgcggatcgagtgcggtgggactaccggggccagcggcagctcgtccctctgggacagtggatgcccaaggtggccgttgacgcgtacgttgctcccgaggccgtgctcgccggccaggtcaccgtgcacgacggcgcctccgtctggagcggcgccgtcctgcggggggacctcaacaagatcacgctcggcttctgcgccaacgtccaggagcgatgcgtcctccatgccgcatgggcggcgcccacagggcttccagctgagacccttgtggaccggtacgtgacagtgggtgcctactgcctgctgcgctcttgcaccatcgagcccgagtgcatcattggccagcactctatcctcatggaaggttcgctggttgagaccaactcaatcctggaggctggctctgtattgcccccaggaaggcgaattccgactggtgaactctgggctggaagcccggctaggtttgttcggaagctgaccaacgaggagatcatggacattccaaagcttgcaactgccatcaacgatctgatgcaaagccatttctcggagttcctgccttactctaacgcttatttggaggtagagaagttgaagaagtcgttctcgatccccctgtaagagcatgttgccccgctcgtccagttgaatgaatgaggaaataaaggttccccaatgctagatgttttgtattgaatcgaacttctacttctgttacgtctttttggggggttctttgttgttttgagcatggggacacgtgcaggaatcatgtcttgatatctttttacgcaacccaattctgtgttgattactttcagttctactatt

SEQ ID NO: 122911 - DNA, 222 bp, Zea Mays
atgttacgtttgcagatatggacctcggtggttttttccacattaggaaagctggaagagccttttgaactcagtttttttgctaatagtggtgttatggtgaaacaaagttttgtgtgtatgtaccaacaactaaaatgtaaacacgacattatcatagttgagtacacgaataattatctcttatatcttattgtaaaatctgaaacatttctcctgtag

SEQ ID NO: 122912 - DNA, 345 bp, Zea Mays
atgtcgtctatgtctacaggtgccctcgccgaatgtcgttgctgtcgcagccgccacctgctggtcaccacgttcaaggactgctgcaacatggcagcgctgccaccagcatgctccagctgtggtggtttgacggagcttctcaacgccatggacgcgcaatgggtagccggccctagcagcagcgtggacgctatagactctgttctctttcaacccactgcttttgttgcaaccggtgcacacatgcaacctggccttctcgttcatggtcctgttaaagcttcgcatcatgttgattcttgtgaagaattcaatacacctaaaaatatccaatcagtttaa

SEQ ID NO: 122913 - DNA, 141 bp, Zea Mays
atggctgctggcggccaaggggagagcaggggcaccggcgtgctccccgggagctcggccatggctgctctgttgggcgtcggccaagggaactgctccctgcagggagcgagcgccatagctgggagcttggctgcttga

SEQ ID NO: 122914 - DNA, 1506 bp, Zea Mays
aggtgatgaaaggggcttaaagctactgcagtccattttgaagccaataatgctgagaaggactaaaaattgcacagacaaggagggcaggccaatccttaatttaccccctgcaaacattgaagtaaaatactgtgttttatctgaggctgagaaggatttctatgaagctctatttcgaagatctaaggtaaaatttgatcaatttgttgagcaaggaagggttctgcacaactatgcttcaattttggagttacttttgcgcctaaggcaatgctgtgatcatccattccttattatgagtcgtggggatacaaaagagtatgcagacctaaacaagcttgcaaagcgttttctgcgtggtggtaatggtgctgttaatggtgattcttgcatcccctctagagcttatatcaaacaggttgtccaagaattgcaaaaggatgaaggggagtgccctatttgtcttgaagcctttgaggatgcagtattaactccctgtgctcatcgtttatgccgagagtgtctcttatctagttggcggagtgcgacagcaggcctttgtcctgtctgtagaatgtcaatgagcaagcaggaccttataactgctcctactgataaccgctttcaaatcgatgtcgaaaaaaattgggttgaatcttccaagatatctgctctcctgcaggagttggaagctcttcgcagttcaggcgccaagagtatcgtgtttagccagtggactgcttttttagatctgttgcaaattccactttctaggaataatttctcatttgctaggctggatgggacgttgaatcttcagcaaagggagaaagttataaaggagttctcagaggacaaaggcattttggttctgcttatgtctctgaaggctggaggtgttggaatcaatcttactgccgcttctaatgcatttgtcatggacccttggtggaatcctgctgtggaagaacaagctgtcatgcgcatccatcgaattggtcaaacgaagactgtttctatcagaagattcatcgtgaagggcactgtcgaagaacgaatggaggctgtgcaggctcgaaagcagcgaatgatttctggagctttgactgaccaagaagtccgcactgcacgtatagaagaactgaagatgcttttctcctgagactacaaaagggctgttgtgcatcggatggtcggcaattcggcatggctaaaacaagatggctggtagccagaatgttggaaggtaagacgagggtaggaaattgcacgcccaaatatcttggcgtttagctgctgttgtgcgcacgatttgtacatcatgaatggttaatggctgacaagagtccaagacgcttcattgagtgaaaatcgaaagcatcatctcaaaattgaatatttctgtttgggttttgtataagtagataaactgaacatttgcagtaatacgaaggcagctacctgctcgatcattaatttaacaataaataaatttggtaaggt

SEQ ID NO: 122915 - DNA, 546 bp, Zea Mays
actactgtcacaattggggacggtaagacggccaggttctggcacgatagttggctcgatagcatggctccaaggaatatagccccgcacctcttcgacctaatcccgagaaagaacaattcggttgcccacgaacttagcggacaacattggatcaaaacactaagaagtaggatcacttccagtgttcagattgaggagtttgtctctctttggactagactctgggatttccagctgcaacttgactcaccggataccattgcctggaatcggtctcctgatggtatcttctcagttaaattggcctacagagcacaattcattggctcgtacagtcaccttaatgctaaccttgtctggaaggcacgcgcagaaccaaaatgcaaaatttttgcttggattctcctgcaggaaaaactactcacggccaacaatctcgccactcgtgggtggcctcatcagccgtcttgtgccttctgcaacggaacccttgagactggtattcacctgtgtctacattgtcctttcgcccgtgcggtgtga

SEQ ID NO: 122916 - DNA, 1908 bp, Zea Mays
atttcgccggccgggtgcgagcagagccgccgccgccttcttgcgtgggagatggtgaaggagcgggaggagcaagtggccattgtgcgcatggtgcttggcgagggtacaccggagatggacatcatccgtgctctccacatggccggcgacgaccccaccaaggccattaacatcctcctcgacctcaacaaggctgcgccacctctcccgccgtcgccgtctccctttccctgtccatcgccctccccttcgccggggaaacccgccaaagccctcgtcgactcaaccccaccatgcaaagcccctacccggcccatgcccacggcagagaaacctaagtccactacaagcaacggtggcagcgaggagcactggtggctggtggggagcgccgagatggtggggctgtccacctgcaagggaaggcgaattacctcaggggacgtggtcaccttcagcttccccaatgccacaaccgccgtgggcaagagccgtccgagccgtcccgccctagcttcctgctcctccgagatcatgcgcttctccaccccgagccacggggaggtgggtcgcatccccaatgagtgggcaaggtgcctccttccccttctcaaagagaacaagttaaaagtcaagggctcgtgcaaatcagctcccgaggtgcttaccattatggacactgtcctcttgtcagtgagtatatatatcaacagctcaatgtttcatgatcaaaagcaatcgtcacccaaagcagctcgatttgctccatatgactccacatttcaccccctacctgcacttttcaaattgataggacttgctccttttattaaggccgcttttactccagaagatctttattccaggaagcggccaactgaaacaaagagcagtatagggtctcctgctgcaaagctgacatccggcagattgaggttgtcttctgatggaaacgaagatgatcatggtgaagaaactgtttcagattcagatttggatgatataattgggatctcagacagctgtgcactagaggaaagggctccccctgattctctgatgtgtgatctacgctcttatcaaaagcaggcacttcattggatgctgcagcttgagaaaggtagttcttcccaggatgccgctacaacccttcacccttgttgggaagcatacaaacttgaggataagagggaactcgttttgtacttgaacgtgttttcaggcgatgctacaactgaatttcctagtacattacaactttctagaggaggaattctggcagatgcaatgggactggggaagactattatgacgatagctcttcttctttctgattctagcaaaggatgcatcacaactcagaatgctgctcagacccctagagaagctagtgggttgggtgaatcgcatgatgctgtgaagaagcttgctaaccctttctcttttagcaaacacaagaaacctaaggccccacttattggaggaagcaatctaattatctgtccaatgacactaattagtcagtggaaggcagagattgaagctcatactaagccaggcactgcgaatatatatgttcactatggacaaaacaggccaaaagatgcaagcatcattggtcagagtgatattgtcctgactacatatggtgttgtgtcatcagagttttcaatcgatggttcaacagaaaatggggctttgtactctgtacattggttcagagttgtgcttgacgaagcacacatgataaaatcttctaaaagtttgatatccctagctgcggctgctctgactgcagatcggcgctggtgtctcactggtacaccaattcagaacaatttggaggatttatacagccttttccggtttctgaaagttgaaccatggaggaactgggctttgtaa

SEQ ID NO: 122917 - DNA, 1179 bp, Zea Mays
ctgcctggtcccgctgtctccacgtgagtggagtttggccccaccgaacggcgtccggtcgcgcagtaacgaaggaggaaaaggaaattgaagtggacgaacggcttcggcttggcgtgtagtaggccccttgaacgaacggcgcgagccgggaccaccaccagcatctgcggcagagagggtcgcgttggttcgacgcaaacgaaccccggtgctcccttgcggccggctattttaccgcaccagctctccccacaaatcagatcagatcacaccacagccgcggatagagaaggaaaaatttccccaaaccctagcttcggatctcgatggcgaacccccacgtcttcttcgacatgaccgtcggcggtgccccagccggccggatcgtgatggagctgtacgccaacgaggtgcccaagaccgcggagaacttccgcgcgctgtgcacgggcgagaagggcgtgggcaagtccgggaagccgctccactacaagggctctaccttccaccgcgtcatcccccagttcatgtgccagggcggcgacttcacccgcggcaacggcaccggcggcgagtccatctacggcgagaagttccccgacgagaagttcgtccgcaagcacaccggccccggggtgctctccatggccaacgccggccccaacaccaacggctctcaattcttcatctgcaccgtggagaccccctggctggatggcaagcacgtcgtcttcggccaggtcgtcgagggcatggaggtcgtcaaggccatcgagaaggtgggctcccgcagcggcgccacctccaaggaggtgaaggtcgctgactgtggccagctctagatctctggtctgtccggctgccctccctccgtcatcgtcgactccgcctgcgtccgtcccttttcatttccttcgatctgaataagatgatggcgatctgagtggtggtcttagttgagtcttcaagtcgtttgtgtctgtgtccctcgcggttttaatttagcggtttaggtgtggatctgtgaatcccgtggcgcctctgcttaatccttgtttcagctgttatgttatgggatccatgataatgctataaaactgaaattccgtttcgtgcttctttacttgtaccacctttaatgtgaactgccaagcatggatcagctcttggtgtact

SEQ ID NO: 122918 - DNA, 642 bp, Zea Mays
atgtctttgattattgatgtcagcacatgcttgaataatttgagaaccgaaggttgggagccattgtttgaagaaactaaagcattctgctttgcaaaagatatcccaattccaaatatgagtgatgaagtgccacactttggtcgatcaagaagaggtgggagaaacaatatcactcaatatcactattttcgtgttgatatcttctatgctgcaatagatgctattataacagagtttgatcatcgctttaatgagcgatcgtcagagttacttgtttgtttttcttgtcttgaccctagagatacattatctaagtttaatgttgataagttggttcgtattgtggatatctatcatgatgacttctcttttgatgaccgcaagaccataaaagatcaacttcaagctttcatcattcatgtacgaagacttgaagacttcaaagtctattatgatcttgcaagtgtttcaaaaacaatggttagactcgagacacacattgtttttctattggtttattgtctcattgagttggcattgttattgccggtggcgatggtatgctatattgaaagagaaatattcaaaggaattgatcttaaaaaattaaaaacccattccaaaaaaagaaggaaagac

SEQ ID NO: 122919 - DNA, 327 bp, Zea Mays
atggcaaaggctgaaactagaattcgttgcatctgtcataccaacatgaaaccagaagaaatcaaggagtacagaaagcagaagcgagcaaaggccgagaagagcctagatacgtatgtgcagatggcaaaggctgttacatttcaggttgcctgtgcgaaagtaataatcaagacggatgatgtagctgaaggacttgaggagctcatctctcttaataacatgtatagtgctgagatgggatctccaatgggaccagttcacatgtccgtcacaatctggacagaccccaaacaccaacgaaacacagattcagcaaaaaagtga

SEQ ID NO: 122920 - DNA, 474 bp, Zea Mays
atgcggaggggatctggggctgctgctgcaggcttgctgtggcattatgtcgagcacgccgagggcacgacgcaagggagatccacgtggctgcgcgaactagcatcgcggctgttgacagggcgagcgttggggaaacaaacaccatgggaggtcatctgctgttgtgggctggtgccggagatggaggaactagccaacctagggagcgggtctggagggacctcactggatttggagcagggagctcgggcatggggaagcaggggaaccctgcgcgtgaacgagagggtcgagcggggccctgagcttgtgctcacgcgcggtcctggcattggaggtgggaaagctcgttggcgtcctgtggaagacgttggccggcgagtggagcgggtcgacgacgcactactgagggagggcaccgatgccatggacgccgggttggagcgccgggcgaggaggagatcctcctag

SEQ ID NO: 122921 - DNA, 804 bp, Zea Mays
atgaacgtccctgccctctcccccctgtttccatggacgcgcacaaagctcctctgctggcgcgcccaagctccatctcccagcgcgccctctctgtggaagcttgcatcgcgccccctctgcttgcctctggctcggatggcgcccccaggtcctaggttgctcggtatcaagcctccctgcgcgcagcttctcctgtccagcctcttcccaagccaccatctccagccgtcgtgtggagcgccaactgagtctctttccacgtccaagctccagatctcgtccatgatttcctccctggttcgctggtctgcgcgtccctgcttgccatggctcacggtcagcccttgggacgctccagctcggattcagctcagctcgcccaagtcactcatggttgcgcacggtgttcttgtcgacgctgtgcttgttaggattagcctctgcgcatccctgctcctatgcgcgcgcacgctcctgccgagctcagccctgtccatttcgccgcgctcggtctctagctccctatgcgcgccgttgcgagctcgtcagccaccgttgccttgtcacagaacccccaatgccgtcatccatggtcacgacctcgccaaatacgttcgtcgcttgacccgatgtcgtttggctcgtcgaccttgtccgctgccgcgtgcgcttgttcctaaagtgcatcgcgcagtagttggatctcgcgcgcgtggttttgaagctctgcgcgttcgtcgtgccgcgtcgtgtgccgatattctctcccggcagaccttgtcgtcgaccatgttcaagtga

SEQ ID NO: 122922 - DNA, 390 bp, Zea Mays
atgggtgcggcgagcgcgaaccgatggagcggcatcggccatccatggagaagcaccgggtgtcgaactaaggagcgcgtggcgaaattcgagctgggcgagcacatggcagggagcggtgagataatcacggtgcgagcaggaaccggccacgacgagcatagggacacggctgcgcgcggcgtgctgagggacgcgcggttgggcaatccagggagaagaagccgaggggactgcgcagtggccagccgagctggggcaaacagggagcggggcgctggaatccgagccaggggcgagctccatggccaggcagagggaactggaaggccgcaggaccaggcacgaccatgggcgggagagcacagagtagaggggccagggcgctag

SEQ ID NO: 122923 - DNA, 1720 bp, Zea Mays
agtcgctgggatttttctgcgtcgttgaaatatcccacatgctccgtgcgttcgtcctccagcccacctccgtggcgcccctctccctgctccagctccttccaccaccgagctgtcgcactggtgaagcagcaacgctcggcttcccctagcctccaacccttccgtcgtctttctcctctctctaatctccagcacatgcccagctcctctccacgccacgcgactgcagaccgaggagcagtccgcgccaggtgaaggcaaggagtccatctcccgcgacatgctccaggccagcggcgtgggtctggccgtggtggtcagcacggtggctatccggccatgtggagacgagcggtggtgagcagggcatccttccattgatttcctccctcggctccctccttgcttcactctctccctcagatttgtctgcgcgcagtcgtgggttcctctgctcgtccgtctccctaaccccgtcgatttcttcctgggcgcgttggtggctggcggatcccctggccgtgtgcccctgtgccggtcgctcctccctgccccagcccggcgtttctcccgccggtcaagctccctgcgctcgcccatggcgcgcgctcctccaagccggcgtccactgctcgccatggctgccgatcctgacccagccgtgtgctcgcccagctcggcctctgctctgtccctgctgcgcgcgcgagctcgtcggtcttcccagctcgcctgtgctccttcctctactctagctctagcgtgtttccttcagcaccttcccatggtcgccgcgccctctactccttccagccggtcgagtctctctgcagccgtgcgctcggcctccagctcccgtgcgcgcgcgtccctggtccctgctcggatctcgcccgacctcagcgctagcactcctcgatgtcggcgtcgagtttgggaccctacttgccatcgcgaccgccgtcgaatcgtcggattccatcccccatggcgcttccatttcctcgccattctacatcgccagcttcgttcctgttcactagccatcttgctctccacgtcgtagttctgttaagggaaacgatgttgcttgagtagtggtcagtatgtgtgtagagatgagcttgaagatgggactattgatagggaagacagtgatgttccgtatgtcactcatgagatgttcgacgaaaaccccgaactaaaaatcatcgacgttcttgcaaatttgagccgggtatagttcgggagaagtctaaggatgtcaattagtgaaaagcaaggcccgtgtgcatcgctcatcaagtgctcggttgaagacttcaatcgaaggtcgtcatcgttcgtgtgatgatcgagtcaaattgtaatatgtgagttgattcgctatttctattattagttcgatgattggattagctagatttattagtcatgatgattctcgtgtttagcaggcgtgctgtgtgatgagctccatattcttactattttaggtatgctgctctgttgcgtcgttcctaattaaattggaagcgagtagcattagcgagccaatttcagtcgaaatacgagaaaccccatgataaagtcaatgattttatctggtagttattgtattctatgtttagtaatagtctaagtgtcctggatgaatgttgattgctactggaataatttaaatgaatagcatcgataagtttgtttcggttaaaat

SEQ ID NO: 122924 - DNA, 95 bp, Zea Mays
cggcatgttagggtcatcgttcgccatcttcgtcctcgccacaagaaactcttggcattcgctagcgaagaagcgaggcccgtgtgcatcgctcg

SEQ ID NO: 122925 - DNA, 2822 bp, Zea Mays
gcatccactgcgtatatagccaacagagccattctctaccgatcgactaaacgcaaggcaagcaccccagcttgtggctctgtgcgtctgattgggaaattgcttggtcgctccaccgatcctctgcggcggccctgcgcgtgctcgtctcgtccctctgtctcgggagcgcctggatttcggaggtgcgtggaaattggatggcaacaaccggtagcccatcaagaactgcgctgccgtcgtcgccgccagctccgtcgtcctgcaagctcgccgccgcctgctgcttcgtcctgatcgtccccatcctcctcacggatgagcatgtggccgtcgccgagtccctgtcgatcggcgtcaactacgggcagatcgccaacaacctgccatcgccggcgcaggtatcgtggctgctccggtcgatgcgggtcagcaaggtgaagctgtacgacgccgaccccaacgtcctgcgcgcgttcctcggcacgggcgtcgagttcgtagtcggcatcggcaacgagtacgtgccggcgatggtgagccccgcggcggcgcaggcgtggctgcagcagcacgtggtgccgtacctccgctcgggcgcgcgcatcacctgcgtcaccgtgggcaacgaggtgttcaagggcaacgacaccgccctccaggcggcggtgcttcccgccatgcagtccgtgcacagggccctgggcgcgctcggcctccagggccgcatcaacgtcaccacggcgcactcgctggacgtcatgggcgtctccttcccgccctccgccggcgccttcgcccccgcggcgctggcgcacctgcagccgttcctgagctttctgtcggcgacgcggtcgccgttcctcatcaactgctacccctacttcgcgtacaaggacgacccggcgcgggtgccgctggactacgtgctcttccgtcccaacgccggtgtcgccgacgcccgcacggggctccgctacgacaacatgctgtacgcgcaggtgtggacgccgtgtacgcggccatccaggggctcgggtacacggacgtggaggtcaaggtgtcggagaccgggtggccgtcgcgaggcgacgccgacgaacccggcgccacgcccgagtacgcggggacctacatccggaacctgctgcagcggatcgagatgaagcagggcacgccgctgcgcccggcgacgcccgtcgacgtctacgtgttcgcgctcttcaacgagaacctcaagccagggccggcgtcggagaggaactacggcctcttctaccccgacggcacaccggtgtacaacgtcggcctgcacggatacctcccgccgatgctggtgtcgtcgactgcagcacgacagctgattcgttattttgcactagtcgccatcgcgtccgtcgcatattcgtctgtcttatcctgacagtgtagcctaccgacggagcactaaacagctaagcatctcatgctactcacgactcaaggaacttctgagtaatctgctggccatctcaacttgggtacctttactgcatttcggatagcgatcacaagctcttactgtacacatactgacaataaggtagaactgactgaagcatatgcagcatccattcatcacagcttacattttgacccaaaaaggaaaggtacaaacagtagggagagctgcatggacagcacctattttgttgttcactccttttcaaatgctatgaatcaagaacaagtcaacacaattattaaagattaagggtcttcgtcttccgaagtattatctccacaagaagataatattcatcagacgaagaccatttgagacgaacattcattatttaatatgtcaatgggaatgcaaaagggtagagatggaactggatcttcattaattcatttatattcatgtcccacaaaatataaatgaatattcaacaatattgacattacagtggtacttttggcttgctcgaaggcgaggatacaagagagtgattatcattcagagtgagcagtacggtgttatttttcatctatttataggcacgagacatatcccaagcaaaagtacatttatgtcctcaagaattacacatgatcgtagtacaagttattaaggactaaatagtcttttcctcctccagttgtcatcattgtccatcgttcttattgcgagccgaagctgtccatatagtgatagcttcggtatttactcttatcctctttggatctagcttcatcttgtgtgccttcatcataagagaaaagcttatatcttggagatatgccaagatatgtatcataacgtagatacaggcatgcatgcgtgcatgtgctttctgatgccaagctgcagctgcccatggcacggtttctttatgcacgcacgcacgcagtactgccaccggtatggttttgtatatgccgcagtgcatcgagatatataggttgcgcctagagctgcctggcaccgtacgtggcgtttagcgctggcctttgtttgtctacaagcacaagtgcacgttgctgaatcacctagcaatgggcaatggtacggggtgggtaattaatctggaccggatgaaaccatgagctcatgctccatccaatccaggtgtgcgctgatgaaaatattgattttatacaacaaaaacacatgcatgttatgtattggatatatcatcttcatctatatctatctctactacttattaaggctgtaagggtagcctgtcattttctgttctgcctttttttattttctgttttgccctcatccctgtccggcagtaaaaaatgaaatctgtaagaattgtgaatcaaac

SEQ ID NO: 122926 - DNA, 1080 bp, Zea Mays
gcatccactgcgtatatagccaacagagccattctctaccgatcgactaaacgcaaggcaagcaccccagcttgtggctctgtgcgtctgattgggaaattgcttggtcgctccaccgatcctctgcggcggccctgcgcgtgctcgtctcgtccctctgtctcgggagcgcctggatttcggaggtgcgtggaaattggatggcaacaaccggtagcccatcaagaactgcgctgccgtcgtcgccgccagctccgtcgtcctgcaagctcgccgccgcctgctgcttcgtcctgatcgtccccatcctcctcacgggtgagtttgtaattagcaacagccatgcaggtagtagtgctgctcctgtctgtgtactgttgtttgccaaattatagcccgcaaacttattagctcacctacgtttttgcgctgcctagtgcagtgttgcagctcgcatatggtttagagtagaggaccctttgctaaggttctatctagagtgtagaaggcacgtttgttatgctcatgtagtacattaccatttattattaatccaaaggcgaaatggaatcttttcgctaagcttgccaggtgcgccgtggcgtaaggcgccgcccactatatggcggcaaatctcagctccgaatcgccataccagcttttcgcggcccctttccgaagcgcaaataaaatgcccactgaccagctagcctccgctccttgattatctccacaccaacaagttgcagtggccagctaccatccagtcagtgtagacccggcgatctgggccgattatatttaggcagctctcagtactagtgatggcagagccacatattcatgtgcccatgtggtccactgagatcttgcttccattggatcacgtgttgtgcttcgttcatccaactccttacacggaaagtaacgtctagcgcagtgttaccaagcatggtcaaattatcgcatatatggatgcatcaaatgttccttcgatctcccttgtttcaatggccacacatacatacgatcaccactcactgtcagtctgtctgtcgctaacacagtaacacttcaccg

SEQ ID NO: 122927 - DNA, 490 bp, Zea Mays
tgctcgcctcgcttcgttgtcatcgttcactatcttcgtcctcatcgtctaccccaccgattctcacgcccaactggccatcgtgctcggcgtgttttcctccgtgcagattcgcatgttcctttcactccatccgctagtcgtgtggtagagaagatcacgttatcgatggatcaatcgtctactggagtaatttcttggaggctggtcatcaccctgaagacttgtggcaaattatttttgttggggacttgttctcaaatgctgagttaagaacaaggcaacacaaatgttaatggttaaagaccttcgtctttcgaagcattatctccctgcggatataatgatcttcagacgaaggttatgaaggacataccttcataatttcagtatgtaataatgaaagcagaaacatatgaaacatagaaaagaacatgttaatcacattaaaccatcagattatttgtgttctcattatataatcatgaac

SEQ ID NO: 122928 - DNA, 844 bp, Zea Mays
cctgtttccagaatccactcgacacggttcctggtaccatggtcgcctcctattttcatctgatgaagcttggctccctgggaaatccttcgccaacacccttacctggaggtttctcccttgtgctggcgcctgcagggatccctgtgggtgctccatccgtttcctttcgcctacaacaacatcgtcgtgccgcgttgtcgactgtgttcagccccgagccatcgaccaccgaccccaacagcgccgcgcttccctgaccctgaccccaaacatcacaaagacctgcgcacgtgctcctcatcgaagtgctcgacaaaccttgcctcgccaacgtctcgccaagttgtcagacccgtcctcgagtttggtggagtcccaagcttgcacgccgtcgactccctgctcgcctcgcttcgttgtcatcgttcactatcttcgtcctcgtcgtctacctcgccggttctcgcgcccaactggccatcgtgctcgacgtgttttcctccgtgcagattcgcatgtacctttcactccatccgctagtcgcgtggtagagaagatcacgttatcggtggatcaatcgccttgtggagtaatttcttggaggctggtcgtcaccctgaagatttgtggcaaattattttcttagtcattggctcttcactgcaacaaaggcaagaccgagtgcatctaccacattccttgttgtttacaaaacttttatcacttgatatgatgcattaggtgatagaagttgcgtgatcaaacaattgatgcattaccatcctcttgagaatttgaataatcattccttgatacctattttatgaaaaactagtgccgc

SEQ ID NO: 122929 - DNA, 104 bp, Zea Mays
atgtggcttccaagaagatcacaaaatgctggcattaaatcacatgtacaccaagatataggaaagcatgataaacatttgtcctagcctaaagtgctgccatc

SEQ ID NO: 122930 - DNA, 552 bp, Zea Mays
atgaacgagcacagagaggaggatgccttgagaggtcaagcggtcaaaaaccaaaaggcgatatgggacaagaccttggaaatgagattcttgctgcagaaggcgttttctacttccaacaagttaccccaggaacccatcagaacaaggttttgcaatcatgataagcaaatagagcaagcatatgatgatcttttgaattcgtcgaagcatactttgagaagcatgatggagctacaggaggctttgcttgagagtaatcaggctacaaaggatgccaatgtagcttatgtttttggtcaatctgtcgcgattagtgcgagaggtgagaggcctaaagattgggttccaccagaagatgtttctgctgtttattacgccaaatgtgatgacattgacgagacactccctatgggtgctgacgggaacgatgggattgtagacatcttctctgcacattcctactatgatgcagcagggcataactgtgatgaatcattttattatctgttttatggtgaaaaattgaaattagttctctgcagttcctga

SEQ ID NO: 122931 - DNA, 434 bp, Zea Mays
tattgtttcaccgtgaggctcgacgatgggaggaaagggagagccagggcggaggagcgggcgcgctgggtcgaagccagggttgtccgggaggctagctccccatggcacaagggcagggaggacgcatgccgcaagttccggagagtgctggagtcgcggcccaaggactggcaggctgccgtctccgctttcgagccgattcccaagccatcaaggaggaaatttggtctgatggttgtgtattatgccaagcgaggtgataagcatcacactcgtgcaacatttgagaacatgagacaaggggaatagaacccaatgcgtttgtcttcacaagccttgttcacgcttatgcagttgctgtagatatgcgtggggcactgtcatgcgttgaggaaatgaaatatgaaggcatcaaaatgacagttgttaca

SEQ ID NO: 122932 - DNA, 1042 bp, Zea Mays
tctccctctcgcccaaccacccccgcccccgccgtagcaccgaaccctcctggcggcggccccgcgcgtgcaagcgcgcgacatcctattgggaggcgagggggctccgatgaccacaagcgctaacctgatgaaccatccgcctcaccgcctcgctccccgtcgtgatgctctccgccgaccaccatctggccttggagcacccgtcccagccatggcggcactggccccgagccccgaccctagcggcagcgcgacatcaagccccggccccaccgtcgggcgcggtcctgacggcgggcgcgatccctgcgcaggcgcgccggccttgcatgctcccactctcactttcgtcgccaccgtctcgcctgccaacccggcgtccagatcggtcgtcgtgctcacggctcccgaggtggccgctaagcttccgaggaacctcaggtgcgttgtcatcgactcgaatgagtacaagagcctctcctccgtcggcggtgtagcgtcgtccctgccggtggcggtgaagcagttcgacacggcgatcatactatactcgtcgggcaccacgggccgggtcaaggccgtcgcggtcttgcacctcaacctcatcgcggtgaccagggcgcacaggaacaaccgggttatagcggagaaggagtctgccgaggccggcgaggagccgctcatgcttacggtgacgctgttcattcgggttcatgatgttgctgaggtcggtggccatgggggagactgccgtcctcatggaccgattcgacttcatcgcagcgttgcgcgccatcgagctgtagcacgtcacgctactgcccgtggcgcccccggtgctggtggccatgatcaagtctgaggaggcacgtcgctgcgacctctcctccctcctcttcatcggcatcggcagcgcgcccctcggccacgaggtcaccgagcgcttcgccgccattttccccaacatagaactcattcaggttccatgcaacctgcatgatcataatcagttaacgctggccgcaccgcagattccatt

SEQ ID NO: 122933 - DNA, 324 bp, Zea Mays
gtaaaatttggtcatacctaaaagtgtgatgaatttataactttgttttgttttgtataatacttctttctttctttcctatttccaattcaaatcaaaccaagttttaaattctagatttcaaatttatgcacaagttagactttcacatgatgcaaaattactacatagtgttttcttcatttattttattatgattatttacctttaaaaagggtgaactataaagtttaatcacttatcaatggtactttgctcaaatttcttctaccaatcccaaattcagaatttgggtgttacaaatcctaccccccttaaaaataa

SEQ ID NO: 122934 - DNA, 456 bp, Zea Mays
atggagatgggcagagccgagcgccatgagagaggtggagaagacatcctggcgaccggcgccatggcaaagggcaaggccgagctgggaccgagccaggggcacgacacgcgcagggagatgaacgccgggggagaagaggatcccaagccggccatgagagatgggcttggcgagcatggacgccacggcggagctgaagctggagctaaaaccgacggtggggtgctggagcgtggtgggcgcgacctgcagagaagcttcgcgcgtgcggaagctcgactgggcgccatgggaaggaggaaacgtgagagggagagagaagcaggaaggagctcggccggcggctacctaaagaacgagcaggagcggctgggcgtagggaggaagaagagcgcgcatcagggagaagcatctgggcggctgaaaaatctgagtacgacggggaagagataa

SEQ ID NO: 122935 - DNA, 321 bp, Zea Mays
atgaagaggcagtggagccatcagtcggtcgtgctcccgctgctcgtcgccgtcttcctgctcctcacgttccggtgctccctgcgccacgcgcagcagcaggcatctagcctccacgccgacgacgcgggaacaagctacgccgtccacgccatgcttgtcgagcttgcggccgtggacccggccgcgtcggcggtgctgcgggccgccgaggcgctgctacaggccaacctgacgagggctcccccggagcgccggggacgccgtggtgcgcggcctccacgactggctcggcaagcagcggttcgagccacagcgtag

SEQ ID NO: 122936 - DNA, 644 bp, Zea Mays
aacacaagaaatgctatcttttcttatacatttggttaaaggaccccatttctatgggccttccaaagtagacaatttgaggagagaattgatttccaagcttgctattagagatgccgcccatagccaaattgttaagtctattcctcacagtctttcgtcaagcgaccaacatcaaaatgttctggattcgctggcaaattattctaatccatctgatatgatgaaggtactatcgtttaatttatattacatttttctaaaaataatcttaaaatggaggattaacacaaaacattatcacaaggtaagtatgtacttcataaatcatgccggaaggaattggacttgtatcaccccactagaattctagggaattgcaaattgctgagaaaagatattaccgtttctgcaaaaattctgcactcaatgcacagctgccttggtggactcgtgtttttagtcctctgagtatttctaacattgtgagctcaaaggctatccttcagattgttccagacattctttttatgctgcttatagtgattcatcatcaacatcatgtgcccctgacaatgttcttgtgacgggtttgtatttacttcggttggcacttgaaatatgtgaacctaaaagacagatac

SEQ ID NO: 122937 - DNA, 808 bp, Zea Mays
cgccgctgtcctccctagcaaacctaacgtaccctcttccgcgccgccatgtctgggaggaagaagacgcgggagcccaaggaggagaacgtgacgcttggccccgctgtccgcgagggagaacacgtctttggcgttgcgcacatcttcgcctccttcaacgacactttcatccatgtgacggatctgtctggaagggagacgctcgtccgcatcactggtggcatgaaggttaaagctgatcgtgatgagtcctcgccttatgctgctatgcttgcctcacaggatgtcgcgcaaagatgcaaggagcttggaattactgcattgcacattaagctccgtgctactggtggaaacaagaccaaaacccctggccctggtgctcagtctgctcttagagctcttgctcgatctggcatgaagataggccgtattgaggatgttactccagtccccacagacagcacacgcagaaagggtggtagaagaggaaggaggctgtaatttcgagtcctgacgtggtgccctgtcagatgtagcagttcaagtctgtctgcatctaatatactgagttattaggttttgtatcgattgaagttttgagtgaactcttgaatgcttaccaatactcattcttgacatggcatacaacatagcagcacaattacaagaggccctactgactgtttgtctgtgtttgatcggtactggggagcggtgtcaacctatggtttcgggtgaccctaacaatggacagcatgttcctgacttcctatggctttaatctgaactagctacatctgaacta

SEQ ID NO: 122938 - DNA, 646 bp, Zea Mays
gattcaagctaatgtattgttttgtctaccggactcttttaagttgcaagtttttttcctaagcacccaggactttctttttacgagaatttgacaattttttgcactgtctaggtggcatgaaggttaaagctgatcgtgatgagtcctcgccttatgctgctatgcttgcctcacaggatgtcgcgcaaagatgcaaggagcttggaattactgcattgcacattaagctccgtgctactggtggaaacaagaccaaaacccctggccctggtgctcagtctgctcttagagctcttgctcgatctggcatgaagataggccgtattgaggatgttactccagtccccacagacagcacacgcagaaagggtggtagaagaggaaggaggctgtaatttcgagtcctgacgtggtgccctgtcagatgtagcagttcaagtctgtctgcatctaatatactgagttattaggttttgtatcgattgaagttttgagtgaactcttgaatgcttaccaatactcattcttgacatggcatacaacatagcagcacaattacaagaggccctactgactgtttgtctgtgtttgatcggtactggggagcggtgtcaacctatggtttcgggtgaccctaacaatg

SEQ ID NO: 122939 - DNA, 788 bp, Zea Mays
acctttgcgtcctctatcagatttcaaagcgagctcgtcatgaccgctgtattgctgtttttgcgccgatggtccgatgctgtgcagtctgggaggaagaagacgcgggagcccaaggaggagaacgtgacgcttggccccgctgtccgcgagggagaacacgtctttggcgttgcgcacatcttcgcctccttcaacgacactttcatccatgtgacggatctgtctggaagggagacgctcgtccgcatcactggtggcatgaaggttaaagctgatcgtgatgagtcctcgccttatgctgctatgcttgcctcacaggatgtcgcgcaaagatgcaaggagcttggaattactgcattgcacattaagctccgtgctactggtggaaacaagaccaaaacccctggccctggtgctcagtctgctcttagagctcttgctcgatctggcatgaagataggccgtattgaggatgttactccagtccccacagacagcacacgcagaaagggtggtagaagaggaaggaggctgtaatttcgagtcctgacgtggtgccctgtcagatgtagcagttcaagtctgtctgcatctaatatactgagttattaggttttgtatcgattgaagttttgagtgaactcttgaatgcttaccaatactcattcttgacatggcatacaacatagcagcacaattacaagaggccctactgactgtttgtctgtgtttgatcggtactggggagcggtgtcaacctatggtttcgggtgaccctaacaatg

SEQ ID NO: 122940 - DNA, 823 bp, Zea Mays
cgccgctgtcctccctagcaaacctaacgtaccctcttccgcgccgccatgtctgggaggaagaagacgcgggagcccaaggaggagaacgtgacgcttggccccgctgtccgcgagggagaacacgtctttggcgttgcgcacatcttcgcctccttcaacgacactttcatccatgtgacggatctgtctggaagggagacgctcgtccgcatcactggtggcatgaaggttaaagctgatcgtgatgagtcctcgccttatgctgctatgcttgcctcacaggatgtcgcgcaaagatgcaaggtattgtcttactgtggaaaattacatttgttatcggtaagttagttcagtttcttattttctctttgcaggagcttggaattactgcattgcacattaagctccgtgctactggtggaaacaagaccaaaacccctggccctggtgctcagtctgctcttagagctcttgctcgatctggcatgaagataggccgtattgaggatgttactccagtccccacagacagcacacgcagaaagggtggtagaagaggaaggaggctgtaatttcgagtcctgacgtggtgccctgtcagatgtagcagttcaagtctgtctgcatctaatatactgagttattaggttttgtatcgattgaagttttgagtgaactcttgaatgcttaccaatactcattcttgacatggcatacaacatagcagcacaattacaagaggccctactgactgtttgtctgtgtttgatcggtactggggagcggtgtcaacctatggtttcgggtgaccctaacaatg

SEQ ID NO: 122941 - DNA, 1257 bp, Zea Mays
gcgtccggtctcatccttatccccatcgcccttatcccctggtctgtgccgctcgtacttggagaaaaatctccagccgccttacctgctgccgccgcttcccatccgacagattatttgtttgcagccactgatcttctccctcgctcagccgagtggtcttccactcctcccagctgagctctccctctccacgcagctccctcgcggtgctccctccatagcgcctgagcgctctgtcctcggatcggagcttctctgcgtgtcgcagccaagcttccttccccatggcgcccggcgcccaagtccccagccgtgaccctgccgagctccgccccgactccacgtctcctggtcgggctctcgttctatgcctgatgccgctgttccctggtgctccctgctcggtccctgcccagcgcctgactacagctccagctcgcggcgtcccctctgcttagccaggattgtcgtgcctctgctccctggttttccctacgcgcgagctcgctggtgttgcccctgctccgcttggccgcgtccccctcagtccaccactctgctcggccatggaagacacgccgcaccctggttccagctcgcgatactccctgcacgccggagtcgcccagctcggccacctacctccctatgcgcgacctcctctagctccctgtttctccagagtgtcttcctctgttggctcgccggcttcctgctccctgctcacccagcgcacgcttctccttgtgtgctgtgcctgcgtgctgctcgccctagctcccagccatggcgtcggccaaagctcctgcgcgttatgtgcccagctcccttttccgcgtatgcgcgcttagctcgctttcctgcgcacccagcgttctgctcccgctcgtccctgcgcgccaagctccttgcgcggtccttccttgagctcggtcctgcgcttttcctttctctgtgctcgtgctcgccgtgccgtgagtcactggccagcagtccagctcgcttcagaatcaatctcgtcgtcgttccgcgcgtcagcaagaaatctcaagagttgggtgaagtcggaggctaacagcatggtattcaccatgtgcgcgacaggaagctcgagccaggatttatccgcattcgtacgagtattgggtcgcgtttgatactggtgagccgatttataatttttgtaagtttatttaatgattggattaactagaattattaatcgtaataatcttcgtatttagcgcaggcgta

SEQ ID NO: 122942 - DNA, 1518 bp, Zea Mays
gtctcatccttatccccatcgcccttatcccctggtctgtgccgctcgtacttggagaaaaatctccagccgccttacctgctgccgccgcttcccatccgacagattatttgtttgcagccactgatcttctccctcgctcagccgagtggtcttccactcctcccagccgagctctccctctccacgcagctccctcgcggtgctccctccatagcgcctgagcgctctgtcctcggatcggagcttctctgcgtgtcgcagccaagcttccttccccatggcgcccggcgcccaagtccccagccgtgaccctgccgagctccgccccgactccacgtctcctggtcgggctctcgttctatgcctgatgccgctgttccctggtgctccctgctcggtccctgcccagcgcctgactacagctccagctcgcggcgtcccctctgcttagccaggattgtcgtgcctctgctccctggttttccctacgcgcgagctcgctggtgttgcccctgctccgcttggccgcgtccccctcagtccaccactctgctcggccatggaagacacgccgcaccctggttccagctcgcgatactccctgcacgccggagtcgcccagctcggccacctacctccctatgcgcgacctcctctagctccctgtttctccagagtgtcttcctctgttggctcgccggcttcctgctccctgctcacccagcgcacgcttctccttgtgtgctgtgcctgcgtgctgctcgccctagctcccagccatggcgtcggccaaagctcctgcgcgttatgtgcccagctcccttttccgcgtatgcgcgcttagctcgctttcctgcgcgcccagcgttctgctcccgctcgtccctgcgcgccaagctccttgcgcggtccttccttgagctcggtcctgagcttttcctttctctgtgctcgtgctcgccgtgccgtgagtcactggccagcagtccagctcccttcagaatcaatctcgtcgtcgttccgcgcgtcagcaagaaatctcaagagttgggtgaagtcggaggctaacagcatggtattcaccatgtgcgcgacaggaagctcgagccaggatttatccgcattcgtacgagtattggatcgcgtttgatactggtacgttaattaatcgcgcgatgcagaagacgacccaagtcgaccccaagcacgggctactccacaggatgatgctgatggacaaacctaaagatgatcgtcaagcggacgtcgtctaaccaacactaacatagtgtttattccaggcaagccccggtgcatgcaacccctttccttgtgtttttaaatacttttcgcacacttaagtctagtgaaatgtgcattaggttcataggaattgcttgaaaccctttgatgcattgctttccttgatatccatacctttatagatacttctgtgaagtatcaaaatatgatttacaaaaatgcttagccttgcttagatctcgtggatagagg

SEQ ID NO: 122943 - DNA, 709 bp, Zea Mays
atattcagctcatactatacatgaatttgcaacgccatgtaatgttgatggcaaggtcatgactgacaagacctaccctgctgggttcatggatgtcatttccatccctaagactgtctccactagtctaagtcaaatgagaactacaggctgcttccgtcttcacccaatcagtgatgaggatgccaagttcaagctctgcaaggtgaggtctgttcagtttggccagaaaggcatcccctacctgaacacctacgacggccgcaccatccgctacccccgatccgctcatcaaggccaacgacaccatcaagatcgatctggagaccaacaagatcatggacttcttcaagtttaacgtcagcaacgtggtcatggtgaccggcgggaggaacaccgggcgtgtaggagtgatcaagaacagggagaagcacaagggcagcttcgagaccatcgacgtgctgcttggagctttttgctatgtctattttatcctatttgttgtacaagaaaacatagaatggaattcaaatttggtggtcacaaaagtgtggagacttgaattcatataaagttaggcttaatattagtgcaaacagttgtattttagtttagatttagagtacaattatgtatgcgttatttgacaatgcttatttatgatatattgaatggtacttatttatattatattaattataatgttgtt

SEQ ID NO: 122944 - DNA, 113 bp, Zea Mays
ctggttttgtataaaaacaattctgagatttttagtttagaaattatcgaaaagagactccgatgtatacgtgtaatcgtaaacaagcctcacaacgatattttgacaggtgt

SEQ ID NO: 122945 - DNA, 850 bp, Zea Mays
gcccccggctccgccctggccccgcgcgccgcccctgccctcgcccccgctcgccgcgacagcccaccggtcgcccaagcctacattcgacgcgcccgatgctgatcttaccggtggctcaaagcaggcggcaaccacgacgcccttctacctcgccttagatcacagagcttccgccacgtcgtctccaccgccggcggaggcgccaccgctgccgtgtgctgccaacagcgagaggggatccgaaataatcaaggcaaagatcatgtcccacccactctatccggctgtcttgagagccttcatagactgccggaaggtcagagtgccgccagagattgtcggtcggctttctgccctcgctgatgacgtcgaaatgaattcagacgacatacaagaacagcgacgagcagcagacccagagctcgaccagttcatggagatctactatcacatgttggtgaggtacagacaggagctcacaaggccaatcgaggaagccgacgaattcttcaggagcatggaggcccagatcgatgcattctcgttattaggcagaactagcttaatagtaatcagaggagcacgaccatgtgtagcttctaatgatgtaactcagcaaattcatcagacccctccagctaccttgccgacgcatgaacgagaagacgagttagactttgtcgaaaccctcttcgctagtggaggtatcgaccatcactcgtcattgtaacccgatggtgatcggtgaccgtgagcttccatgttattgtgttatgataattgagactttttttatgactgtatgagatattgtctcttattagtactggacgatgagatgtgtatt

SEQ ID NO: 122946 - DNA, 110 bp, Zea Mays
gtttcacggtatggctagggtactaataagtgaatgtgaggtactacttattaacatacttgaattgagttccatgattctactttctttagtgtttttaatgatttgtc

SEQ ID NO: 122947 - DNA, 75 bp, Zea Mays
ttattccacttgtgtgttcttgaaatttggtccattattgcttcttatcttcttgattctcaagtcgaactcatt

SEQ ID NO: 122948 - DNA, 333 bp, Zea Mays
atgggaggggcagggaagaagggcgcgacggccatgggagagggagagcgcagccagccatggaagcaggggcgcacggctggggaagatggagcagggaggagaagggtccgcgcacagcaaccatggaaccgagctggagaagcgacacgatggagaactccagggcgcgacgcaggagaagccggggaggagcatgcggcagagggcggggttaatggcgagcagaccaacagaggcgaggtagaagacaacctagaacgtgagcacgtcgcaggggaggccgagcacgatgcacgatgggtatccagggcggctagcggcactgagtga

SEQ ID NO: 122949 - DNA, 2309 bp, Zea Mays
ttccctcccttctctattctgttcccctttcccccctccttctccctcctcgccaacccggtagtaaccccacccaccgcccgcctccagcctcgcgggtccccgccccgccttgccggaaccctagctccggcgcgtgccccggcctccccagccacctatcggttccgggggccccgcgcccctcggctcgatcgcgcgagatccggagccgccgccggccgggcgcagaagccatatgtcgggggtcggcagcggcaggccgccggcagcccagaagatcctgcagtccctgcgaccgccgctgtccttctccacgccgtcgcggccacccttcgccgcgcccgacgactaccaccgctttccaacgccggctgcggccacgtcccccgccgccacctcaggcggcgttggcgcgggggctgctcctcctgatactgtcgaggaggggctggtcatacggactccgctaaaaaggaaagccacatctgaagaaaatgctgctgctgactcaagcagttgtatcattaccagtccaatgctcactccggtctctgctaaaactgttaaagcttctaaggcaaaggctaagaacagtaaaactgggcctcagacacctacatcaaatgttggttcaccactcaatccaccaacgcctgttggcacatgccgctatgacaattcactaggacttctgacaaaaaagttcattaacttgcttaagcaagctccagatggcattctagatttgaacaatgctgcagaagtactagaggttcaaaagcggcgcatatatgacattaccaatgtccttgaaggcattggactaatagagaagacacttaagaatagaatccgttggaaggccctggatgattcaagtgttcaattagataatggtatctctgctttgcaggcagaagttgaaaatcttagtctgcaggagcaagctctagatgagcgtataagtgacatccgtgaaaaattaaggggcttaactgaagatgaaaataatcaaaggtggctctatgtgactgaagacgatatcaagggattacccagctttcagaatgaaacactaattgcaattaaagcacctcatggtactactcttgaagtaccagatcctgatgaggcaggtgattatctccaaaggagatatagaattgtattaagaagtacgatgggaccaatagatgtttacttagttagtcaatttgatgaaaaatttgaggaactgggtggtgttgcgacacccgccaagcattcaaatgtgcccagacatcaaccagctgaagatttcaatacatcatatgctggacaaagtagcacactaatgggtgtggcacatgatgcacagcacagccagaagattccccaggatcctagtgctttgcatgactttggagggatgacaaggattagtccttcagacgtccatacggattctgattactggctcctaacagagggggatgttagcatgactgatatgtggaaaacagaacaagcgcagtgggatgagatggatttcttgtcagaagatgttgtcacccctcgagcccataatcagcagctggtcacagttgatgggccacatatggaggttccaagcacagatccataagatcataatggcctcaacaaaactgacatctgaacacctggagcggtgagtgttgaatgggaaggattctcgtgtgacagtaaatgcttattattgcaacggaagagccggacgatttcatcagggaatgtcacctggagtttagtcagggcatcagttcacaacttcagattggtgcacaccgctgttgtgaagattggcgaggtcagcttggttaacaatttactgcctgattggtaacctgcagctatttagcttagccgacactgctcccggcttctgtgactttggtgttgtgctcattcatccctgctccattggcttgccaagctattatcataccagaccggtggacctccactgaaaaatgctgcacaatgtataaaacatcaggtcaaaacggtgcacagtgcatggggtgttggcgttacaaaaccattgggtgagctatcaatgtaaggcagaaaattctttgtaccgcgttacaaaaccattgggtgagctatcgatgtaaggcagaaaattctttgtacaattgtttgataccccagatcaaagcatagctgttcgattgtaaacaaatgtttctatgcatgtatcagagaggagctcaaattgtttggcatacatttgatccattcacaggttcataccctgttaaacgtaacaacctttgataacg

SEQ ID NO: 122950 - DNA, 473 bp, Zea Mays
gtgttcccctcagcatctcgacatcggaactccatcatgtctgtatatgtgttgaagaatgggatcgatggagaagaaagcgaagcccgtgtggttcgtgcgttcgtttggtgtggaattggagatgtggatattggggaagaaattccgagaaattagtggacggtgatggtgatgttcgtgcgacactcgtctgatgctcgacaaaaagcccgaatcgggagtggctgcttcgtcttcttcgtcgaatgggaatcgtcgtgctggccatgcgtcaccagatcgacaaaataaatcccatgggtatctggtctagactagaaattgtgtgcatcgctcgccagacatgtgagatcaaagacgtcaaccggaaaccatcgtcgttcttccgactatcgcgtcggattggtcagggtaagccaatttgttattcgtgttagtggaatgatggatggtctgactaggtataatat

SEQ ID NO: 122951 - DNA, 345 bp, Zea Mays
atggcctcagtttctcggccggcgctcggtctcctccccatcagcttggctcagctcggcctgcgtgcccctgagctctcccctgcgcgctcggcctccaaccttcctcccatggtgccctgctctatttactgctcgtcgcgcacttggaatccttgccggtgcttagccccgacgtgcgcagatgtggttccgtcatcaagccaccgtctcgaccttggtgtgcaggccgttgtgctgtctctgtcggtctactcgtcgtggcatggtcatggaacttcctcggcgtcgcgcacgtcaaatcgttgggccgcgtcctgctcggctctcatgccgttgatttga

SEQ ID NO: 122952 - DNA, 111 bp, Zea Mays
tcttggggattcttttgtcagcgcgattccaactcggaggtatcacgtagggaccgacatcgagatggggtgaccgaacgacgacggcaagacaaaggttggagacgaccg

SEQ ID NO: 122953 - DNA, 656 bp, Zea Mays
gcgccaacctttgccatggcgtttccccagcagctcaatatgccgtcgatcctgtcagtctcagtcgcagcacgcgtccgtggtcgtgttcatcgagttcaccgacgctctgttgccggttcgactgtcgtccctactgcgtgcctcgctgcgtgctcgccgggtgtcgtctattgtaccccagcactcgtgcttgccttggctcgctttagcgctcgcacgcctgctcgttatcactgcggcgcactcgctcttcgtccatcgggcttcgcgcgtgctggaggttaagttatagaagtttgaagtgtgaagtctgaatctgtccaaatctggacagcaaagccttcctagtgtctttagccttgatacactttaaatcaacctgagttgtttataaatgatttgtagacaatttaattatctttccagaaagtctaagatcaaatgatttggatgcctgaatctctagttataaattttgaagtcacaagtctgaatctgtccaaatctggacagagctgtcgtttatcactatttaaccttgttaattgtctaatcaccttgagatgacaataccaaagttgtagagtgtttcatatgcttttcaaaaagtatttgaacactatttttggatgaatatcttgtgagttatgact

SEQ ID NO: 122954 - DNA, 357 bp, Zea Mays
ggtgcattagatggaaccgctatcaaggtaactgtgccaacacatctaaaaggaagatataggtcgaggaaagcggacattgtgacaaatgtattgggtgtttgtgcactcgatatgcaattcatctatatgctgcctggttgggagggttcagcgcatgacggtcgtgtgctgcgtgatgctatctcgaggccaaacggattgcgtgtccctcaaggttgttattatcttgttgacgcgggtaatacaaacgccaatggatttctagcaccttatcgaggtcagcggtaccatttgggtggttggacagtgcaaaatccaccacatagtgccgagaagtatttcaatatgtgtcat

SEQ ID NO: 122955 - DNA, 1668 bp, Zea Mays
ttgcgttcatcaaccgcgtctggcgactcttgcgttcacggttcacccgaaccacacccgttcctttcctttctcctccctccctactcacacccctgaaccctttcacttcgtggcgccgactgcgcaaccggcaccaaccttcgccaggttttcgtgggctctttcaccgatacaaccatcctccaggctacttatattcggatctaacccaaagttgctgttttttccatatatgaaaagaagaacgcaagggatgctcgattgactctagttacttagcagaaccaaaagtggaaggccatcaaagatacgaggctattttctctccatgtctcggtcaccccacctcccaccccgctgcccaccgctgggtcctcagatcactcgaagggatgacggcatgttcacgcaaagctgcaggtttccatctggggatacgttcattggtgaaccaccgtgctggctggatgatctccttgaagattctgggaaagctcccaagctccctcctctcagaagggcctgcagcgattctgatgccatcttagatgcgctgtcgacattccagagcccaatttatccaatcgaggaatgtgatctaaactcaggtggtgaagctgaggacttgttgggtggagtcgaaggtgatgaaagtggttctgtggtcgaggctagctgtttctatggtccgaattcgccaagacagaagagtaggcttacaacttcagagagttccatggtaaatgctgtgcttgagaatgtccccggcaaccccttgcagtacctgaccatcgatgcctgcagtgatgtgaatggtaatgtggccaatgtaactgctgatgcctgtgatgcttttggccatcctgatcaagacaagtcatttaaaaggcgctcagggcaaagatctagggtccgaaaacttcaatacatcgctgaacttgaaagaactgtcgaatcgcttcagaacattggagctgatttggccgtcagaatgtcatcacttttccatcttcacaatgctctatcaatggaaaacaagcaactgaggatacatatttccagtcttcagcaagcaaaactgattaaggatggtcagacgcaggccctaaagaatgaagctgaaaggttgaagcagatgtctgcccgtcaccgccggagcagaagcgtcacttcctgttatgacctgagctcattcggagcagatgctacggcagtcaattggcagatgcctgacatggcaaggctcagcctgaatggaagctcctctgtctccccaagaagcggctatggtatatgacagcagccggccctaacctccctcagaagataagtcgaggcattaccctagataacttttcgctaaccttacccaggcatatatttgagggcccatctttgactaggatatcagttggattcgctgaattttgcagaggctatcagcttaggcccggtttggttggggttttaggctgtttttgctttccaaaagccaaaagatcaaccaaaagacttttttcagaagcagttgcttttcgtaattttttttaaaacaccttagaccttgtttttggcttttggttttctgcttttctaaatgggttgaataaataacacagttgtttcgagagagatactataagaggtacattttacatttgtttt

SEQ ID NO: 122956 - DNA, 1497 bp, Zea Mays
atgagccaggactacaggcccatttcattccgccgccaacttcaaggccgttgcgtttgcgttcatcaaccgcgtctggcgactcttgcgttcacggttcacccgaaccacacccgttcctttcctttctcctccctccctactcacacccctgaaccctttcacttcgtggcgccgactgcgcaaccggcaccaaccttcgccaggttttcgtgggctctttcaccgatacaaccatcctccagaagaacgcaagggatgctcgattgactctagttacttagcagaaccaaaagtggaaggccatcaaagatacgaggctattttctctccatgtctcggtcaccccacctcccaccccgctgcccaccgctgggtcctcagatcactcgaagggatgacggcatgttcacgcaaagctgcaggtttccatctggggatacgttcattggtgaaccaccgtgctggctggatgatctccttgaagattctgggaaagctcccaagctccctcctctcagaagggcctgcagcgattctgatgccatcttagatgcgctgtcgacattccagagcccaatttatccaatcgaggaatgtgatctaaactcaggtggtgaagctgaggacttgttgggtggagtcgaaggtgatgaaagtggttctgtggtcgaggctagctgtttctatggtccgaattcgccaagacagaagagtaggcttacaacttcagagagttccatggtaaatgctgtgcttgagaatgtccccggcaaccccttgcagtacctgaccatcgatgcctgcagtgatgtgaatggtaatgtggccaatgtaactgctgatgcctgtgatgcttttggccatcctgatcaagacaagtcatttaaaaggcgctcagggcaaagatctagggtccgaaaacttcaatacatcgctgaacttgaaagaactgtcgaatcgcttcagaacattggagctgatttggccgtcagaatgtcatcacttttccatcttcacaatgctctatcaatggaaaacaagcaactgaggatacatatttccagtcttcagcaagcaaaactgattaaggatggtcagacgcaggccctaaagaatgaagctgaaaggttgaagcagatgtctgcccgtcaccgccggagcagaagcgtcacttcctgttatgacctgagctcattcggagcagatgctacggcagtcaattggcagatgcctgacatggcaaggctcagcctgaatggaagctcctctgtctccccaagaagcggctatggtatatgacagcagccggccctaacctccctcagaagataagtcgaggcattaccctagataacttttcgctaaccttacccaggcatatatttgagggcccatctttgactaggatatcagttggattcgctgaattttgcagaggctatcagcttaggcccggtttggttggggttttaggctgtttttgctttccaaaag

SEQ ID NO: 122957 - DNA, 390 bp, Zea Mays
ggaaaaccatatagatcaaatgtcaactgatgaagtcgagcaatcgattaacagggactacaagatacaaacagggtaatgatgtggaatggtattgttcgaatcgtatagctaccattctagcaagatgtttacctacaggtcccctggccatgatgtgtcatgatggatgtctgatgaatccagctaaagctctacatttgtaacgaacgctttctgatgagggcacggcgataacacgccttctattctagtatgcttagttagattcaatgttagcgcaaacgactgatgataagtttttcagttagtattttaatttggatttagagtacacttatgtatgatttatctgacaatgcttatttatgagacattgaattgtactta

SEQ ID NO: 122958 - DNA, 947 bp, Zea Mays
atgggcgcctctgctccgacgatcgctctctcctctgcgcctccactgcccatctccctgttaggcggcgacagcaaggaggaggaggaagggctcggcaacctggcggagcagacttgttcatctgttactgcgattaatgtgttcaccactgaaaatcagatatcatacacgagtacgaatgagattaatgattggataggagctccgaacacgagccatagacgggagttgatgccaccaggcgatggatggtcgcatcctcaggacctcggcgtgcaacagcagcggctgtcatttttctcatcgcctacttcaatagcctacaacattagcagctgggatccattgagtatttggagaggtattcaggagatcatggatgaagaaatggaagaagatgttatagtcaaggctgtggactgctcgaaccaatcagagtttaacataccactgttagatcttagagctcctcttattcttgtcggctccccgaaggagatgaatgaagaaaggaaggtcaacttactaggactagcagatatattatcagcctcaattggaggattctcatgggctcccttgatttcaaagatctgcaagaataaagtcaaggcggaggcttggtttactggtcttagtgccttgatatgtcgaggacagcatggatcccaggtccaacatatagatggaatccggatcgctggaattccttttgatggtgcaagagaaagtagcctaagtggtagctctactttcacttcggattcctttgagaataagttgagctcgcttgctcgtcttgctaagatggaggttgagtatcgatgtatccagatcatagagattggtcttccaatgggtaaacatattaggatgagagacaccccgggggtctaaaatctgatgttgagtccgcattgcaagttctgaattttgcaatataa

SEQ ID NO: 122959 - DNA, 742 bp, Zea Mays
atttgctcaccacgcccagcaccgcagctagtccattgcattgacgcctcgatcagggctagcgacggacgaaagaaagctctgcatgcagcgcctcgccgccgccgtcgtccccagcctggtgccgccgctcgacctgtccatggccgcctccgccgctgccggctgttttccagcagaagcagccggcagtagtagccggacgacgacgtcgacgccgacgccgacgcggcggccattattagcgcagccgccgtggcgggtggtgctactgacgctcctgctgctggcgccgagctgctgccaggcgacgcgaggcatgcagccgttcaggggcaagccgctgcggccaggcaccgccaaccatttcctggggttcttgccgcggggaccggcgcctccgtccggcccctcgcggcagcacaactccatcggagcgcaggatcaaagccatccctgacggcgaccgcaggactgaagcgtggaagaagcagggccgccgtcgtgtcgatgttcggatccgaggagtaagatctccaccaaatcaagagagttcgcatcaccatggattaggttccttgtcaaaaggttaagctcgtagtattgattatttagctagtttcgtagcactagcagcaatagatgtatactcggagagggaacgaagaaaaggcacgttctttgtaggacgatgtacatgaggctatattttttttgttggggatgggtgtggtggcgtctc

SEQ ID NO: 122960 - DNA, 100 bp, Zea Mays
cgaggttgataatcaaagaattataattgagatccgattatcacgcaaattgccatggaatcagatgttcagaccacaaataaatttattagatttcaaa

SEQ ID NO: 122961 - DNA, 321 bp, Zea Mays
atgggacgagctcagggcagggaggaccagcaagctccgtggtcgaaggctaagggcgccgagcgaattccatggcagagggcggagagggacgaggtgagctggagcaaggtccagggcacgacggccatggcgagcagcaggagggtggccgagctggagctagaggaagggagcagtgttcctatgtactgcacacatagagagaagggggcactagaagccaataccaggatgcggcctggggaagtgctagggagaggggcgcgacgctggaggaagaagctccacggcttggagaagataaagacagggagatga

SEQ ID NO: 122962 - DNA, 660 bp, Zea Mays
aagggatgctgaaccaaccagccctcccctctatttatagagggttattctcacttcataaactacccttatttacatagagcctatccactccaccgggggcgaaatagactaactcctaggttttcgatccgacgaccacgtccttcacacggagttgcttcgccttgacgcatcctctgcgatcacgccacgtgccgccaccggttccctccagaactgccaccgccgagttttgaggcccaaactcagcaaaaccaagcatctgtagcgctgggtggttttgaggcccaaaccaccaaacctgtcgtgagcaccgcacctcgtgcatgtcctccacgatcagacgcgtgtcccaccagtcctcgaccacgccggcaacatggtcactccaccacgtcctcgcacaagtgcgtgtcccaggtgtcaaccaccgcggttggtcacctggctgctcttatccatcagtcaagacctagcactcgcccttcaccgctcccggtccatcagcacgagcccgcatgaccttcacctcagccatcgaccacctttcctatgctccacacctgcacaccataagtcgaccaacatggttgcataagcataatatcacactctggtcagtccactaactaccctagagtgctacccgttgacaat

SEQ ID NO: 122963 - DNA, 90 bp, Zea Mays
taaaatttgttacatgaagtttatttcaattagaacatattcaattaataatattatgagacatatttataaggaatgttgattttaaag

SEQ ID NO: 122964 - DNA, 767 bp, Zea Mays
ttttttattttttatttttatacatacgtatttatttcttttttaaagcacattccatttccattaagatagagggaaacgccacttcagaggcaccggtgcaagaacaagcagattagaaaatgcaactcctaacactacgaacaccatcatgcgaacagaaggaaccgaacagaagcaaggattctacaagcagagacacagaggaaaggcccaacaacgtggacgacgacaacgggagatcaagccctctcgcccctgatgcggcgcgcgagctggatgtccttgggcatgatggtgacgcgcttggcgtggatggcgcagaggttggtgtcctcgaagagccccacgaggtaggcctcggcggcctcctgcagcgcggcgacagcggaggactggaagcggaggtcggtcttgaaatcctgcgcgatctcacggacgaggcgctggaagggcagcttgcggatgagcagctccgtgctcttctggtacttgcgaatctcccggagcgcgacggtgccggggcggaagcggtgaggcttcttcacgccaccggttgccggcgccgacttgcgcgccgccttggtggccagctgcttgcggggcgccttgccgcccgtcgacttgcgcgccgtctgcttcgtgcgggccatcggagattcggtgcttggcgcgaagatgggcgagccgagccggcggtggatttgggaaagagttggtttgatgcgaggcgttcggagattgggatggggttgggtgttttgtaa

SEQ ID NO: 122965 - DNA, 1232 bp, Zea Mays
gttgttacctagcggcaggctttgctttgtgctcacctagctcttgacctcttgtgctctgagctccggcgtggagggtggtggtggtgccagctgggctttggcttttaagctgccctctccagcctgcgctccgcccggcacctgcactcaggtcgtcacccaacccacccagcgtccagtctccagtgctcggctcgcctgctccccaccatcgtgtgcaatcctcgctcccttcttcaacaacaacgccctcaaaggctaccgctccactagcttcaccactctcatttgcagattgcaacaccagcaactcattgcagctttcaggagctgaaacaacgagtggcagtgtgggagagcgcacggtagcaacttgagaaagggaagcaggagcgaaatgggtgctgcgacgacgctgcccggcaacgccgggcccgtgcgctgctctcgcacgttcctcgcgctgctgctctgcttccagctactgcacacgtcgttggccctcaagctgcacggcgtcggcggctacgaggagaagaaggtcccgctggccgtcatcgtgccggacccctcaccggagctgtcgggcctgtccccggcgccgctcgccgcgccggcgccggtccacggtggtggcgacgtgcggccgaggctgccgacagagcggtggcgccgggacaggggagaggtccggcgcgccgcgcacccgccggccgcgcccgcggccgcacccgagcccacggcggcgccgtcggctggccccgccagagcccccaccgccggggcgccggcgccgggctctggcgacggcggcgcggcgttcatcaagagcagcccggccgtgccggtcccgcgcggcgtcacggacaccgacaccgtcctgcccatgcccgcgcccggagaaacgcggcaggaggttggaggcgccaattcagttggagccgcctgtgtaatgccgctgctgctggggctcatggctatgctgatgctgtcttttgggatctaagcagcatgcagtttagaactagcagtcgcaagagagatctatcaaaagattgttcctttttatctggtttattgtttctttctgtgccggcgccggcgaccctgacccctcttctaatcctatgtaaacaaagtcgtcaagtcttccttttatctgccacatgcacgttgtctcctgccatcctcttgatactaaagagtattgcatgcatggtatatgcatt

SEQ ID NO: 122966 - DNA, 104 bp, Zea Mays
cgaattttgggaagtgtcactaataacattgagaaaacgtcataacactagtcaatcgctatatcgtgacaaatatcttgttgccataaggcactaacagtaaa

SEQ ID NO: 122967 - DNA, 945 bp, Zea Mays
cgcactcactctcatctccggccagccgagcgaagcagctccaccacggaaccaccagcctaggatgtaaatcgcgcgcaccacttagttctcgagaaagaaaatatcctgccgaccctggattcgatttttaccgccgctcagcttcgaacaaatccatcgccgctcaactctgagcataaaaatcccacgcgcgctgccggagctcgctcctgcgcatccatggcgcgcacccctctccttcctccgtgctccactgcgccgagccctccccagccgcaccttccctgctcgaccgcgttcccccgcccagcgtcgcgctcagctcccagctcccgcgcgtctctctgctcggatttagcccagccgcgtcgcaccctcagcttgccgcgccgtcgcgttgctgctcgccctgcgcgctctgctcgtccaggagttgcccagcctctctgctcgccggtcgaattctttgcgtcgcgcgcatagcgtttcgttattcctgcgcgtgctgccgtgaagctacctgttcagttcgcctccgtcatgttgtcgtgcgcgcgaaactgctcgcagtcgatatcaagtccgtgatgcgcgtgctggacacagtaaacgttgtgtggactgttgtccgagcccgtccgaccgtgaccttgctttgcctctcgcgtcgctactcgccaagtccttccccagtccgagccataaaattcactcggacacgaccttgttgtcgttccatacgtcagcaagaaatcctaagaatcgggtgaagacgaagctggcagcgcgatattcctcaagcgctcgacaaattgtatggatcggaaaatcgctaccgatctcgcggattcgtgtgtgctgtggaaacggtgcgataattagtcacgtgatgcggaagatgactcaagtcgaccccaagcgcgggctactccgcatggtgat

SEQ ID NO: 122968 - DNA, 116 bp, Zea Mays
gtttccatacatgttttcgttatgaaatagatcgatggtttacactaaaatttatacccatttatgttgttttggttcacgttttacgctgaaatccgcctgaattcccacgcacg

SEQ ID NO: 122969 - DNA, 274 bp, Zea Mays
tgcaggcactaaatgcaagctccagagttgctcttatgctcaaactggacaagagtggtactgcgaccatcttaattggtggtattggtggtgctggagtggttgtacctgctacttcagttattgggcctctaggagctgcttctcttttatcaccaacaattgctattgttggattagttcctggggcacatgtgctttctgttaccacttagaatgtgaccatatctacacctacagaattcttgttgcttaaaaacatgtttgacctagc

SEQ ID NO: 122970 - DNA, 459 bp, Zea Mays
ccagtggagactggtgtgcggctcaggcgtttaagccttggggctaactcactgtgaacgcaaacacgtgtcagcagaggttataaagtgccagcagtcagcgtcgccgtggtcgtgggcgccaggtcgccggagcgggcggtgacgtcgtggctgacattttgggaaagggagaaaaccgagggtcttaagtgtagaggtcagcgagacaatgaaacagtggagagagctcgggttaattcagttagagcgccgggtcatttctgcaaaactgctggtgcgggcgcaggctgtccgatgtgggccggcgctgcctgctgctgggccggctatgctaggtttcgacttagtactgtacctatttcgccttttcttttatcaacaaacttgtaaattgtgctgaaaaaagagctggcttggctggtacatcaagcatatgacatattgcttgttcggtgt

SEQ ID NO: 122971 - DNA, 453 bp, Zea Mays
atggggctgcacccaacacaaagctccatacaaccatttcatggaacacctagagcgcttcgaacgggatggacgatgtcgtgggacggggctactgctgttgcaacacaggaagggcaagctcaccatggtgaagctgcaggcggccatgggaagaggtggagcagtgagaggcgacttaaggtaagggtgccatggcaggcctgctgcaggggagggcgtcgagctgcagcaaggagggacggccatgggagatggggcgagctcccgggcagggaggagagggcactgaccagccatccagagaggaggcgtccatgggggaagagcagggcgaccagttgtaggagatggggagggctggtcgctggaggcctggagaggatgaggttgagagagagggcggcatgcgtgctgccagcaagggaagacgtgggaaaatatcccagatag

SEQ ID NO: 122972 - DNA, 2991 bp, Zea Mays
gatccacgtgcacattcacgcgcccatccaaaactgatactccgacccaccaaaagcagcgaccattaatttcctcttcctttttattaactccttggattaaaccaatcagcaaattcttgcccgtggaaattagaattccccagcagaaataggtgcatcgtcgcgttcttttaatctagtaaaattcttccattttttcagtaatcctttcccttcccctgcatcgatcggagtatcggaccaagaacagagggtagaatcaggtagaaagaaacaagaactgacttagccagtggtaattccggcctccatttggtggatttatccaatacgatggcaagagtgtccggtgaatcgtgacttaattcctgacgaatttctcgtggtttccgtggacaaagctgtgacctttgcgatgcagtacaaccaccgtagccgcttgccgccgccgccgccgttcggccgtggtgggtatcctcgcggccacaagcagccgtactacgctcctcctcctcctccgccgtttccgccggcgccgccgccgccgccgctagagcgcaagtacgaggtgcttatggaggccggtcgcctcgctgccgagtatctggttgcccagggcgtgctcccgccagccgccctccagcgtggcgccggcatctctggcacgtggcttgctcatcctcttcctccgcccccgcagctaccacagcagcaggaaccccccgggttttatggccggaggaggtacgaagatgaatacaacagtaaccctaacggctggcctaggcgagccaatggcactagtagcagcactagtagcagagatgattgcagccgtggcagctacaatggaagagggaagaggaagtatggggagtacaggagggggtatctggactcagggagagacagggaggagagaggaaggccatttccgaacggtcggcactacgaggaggatggggatgaagatggggcacctgggtttcagagagagcgccgcggcaatcgggggaatgatgaggcgagtactagtgttacagaggcagtgagggaggggacaccattgacagcgaaggctgtagcagggttatgcatggaggatacaacatcgaagattatgagctctgtcaaagatactagtaaggatgctaatgatgcatcaaaggtgctggaggagactgaggaaggtgaggtggaggatgacagtgggacgcaaaattcagaaactgaggtggttaagcaagggatagacaccgatgtaaatcatgcttcttgtcgtgttgttacagagtcagatcccaaacagttaccatatggtaagattgaagatgaggttcctgatgaggaagctggaaatgaaaaaaaagttatggatgaggctactttggatcacaacacttctgatggtgagacaaatatggaagttgagatgcatgttggtaaggatagtttgattgactattgtaacttcacaagaaccccaacaaggcccaggtcagtgcgtgcacacagaaatgcagcatgtatcccaggagaaactgcagttgttgaaacagttgatctagtttcttcttgtcaagcttcacagatggtaatcggtgattctgctgagagatctttgactaacgtcgcgtcagaaaacagagaagataaaatttgccatgaaaacactagctctggtgatgtctgtgctgaaccaaaagagtcgatgcttcttcaagaaaatggaataccagttgggactggaaacatggtagaagagaaggttgatgcacaaccacatgtggttgtccagcaatataaggaagaaactaacttatctccgttaacagatgccctcaagaagagcttgatgcaggaaaccaccttatctccatttgcagcttctcacaaggatagcttgacgcaagaggatggcttcatgcaagaagctgatttatctccgttgactgctaatcacagggatagcttgattgaagaaaccaaattgctaccaacaacagcttttcacaaggtcagcttgattgaggaaactggcttaactcggacaatatcttatgagaataacttgaagttacaatttaaggaaggaacaaagatcggtgatatcgatatgctgccacaagatgtggacctgattgagttgcccgatcaaaggaaaataattggtcatgatgttggtgctgaaactgtaatagaaatggaaaagggaaagctggatcaatctagctcactaaatctatccgatcttgacctagttcgtggtacagaggttgccgctgtacacaattgtccagcgttggtccagccatctgcagctggatcttctgcagagtcaaataataaacagcaagaaggtcctgaaacttttacaggcgccaatgccagtcatacatatgatttatgccagattccattagataataaggatgttcaagtaattgatatagaatgtggcacaccagttgaagttgatggatttgatttgtcaaagtcaaagaatgagatgatgtgctctagcatggatagcatgatggaccccggccatggaatacatacggatattcttcctggtattcaagatggatacagccttgcattttctgattttcttggttctgatataccatgctacccatcaatgcaatcagatcttcatgctggaataggtgccaacgactctgagggcattgctgtcatggatgatccaatatatgggtccctctctgatattggtttcatggacgtgtgggggcagcccactcaagactacgacaaattcttctaggctgccgccgggggccgaggttcagtgatttgacaggagaattagttgagttacctgagtacaggcgagaataaatagatcgggttatctcagagaaatgttgtaatcattcctaattgtagagctagacaaactctcttttttttcgatacccatttcgacggagttactgatccaaagactggtcttatgcgttc

SEQ ID NO: 122973 - DNA, 2454 bp, Zea Mays
caccttcatccacgcgagggcccccttgacccaccaatccaccattgctcgctataagactccgtggtgccgcacggctccgccgccggcgaggcctcatctcggtttactataagagtataagtacgtctccgcaacaagctaatcttttttttgccccctccttccacgtccccaccctgccgtcgtcgctactcgcatagagattcgcgcggccgtgtcttgctcgcgcctgcccccttccttccttgtcgtgccagcgcccagatctctcgctcgccggcgctcgggccagatctgggtgggggctcggaggcggagccgggcgcaggtttggtttgacccaaggggcgaggaggagagggaagaagaccccggacgccatggagctggcggttggcggcgggatgcggcggtcggcgtcgcacacctcgctgtcggagtcggatgactttgagctcacgcggctgctcagtaagccgcggatcaacgtcgagcgccagcgctccttcgacgaccactctctcagcgacgtctcgcactccggcggatacggcaggggtggcttcgacggcatgtactcgcctgggggcggcctgcgctccctcgtcggcacgccggcctcctccgcgctgcactccttcgagccccaccctatcgtcggcgacgcctgggaggcgctccgccgctccctcgtcttctttcgcggccagccccttggcaccgttgccgccgtcgaccacgcgtccgaggaagtcctcaactacgaccaagtgtttgtgagggatttcgtgccgagtgcactggcgtttctgatgaatggcgagccagatattgtcaagaacttccttctcaagaccctgctgctgcagggctgggagaagaaagtcgaccggttcaagcttggggagggagccatgccggctagcttcaaggtgatgcatgacgccaagaagggggtcgagaccctacatgctgattttggagagagcgccattgggagggttgcacctgtggattctgggttctggtggattatactcctccgggcctacacaaaaagtactggcgatttgacgctggcagagacaccggagtgccagaaagggatgaggctcatactcagcctgtgcttatctgaggggtttgataccttcccgacattgttgtgtgctgatggttgctgtatgatagatcgcagaatgggtgtatatggctaccctattgagattcaagcccttttctttatggcactaaggtgtgctcttcaaatgcttaagcatgataatgaagggaaggaatttgtagagaagattgctacccgccttcacgctttaagttatcacatgcgaagttatttttggctcgatttccaacagctaaatgacatttatcgttacaagacagaagaatattcccacacagctgtcaacaaattcaatgttattcccgattcaattccggactggttatttgactttatgccttgtcagggtggttttttcgttggtaatgttagtcctgccaggatggacttccgatggtttgcacttggaaacatgatcgctatactttcttctctcgcaacacctgagcaatctaacgctataatggatcttattgaggagcgctgggaagagcttatcggtgaaatgcctctgaagatatgttatcctgctattgagaaccatgaatggcgaattgtgactggctgtgatccaaaaaatactagatggagttatcacaatggaggatcgtggccagtgcttctgtggctgctgactgcagcctgcatcaaaactggacggccgcagattgcaagaagagcaatcgacctagcagagaggaggctgttgaaggatggctggccggagtactatgatgggaagcttggtcggtatgttggcaagcaggcgaggaaattccagacttggtccatcacggggtatttggtcgccaagatgctgttggaagatccttcacatcttggcatgatcgccctggaagaggacaaggcgatgttgaagcctgttttgaagcggtccgcgtcatggacaaattgagatggtgacgaaaatttttagggaggcgaagtcagctgaaaacacgaattcctgtggtagcgtctccttgtctgctgaccccttcatttgacttccaaaccaggatggtttgtgtctacttggttgtacaatatctcagctcgtttcctgagttgaaaaaaagaagcaactgcagaaatgggcattttatttttttctctctctttctcaatctctgtaagaagacactctgattcttgcttaggtcataccctataaataatggatccttttggttaggctcaactttgttgtaccagtggactatacagatgagtaagctgattccagcttccctgtgaagcataagtgctatttctaacgaatgaataagctactttccctgcgttgc

SEQ ID NO: 122974 - DNA, 940 bp, Zea Mays
cggcgaggcctcatctcggtttactataagagtataagtacgtctccgcaacaagctaatcttttttttgccccctccttccacgtccccaccctgccgtcgtcgctactcgcatagagattcgcgcggccgtgtcttgctcgcgcctgcccccttccttccttgtcgtgccagcgcccagatctctcgctcgccggcgctcgggccagatctgggtgggggctcggaggcggagccgggcgcaggtttggtttgacccaaggggcgaggaggagagggaagaagaccccggacgccatggagctggcggttggcggcgggatgcggcggtcggcgtcgcacacctcgctgtcggagtcggatgactttgagctcacgcggctgctcagtaagccgcggatcaacgtcgagcgccagcgctccttcgacgaccactctctcagcgacgtctcgcactccggcggatacggcaggggtggcttcgacggcatgtactcgcctgggggcggcctgcgctccctcgtcggcacgccggcctcctccgcgctgcactccttcgagccccaccctatcgtcggcgacgcctgggaggcgctccgccgctccctcgtcttctttcgcggccagccccttggcaccgttgccgccgtcgaccacgcgtccgaggaagtcctcaactacgaccaagtgggctgtcactccattttatagctccctcttgtgaaaaattgattattacttgtaatagacattcatatcgcttagaaaatggtataaatgtatattcgacacattcatatcgcttagaaagtatcagttaaaaaaagtcatttaggtagtattgtaagtctcttatgctcttttatgtctaaattttaactgacaggcgtttgaagtatttatattgtaatttatgccttcgaatttaaaatttaggagt

SEQ ID NO: 122975 - DNA, 1324 bp, Zea Mays
atgggtcaacgacaaattctttcagaactggaccctcaaagcagagcaggttactctggtctgcgaagacaaagaaggaaatgctcggtcgcgtccatagaagaagaggaaggaaaacagacaacgtggagttaccgcgtccacactggctcgttctgccatcgcgcgctccgcctccctccccgcgctcgcagtccccgccatagtccccgcatccgcgcccgcagtcccgccgcgccccctccccctgcaaacccctccacgacgcagcagcaaatccaccatcgacgcgcgcgccgcgtgccccaacgcggaacgctggatcccgcgcagcaggaggcggccaaccagtcgccgtcgcccccagcccccaccccgcctgctgcagcaagcggcgtccgctaccgcacgccctcatccccggacctcctcctccccgccgacgccgccaagatgcgtcgctactccgcgctgcccaacagcggccgccaggagacgctggccgaccacgcgcaccgctaccagggcgtcatgctcgtcatcctcgcctcgctcgcgctcgtctctctcgtcctcctcctcatgccacgctcacccactggcaccatgggcggcgctcgaaggtccgggccggccgaggcagacaggtacgccgtcatcttcgacgctggtagctccggcagccgtatccacgtcttccacttcgacgccaacctggatctcgtctgcattggcagcgagatcgagctccttgtccagataaaaccgaggcttagccactatgccaatgacccccgagaggctgccgagtcgctcgtctctctccttgactatgccaagcgagtggtgcccgccgaattgcgcgaccaaacgcctgtcagggtcggggccaccgcagggctgagaaatttgggtgcacaaaaatccgaggcaatactgcaagcggtaaatggttcttctcacctttcaatgatgcggtcactgagttcatcgaatgtagcatgccccatcccgctgctttagttactttggttttaatgaatactgcagcgacgaggatgagagagttcaagtgctcaccattgtcaagaaggacgagcctgtagatgacattgtcgaccgtattaatcctgggacagttgcagggtacagtgaagcgaagggtgttgtaggtgcttctgccgccacttctgcggtgcgacctgctcgctcccgatcgtcaagtttccatggtgtgactaggcatagatggagtgggaaatatgaagctcatatatgggacagttcttgcagagtagagggacgtagaaggaaagggaaataa

SEQ ID NO: 122976 - DNA, 792 bp, Zea Mays
atgcagattataccactgaaccagagcaaaaaaggtctaagtatatcacatgaataccgtgcttaccttgtcacagtagtagatgtggatggtcccagagttgtgcccaacgggaaaagcctgagcgaagctaggccgcgaatagcacgaggcagagtggcagacgacgacgacgacgtcgacggcgacgatgaccttcacgtgccgcatccacagcgaccgcgacgactgctgcctccgcagcctggactggtgctcgtcctcacagcccccgccgctgccgccgacgacagctttgtccctggaccgcctcttctccttcctgctcccacgaccgagagatggccttccccaaatccaatcacaaagacaaagagccaggacccgaatcgttcgtacctgctagaggcgggcctgggagatctcctcgcgctcgcggctggcgctctgccggaactggagctcggcgatgagatgctcgcgctcgacggagagctcctcgacctgcgcgtacgcctatgcaaggacgaggagctcagcagagtggaccgcgcccttccatggaacgccgaggtcggggtcggtctggactgcgccatcccatggatatccgaggtgggggaggctgtcatggcggaggtggcggggcatagggtgagcgaaggacaagggaagggcacgcacggaggagggggcgcgcacgtaaggaaggaaggcaatggcacggatggcggcctcggtgcgtggggaatgaaggttatggcgctggtggcggcctcggcgcgtgggtaa

SEQ ID NO: 122977 - DNA, 1143 bp, Zea Mays
aaagaattattattgccttcttaaagaaagaagtaaaattgatgccttcctccagcttcgtggaaaattcactctcaaaacagagaatgaggcaatacttaaacaaatactgtagcagtgtgatgagctgctaacaactttctttgctccagtcatcgctgctgcactcaaagcctaaatccacggttggaactccggcgtacattgctccggaggtactctctcgccgggaatacgacggcaagatggcagacgtttggtcttgtggagtgactctttacgtgatgctggttggtgcatacccttttgaggaccccgatgatcccaagaatttcagaaaaacgattgggagaatagtgtcaattcaataccagataccagagtatgtccacatatcccaggattgcagacagctccttgctaggatcttcgtcgcaaatcctgcaaagagaataacaattagggagattaggaatcacccctggttcctgaagaatttgcccagagagcttacagaagctgcgcaagcgaagtactacaagaaggacaacggtgcccccaccttctctgatcaaacagtcgaagagatcatgaagatcgtagaggaggcccgcacgccgccccagtcgcctgctccagtggctggttttggttgggcagaggaagaagagcaggaagatgggaagaaacctgaggatgacgagcaggatggggaggatgagcaatacgacggcgaggacgagtatgacaaacaggtgaagcaagtacatgccagcggggactttcgacacctaataaaatgaagctcctagcaagaccgagttctcaactgatgagatactgtctggttttgctgtagtttgtggtgctaagatgatgcaccctcggtgcttacgtagtatacttctgtctggattcacctttttttcgcatattgtgttaatactctgtaaattatcaaactggcttcctcaatgctcgtgtaattaaatgaaccgttgagtgattaagctagaaggcaagatatactttctatggagtaaattctgaaagtatcaatatgtgttgaactagactaatttaaattttattttcgcaaccattacatactattgaatagtctatttcattctgtgtacctag

SEQ ID NO: 122978 - DNA, 1684 bp, Zea Mays
cccgcgcggcgcgatcgcaatcacgcgcaaacccaatcgcggagacaaagcacacaagcaaaagcaaccccgcgggccgcgctagcagtagtagccgaacgaggaggagcctcgaatccagccaggccaggctcctcccattcctcctctcccacgagctctcaccgctcctcgcggcggcaaaaccccccttgaattccctacgcgcccgcctccaatcccgccagtccggcggcgacccagggatccatggagaggtacgaactgctcaaggacatcggttccggcaacttcggggtggcgcggctgatgcggaacaaggacaccaaggagctcgtcgctatgaagtacatcccgagggggctcaagattgacgagaatgtggcgagggagatcataaaccaccgctcgttgcggcaccccaacatcatccgcttcaaggaggtcgtgctcacgcccacgcacctcgctatcgtcatggagtacgccgccggcggcgagcttttcgacaggatctgcagcgccgggaggttcagcgaggacgaggcgaggtatttcttccagcagcttatctgcggtgtcagctactgccacttcatgcaaatttgtcaccgggacttgaagctggagaacacgctgttggatggcagcccggcgccgcgcctaaagatctgcgactttggctactctaagtcatcgctgctgcactcaaagcctaaatccacggttggaactccggcgtacattgctccggaggtactctctcgccgggaatacgacggcaagatggcagacgtttggtcttgtggagtgactctttacgtgatgctggttggtgcatacccttttgaggaccccgatgatcccaagaatttcagaaaaacgattgggagaatagtgtcaattcaataccagataccagagtatgtccacatatcccaggattgcagacagctccttgctaggatcttcgtcgcaaatcctgcaaagagaataacaattagggagattaggaatcacccctggttcctgaagaatttgcccagagagcttacagaagctgcgcaagcgaagtactacaagaaggacaacggtgcccccaccttctctgatcaaacagtcgaagagatcatgaagatcgtagaggaggcccgcacgccgccccagtcgcctgctccagtggctggttttggttgggcagaggaagaagagcaggaagatgggaagaaacctgaggatgacgagcaggatggggaggatgagcaatacgacggcgaggacgagtatgacaaacaggtgaagcaagtacatgccagcggggactttcgacacctaataaaatgaagctcctagcaagaccgagttctcaactgatgagatactgtctggttttgctgtagtttgtggtgctaagatgatgcaccctcggtgcttacgtagtatacttctgtctggattcacctttttttcgcatattgtgttaatactctgtaaattatcaaactggcttcctcaatgctcgtgtaattaaatgaaccgttgagtgattaagctagaaggcaagatatactttctatggagtaaattctgaaagtatcaatatgtgttgaactagactaatttaaattttattttcgcaaccattacatactattgaatagtctatttcattctgtgtacctag

SEQ ID NO: 122979 - DNA, 1591 bp, Zea Mays
gcgcggcgcgatcgcaatcacgcgcaaacccaatcgcggagacaaagcacacaagcaaaagcaaccccgcgggccgcgctagcagtagtagccgaacgaggaggagcctcgaatccagccaggccaggctcctcccattcctcctctcccacgagctctcaccgctcctcgcggcggcaaaaccccccttgaattccctacgcgcccgcctccaatcccgccagtccggcggcgacccagggatccatggagaggtacgaactgctcaaggacatcggttccggcaacttcggggtggcgcggctgatgcggaacaaggacaccaaggagctcgtcgctatgaagtacatcccgagggggctcaagattgacgagaatgtggcgagggagatcataaaccaccgctcgttgcggcaccccaacatcatccgcttcaaggaggtcgtgctcacgcccacgcacctcgctatcgtcatggagtacgccgccggcggcgagcttttcgacaggatctgcagcgccgggaggttcagcgaggacgaggcgaggtatttcttccagcagcttatctgcggtgtcagctactgccacttcatgcaaatttgtcaccgggacttgaagctggagaacacgctgttggatggcagcccggcgccgcgcctaaagatctgcgactttggctactctaagtcatcgctgctgcactcaaagcctaaatccacggttggaactccggcgtacattgctccggaggtactctctcgccgggaatacgacggcaagatggcagacgtttggtcttgtggagtgactctttacgtgatgctggttggtgcatacccttttgaggaccccgatgatcccaagaatttcagaaaaacgattgggataccagagtatgtccacatatcccaggattgcagacagctccttgctaggatcttcgtcgcaaatcctgcaaagagaataacaattagggagattaggaatcacccctggttcctgaagaatttgcccagagagcttacagaagctgcgcaagcgaagtactacaagaaggacaacggtgcccccaccttctctgatcaaacagtcgaagagatcatgaagatcgtagaggaggcccgcacgccgccccagtcgcctgctccagtggctggttttggttgggcagaggaagaagagcaggaagatgggaagaaacctgaggatgacgagcaggatggggaggatgagcaatacgacggcgaggacgagtatgacaaacaggtgaagcaagtacatgccagcggggactttcgacacctaataaaatgaagctcctagcaagaccgagttctcaactgatgagatactgtctggttttgctgtagtttgtggtgctaagatgatgcaccctcggtgcttacgtagtatacttctgtctggattcacctttttttcgcatattgtgttaatactctgtaaattatcaaactggcttcctcaatgctcgtgtaattaaatgaaccgttgagtgattaagctagaaggcaagatatactttctatggagtaaattctgaaagtatcaatatgtgttgaactagact

SEQ ID NO: 122980 - DNA, 1224 bp, Zea Mays
atggtgtggtcactgcaagcatcttgctccgctaagaagctacaagtgaatgccgaggagagcagcgatgacttggctaacccaccgaaggtagaggagaagcttggtgttgtccctcatggcctgtccactgactctgaggttgtccagagggaagccgagtctatctctaggaagactctcaggagctcagccgagaagtttgagttccaagctgaggtttccagactcatggacatcatcatcaactcactctacaacaacaaggatatcttcctgagggagctcatatctaatgcctctgatgcgttggataagattaggttcatttcccttactgataaggaagttctgggtgaaggggacactgcaaagcttgagattcagattaagttggacaaagaagaaaatcctctccattcgggataggggtattggtatgaccaaggaagatcttattaagaaccttggaacgattgctaaatctggcacttcaggaacatgagctgctcgagtctcttgtcgaagctgatacgagaaggcaggaaagagctaaaaagatggaagaaaagaaagtgtatctgcaactgtacgaagcaatggaggcgctggtccacatctgccgggaatcaaacatatatgaaaacaatcaaacatatattgggctgaccgaaatcccattgttcctaaggaacggaaattggtattgacgcaatatataaagcatgtgcttgctaaacgtcttttctatttgtcatcacatttcttttctgctttcctaattttctcgaatgcttctttgcaaatacaccatggattaggattacctatgggtttcaatcttttttttgtaggttacgcctaatctttatggcaatttggtggctaacacggctgcaggtattgttggagggatgggcatcatgcctggagactttgtggcatatggaacttcttggagctttttgctatggtcttcatcaagttttctaccaatgacttatctcccgctaccccgacccgctcatcaaggccaatgacaccatcaagatcgatctggagaccaacaagatcatggacttcatcaagtttgacgtcggcaacgtggtcatggtgactggtgggaggaacaccgggtgtgtaggagtcatcaagaacagcgagaagcacaagggcagctttgagaccatccacgtgctgcttggagctttttgctatgtctag

SEQ ID NO: 122981 - DNA, 159 bp, Zea Mays
actgggtgccggcaacacgaaaacaaaggcgagcgtcgatagccggcttggagactcggcacggctgagaaggggctcggtgagctcgacgaatggacgaggagtgaggggacgccgacgaggtgactccacggtggggcgaagcacagatgctaggag

SEQ ID NO: 122982 - DNA, 194 bp, Zea Mays
agggtgtgtcacaaaagatccagaggcagatcgaggacctcaagcgcgctggaggggtcgagagtaggaccctcaccgtcgatggcattcccgtcgacgcctacctcactaggtttgtgtgggatgaggggcaggtacccccacaatgcctctgctcaaggagattgtttgcaacatccagtcacatgttgcca

SEQ ID NO: 122983 - DNA, 2731 bp, Zea Mays
ctccccgggcggctggctttcatcttgggttttacttcaccgcgtcgcttgcaacccttccccccgcaggtaccatccagggacgatcctgacggcgctgcaggaggtggcgcagcacgcggatggccggcgcatagactggagggcggtggtggcgaagtcggccacggggatcacctccgcccgcgagtaccagatgctctggcgccacttcgcctatcatcacgacgtagacgagagcgtcgacgccgatgaccagcctctggacgatgacagtgacctagaactggagcttgaacccgatcccaacctgaccaaggaagctttatgtgaggcctctgcattagccaaggcgctaatatctggatcttcacaagcctctggtcatcgtattaacttggatactcatgttctgaacacccgaaatgaaaagatagtgcgggttccatctgagaaacagcttgctcaaagtcatcgtgtaacaaatgttgcaggtcctgtttccaattcaaaacagttagcccatataggaccctctgctggtcttttggatccaaatggaccttcaaaaaagaggaaaaagccaaaagcatggtctaaagaggaagatgcagacctggcagctggtgtgcagaagtatggtgaaggaaattgggaggatattttgcataaatgtaacttcgataatacaagaacgcctgatcagttatctcagagatgggcgctgaagcgtccaggaggatcaaccaagcctgctagcactaaacacgcctctgttggcttagaggaaagatcagcagccctcaaggcactttcattggctgtcggacctatgcgtggatcatctgcactgagatcaggagcttatccacaaagcattcagcataagtctacagtgtttgctcctaagatgccagaactaagatctgcagtaaccccttcaccggcaccagcagtgccagtcccagttgctatgcctctgcgtgtggcagctcaagtacaggctccgcctcatcaagggcatcaagctcctgcccatgctgcaccaccaaaattgttaaatgcttcaaataagacacggaagaagcaagcagctcagccaaatcccaccatcagtccttcctcaatacaagcagctgcgattgctgctggtgggcgacttgccacagcctcaaccgccgcaaattttttaaaagtcgcacaatctaagaatgctgtgcacataagatctctaggagcaacatctttgaaaccttccgcaagctttaaggcatcgattgtggttgagcatggaacacaacctgggggctcccagcacctagaacctctaaatgctagtgcagttcatgatgtttcaggagttgctgcagttaatcaatcagggccacttgctggggcatgttcagagactaagaaggcattgagtaccgcactagcacctgtcccatgcgacagcgaggaaaaggaggatgactcggaattttgtgtgattacgatagatgatctgttccctgaagatgcaaagcagccagaaactgtggataccaaggcaaagcaaccacaaaccacgggtctgaaggcaaatcagccagaaaacgcagatcccaaggtaatgcaacaagaaaccatggatcccaaatcaaagcagtcagatacagtagaggttgagatagttgatccgaaagataaagacatgctagagtttgatcaatatgttgcttctcaaggagggcacttaaacacggatgatctgaataaaagcaagtgtaccaacagtgtttcccaagcccaaggtcttgttggcagccagcaaaaactgattcctgcggatgggaaaggtagccctgtaactgtggttgggaaaggcaagcctgtaactgctggagtggcagcaactgggaggaagactaaattccctgtctcacatttggcagcagggaccccacgtggcattgttgacacagtcaacgccaacgccccaaataaaacgctagtaaggagggcagccatccctgcccctgtccctgctggttgccaagttaggaaggatgccatgaactcaaaaggtaaccaaatgacccctggcaatgccggttctggagtaccagccagcagtcagactagcgtggctgcacaagctgccagcaaagcaaatctaccatccagcagcagccaggccaagcccaataacatggtggtgaatggtggtaacaggctagtggttaatccaccgtccagcagccaagctagtgcggccgtgaacgacgctaacagggctgcgacaccacagtccagcaaccctgtcaacggtgccaacaacagagaggttaatccaccacccagcagccaggctagcacagccgtgaatggtgctgctaacaaggggaatgtgccagcagcagccaggcccccttaatacagtaaattttgtaatgattcccgtaggacttgtgtgcgtggaagaaatgtgtatagggcattaggcagaggtcatgtcattcttttcgccttgcatttgcagtttgcacccgtgaactggagaccactaggttggaatggttttttggctgctatctcctgctggccagttcccttgtgatgtaaatttttgatgcttgtgtttgtttacttgcgcccgagatgatggtgccaactttgtgcctgtctggacagatcattcgcatctcttaggggccgttcgtttccattggaataaacccggtttcgttcc

SEQ ID NO: 122984 - DNA, 231 bp, Zea Mays
ggcggcgtgcaaggggaaacgaaagcggcacctctccgaggacgacgtctggctcctcctccacaggtaccatccagggacgatcctgacggcgctgcaggaggtggcgcagcacgcggatggccggcgcatagactggagggcggtggtggcgaagtcggccacggggatcacctccgcccgcgagtaccagatgctctggcgccacttcgcctatcatcacgacgtaga

SEQ ID NO: 122985 - DNA, 450 bp, Zea Mays
atggccacacccctgctcctctccatccatgggcgtgtgccccttcgcgctctggttttctctctttgcgtcgatgttcaagcgcctccgtgctcgcagataccttgggctgtttcgcctctacgcaacgcctggaggcagaaggaagggtccttgctggttatggagagactagttgaatgttggaggtttgcttatggttcatggccatggacgccggtgagcttgccccctggtccgactagcgccttttcccccaacgctctcctcggtcgcaccatgcttcgccatccatgctcacccagcgcctctgcgctcggctcccctacgcatggcctcgccaggatctcagtggttgcccaccttggaagctcagtacgtcgagttccacaacacactccatcatgcttagacaatgaagtttggttgtgtcggttgctagttgcttga

SEQ ID NO: 122986 - DNA, 190 bp, Zea Mays
aataattcaaataccacctggatcaaactacatataggtcatatgtcggggtttattttgaacaaaataagtacatacactcatgttcaaacgattaaaacttgccaaaagatctaattagaaaatacattgctcaacacttctgaaatgaaagtaactacttgttttctactgtaattgcaatctaatc

SEQ ID NO: 122987 - DNA, 2260 bp, Zea Mays
tctgcatcgccggcctcgagtgaagagtcgccgtcccgctccggcgacaacaccggcaagacagcccagcgatccccgacaaccagctagccgctgcagcagtagtggccttcttatcgtcgttataccgccatggatgagacaactgatgcaagcacttcgttgaaactccatacaagattgagactctgggagtttcctgactgttatatatttgaaccaattgatggcctggctgacttgtacttgtcagttagccgggccagcggaacaatgaatctagttcaagacttgccaccacgtggacccactacaaaacataaagttcaaacagtatatggtgtgataggagtgctcaaacttgcagttggatcatattttgtggtgatcacggatcgtgattgtgtgggatcctactttggacacgcaatttttaaagtgacaggactaaaagttcttccctgcaatagtgcacataacaccacctctgctgagcagaaaaaaatggaaacagaattctcagaactcctggatgctgcagagaggactattggccttcacttttcctacgatatcaacctaacactttctgcacagaggctacatgatctaggcgatgagtatagagctcttcctctctggagacaggcggaaccaagatttctatggaatgcttacttgttagaacctctaattgagaacaagctgaaccagtacttattgccggtaattcaaggcagctttcaaaatatccaagcagaagttgggtcagagaaggtaaatgtgatcctgattgcacgaaggtgcacacgaaggataggtactcgaatgtggagacgaggagctgatgcagagggttttgctgcaaacttcgttgaatcagagcagataatgcagtcaaaagggtttacagcatcctatgtacaagttcgaggttctatgccattcttgtgggagcagattgttgatttgacatacaaacctagttttgacattgttagacaagaggatgcgccttctgtgcttgagaggcatttccatgatttgcaaaagaaatacggagctgtcttagctgttgatcttgtcaatacaggtggcggtgagggtcgcctccgtgaaaaatatgcaaaatctattgaacctattcttagtgaagatataagatatgtgcacttcgacttccaccgagtttgtggtcatattcactttgagcgcctttctcagctatatgatcagatcaaggactatcttcagaaacataagtacttccttataaatgataaaggagagaaaattgaggagcagactggcactgtaagaacaaattgtatagattgtctggatcgtaccaatgtgactcagagcatgattggggggaaaattctggaaagccaacttcaacgtataggagttcttagtgctggtgatacaataagcaaacatccagcctttgatacaaactacaaaattttgtgggccaatcatggagatgcaataagcattcagtactctggaactcctgctctgaagggagattttgttcggtacgggaagcgaactactcagggaattctaaacgatttgaggaatgcacttgctagatactacttgaataacttcgttgatgggactaagcaggatgccatggatcttcttcaaggacataacatgacatctgttagtcgagacatggcagtgccaagcaaatcaggacttctggagagttatgcgtccttccgccttgcttttgcattggttatgggagctctagtgttcatgatgatgtcactaagacaagcccggaatgatgctcgccatttgatgctgtcatttctttgggccggtctttgtattggcatctcacattttgtcagagccaacggccgcacgttcactaaccgacctaggtttcacaagtcacgccattgatggatgcaagatgaccgtttgctcgtcaagcgacgtcatagattgtcatcattcatcgaacttgttgacacaaattggtttgcatgaagtgttgcattttttttggcatggtacttgccctttgtaataagttttcttccatttcgtaactagtttttgtttcttcctctcctatgtctggtccatactgttctggccttctatggtcttcggtagaattcattggtaaaaaccatatgaagtgtattatgattttttcgtattgcatactcagtcctcggcatttgcaccagggatggctattcttcttctaacaagaggttcatctata

SEQ ID NO: 122988 - DNA, 2254 bp, Zea Mays
gtatgtgggccccttcaagatctgcatcgccggcctcgagtgaagagtcgccgtcccgctccggcgacaacaccggcaagacagcccagcgatccccgacaaccagctagccgctgcagcagtagtggccttcttatcgtcgtggttataccgccatggatgagacaactgatgcaagcacttcgttgaaactccatacaagattgagactctgggagtttcctgactgttatatatttgaaccaattgatggcctggctgacttgtacttgtcagttagccgggccagcggaacaatgaatctagttcaagacttgccaccacgtggacccactacaaaacataaagttcaaacagtatatggtgtgataggagtgctcaaacttgcagttggatcatattttgtggtgatcacggatcgtgattgtgtgggatcctactttggacacgcaatttttaaagtgacaggactaaaagttcttccctgcaatagtgcacataacaccacctctgctgagcagaaaaaaatggaaacagaattctcagaactcctggatgctgcagagaggactattggccttcacttttcctacgatatcaacctaacactttctgcacagaggctacatgatctaggcgatgagtatagagctcttcctctctggagacaggcggaaccaagatttctatggaatgcttacttgttagaacctctaattgagaacaagctgaaccagtacttattgccggtaattcaaggcagctttcaaaatatccaagcagaagttgggtcagagaaggtaaatgtgatcctgattgcacgaaggtgcacacgaaggataggtactcgaatgtggagacgaggagctgatgcagagggttttgctgcaaacttcgttgaatcagagcagataatgcagtcaaaagggtttacagcatcctatgtacaagttcgaggttctatgccattcttgtgggagcagattgttgatttgacatacaaacctagttttgacattgttagacaagaggatgcgccttctgtgcttgagaggcatttccatgatttgcaaaagaaatacggagctgtcttagctgttgatcttgtcaatacaggtggcggtgagggtcgcctccgtgaaaaatatgcaaaatctattgaacctattcttagtgaagatataagatatgtgcacttcgacttccaccgagtttgtggtcatattcactttgagcgcctttctcagctatatgatcagatcaaggactatcttcagaaacataagtacttccttataaatgataaaggagagaaaattgaggagcagactggcactgtaagaacaaattgtatagattgtctggatcgtaccaatgtgactcagagcatgattggggggaaaattctggaaagccaacttcaacgtataggagttcttagtgctggtgatacaataagcaaacatccagcctttgatacaaactacaaaattttgtgggccaatcatggagatgcaataagcattcagtactctggaactcctgctctgaagggagattttgttcggtacgggaagcgaactactcagggaattctaaacgatttgaggaatgcacttgctagatactacttgaataacttcgttgatgggactaagcaggatgccatggatcttcttcaaggacataacatgacatctgttagtcgagacatggcagtgccaagcaaatcaggacttctggagagttatgcgtccttccgccttgcttttgcattggttatgggagctctagtgttcatgatgatgtcactaagacaagcccggaatgatgctcgccatttgatgctgtcatttctttgggccggtctttgtattggcatctcacattttgtcagagccaacggccgcacgttcactaaccgacctaggtttcacaagtcacgccattgatggatgcaagatgaccgtttgctcgtcaagcgacgtcatagattgtcatcattcatcgaacttgttgacacaaattggtttgcatgaagtgttgcattttttttggcatggtacttgccctttgtaataagttttcttccatttcgtaactagtttttgtttcttcctctcctatgtctggtccatactgttctggccttctatggtcttcggtagaattcattggtaaaaaccatatgaagtgtattatgattttttcgtattgcatactcagtcctcggcatttgcaccagggatggcta

SEQ ID NO: 122989 - DNA, 2091 bp, Zea Mays
acgccacccagttgcttctctgtgtactctccaactcatcaccggctccatccttgtcctacactgacctcgtccccatcccgcaaccgcaagcaaccaccgatccagcccgttcggcctttcggcgaatggtgacgaaccaggacgcggaggcggcatcggcggcagccccggggccaggggcgacggtggacccgatgcgcctagcgtcgcggtggcggtcccagacggagtgggaccgcgcggtgccggagctggaggctgagccggagccgtccgagctcaacaccgtcaacagttcgggactcttctccgtcgtctctacggacaagttgtccgtgaaatacctcggcagccatcaccacggccacgacgtcggtgtcgtgcaggccgaccgccccgctcccacgcgccgggccgtgtactacttcgagatggccgtcaggaacgcgggatacaaggggcagacatccatagggttcacgagcgagagcttcaagatgaggcgacaaccgggttgggagtcaaacagttgtggataccatggtgacgacggccacctttaccggggtctagggaaaggcgaaccgtttgggccaaaattcacatctggtgacataattggcgctggcatcaactacttgtcacaggagttcttcttcacgaaaaatggagctccggttggagccattccaaaagaaattaaaggcccactatatcctacaattgcagttcatagtcagggtgaagagttgactgtaaactttggaaaggaaccattctgttttgacattgagggttatattcttgaagagaaaatgaagcagcaatcggtgtctgataaattgaacttggagacggacatcagtcattggattgtccgctcatatctcctacattatggataccaagatacattaaatgcttttgatatggcaaatgcaactgacccccccaccaatcgccaaaatggtcatgcagaacctcccgaaacgtatggtcttagccacagaaaacttttgcgtcaggaaagtggcagttggtctttgctctcagctgccttgcaagcctgagctcttttatctttggatgtgcagcgcaaatatgttgtagtattacatttatccacatcattccactgtatcttgcagatgcagctgtatcttgatttgacattgccctcttttgatttttttggcctctggtatgccttcggccttctgaaaacagtttattttatttgataaagcttatcatgagtggagatattgactctacattcaaaagacttggggagtggtatccacaagtgataaaggatgagaaatcggttatttgcttactactccattctcaaagattcatagaatatatcagggctgaacaactggaagatgctgtgcactatggtcgtgctaacctggcaagcttcttgacacacgaagcttttgagtggctgctgaaggatagtgtggccctgctggcgtacgagaagcctgcagaatcatgcttgggatacctgatgggctctccccagcgtgaattcgtggcagacgcagtgaacgcggctgtcctgtcgacgaaccccaccatgaaggaccctgagagctgcctctactcgtgtctcgagaggctactaaggcagctcacagtttgtagccttgagcgacgtgcattcaacaacgaccaaggagatgcattcttactccacaaagaaatgcaaaactatgaaaggtctaggcgctcatagcctcataggcatcaggattgttgcgcttctgaagtaaactcggttcgggtgttagacctcctcatctgccgtttgaagggacgaagattcaatgacaagcacgtatccttccctttgcaggtctgcagcgcccctcagctttcgcaagggtgagcaccgaattgcatggacacagctcaggcgcttcgggaggtgttctaacctctctgtaatcagaaaactcacagtgagataaagccaacgtttcagatttcccctattttgttggttggctaatatgctgtttgacactatgaatgctaaaaagtaaagacgcttcgacatatgcccctggtacaaga

SEQ ID NO: 122990 - DNA, 1878 bp, Zea Mays
gcgatttccttcgtgctagggtttagtcgggatcggcgttcgttttccctaatttcggtgaattttccgcttctttttaatatactgtttcttccttctcggcggtggataggcgaatggtgacgaaccaggacgcggaggcggcatcggcggcagccccggggccaggggcgacggtggacccgatgcgcctagcgtcgcggtggcggtcccagacggagtgggaccgcgcggtgccggagctggaggctgagccggagccgtccgagctcaacaccgtcaacagttcgggactcttctccgtcgtctctacggacaagttgtccgtgaaatacctcggcagccatcaccacggccacgacgtcggtgtcgtgcaggccgaccgccccgctcccacgcgccgggccgtgtactacttcgagatggccgtcaggaacgcgggatacaaggggcagacatccatagggttcacgagcgagagcttcaagatgaggcgacaaccgggttgggagtcaaacagttgtggataccatggtgacgacggccacctttaccggggtctagggaaaggcgaaccgtttgggccaaaattcacatctggtgacataattggcgctggcatcaactacttgtcacaggagttcttcttcacgaaaaatggagctccggttggagccattccaaaagaaattaaaggcccactatatcctacaattgcagttcatagtcagggtgaagagttgactgtaaactttggaaaggaaccattctgttttgacattgagggttatattcttgaagagaaaatgaagcagcaatcggtgtctgataaattgaacttggagacggacatcagtcattggttctcttaaattgtttcattactggctcattgcattccatgggccctccatttcctggtttttgaaatctattctatcttgccttatggatacacaccatgaacttgtgacaggattgtccgctcatatctcctacattatggataccaagatacattaaatgcttttgatatggcaaatgcaactgacccccccaccaatcgccaaaatggtcatgcagaacctcccgaaacgtatggtcttagccacagaaaacttttgcgtcagcttatcatgagtggagatattgactctacattcaaaagacttggggagtggtatccacaagtgataaaggatgagaaatcggttatttgcttactactccattctcaaagattcatagaatatatcagggctgaacaactggaagatgctgtgcactatggtcgtgctaacctggcaagcttcttgacacacgaagcttttgagtggctgctgaaggatagtgtggccctgctggcgtacgagaagcctgcagaatcatgcttgggatacctgatgggctctccccagcgtgaattcgtggcagacgcagtgaacgcggctgtcctgtcgacgaaccccaccatgaaggaccctgagagctgcctctactcgtgtctcgagaggctactaaggcagctcacagtttgtagccttgagcgacgtgcattcaacaacgaccaaggagatgcattcttactccacaaagaaatgcaaaactatgaaaggtctaggcgctcatagcctcataggcatcaggattgttgcgcttctgaagtaaactcggtctgcagcgcccctcagctttcgcaagggtgagcaccgaattgcatggacacagctcaggcgcttcgggaggtgttctaacctctctgtaatcagaaaactcacagtgagataaagccaacgtttcagatttcccctattttgttggttggctaatatgctgtttgacactatgaatgctaaaaagtaaagacgcttcgacata

SEQ ID NO: 122991 - DNA, 1795 bp, Zea Mays
aaatcacacccgtgtctgtacgccacccagttgcttctctgtgtactctccaactcatcaccggctccatccttgtcctacactgacctcgtccccatcccgcaaccgcaagcaaccaccgatccagcccgttcggcctttcggcgaatggtgacgaaccaggacgcggaggcggcatcggcggcagccccggggccaggggcgacggtggacccgatgcgcctagcgtcgcggtggcggtcccagacggagtgggaccgcgcggtgccggagctggaggctgagccggagccgtccgagctcaacaccgtcaacagttcgggactcttctccgtcgtctctacggacaagttgtccgtgaaatacctcggcagccatcaccacggccacgacgtcggtgtcgtgcaggccgaccgccccgctcccacgcgccgggccgtgtactacttcgagatggccgtcaggaacgcgggatacaaggggcagacatccatagggttcacgagcgagagcttcaagatgaggcgacaaccgggttgggagtcaaacagttgtggataccatggtgacgacggccacctttaccggggtctagggaaaggcgaaccgtttgggccaaaattcacatctggtgacataattggcgctggcatcaactacttgtcacaggagttcttcttcacgaaaaatggagctccggttggagccattccaaaagaaattaaaggcccactatatcctacaattgcagttcatagtcagggtgaagagttgactgtaaactttggaaaggaaccattctgttttgacattgagggttatattcttgaagagaaaatgaagcagcaatcggtgtctgataaattgaacttggagacggacatcagtcattggattgtccgctcatatctcctacattatggataccaagatacattaaatgcttttgatatggcaaatgcaactgacccccccaccaatcgccaaaatggtcatgcagaacctcccgaaacgtatggtcttagccacagaaaacttttgcgtcagcttatcatgagtggagatattgactctacattcaaaagacttggggagtggtatccacaagtgataaaggatgagaaatcggttatttgcttactactccattctcaaagattcatagaatatatcagggctgaacaactggaagatgctgtgcactatggtcgtgctaacctggcaagcttcttgacacacgaagcttttgagtggctgctgaaggatagtgtggccctgctggcgtacgagaagcctgcagaatcatgcttgggatacctgatgggctctccccagcgtgaattcgtggcagacgcagtgaacgcggctgtcctgtcgacgaaccccaccatgaaggaccctgagagctgcctctactcgtgtctcgagaggctactaaggcagctcacagtttgtagccttgagcgacgtgcattcaacaacgaccaaggagatgcattcttactccacaaagaaatgcaaaactatgaaaggtctaggcgctcatagcctcataggcatcaggattgttgcgcttctgaagtaaactcggtctgcagcgcccctcagctttcgcaagggtgagcaccgaattgcatggacacagctcaggcgcttcgggaggtgttctaacctctctgtaatcagaaaactcacagtgagataaagccaacgtttcagatttcccctattttgttggttggctaatatgctgtttgacactatgaatgctaaaaagtaaagacgcttcgacata

SEQ ID NO: 122992 - DNA, 1786 bp, Zea Mays
aaatcacacccgtgtctgtacgccacccagttgcttctctgtgtactctccaactcatcaccggctccatccttgtcctacactgacctcgtccccatcccgcaaccgcaagcaaccaccgatccagcccgttcggcctttcggcgaatggtgacgaaccaggacgcggaggcggcatcggcggcagccccggggccaggggcgacggtggacccgatgcgcctagcgtcgcggtggcggtcccagacggagtgggaccgcgcggtgccggagctggaggctgagccggagccgtccgagctcaacaccgtcaacagttcgggactcttctccgtcgtctctacggacaagttgtccgtgaaatacctcggcagccatcaccacggccacgacgtcggtgtcgtgcaggccgaccgccccgctcccacgcgccgggccgtgtactacttcgagatggccgtcaggaacgcgggatacaaggggcagacatccatagggttcacgagcgagagcttcaagatgaggcgacaaccgggttgggagtcaaacagttgtggataccatggtgacgacggccacctttaccggggtctagggaaaggcgaaccgtttgggccaaaattcacatctggtgacataattggcgctggcatcaactacttgtcacaggagttcttcttcacgaaaaatggagctccggttggagccattccaaaagaaattaaaggcccactatatcctacaattgcagttcatagtcagggtgaagagttgactgtaaactttggaaaggaaccattctgttttgacattgagggttatattcttgaagagaaaatgaagcagcaatcggtgtctgataaattgaacttggagacggacatcagtcattggattgtccgctcatatctcctacattatggataccaagatacattaaatgcttttgatatggcaaatgcaactgacccccccaccaatcgccaaaatggtcatgcagaacctcccgaaacgtatggtcttagccacagaaaacttttgcgtcagcttatcatgagtggagatattgactctacattcaaaagacttggggagtggtatccacaagtgataaaggatgagaaatcggttatttgcttactactccattctcaaagattcatagaatatatcagggctgaacaactggaagatgctgtgcactatggtcgtgctaacctggcaagcttcttgacacacgaagcttttgagtggctgctgaaggatagtgtggccctgctggcgtacgagaagcctgcagaatcatgcttgggatacctgatgggctctccccagcgtgaattcgtggcagacgcagtgaacgcggctgtcctgtcgacgaaccccaccatgaaggaccctgagagctgcctctactcgtgtctcgagaggctactaaggcagctcacagtttgtagccttgagcgacgtgcattcaacaacgaccaaggagatgcattcttactccacaaagaaatgcaaaactatgaaaggtctaggcgctcatagcctcataggcatcaggattgttgcgcttctgaagtctgcagcgcccctcagctttcgcaagggtgagcaccgaattgcatggacacagctcaggcgcttcgggaggtgttctaacctctctgtaatcagaaaactcacagtgagataaagccaacgtttcagatttcccctattttgttggttggctaatatgctgtttgacactatgaatgctaaaaagtaaagacgcttcgacata

SEQ ID NO: 122993 - DNA, 1891 bp, Zea Mays
aaatcacacccgtgtctgtacgccacccagttgcttctctgtgtactctccaactcatcaccggctccatccttgtcctacactgacctcgtccccatcccgcaaccgcaagcaaccaccgatccagcccgttcggcctttcggcgaatggtgacgaaccaggacgcggaggcggcatcggcggcagccccggggccaggggcgacggtggacccgatgcgcctagcgtcgcggtggcggtcccagacggagtgggaccgcgcggtgccggagctggaggctgagccggagccgtccgagctcaacaccgtcaacagttcgggactcttctccgtcgtctctacggacaagttgtccgtgaaatacctcggcagccatcaccacggccacgacgtcggtgtcgtgcaggccgaccgccccgctcccacgcgccgggccgtgtactacttcgagatggccgtcaggaacgcgggatacaaggggcagacatccatagggttcacgagcgagagcttcaagatgaggcgacaaccgggttgggagtcaaacagttgtggataccatggtgacgacggccacctttaccggggtctagggaaaggcgaaccgtttgggccaaaattcacatctggtgacataattggcgctggcatcaactacttgtcacaggagttcttcttcacgaaaaatggagctccggttggagccattccaaaagaaattaaaggcccactatatcctacaattgcagttcatagtcagggtgaagagttgactgtaaactttggaaaggaaccattctgttttgacattgagggttatattcttgaagagaaaatgaagcagcaatcggtgtctgataaattgaacttggagacggacatcagtcattggattgtccgctcatatctcctacattatggataccaagatacattaaatgcttttgatatggcaaatgcaactgacccccccaccaatcgccaaaatggtcatgcagaacctcccgaaacgtatggtcttagccacagaaaacttttgcgtcagtttattttatttgataaagcttatcatgagtggagatattgactctacattcaaaagacttggggagtggtatccacaagtgataaaggatgagaaatcggttatttgcttactactccattctcaaagattcatagaatatatcagggctgaacaactggaagatgctgtgcactatggtcgtgctaacctggcaagcttcttgacacacgaagcttttgagtggctgctgaaggatagtgtggccctgctggcgtacgagaagcctgcagaatcatgcttgggatacctgatgggctctccccagcgtgaattcgtggcagacgcagtgaacgcggctgtcctgtcgacgaaccccaccatgaaggaccctgagagctgcctctactcgtgtctcgagaggctactaaggcagctcacagtttgtagccttgagcgacgtgcattcaacaacgaccaaggagatgcattcttactccacaaagaaatgcaaaactatgaaaggtctaggcgctcatagcctcataggcatcaggattgttgcgcttctgaagtaaactcggttcgggtgttagacctcctcatctgccgtttgaagggacgaagattcaatgacaagcacgtatccttccctttgcaggtctgcagcgcccctcagctttcgcaagggtgagcaccgaattgcatggacacagctcaggcgcttcgggaggtgttctaacctctctgtaatcagaaaactcacagtgagataaagccaacgtttcagatttcccctattttgttggttggctaatatgctgtttgacactatgaatgctaaaaagtaaagacgcttcgacat

SEQ ID NO: 122994 - DNA, 1840 bp, Zea Mays
gcgatttccttcgtgctagggtttagtcgggatcggcgttcgttttccctaatttcggtgaattttccgcttctttttaatatactgtttcttccttctcggcggtggataggcgaatggtgacgaaccaggacgcggaggcggcatcggcggcagccccggggccaggggcgacggtggacccgatgcgcctagcgtcgcggtggcggtcccagacggagtgggaccgcgcggtgccggagctggaggctgagccggagccgtccgagctcaacaccgtcaacagttcgggactcttctccgtcgtctctacggacaagttgtccgtgaaatacctcggcagccatcaccacggccacgacgtcggtgtcgtgcaggccgaccgccccgctcccacgcgccgggccgtgtactacttcgagatggccgtcaggaacgcgggatacaaggggcagacatccatagggttcacgagcgagagcttcaagatgaggcgacaaccgggttgggagtcaaacagttgtggataccatggtgacgacggccacctttaccggggtctagggaaaggcgaaccgtttgggccaaaattcacatctggtgacataattggcgctggcatcaactacttgtcacaggagttcttcttcacgaaaaatggagctccggttggagccattccaaaagaaattaaaggcccactatatcctacaattgcagttcatagtcagggtgaagagttgactgtaaactttggaaaggaaccattctgttttgacattgagggttatattcttgaagagaaaatgaagcagcaatcggtgtctgataaattgaacttggagacggacatcagtcattggattgtccgctcatatctcctacattatggataccaagatacattaaatgcttttgatatggcaaatgcaactgacccccccaccaatcgccaaaatggtcatgcagaacctcccgaaacgtatggtcttagccacagaaaacttttgcgtcagcttatcatgagtggagatattgactctacattcaaaagacttggggagtggtatccacaagtgataaaggatgagaaatcggttatttgcttactactccattctcaaagattcatagaatatatcagggctgaacaactggaagatgctgtgcactatggtcgtgctaacctggcaagcttcttgacacacgaagcttttgagtggctgctgaaggatagtgtggccctgctggcgtacgagaagcctgcagaatcatgcttgggatacctgatgggctctccccagcgtgaattcgtggcagacgcagtgaacgcggctgtcctgtcgacgaaccccaccatgaaggaccctgagagctgcctctactcgtgtctcgagaggctactaaggcagctcacagtttgtagccttgagcgacgtgcattcaacaacgaccaaggagatgcattcttactccacaaagaaatgcaaaactatgaaaggtctaggcgctcatagcctcataggcatcaggattgttgcgcttctgaagtaaactcggttcgggtgttagacctcctcatctgccgtttgaagggacgaagattcaatgacaagcacgtatccttccctttgcaggtctgcagcgcccctcagctttcgcaagggtgagcaccgaattgcatggacacagctcaggcgcttcgggaggtgttctaacctctctgtaatcagaaaactcacagtgagataaagccaacgtttcagatttcccctattttgttggttggctaatatgctgtttgacactatgaatgctaaaaagtaaagacgcttcgaca

SEQ ID NO: 122995 - DNA, 1852 bp, Zea Mays
acgccacccagttgcttctctgtgtactctccaactcatcaccggctccatccttgtcctacactgacctcgtccccatcccgcaaccgcaagcaaccaccgatccagcccgttcggcctttcggcgaatggtgacgaaccaggacgcggaggcggcatcggcggcagccccggggccaggggcgacggtggacccgatgcgcctagcgtcgcggtggcggtcccagacggagtgggaccgcgcggtgccggagctggaggctgagccggagccgtccgagctcaacaccgtcaacagttcgggactcttctccgtcgtctctacggacaagttgtccgtgaaatacctcggcagccatcaccacggccacgacgtcggtgtcgtgcaggccgaccgccccgctcccacgcgccgggccgtgtactacttcgagatggccgtcaggaacgcgggatacaaggggcagacatccatagggttcacgagcgagagcttcaagatgaggcgacaaccgggttgggagtcaaacagttgtggataccatggtgacgacggccacctttaccggggtctagggaaaggcgaaccgtttgggccaaaattcacatctggtgacataattggcgctggcatcaactacttgtcacaggagttcttcttcacgaaaaatggagctccggttggagccattccaaaagaaattaaaggcccactatatcctacaattgcagttcatagtcagggtgaagagttgactgtaaactttggaaaggaaccattctgttttgacattgagggttatattcttgaagagaaaatgaagcagcaatcggtgtctgataaattgaacttggagacggacatcagtcattggattgtccgctcatatctcctacattatggataccaagatacattaaatgcttttgatatggcaaatgcaactgacccccccaccaatcgccaaaatggtcatgcagaacctcccgaaacgtatggtcttagccacagaaaacttttgcgtcagcttatcatgagtggagatattgactctacattcaaaagacttggggagtggtatccacaagtgataaaggatgagaaatcggttatttgcttactactccattctcaaagattcatagaatatatcagggctgaacaactggaagatgctgtgcactatggtcgtgctaacctggcaagcttcttgacacacgaagcttttgagtggctgctgaaggatagtgtggccctgctggcgtacgagaagcctgcagaatcatgcttgggatacctgatgggctctccccagcgtgaattcgtggcagacgcagtgaacgcggctgtcctgtcgacgaaccccaccatgaaggaccctgagagctgcctctactcgtgtctcgagaggctactaaggcagctcacagtttgtagccttgagcgacgtgcattcaacaacgaccaaggagatgcattcttactccacaaagaaatgcaaaactatgaaaggtctaggcgctcatagcctcataggcatcaggattgttgcgcttctgaagtaaactcggttcgggtgttagacctcctcatctgccgtttgaagggacgaagattcaatgacaagcacgtatccttccctttgcaggtctgcagcgcccctcagctttcgcaagggtgagcaccgaattgcatggacacagctcaggcgcttcgggaggtgttctaacctctctgtaatcagaaaactcacagtgagataaagccaacgtttcagatttcccctattttgttggttggctaatatgctgtttgacactatgaatgctaaaaagtaaagacgcttcgaca

SEQ ID NO: 122996 - DNA, 295 bp, Zea Mays
aatttataatatacaagagatcctagaatttagaaaagaaaagcctttatctggaccgaattcacggtgccagcccacgtccccttctaacacgttttcattttccatttactttgttgccaaagagaaaacaataaaaaaaatactacctatgtcacgctaatgcatgagtaacatcatttagttttttttcttcttctcacgtgaacacgcattacctagcctaattggctcgcgtgatgggcccattggccggtctccctacgcccttgctcacgttaaactgcagggccct

SEQ ID NO: 122997 - DNA, 258 bp, Zea Mays
atggaggaatcgggcgctggaattaatcttgggaagcaaatgaaagaggataaggctgcaagagaatcgggatatgagggtacaattaggaggaaccactctatcaatttgaatagggtgccagttgtggctttcgatgcgaggagcacccggggaaatggcatacgtggagtaggaaatatgaagctcatttatgggacaattcttgcagagtacatggacgtagaaggaaagggaaacaaggtatccattttttaa

SEQ ID NO: 122998 - DNA, 1533 bp, Zea Mays
tccttgtgttctttgtttcccgtcccgcggtgtgcgcgcgcacgtctgccgtctgccaagaggagtaggcagagatggcttgccctgcgcagtccatgctctccgccagcggctgcatcctcctgaggagcaagcctcgggcttcctcctcccacgtgcgagggggcatcatcggcggtggctgcagcagcaggccgttccagctaacctgcaacgcttcctcttccccgtctcctccctcgccggcgccggcgcaggaagaccccgactgcaacgacgaggagtgcgccccggagaaggaggtcgggagcttgagggccgagtggctggccgaggagaggacccaggtcgtcggcactttccctcccaggaagagagggtggaccggcttagtggagaaggacaccgccggccagaccaacatctattctgtcgagccggtggtgtacgtggccgagagcgccatcagctccggcgcggcgggcatgtcggcggagggtgccgagaacacggccgccatcgccgcggggctcgtcctcatcaccgtcgccgcggcctcgtccatcctcatccaggtgaacaagagccagccgcaggtgccggaagccgcctacaacggcccgccgctcagctattacgtggccaagttccagccggcgcagacccttgaggcccccgccccggcggaggcggtagaggcgcaggatggcgccgccactgtccaggactcggcggctccggaggcgcaggaagctgtcctcatcagctgattcggttttgtggcagcttacagatgaggttgtagtgatgtgcatgatgatggaagagacacatgtataatacattcattgtatgcatgagagagaaagggagaaaggagcatttcggagtcgtattacgtttcgtgtatatttacatatacatgcattcaggtcgcctatgcttattggaattcagacatcacggcactcccacaaaccattcattcagttgtaacaacggggcatgagcagagctatatatatatatatatcgcggtagcagagccattcacaataactgcgtgtaccatgggccatggacctgctctgacaccattgctgctttgataagcacttcagctgccttcaccagccgcgcagtgagttttgttgccccgacgcgcctcagggatgcatcggcgagcatccggcccttctccccactgccgcccagggtgactgcacggaatgcacagtatacggactgagagaccttcttgaagacggtgtcatcggtctggaggcttctaaggaagaccctagtcaatatctcttttctggcgttcatcctttcatgatctgacaagctccttgaggttgacgagtacatcatggcctcaatgattttctcagtgccaacatctggaaagttgtctagcagccttgtgaggacgttgaacagttccgaagtggcattctccagctcagaagaagtgatctttgggttctcactcgctaacacctgatgcaaaacaagcatgctgcaaacaag

SEQ ID NO: 122999 - DNA, 246 bp, Zea Mays
atggaaagcaggggcagcagcggccaggcgccatggctttgggcaggggcgagcttgggctgggcgtcgagcagagggatagcgagtgaagagggcttggcgccatggaagaggagcttgagcgagcagaaaaggcagggtcgagctcgaccactagaggcaaagaaaggggtggccatggagaagattggagcaggtagggagctcagcaagggacggaggagatctgacgcaggggcacaatag

SEQ ID NO: 123000 - DNA, 183 bp, Zea Mays
atggagaagattggagcagggagggagctcgacaagagacggaggagatctgatgcaggggcgcagcagggaagaggaagtcgcgcagggagggatcagggggagccgccatgggaggggcagggagctgagcgcccaagtgttggctgccgcactcgagcacagaaggaaacgatgggatga

SEQ ID NO: 123001 - DNA, 423 bp, Zea Mays
ccctgatggaagaagggcgggagacactgggtgaaactgtctaacctgtagaacatcacgctaagatatttttaatattgaatataaattgtatataggtatatacgttttttctaaaataaaaaataatcgtgtcgggccgggccagcactacgggccgaggctacagcccaagcacggcacgacgttctttgctcttgcaagcattaggtcgtttctgagaccacattggcgcaatggactatatggtgtttgaggttgctgaattggataaagcagcaatgatttgtcacactagtagtaaaatgaaaggttatttgttggttttaaacgttagtaattgctacgaagtagcgtaatttatatggagcgcatccagtttttattgatgcctgactttagcaatcactccatattttgatc

SEQ ID NO: 123002 - DNA, 1149 bp, Zea Mays
ccataaacaaacccaaacggcgtttgcaagaacgacggtgattccgatttgtgcatagcttcgccatcgacgagcgttgagcggcttgccttctcctcgcaaaacacggggtttctctcctccaccaaacacaacaaaacagcacacacacacaattaatcataggaaaataataccgatgcggaattgaacaaggatttacgtggcctcgccgggggtgaacaacgacgacgacggggctgcgcaaaaacagcaaaccaccgacgggcgtcacggcgtgctgctcactgcgcaacaaaacagcaagccggcagcgcgcagagctgtcgaggctgctgcacatttcgtcgagcacacagcgagcgtcaacggcgcactgcgcagcagcagagaggaggcatcggcagagggctcgcggccatgggcaactgcgagctcgctgcaatccatggacagggagccaaccgcgctgcgtggaagaggaacagggagggcgtggctggaggaaaggggcgagctgcttgtggccatgggggagaagaaagggcgccgtcgagggagcttcaacagtggagcgctcggctgctgggctgctcaccgtggacagcagagaaaggcaggcgcagtggagaaagggtgctcaaaactgctggccggagctagggctcggccatgggaaagaagggggaaggaggaaggggagccggctggtggagatgggagagctcggctccatgcagatatggagcttgccatttggagcagtggcagggggcgtccttggctgctgggcgagctcggcatggagaagctgcttgctgccatgatgcgggaggaagaaggggcgccctgctcttgcacgttgggaagaaggggaggacgccatgggaggagagggagctccctgctgcagccgctcgcaggaggagccgggagggcgccgggccatggctggccgaggggaggagctcctgccgtcaaccatgcacacgcagagaaagcagcggccaaggggagagcaggggggcgctaggcaaaggtccggctagaggtggaagaaggcttgggcgccatccatgggagtggctgctccctgctctggcgtgcgtgaaggagaaaggagaagagagtggcggctggaaatttttg

SEQ ID NO: 123003 - DNA, 2484 bp, Zea Mays
cttctcccttcacaaccccaacctcgaaaacgaaggcgccaaaccattccccaaacgctctcgcgtccgcccgacagctcgcctgcctgcctctccgtcgtcgccgagtccctcgccggctctaccaggcggtggcgaaggcacttcggcggggacgctcaaccgccccgcgggcggcgtcgacggtcggttcccggcggcctcgcggaggttgcatcccgtgtcgaatcgaggcaggatcctacgccaaatgcctctctttgataagaaacctttctccttgctggagccccctaaggacttggattcaaaggagaaggtgttccaaattcgattcacgaaggagatattccgagattatgaagaatacctgaagaggctaaacctttatcgtcaaagagtttggacatgtaatatatctggaaaatctaatttaacttttgaagaagctttggtatctgagcacaaagcgatggagaaggctcaaaatttgccaactgagctaatggctcaagttcttcggatgactcaatacagccctcttggtttatatgaacttgttgataagatatatgctagtctgctggaagaagtatttgagggaatagaattacatgctaataaggatggtaatgtggcaccttgcaagattttgaagattttagattctggtggcacaaagatgtgtgaagttggttggattcggaagggtaaggctataaccaacacatcagtaatcaaagctgcagatctgttttaccggagggcacctgttagcaggaatacgctgaagttttttattagagatgctacgtcacaaagtaatccatgggttatccatgagaatcttgccaaaaaatttggcataaccatcgagccccctgatagtgtaatgaagaaagggagaaaaagacaagagaatgaaactgttgaagatggaaggaaaaagctcaagacagatgaagaacatgcttatgtgctgattaagtatccaatagatgatctgctagtaaggcccaatgcagatgatccgtctttatttaagagacctcttctggctacagattttagagtaccaagatgttctgtgggagatctccttatggtatgggacttctgctcgtcttttgggagggctctgaatctgtccccatttccgctaacagatctggagaatgcaatttgccacaaagaaagcaatgttcttcttgtggaaatacatgcagctttgtttcacttgcttatgaaggatgaaggtgactatttcactgttccgcagaacaagaaacagaagttaaaggtaagttcagtaacatgggctgagtatctatgtgacttcttggaaatgacaaaaaatgaagaactatccactaacattgcaacagtaagaaggggatattatggtcttattgacactaatataaagcttaagatccttcgggaactagtggaagaagctattgaaacctctgccataagggagatactaagtgatcgtgtggaccagaaacaagtccttaatgcaacaaaaagagagaacaccagaaaggacaaaaaagagcaaaatctgaacactgaaattgccatgaaaaatgaggagaatcagacagatgctgtgcaaggtggccatgaaggtgtagatgagctggttaggagaaaagaagaaaatgacaagagtaatatttctcggggtaggacagaagtgaaacgacacatggtacagcaccttgagacggagatcgagaaattatccatccgttccagccctcttggtaaagacagacagtacagtaggtactggtttttcaagcgtgaaggaagactttttgttgaaactgcagattccagagaatggggttactacagcactaaggaagagcttgatgcgctcatggactcattgaatgtcaaaggtataagggagagagctttgaaacggcaactagagaagttctatagtaagataagtaatgccctagagaaacgatcaaaagacatcgcaaacaagacgttacttgaagagggtgtgctgcgccgttccacacgtgtccgggcccagccaaaggacaatccgtccatggcattcctcaagtatgtcaacaagtggagggataactgaggtactctgagctatgtaggcttttgctcggttaggtcgttgcagtgactcgccatactcatggctggtttactgacacctcattagctagtgaaacctgtatcagaacctacttttcttctctctctttttttttttaaattttaacttagctttcatgtgtgttcacaaatgaacccctcccccccctccgtaattgaactatgctaggctttaccgtttttagaacagtggccaaattttttgcatggatgatgtaaacgtgacaaggccggtgtggagatgcttcgatctgcaagggtgggccgcgggccaatgttggggatttttgacttaatactactgccttgaattttttagcacca

SEQ ID NO: 123004 - DNA, 2494 bp, Zea Mays
cttctcccttcacaaccccaacctcgaaaacgaaggcgccaaaccattccccaaacgctctcgcgtccgcccgacagctcgcctgcctgcctctccgtcgtcgccgagtccctcgccggctctaccaggcggtggcgaaggcacttcggcggggacgctcaaccgccccgcgggcggcgtcgacggtcggttcccggcggcctcgcggaggttgcatcccgtgtcgaatcgaggtatttgtcggcaggatcctacgccaaatgcctctctttgataagaaacctttctccttgctggagccccctaaggacttggattcaaaggagaaggtgttccaaattcgattcacgaaggagatattccgagattatgaagaatacctgaagaggctaaacctttatcgtcaaagagtttggacatgtaatatatctggaaaatctaatttaacttttgaagaagctttggtatctgagcacaaagcgatggagaaggctcaaaatttgccaactgagctaatggctcaagttcttcggatgactcaatacagccctcttggtttatatgaacttgttgataagatatatgctagtctgctggaagaagtatttgagggaatagaattacatgctaataaggatggtaatgtggcaccttgcaagattttgaagattttagattctggtggcacaaagatgtgtgaagttggttggattcggaagggtaaggctataaccaacacatcagtaatcaaagctgcagatctgttttaccggagggcacctgttagcaggaatacgctgaagttttttattagagatgctacgtcacaaagtaatccatgggttatccatgagaatcttgccaaaaaatttggcataaccatcgagccccctgatagtgtaatgaagaaagggagaaaaagacaagagaatgaaactgttgaagatggaaggaaaaagctcaagacagatgaagaacatgcttatgtgctgattaagtatccaatagatgatctgctagtaaggcccaatgcagatgatccgtctttatttaagagacctcttctggctacagattttagagtaccaagatgttctgtgggagatctccttatggtatgggacttctgctcgtcttttgggagggctctgaatctgtccccatttccgctaacagatctggagaatgcaatttgccacaaagaaagcaatgttcttcttgtggaaatacatgcagctttgtttcacttgcttatgaaggatgaaggtgactatttcactgttccgcagaacaagaaacagaagttaaaggtaagttcagtaacatgggctgagtatctatgtgacttcttggaaatgacaaaaaatgaagaactatccactaacattgcaacagtaagaaggggatattatggtcttattgacactaatataaagcttaagatccttcgggaactagtggaagaagctattgaaacctctgccataagggagatactaagtgatcgtgtggaccagaaacaagtccttaatgcaacaaaaagagagaacaccagaaaggacaaaaaagagcaaaatctgaacactgaaattgccatgaaaaatgaggagaatcagacagatgctgtgcaaggtggccatgaaggtgtagatgagctggttaggagaaaagaagaaaatgacaagagtaatatttctcggggtaggacagaagtgaaacgacacatggtacagcaccttgagacggagatcgagaaattatccatccgttccagccctcttggtaaagacagacagtacagtaggtactggtttttcaagcgtgaaggaagactttttgttgaaactgcagattccagagaatggggttactacagcactaaggaagagcttgatgcgctcatggactcattgaatgtcaaaggtataagggagagagctttgaaacggcaactagagaagttctatagtaagataagtaatgccctagagaaacgatcaaaagacatcgcaaacaagacgttacttgaagagggtgtgctgcgccgttccacacgtgtccgggcccagccaaaggacaatccgtccatggcattcctcaagtatgtcaacaagtggagggataactgaggtactctgagctatgtaggcttttgctcggttaggtcgttgcagtgactcgccatactcatggctggtttactgacacctcattagctagtgaaacctgtatcagaacctacttttcttctctctctttttttttttaaattttaacttagctttcatgtgtgttcacaaatgaacccctcccccccctccgtaattgaactatgctaggctttaccgtttttagaacagtggccaaattttttgcatggatgatgtaaacgtgacaaggccggtgtggagatgcttcgatctgcaagggtgggccgcgggccaatgttggggatttttgacttaatactactgccttgaattttttagcacca

SEQ ID NO: 123005 - DNA, 2499 bp, Zea Mays
cttctcccttcacaaccccaacctcgaaaacgaaggcgccaaaccattccccaaacgctctcgcgtccgcccgacagctcgcctgcctgcctctccgtcgtcgccgagtccctcgccggctctaccaggcggtggcgaaggcacttcggcggggacgctcaaccgccccgcgggcggcgtcgacggtcggttcccggcggcctcgcggaggttgcatcccgtgtcgaatcgaggtatttgtcgtgcaggcaggatcctacgccaaatgcctctctttgataagaaacctttctccttgctggagccccctaaggacttggattcaaaggagaaggtgttccaaattcgattcacgaaggagatattccgagattatgaagaatacctgaagaggctaaacctttatcgtcaaagagtttggacatgtaatatatctggaaaatctaatttaacttttgaagaagctttggtatctgagcacaaagcgatggagaaggctcaaaatttgccaactgagctaatggctcaagttcttcggatgactcaatacagccctcttggtttatatgaacttgttgataagatatatgctagtctgctggaagaagtatttgagggaatagaattacatgctaataaggatggtaatgtggcaccttgcaagattttgaagattttagattctggtggcacaaagatgtgtgaagttggttggattcggaagggtaaggctataaccaacacatcagtaatcaaagctgcagatctgttttaccggagggcacctgttagcaggaatacgctgaagttttttattagagatgctacgtcacaaagtaatccatgggttatccatgagaatcttgccaaaaaatttggcataaccatcgagccccctgatagtgtaatgaagaaagggagaaaaagacaagagaatgaaactgttgaagatggaaggaaaaagctcaagacagatgaagaacatgcttatgtgctgattaagtatccaatagatgatctgctagtaaggcccaatgcagatgatccgtctttatttaagagacctcttctggctacagattttagagtaccaagatgttctgtgggagatctccttatggtatgggacttctgctcgtcttttgggagggctctgaatctgtccccatttccgctaacagatctggagaatgcaatttgccacaaagaaagcaatgttcttcttgtggaaatacatgcagctttgtttcacttgcttatgaaggatgaaggtgactatttcactgttccgcagaacaagaaacagaagttaaaggtaagttcagtaacatgggctgagtatctatgtgacttcttggaaatgacaaaaaatgaagaactatccactaacattgcaacagtaagaaggggatattatggtcttattgacactaatataaagcttaagatccttcgggaactagtggaagaagctattgaaacctctgccataagggagatactaagtgatcgtgtggaccagaaacaagtccttaatgcaacaaaaagagagaacaccagaaaggacaaaaaagagcaaaatctgaacactgaaattgccatgaaaaatgaggagaatcagacagatgctgtgcaaggtggccatgaaggtgtagatgagctggttaggagaaaagaagaaaatgacaagagtaatatttctcggggtaggacagaagtgaaacgacacatggtacagcaccttgagacggagatcgagaaattatccatccgttccagccctcttggtaaagacagacagtacagtaggtactggtttttcaagcgtgaaggaagactttttgttgaaactgcagattccagagaatggggttactacagcactaaggaagagcttgatgcgctcatggactcattgaatgtcaaaggtataagggagagagctttgaaacggcaactagagaagttctatagtaagataagtaatgccctagagaaacgatcaaaagacatcgcaaacaagacgttacttgaagagggtgtgctgcgccgttccacacgtgtccgggcccagccaaaggacaatccgtccatggcattcctcaagtatgtcaacaagtggagggataactgaggtactctgagctatgtaggcttttgctcggttaggtcgttgcagtgactcgccatactcatggctggtttactgacacctcattagctagtgaaacctgtatcagaacctacttttcttctctctctttttttttttaaattttaacttagctttcatgtgtgttcacaaatgaacccctcccccccctccgtaattgaactatgctaggctttaccgtttttagaacagtggccaaattttttgcatggatgatgtaaacgtgacaaggccggtgtggagatgcttcgatctgcaagggtgggccgcgggccaatgttggggatttttgacttaatactactgccttgaattttttagcacca

SEQ ID NO: 123006 - DNA, 9184 bp, Zea Mays
gattgaacagatagaagtaacattaaaaattgaagtcttacctggtgtatcaataacattgatggtgcggccgtccttcagggtagtgcttcccaactgacaagtattagtaacactggcatgtgaatattctgatacaaatgcttcccgtccaaggatgctatttccagttgcactcttgccatagccaagtttcccaaccagaacaagagtgatatcggcactgggcaacacccagtcatcatcatactggcttccacccattacaagttatgaggacaatgatttatgagaactgtttaggtaatcaagacattaggacttcaccaaggtaacaattatattatatgaccgaccacattcaggatatgtaacaaaactggcaaatgaactgatgaaagaaaagcccctacgggtcatatctagttatcaagtagtcaaggtttaaactgcatagatgtttttcaataaaactttctgaaattaatagccaatggccaaattcattgttttaagtttaaattagagaaaggttggattatattgcgaaaggcctctagcttgagttgattaggtggtctgagtagcactcctcaggccgatttcgaatcccagtgggagcgaatttcaggctggagttaaaaaggtcactcgttggttcctctggttgtgtacacacgagatgaactggcctataggggatccttgtatgtatgtttggagggctcagcacgagtaaagatttggtctataggggggcggacccttatgctgcacggaggcccaactttcgtgacctttctcgatcggggctccgaatgagcttcttattaatataataccgtgggacgatctttcctctatcgaccgagttttttaggtcgaattatattatctttctgaatggaaaggttcaattgaattgctatgaaaaaaatcatgttacctcacgaaaaacacttagctcaaaagtcatgtactcctgtgcaacagaaaataaaaaataagacacaaaatccaagattaatctctttacctctatttaagattgttaactggtaatatttaaataaaaaccatagcatgtcagaaagcagatctaactgatgactacttacaagttaaaagtgcaagaaaaagtggaatggtcatactgcctatgaataccaacaattcaaatctacatattttaatcatgtatggtcactaaagaatattatatgcaacggcacaggatatcgccaaagtatctatcagaaggttagaacaagttaccctaaaatgcaacttcgtataatatatcaataagaaaaggaaaaacatcagtatggcacacctatcccaatcagaaactgaaaccatcccaatctgaaccaaaacatacagcctttaccagattagacctatcgactgatattgactgtgaaccaccgaccatcagaccatgtttagtaaggagttagatcagatgtttcaaaacaaagaagatgcttgtagggaagaagaaaaaactgttccagcaaaaagagcaattaaatgtttttttgagggagaaaggctgtagggtaaacccctacagcgcgcttttattttatcttaaaaaaatacagagggaaacatagatagaaaaagaaatgaaaaagatagagaagaaagaaagaaaaggtatcgagagtttagccatgaaatcaagagcaattaaatgtgaaactatacaagatagaattgtaactcctggactaatttcatgttgttctctccctccattttcagagagctgcttatatcagcaagaaaatcctttgcggatatagcattgcaaagaatcgattatgtactaccagtgcacaagcaaagctgatcagcatagtggagtgcatcatcaactcaattttgactacctttaccctaaacgcatctatgatgcctaaacaaattcccagaatcaataatccagatgcctatatattgtgcaaaacccaatctactacagtactgccacagcaaagcagggcaccaaatgcacatggaaatagtgaaaagggcagtaagaaagattcttgaattggattgtaggtaagcccttccgttctaggagtcattgtgttaagactatctccaaccatatcatctatacctgagacatttaatttttgccatctttacggatggcactaaattaccaatcactgacagctgagtcaccgacatggtatttttgggtgtcatctgccccgtaaagatggcaaaaaattagattgtcctctatatccctcctttacataatccttcataagatttccttctttatatcccattcctctccaacagcgtcatctatatcccgtcctttatacataaatgttgttattagagacatattttgctcaagatttttgcacatacgttgttatgactggcaatgtgtacagtcggaggtctaaaaggccgactggccagcccattgtaagggacggcgcagataaaatatagagttattagcaatttctgttgcaaacagattagataagtcctagaagtaaggagttgttagagggagtttgttaggatatggagtttgttacagattagataagtcctagaaataaggagttgttagggagagtttgtttcaatcagggactatataagtcctatctctgtaaccaggatggtcagcgagaaattaatctaaagaagagattatttccttgcctctcattgtgcccaaccgtgcgacagcacggcgtcctctcgcccccgttcttccagcctgcgctctacccctaccactcatacaacctaaggagtagagatcataccaacctggtatcggagatgccagggtccaacaccggcgatagtttggcctccgccacggtgtcgccatcgttggagtcgatcaccacgatgctcgctgacatgcagcgccagctgggggagttcaactcccatatgtcctccatctcatctcgcgtcacggccatggaaaaaaatccaggaacctcagctgatacacctccatctggctgcccctacggcatgccagggtacggcggcctgccgccaaccacactagtccctgagggatccttacccccgcagcccatccacacctccgccgccgcatacacaaccaccaccacacccctgccaatccacctactgcccttgccgcactcgccatcacctctgccacaaatgccaaacattccacagcacatgcctagcaacccattcccaccatccatggtcggcgttccccgtttccaccgactagaatttgccacgtttgatggcgaggaccccatccagtggttaaaccggtgtgaccagttcttcgtttggaccgccacttcgcagcaatccattgggtgaactggcacgattaccctttcgcacgacagtggatgattatcaggaaagattttgggatctgctagcccaaacagcacctctctcccaggagcagcaggtgcaactattcactgcaggactaccggatcgaatcaagatcgatgtggagcttatggcgccacgagaccttaatcaagcgctgagcttagcgcgagcatatgaaaggagatcccaggccctggacatccatccaacagcaacacctagcaaggctctgcgacagccccagcgcccatcagtacctgtcccggcactacagccacaaattccaacagcagttagtacagcgccgcaatgaccattcaagaagctgacaccggctgagatggtcgagcgtcgacgtcaggggctctgttacaattgtggcgagtagtatgtcaaaggacaccgatgcccttaactgttctatctagaggtcactgattttgagggggaagccatggagaccgatcttgaggaaccagaaccagtgatatcactgcatgctttgactggtattcaatctgagggcacaatgcagctggaggtatctatcagaggacatgctctcacagcactactggacacgggttctactcacaactttatcaacttaggcactgcaagcactcttaaactggagtacaatcccagccaaggtctccatgctacggtggcaaacggtgacaaggtctcctgctgcaggttcccaaacagcattagcatgactatcggcctcgaggacttcctaatggaagcatatgccattccactggactccttcgatattatcctcggagtccagtttctgcgcaccctggggccaaccctttgggatctggaagacttgtgtcttgccttctggagacgaggcaagcggattctatggaaaggcatgggctcctcacgagatgacattcacatgcacccgacagttcgaacagtcaatgcagcaagtgaagattcaaaacctatgatggaccgcttgctacaacagttccaggaagtgtttacaacacctagtggccttcccccagctagaaggtgtgatcacaggatccatcttctgccaggaacagtaccagtagcagttcggccatataggtacccacagcttcaaaaggatgagcttgaggcacagtgcatgaccatgttagagcaaggcattatcagatatagcacctcagctttttcagcacttgtccttctaatgaagaaaccagataattcatggcgtttctgcattgactacaaggcactcaatgagaaaacagtcaaggataaattccctataccagtggtcgatgaactactcgatgagcttcgaggggcaaaaattttcactaagttggacctccgttctggttatcatcaggttcgggttcacccagatgatgtccacaaaactgccttccggacgcaccatgggcactttgagtttttggttatgccatttggcctctcaaatgccccagcaacattttaggctttaatgaatgaagtactgggagggtttctccgtcgttttgtcctcgtattctttgatgacattctcatatacagtgcaacatggacagaacacctaatacatgtcaaggcagtcctagaaacgctacacaccaacaagctctttgtcaaagagtccaagtgtaacttcggggctacatctgttgcttatttgggacacataatatcagccaaaggggtggccatggacagtagcaagattgaggcagtaacatcatggccaatcccaaaatcaccacgaggtctgcgaggatttttgggactagcaggctattaccggaaattcatcaaggattttggagtaatcgctgctccattaacaaagctcctcaagaaagaaggcttcaagtggtcaaccgacgcagactcagcattccaaacactcaaacaggcactctcctcagcgccagtactgcagctcccagatttcgagtgtccattcatagtggactgcgacgcgtcagggtcgggatttggtgctgtcctacaccaagaccagggacctatagccttcttcagccggccctttgcagcacgccatataaagctagcaacctatgaaagagagctcattggattggtacaagcagtacgccattggcgtccgtacttatggggtagatagtttgtggtgtgtactgaccattttagcctcaaatatatgttggaccaacgattgtcaacagtaccacaacatcaatggattagtaaactgtttggatttgacttcaaggtagaatatagagcaggaagacttaacacagtggcggatgcattatcgcgccgtgatacaaccaatgaatcagtttatgctctgacagcacccactttccaactgtacaaagatctagaagaagaatgtgcacacagtgaggaagggcagcagctcagtgcacagatcaaagaaggaagcttaggggatccatggcatacacaggagggactagtaatgcatggcaaccgggtgtttgtaccaggctcctccacactcattccagcaatactagaggccgcacattctgcaggacacggtggagtacaaaagacactacataagctcagatcagacttcttcatgcacaaagacagggcactagtaaaggattgggtgcgctcctgtgtcatctgccaaaagaataaaaccgaggctcttcaaccagcaggcctgcttcagcctttagaagtaccacgacaagtatgggcagatattgcaatggacttcattgagggtctgccaaaggtccatgaaaaatcggtaatattgacagtggttgatcggttttctaaatatgcacacttcattgccatgaatcacccatacaccgcagccacagtagctcgagccttctttgagggcatagtaagactacacggcttcccaagttccatagtcagtgatcgggatccggtgtttacaggaaacgtttggaaagatctcttcaaacttgcaggggtgaaattgaagatgagtacagcatttcatccccaaacagatggtcagtctgaagtagtcaacaaaaccattgccatgtatttgagatgcatcacgggggatcgacctagggcttgggtggactggctagcctgggctgagtattgctacaatacatcataccactcagcactgaaaacaactccatttcgtgtagtttatggaagagatcctccaccacttgttccatatcaacctaggactactgaaactcaaattgtggaccagatgctccaggaacgtggcctgttccttggggaggtcagagacaggctactacaagctcaagaacaagcacgcaggtttaatgatgggcgacaccgtgagctcgagttcagcattgatgattgggtttggctccgtctcctacatcgaaatgcccagtcactagtcgaccaccctaaagggaagctgggaccacgtatgcaggaccattccgtgtgattgaaagggtggccactgtggcgtacagattggagctgccaaaagggacacgcattcacgtcgtcttccatgtgggactcaagccatttcggggcagtccccccttactgccaccagccatgccaccgatggaaaacggtcgactgctgccatctccagagaagattatcagagcccgattgaagagaggacaatggcacgtgctaatgcagtggagtgaagcaaagccagaagatgcaacatgggagcccctgcagcagttcacagcttcataccctcaatttcagctcgaggacaagctgttcgtcgagggagggagagatgttatgaccggcaatgtgtacagccggaggtctaaaaggccgactggccagcccattgtaagggacggcgcagataaaacatagagagttattagcaatttctgttgcaaacagattaggtatgtcctagaagtaaggagttgttagagggagtttgttaggatatggagtttgttacagattagataagtcctagaaataaggagttgttagggggagtttgtttcaatcaaggactatataagtcctatctctgtaaccaggatggtcagcgagaaattaatctaaagaagagattatttacttgcctctcattgtgcccagccgtgcgacagcacggcgtcctctcgcccccgttcttccagcctgcgctctacccccaccactcatgcaacctaaggagtagagatcataccatacgtatttatcatatctttaaatatcttatacatattttagttttgcttaatccgttttctaaaatataaaaatagatagaggaaaggtgagaccttatatagagaggatggagaagcgtcctctatatttagaaaacgttgcaaagaataccgttagagcatatagaggacgaaatcttctctaaatatagaggggtagatgaccctttaggctgcctccaataagagcctatgaaggctcctctcctccaaatttaggtaattctctcctctatcccctccagcagggttccctaaatatagaggatgttcctctttcctctgcatatatggattctttctactctcctctatcatattaaacaaaactaagatatgtataaaacatttgagaataataacaaatatgtacgcataaaaatttaaaataaaatatgtctttaatatgggtatttatatataaaattgataacggtgttgaaaaggaacgagatataagaaaagaatcttttatagagaacctacatggatataaaagatgaatataaaggacgttgttaccaataggatggtaccaggagtcaatgtgcaaatgtgaagctacaagataggatggattcagaactccaagattaatttcacctatcttctcacgttctcagatggctgctaatcagctagaaaaggttaaacaaaaaaaatggcatgtatgtcccacagacgacaaaagcatcgaccagagtagagcgcatataaacgagttatattcaacaatcaacatgctgatatattgcccaaaaactcaatcgacagccgatatattgccccaaaactcgatcaacaacatcgccacaacaccagagctgacctcgattgctggtggaaataacgaggaggggcatacttcacaacaaagaaaagaacacccgatacacatccgaacttgatctaacatctcgccatcaaataagtgactggagaataaatccacagtagcccgaacaaaaaaaaccccaaaattggcgcactactcgtcattagatcaataacaatagaatccaccatacgcaccggcggaatttctatcgaaagctccaaaaattcatgatgggctacgcagattagacagaggaggaagaaaaggatagaggattaattacttgctcgagaagaaccggcggcgcttggccgcttgcgcggcgggcgggagcagctgcggcctgcgggttgaggacttgaggtcagggtgctgtcgatttatctcccggtgcaaaaaaggtcgcccaccgcggcacgccgtgtgcctatctcctcctcctgtgacgttttataacggcccaattgtgagggcgccgtatcgtagcggccgtgcggccgtgccgacttcggagttcttgcctgccgccgcgcgcgttgcgtggcctccccggagtgcccctaggccgtcggatctgcgtccgcgctcctgccgactgcggggacacgagccgcctggccggaacaaaaacggaagtgttggccacgtcacccgtacgatggttcttgtttttcggggactagcagattggctcacggatgttttc

SEQ ID NO: 123007 - DNA, 3127 bp, Zea Mays
cctctgccacaaatgccaaacattccacagcacatgcctagcaacccattcccaccatccatggtcggcgttccccgtttccaccgactagaatttgccacgtttgatggcgaggaccccatccagtggttaaaccggtgtgaccagttcttcgtttggaccgccacttcgcagcaatccattgggtgaactggcacgattaccctttcgcacgacagtggatgattatcaggaaagattttgggatctgctagcccaaacagcacctctctcccaggagcagcaggtgcaactattcactgcaggactaccggatcgaatcaagatcgatgtggagcttatggcgccacgagaccttaatcaagcgctgagcttagcgcgagcatatgaaaggagatcccaggccctggacatccatccaacagcaacacctagcaaggctctgcgacagccccagcgcccatcagtacctgtcccggcactacagccacaaattccaacagcagttagtacagcgccgcaatgaccattcaagaagctgacaccggctgagatggtcgagcgtcgacgtcaggggctctgttacaattgtggcgagtagtatgtcaaaggacaccgatgcccttaactgttctatctagaggtcactgattttgagggggaagccatggagaccgatcttgaggaaccagaaccagtgatatcactgcatgctttgactggtattcaatctgagggcacaatgcagctggaggtatctatcagaggacatgctctcacagcactactggacacgggttctactcacaactttatcaacttaggcactgcaagcactcttaaactggagtacaatcccagccaaggtctccatgctacggtggcaaacggtgacaaggtctcctgctgcaggttcccaaacagcattagcatgactatcggcctcgaggacttcctaatggaagcatatgccattccactggactccttcgatattatcctcggagtccagtttctgcgcaccctggggccaaccctttgggatctggaagacttgtgtcttgccttctggagacgaggcaagcggattctatggaaaggcatgggctcctcacgagatgacattcacatgcacccgacagttcgaacagtcaatgcagcaagtgaagattcaaaacctatgatggaccgcttgctacaacagttccaggaagtgtttacaacacctagtggccttcccccagctagaaggtgtgatcacaggatccatcttctgccaggaacagtaccagtagcagttcggccatataggtacccacagcttcaaaaggatgagcttgaggcacagtgcatgaccatgttagagcaaggcattatcagatatagcacctcagctttttcagcacttgtccttctaatgaagaaaccagataattcatggcgtttctgcattgactacaaggcactcaatgagaaaacagtcaaggataaattccctataccagtggtcgatgaactactcgatgagcttcgaggggcaaaaattttcactaagttggacctccgttctggttatcatcaggttcgggttcacccagatgatgtccacaaaactgccttccggacgcaccatgggcactttgagtttttggttatgccatttggcctctcaaatgccccagcaacattttaggctttaatgaatgaagtactgggagggtttctccgtcgttttgtcctcgtattctttgatgacattctcatatacagtgcaacatggacagaacacctaatacatgtcaaggcagtcctagaaacgctacacaccaacaagctctttgtcaaagagtccaagtgtaacttcggggctacatctgttgcttatttgggacacataatatcagccaaaggggtggccatggacagtagcaagattgaggcagtaacatcatggccaatcccaaaatcaccacgaggtctgcgaggatttttgggactagcaggctattaccggaaattcatcaaggattttggagtaatcgctgctccattaacaaagctcctcaagaaagaaggcttcaagtggtcaaccgacgcagactcagcattccaaacactcaaacaggcactctcctcagcgccagtactgcagctcccagatttcgagtgtccattcatagtggactgcgacgcgtcagggtcgggatttggtgctgtcctacaccaagaccagggacctatagccttcttcagccggccctttgcagcacgccatataaagctagcaacctatgaaagagagctcattggattggtacaagcagtacgccattggcgtccgtacttatggggtagatagtttgtggtgtgtactgaccattttagcctcaaatatatgttggaccaacgattgtcaacagtaccacaacatcaatggattagtaaactgtttggatttgacttcaaggtagaatatagagcaggaagacttaacacagtggcggatgcattatcgcgccgtgatacaaccaatgaatcagtttatgctctgacagcacccactttccaactgtacaaagatctagaagaagaatgtgcacacagtgaggaagggcagcagctcagtgcacagatcaaagaaggaagcttaggggatccatggcatacacaggagggactagtaatgcatggcaaccgggtgtttgtaccaggctcctccacactcattccagcaatactagaggccgcacattctgcaggacacggtggagtacaaaagacactacataagctcagatcagacttcttcatgcacaaagacagggcactagtaaaggattgggtgcgctcctgtgtcatctgccaaaagaataaaaccgaggctcttcaaccagcaggcctgcttcagcctttagaagtaccacgacaagtatgggcagatattgcaatggacttcattgagggtctgccaaaggtccatgaaaaatcggtaatattgacagtggttgatcggttttctaaatatgcacacttcattgccatgaatcacccatacaccgcagccacagtagctcgagccttctttgagggcatagtaagactacacggcttcccaagttccatagtc

SEQ ID NO: 123008 - DNA, 200 bp, Zea Mays
cctcatgggaaacttggttgggccattgatgaggattttggttcgtttgaggcacttgtgtaaagaagatgaatgcaaatggcgctgctttacaagggtctagatgggtgtggttagctttggataaagaggcaaaaaagctttcagttaaaactactaaaactacaactaatcaggtgaaacatgtcgtccatatctat

SEQ ID NO: 123009 - DNA, 283 bp, Zea Mays
aaaccgctcgctgccctatcatcgcgtaccgcgccaacgccgtgcaagtggagtcgccgccgcctggcatgaaagggtcgccgtggtggaaatcccggcgagcgcactattgaggcacgccttttgccgtggggctttgcctatctgcggggaagtcgcacggaccctctgcgggtggcgcttgggtcaggagaaccaccagttgctcgtcggcgtgctgaatccatcccgggctgcaccgagatgtagacgggtgtccacgggccttccttcgtttcggtaa

SEQ ID NO: 123010 - DNA, 321 bp, Zea Mays
atggcgcggggctacaggaggatgtccggcgacgaggggctgatacagaaaggtgcgcagccatggaaagaaaggagcagaggggcgctcgcttgctgcaggaaagggaggggcgtccgtgggagagagctggtgactttggcgccatggggaagcaagagcggcatgcttgctgcaggaaaagtagggcgacatgatagggagatggagcacgccatctgcagagaggacggcagggcgagctcgccaccaggggaaaacggcggtgtggtggagatgaagcagggagttgtgctcatcttcaggaaggggaggagctag

SEQ ID NO: 123011 - DNA, 186 bp, Zea Mays
atgcagtgcaagggatcgagggttgaggaccacaacacgccacgaccggtgataccagcaccaggaggaatttctggacgggagggagctactacacaggagactctaaaccagatagacgactttgtaaacaagttcttcacttctagaggtagtgatcacaactcaaacgacccctatatgtga

SEQ ID NO: 123012 - DNA, 945 bp, Zea Mays
tcgtgcgggtgcggcgcaacgagcgagaggaggaggatgacggcgcccaagcccggcgggggagcggtggcagcggcgcgggcggcggcggcggggcccaggacggtgctcatcacgggggtgagcagggggctgggccaggccctggcgctcgagctggcgcgtcgcgggcacgcggtggtcggttgtggccgttccgccgagcagctccgctccctcgaggtagagatcacatcaccatcgcgccacttccttactgttgccgatgtcagatctgacagcagtatgtccgagctggcaaaggctgttttggaaaagaagcaagttccagatattatagtaaacaatgctggtacaataaacaagaataacaagacatggaatgttccagtggaagattttgatatggtggttgatacaaatatcaaggggacagcaaatgtgcttcgtcattttgtaccacttatgatagcaggagacatgggattataattaatttaacctctggttggggaagatccgctgctgcagaggttgctccatattgtgcttcaaagtgggcgattgagggcttgacacgctccttggctaaagagctgcctcctggaattgcagccattgctcttagccctggtgtcgtgaatactgacatggttacttcatgctttggaagttgagcagcgttatatcaaacaactgaaacatgggcaccgaaggcagctacaatgatactaagcctttcactggacgataacggtgcctccttgactgtatgaagtggtgaaattttgtgctcaactgattactgatgggggtctctatatttttgcgagattatggtgatgtaaaatagtagttataatgtgtgtgcactctgatgtccctagctgctgcctgaacgttattgtttagccttacctctatggcctatgcacatgctcttct

SEQ ID NO: 123013 - DNA, 1856 bp, Zea Mays
gatgatttcagttcatactatccatcaaacattaagcacgcgatgaacaatgtccttcccgtcatcgcccaacatctagaattttactcctatcatcgactccctaatatcacacaccctaacgacataataacgaatctatccataattaccaagtgcacacctcgcattactagtatttctaacttaatcgtatacgtatacgaagtgtcttattttacgatcataaaaccgataataaaaatagtgaatcggctcaccacatcacaactcgacttggtagttgcctgacgacggccttcagctgaagtcctcagtcgcatatcagacgagcgtgaacgacgagctaaggctgaggcgaagcttgacgacgagatcgaataggggatggtgagcaagaggcagcgaccaaagaccgaagcacatagcacggcggacatacttagccacgacgaggccgaccgacgagggagaacaagaaacacgacggtgagtcgatgagctgaagattgggagcgacagccggtgaggagattatctccaaagagccgcgcgagggaagctaaaaattaatccgacagtggttccgcggcaaacaatggccgggtctgaggggccagcaattacttgaacatggttgacggcgaggtctgccggtagagaatatcggcacacatcgcgacacgacgaacgtgcagagtttcaaaatcacgcgcgcgagaccaggccggaactgaggacaagcgaacagagaggaacatgtctgggagttcaacggcgatggggatgctgatgtcgcggatgtgaacacgaccgccgcataccgcgcgaggacacggaagtcagagcgacaacgacacagcgacctcgacactaaacaccggagctcgacgatttcacggcgtagcaggaaataacaacgccacgatggtcggcgagacaagtccggcgatgacgagacactctatgccgtcgggccgagccgtgctgcgcgacgctgggcatcgagcagagaccgagctggagctaggcgtgacacggaaggacagacggccatctgggcagcgcaggcgcacgcaacgagtggagcaggagccagggacacgacagcagggaggagcaggaaggttgggcgaccaagcgccgtctcccgcggcgagcaccgacgagcagcagggcatggccatggatggaggagctggagcgccggcagagggcagagatggagcagggaactcggccaggaaagggactcggaaccgggcgcggcggctggacgcagggcgagccatggagatgggcgccgagatccatggatgcagggaggagggaggagctcgcaggctagctggggatggaggaggagaaatccacgcgcgccatacaagggcttcgacagggacagggcgcttctgggaaatggagggagagaagcaagggggcagctaggctcttggccgaccggagttggaggaggaagccgcggcctgaacgccggcgagccaggcgcggccatggctggggaagaggaacagcaggcgatttggagcgcggcgtgcttgaagatggagcagaggaagcagtgcagagaaggaacgcggggcacagggaagcgcgcgtcatggctgggaggatctggggcgagctgcgcgcgtgcagaaggcagggagagcgcgggcgggcctgaggagaagacgagggaggcggccagcacgacgaccccagagtacacgcggccagcgaacggcggcatgggataagaacagcagatgagcggcgcaggggaaaaaaaatccagcgacggatgtagacgatggctggaagaagaagaggataaggcagccgaagaagaaaaa

SEQ ID NO: 123014 - DNA, 102 bp, Zea Mays
ggttggctcgtcgttgatctcgtcggtatcgtcgagccatcgaaccctctcctcggtcgcatcgggtctccatgccggttgttgacgattgctttctctcct

SEQ ID NO: 123015 - DNA, 1612 bp, Zea Mays
aaatgaacagtcgctcgcttttctcgacacgctgggctgctacgtgtcccgccagtactgggtcccacgtgcccgcctcctttcatcctcggcagtcggcactcccgagtcccccacaccgccgtgttcccctctcttgtcagttgtcccttcccccacttccctttccttcccgaagagacgggcgcagacggcagagccaccatggccatggaggacgccgcctcggagagcagcgactgggaggtgctctctgccacctccgcctgcgggggcggcgacgacgatgaggtattaatcgtctctggcgggggcggcgacgtcgtcctcgaccacttcgctctcacccccgacaccgcagccgcctggcctggcgacggcgagggctcgtggtcggacgaccggggcgcctggcaaggattagaattattggatgggttcgatccgattccggaagcaagtttcaatcttgcagctggtgtttggaaccagccgctgctgataagcggcgtggatgacgcccgcgaaggggcgcgcagtgcgacccgcagcgcagatggaaatcaagaggaggtggtagccgctgagattcagcaggagagtaattctgtgtttagccgcggtgaattgcgcccggtgctgcagccggcgtatcatggcgtgggagaaactctggattctgatgcagctacacgtacaggtgcctcgctccagggtgaggtatcggagagttcccttgtgcgattggatggaggaattggtactggtgtagaaagatcgtgccttgaagatgctgtgtcaagtgatgagatccatggtgaacaagaagagcaggaacaagggagcaaggttaatgctgccactggttgcgatgaaccagatggagaggtcaaggatggtgctctgcctctggctcacacggcaggtactgaagagggggagaagcaatttgttgtctggtggaagctgccgttcaagctgctgcactactgtgcttggaaggtgaagccggtatggtccttctccatcgccgcagcacttcttggcctggtcgtgctggggaggaggatgtacagaatgaagcgcaaggcaaggggcttgccccagattaagattgcgtttgatgataagagggcctcccaatttgctgatcgcgcggcatatctcaaggaagccttcctggtagctagacgtgtacctatgctgagaacatcatctggtgctacgcttccatggtcaatggttcaggagagatgagtgaagctgctcaaagctccattctggatggtgtacatcagtacgagcatctgatttggctttgtctataaccttttgttttagatgacgcgtcaaggaggattccaatgttgatgtcagtggtctctctttctcgatcttctccatttttactttaccttatctttcttttttaaggaaccacttcttgtgctcctgatttccttttttttctttgcccttactctgtttagtccgtggttagtagtggtgtcctaaatttatcgttcgtacagacgtgctcttttctttatcttgttaatttagatgctagttgttgacgctgaattggattggatgacatatcagtaaggct

SEQ ID NO: 123016 - DNA, 199 bp, Zea Mays
ctgctatattaataaatgtgtactcgcttgtgccatttatttgagaaattacaatagaactacaagtatatatctttgccaattttgtctcatttgcttttcatctatgcatataaggtttgctagatgtatgggagaagattaaatcacaaggaatactgaaatagtgacaattgatggttttcattacataggacat

SEQ ID NO: 123017 - DNA, 1372 bp, Zea Mays
ggcttttgatgaccgttcccaacttcccattgctaatgttgtatcattttcacttggaccaacaactgatgtatcttgtttcccttccaacagggtggataaggacgattcacgctgcttcaattgtggttcttatagccatgctatgaaggattgcccaaagcctcgggacaatgttgcaattagcaatgcacgaaaacagcataatttgaaaagaaaccaatctaatgttaaccgtgtacaaaaccgatactaccagaaaacgcccggcaaatttgatgatttgaaagctggagtactgggacctgaaactagacagtgcttggggatcggggagaatgatcctcctccttggctgcacagaatgcgtgagttaggctatcctccgggctacctagatgtggttgacgatgaagatagaccttctggtatcaccatatttggagatggtgaggtgaaactagagtatgaggagggagagctttcagagcaaggcgaagcatctccgcctaagaaaaagatgacagtggaattccctggaataaacgcccccatcccagaaaatggtgatcagtggctgtggggtagcaccccgccccagtcctcaggccgccaccactcattggattcgagggatttccatgatagagggcctcctggcgctgatcattattcaccgagataccactcccacgattttggacctttgcgcccaagcatagggagatcacactcagacagggggtggagaagcccacctcgttatgataatccgcctgcagatgatggtgcctggaccccgcattcataccccagcaggcagcacttgggccattacagctcgagctctgagatgtcgtcacgccattccagggacaaagacagagataggcatgatagcaggcattaccaccaccgcagatgagtcaagcctgtagctgatttgtatcatattcttttgctgaagaatcctctacctgacgcattcgatctgacatagaaatcagtcctgctatagtttcttaagttacgaaatttcctttccttccaatatatttttgcagcagtgctcccaaacccatggtagagagtgaccttatctcgtctggtccgtgagctgtatctgaattatatgactgccttcctcacatatgcaactcttgctccttccttgactgttatgggcctgcttggttcagggactaactaatgtttagtcaggggactaaagttatacctgtttgattacagggactaaggtgctgtttggtttagtacttgaagtggtaacgggaatggagtgggctaccgccgctatctgatacattgtttggttaatgtggaaaacgtgatcaactccgtttacagcgtt

SEQ ID NO: 123018 - DNA, 96 bp, Zea Mays
attttcctgcattccattgtggggcttcaatggttgtcacttttctttttagatatttactctctcaatattcatcaatcaaccattttcatggtt

SEQ ID NO: 123019 - DNA, 1311 bp, Zea Mays
cacgatggctctcgtaaccgccgccgtcactgaccggcagaccagctgctgtcgcctggccaggctaggcccggccaggtgcgctaccaccgcgaaacaaaccttggcagcgccgcacgcagtgcaagcgcgcgacaacttctcggcgtcttctccgatcctcgcccgcccccgtcgccacagcatatatatgcgcgctagcgctcgactcccccgggtactctcgttccacctccacacggcacacaccaagccggctgcgccaacaactggggcttcggcgcttcgcttcgcgttccatccacaaagatatggcgcaagactctgaccaagcaggcgctggccctcctcctccggcgcccacgacggctggggtggcgggcgccatgacgctcagcagcatcctcaccgtggcgggcatcctcctgctcttcgtcttcttcgccttcggcatcgtgtccctccagtactgcttcaaggtctgggacagggaaagccagcagggcgagcaaagccgccggcgccagcgccgtggtacggccgatggtagcagtggtggggtgcggaccagcaggggcgtcgacccggagctgctgcgctcgctgcctgtcacggtgtaccagctggcgccgccgcaaggtgcgggcaaggggccgcagcaggacgcggtggagtgcgccgtgtgcctcgccgagctccaggacggcgaggaggcccgcttcctgccccgctgcggccacggcttccacgccgagtgcgtcgacatgtggcttgcctcccacaccacctgcccgctctgccgcctcaccgtctccaagcccgacgacggatctcctccgccgctttcattggctcttccacccgtcccgccggagcctgcgaactacaccaccaccgccaacttgcccgccagcgtgcttctcggggtgtctgaccatggcgcggtcaccgctggcactggctccgcgcccgccatggtgatcgagatcccggagttgttcgcgccgacgccgacgctgaccccgtgcgacgcttccaagacaccgggctcggcggggctcagatcgatcaggaggttgtggagcttcggaaggcaaggggcggcggcgacttcttcctgcgcctgtgccggtgccggtgctggtgccagcggagtggacttggagcagggtatgagatagcgttaccatcgctttctcctcccagagacaccattgccgacttgccgtaggagcgagcatgcggccagccggagagcagccccaatttctgcgctcctgcattactacattctttgtattgtactgctgt

SEQ ID NO: 123020 - DNA, 1522 bp, Zea Mays
agcacccggcccagcacccctgcaggtaggcaggtagctttggcggccgccatggccggaggagacggcgcggacgagataacgctggagcacacgcccacgtggatcgtggcctccgtatgttccatcatcgtcgtcatctccctgctcttcgagcgactgctccaccgcctcggcaagaggctagcaaaaggccgccggaagccactgtacgaggccctcctcaaggtcaaagaagagctgatgctgctgggcttcatctccctgctgctcaccgtgttccagggcgccacgcagaagatatgcgtgcgggagagcttgatgaaccacctcctgccctgcccgcgcaccaccgccaagaccagcgcgcacttcgtcggcacgaggaggctcctggcaggaggcggcggcgtctccagtgactactgcctcagcaagggcaaggttccaattctttcggtcgatgccattcatcagctacacatatttatcttcgttttggcagtcacgcatgtggttctcagtgctgttacagttattcttggaatcacgcagactagaaactggaaatattgggaggagaagatccagcaaaacgatgacagtgctcctcaaatgatcaagcatgtgcaagaattcaaatttatcaaaagccacttcagaggccatggaaaacgatgggggatattcggttggctgcgctcttttttcaaacaattctacgggtcagtcacggaggaggactacaccaccctgcgacttggcttcgtcatgaaacactgccggggccatccaaaattcaacttctacaactatatggacagagcattcgaaggggatttcaagaaagtcgttggcataagctggtacctttggggtatgctaatgatattcttgctacttaatgttcacgctgttacttgtgctcggaagtaagatggagcatattatcacggagttggctcttgaggttatccaaaagcatacggcaatagaaggggttctagttgtaactccttcggatgaactcttttggttccaccggcctaaactagtccttctcttgattcatatcatcttgttccagaatgcatttgagattgcattcttcttttggttgctggtaacatatgggtttaattcgtgcattatgggaaaaccggcatatgttattactcgtgtggtgataagtgtcatcagccaagtcctatgtggatatagcaccctacctctctatgctctcatctctcaaatgggaagttctttcaagaaggccattttcgatgaaaatgtctccgaaggtctcatcaattgggcagaaaatgctaggaggcgtaatagaatgccaacaagtgttggtgacaattcacctgttggtgaaggaattcaaatgtcaaatcagacacaaagagaatcatcaatggaacagggaactgcaaggttgatctaagtgaaaatatgaatgtacatgctaacacacattgtacatacatttacagctatcacaatttattctttaatg

SEQ ID NO: 123021 - DNA, 732 bp, Zea Mays
ataaattagatacttcaacgtgattggatcgaacccagacatatgactaggagaagctccaaggccactttgtcaagggtctctgcaatgcacttactggtgcatgatttactggaggttgtgtgcatgaatgtgccacgcattggtatgggggttggagttgaagcaggtaaatttcaccaacattggtatgtgaactggagttgaagcaggagacatgattgtcattcctatcctgtgcacactgcctcctcactgtctttcgtcgtccccctcgcagtcctgataccggagcatggttgccagggagagcagtccaaggcaaatttgccatgttggagcagtcacaggagccaaggggctgcagtcacaggtcctgctagccaggatggagcaatcataggacctcctagcagtccaaggcaaatttgcgaggtggagtagttgcaacttctgaaacccacgggataacatgctcaagcattcgtatgataaaaagaagatggcacataatcaaaagaagacctcatgttctgcgtttgtgaacctgtttgtattttttttgaacttgctttgtgaacctctatttgtaaacctgtaaaatctgaagttgtgaatatgtgagcttgtttttgtaaaatctgaatctggttttgtgaacttgttttgtgaacctctttgtgagcctgataaatgatggacttgagcctaaaatctgtgggtctgaatctg

SEQ ID NO: 123022 - DNA, 372 bp, Zea Mays
caaattccaattagattttaaattcaaacaaagttctaatttgcacaccaaaaaaatatttcaacatgaatgcaaggttcatgtattaagtttattcatttatttattaccttatttttttatttaggcgatgttttcaatatgcaacacaaaatattcattttacgaaaatatttcgaatgtttagtccattaaaggttcattccaaagcttcattatttattactcattatatttattttaattttttttcctaccaattttttgggccttacaacaatctaccatatgggaggaatttcttcaaagaatggtgacataatttaaaacatttgaagtgctttctttttcctatgtgactacacaagacac

SEQ ID NO: 123023 - DNA, 92 bp, Zea Mays
tttttatgcaagaatctgtgtacattcatgttctaagatgtagatcaaaacgagatacaatcggatcgaatcacagcatcagcttcgatatt

SEQ ID NO: 123024 - DNA, 423 bp, Zea Mays
atggctgaggaagacgctgcgcggccgagtgccatggagatggcaggaccaagcgcgcagggagcacggcacagacagaggcccgcgtccggtgagctggagaccacggctgggcacgcgcaggaaagggagccgagcaggggcaagtgcgcagcgcccatggaagcagggaaggagctcgggcgagctgctcggcgggctggagcagaggagcgcggtgcggaggagaaaggagagcggctgagcgcgatgaaggggcttggctgggcgcagggaggagcgccgtcgagcaggaagcttcacgcacgcaaggattccatggcgccagaggagcaaaggccgagcagggagggtgcgccatggcagggagaactcgggggaagggaagtcgcgacgcgcaggagctccatggctggacgttga

SEQ ID NO: 123025 - DNA, 384 bp, Zea Mays
atggtaccgctcaagttcctccgtgcgcacaggaacaaggtgaaggaggtcatggcgatgctcagtttagttctagaagataatatattgggtgttcgttttattttagaccattggatgggtcatgtcatcgatgggataataagtgctaagttttttgtttgccttgttctagaaatgcagactgagttggcgagaagggagaaggcaaccaacatcaagccagatcatgatattgatgtctatataaagaaattaggcttggaggtctgtgctgatacactggtagggaatgagatgatgaggggtatttctggtggtcaacgaaagcgtgtcacaatagatcctgtatatggtggctatgaaggttcttatttcttatag

SEQ ID NO: 123026 - DNA, 838 bp, Zea Mays
caccgtagggcacataggctctgggctctggcgctaatgttcgagcaaggcgctgctcctgttgctgtagaagggattttttgaccaaccctccaaccggtgcggcttcgatctttcctctcctatcacctgaatccctcgagtattcatcgccggcgcagcgcggtctcttcccttcgctggagaagggggaaggggacacgaacggagcagaaggccatggacacgatgcggggcgcgctggagcgggccaagatgctggtgggcatggaggtcgacgaggagtccgcgttgccaccgcccgaggagcagtccttcttcgacgacatcaatcggcactgcaccctcaacaccactcagaggctctatggtttcgcgatatgcttggctgccggactgacgtgcacattcttgtcaatgcttgtcttcttcaatccagtgaaatttggggtagcattcacccttggcaatttgatggcccttggaagtacagcatttctcataggccccaaaagacagtttgatatgatgcttgattctgtgcgaatatatgccactgctatatatattgcaagcatcataattgctctattctgtgctatctacgttcgcagcaagctgctgactctagtggccatcattttggaatttggtgcccttatttggtaagtttagattcacttttctcaagtactttattgcattgctgtaatatgtgtatatatatgatgacttgaatatcgatcatgcattcattccttagtcgttcttatctatggtgatgcgatacggttttgtgttctgactaagaattatcagttccccaccaatatcaatc

SEQ ID NO: 123027 - DNA, 835 bp, Zea Mays
gtcaccgtagggcacataggctctgggctctggcgctaatgttcgagcaaggcgctgctcctgttgctgtagaagggattttttgaccaaccctccaaccggtgcggcttcgatctttcctctcctatcacctgaatccctcgagtattcatcgccggcgcagcgcggtctcttcccttcgctggagaagggggaaggggacacgaacggagcagaaggccatggacacgatgcggggcgcgctggagcgggccaagatgctggtgggcatggaggtcgacgaggagtccgcgttgccaccgcccgaggagcagtccttcttcgacgacatcaatcggcactgcaccctcaacaccactcagaggctctatggtttcgcgatatgcttggctgccggactgacgtgcacattcttgtcaatgcttgtcttcttcaatccagtgaaatttggggtagcattcacccttggcaatttgatggcccttggaagcatttctcataggccccaaaagacagtttgatatgatgcttgattctgtgcgaatatatgccactgctatatatattgcaagcatcataattgctctattctgtgctatctacgttcgcagcaagctgctgactctagtggccatcattttggaatttggtgcccttatttggtaagtttagattcacttttctcaagtactttattgcattgctgtaatatgtgtatatatatgatgacttgaatatcgatcatgcattcattccttagtcgttcttatctatggtgatgcgatacggttttgtgttctgactaagaattatcagttccccaccaatatcaatc

SEQ ID NO: 123028 - DNA, 1084 bp, Zea Mays
ctgtattcgattctaacatctttgtttctgtaatcgactctaacatctctctagcatttaaatatatatatagcttgctaaagcatttagatatgcagcaatcgactctaacatctatgtttctatttatgtataccaaagcacaattaaacatctttgtttgctcatatagttgttcctgattgcttcatttacagttttatttaaatgctttagcactgttcatatctaaaatgcattttaaattgttattttgaaaacctacctgtaccttatttcaagacctccattctcaccacactcattttatatcatttcagaagcaagaaaaatataaggatgcggaacctagtgcaatagatcttttcaaggagatgcattgtagcaaaaagaaaggttttagtgaaaatgttcagaaagctattgttgacatggaagaaatggtagcagcacgagttcaggatggacaacaaccaaaatctcctacagaagttgtttctaatgtgctaccaggctccagtgtgttcctacgcaatgttggtcttcagtccgcctccaagaaaagctccacaacgattgtttctgcaaaggttcaacaacttcaggatgaactagagaccgagaagcaagaaaaagatggccttagggaagaagtggaaaccttgaaggctcaagcacaagcatctcaggagaccattgatagtatgaagaggtcgatggaagaaaataacaacctccttcgtcaactattaagcttcaatcgaggccaagtgcctccatcttaagtctggttgaccactataggacctgcagccttatggctggtatagtggctggttacagtagttctagatttgaagttataggatcattttcaattatgcttaatgtttaatactttgagttgaagttattggatttgttttggattttaagttaaaggatttgcagatatatgttttaaagttatattattctcttctagatgaaatatttgtgttgaacaaattcatatgatattttggttctgatgtgtaatattctatgatgatatgaatgcatatgatgtattccttgcgatgat

SEQ ID NO: 123029 - DNA, 731 bp, Zea Mays
gacgccacaacctgacgagccaaaagacaaagaggatagacgaggaggaagagaagcaggtagtggacgacggagggagacagccagacaggacaggagcctaccagaccagaagggcatgccgggcgccccatgcaacgtcgagccgacgggccgccggttgcgctggagcgggctcggacgccggcgccgccgcaggctcccggtcgcccggctcggcggcgagagggccgggcgcggtcggggagtcctgcggcggctccggctgcgctggctcacggcaaggtggctacggcgcgcggctcgcaggctggcggcgatctacatggcggcgctcgcgggcccgccggctcccaccggcgcgtcgtcgtccacctgtccgccgtggatcggcctggagccgtgcttcgccacgccgttcgtgtcctgcacaaggccgtgctggtgaggcggcgtcggcggcgcccgccgtgcatggatcgatttcaggctgcgccggcgtgcagcaggtgaccatcgatccacgtacggcaaggtaagacataaagctttggtgtaacaacaacaaccagccatgaggccacccataactggagacgtactggagcacctggtctagaatccagatgcatgcatatatcgaattgtactgatccttttcttcttctctattcgtctcctgttcttgttcttgtcttgttaagcaaataagtagtagtaatcttttccat

SEQ ID NO: 123030 - DNA, 108 bp, Zea Mays
cttctacgaggtataaaaacatgtttcaaacaccttttgcacttagaaacactatgcaacgacattaatgcaacatacaaagttcaaccttatgatgcattttagttg

SEQ ID NO: 123031 - DNA, 762 bp, Zea Mays
ccccatccttaagtccagaggcaggctcgacctggacccgagtagctgctccaccaccccagccgatgcctccccgatccccatggcgccgcgcgtcgtcggggccctactgaccgccaccgccctcctcgccccgctgctcctctcctcccagcttccttccctgcccagagcggccgccgcgggctcaccggcccccgcgccggcgccggcgccggcgtcccaccaccacttgcccccgccacgccgcgtcccgtcgcccgcgaacaacggagcccacgcccgacagccgccgccgccgccgaggcatcagcgagacggtgccgcacgccatgctccccctccgacggtgaggccgtcagcgtggtggcgccagctcaacttcggcgagcggttcggggtcgcgctcgccgccgtggccgccgcaatgcaggtggcgctcgtcgcgctcctgctggtcctgcgcgcgcggcagctgcggcgagcggcggccgcggggaaggccgaggaggaggagcaggaggctgcatccgctgctgcgtcgcggcccgcgccagcgtgaccgacagctacggttgttcggtgagctgacggggcaacatcacactgtcacttgctgccgctgggcttccttgttcccactgtacagtacagtggtgtccgtctgtatacattctctaaatagttttcccttttttttcgagcctagtacgtgctgagagatgtacgaaaaaggataagggagtgaattgatttctttcc

SEQ ID NO: 123032 - DNA, 1727 bp, Zea Mays
gcgcgaccgatacggcagttaaaaagggtgggacgccacctttcccgcggaaagaggagctcccaccgctaatccatcgtcctcgtccctccctacccgcggccggccacccacgccgttgctgctgttctggcgcgccctccacctcttcgtctctcgtaggtgccgtcgtcggagcttgcttttggggaggtcgtgcggcatgatctgctgaccgccccaaatcaacccggccgcgcatcgaccgtcgtcatccagtccgacgaggaggaggaggaggagagggagaggggggagccacaaaactaagatgtcttgctgcggtggcgccgaggaggacagctacggcccgccggccaaccaggcggttccaccacccaatgccaacgcccccggcaacagaggcgggccgagaggaccgggggcgccgagggtcggcggccccgccaagcccgtcagcattgacgtgcccgccatacccttcgacgagctcaaaaggatcaccaacaacttcagcgaccgcgccctcatcggcgagggctcctacggccgcgtctacaacgccacgctcagcgacggccgcgccgccgtcatcaagaagctcgacaccagcgcctcgcaggactccgacaccgacttcgccgcgcagatcgcgatggtctccaagctgaagaacgagtatttcctggagctcctagggtactgcttggaagacggcaaccgaatgctaacctatcagttcgccacaatgggttctttgcacaacatactacacgggaagaagggagtccagggcgcggagcccggtcccgtcctcaactgggctcagcgagtcaagatagcctacggggcagcgagagggctggagtacctgcacgagaaggtccagccgtccatcgtccaccgggacatccgctccagcaacgtcctcatcttcgacgacttcagctccaagatcgccgatttcaacctcaccagccagggcaccgacaccgccgcgcggttgcactccactcgcgtgctagggactttcggataccacgccccagaatacgctatgacaggccagatcaaccaaaagagcgacgtctacagcttcggcgtgattcttctagagttgctgaccggaaggaagccggtcgaccacacaatgccgaaaggccagcagagtcttgttacttgggccactccgaggttgagtgaagacaaagtgaagcagtgtgttgatccaaagctcgacagtgactaccctccgaaggccgttgcgaagctggcagcagttgcggcgttgtgcgttcagtacgaatccgacttccggccaaacatgactatcgtggtgaaggcgatcacgcctcttctgaacgcgcccaaaccggcagctccagccgcgccacagtcctgatcaacccagacgacagaattagcctggacctggacacggttcccctgatctgttcctcattgcagatgtatgctaaggaaccacgcatccttgctccatccatccattgcatacaggggaattttgtaaaatgttaatccggtactctgaattcgtgtgcttttccttgtttgtttgcctggcttgttgtgagtttgtgatataacatgtgcagctttagaaagtacacatatgctgtttccagctagaaaaattacgcgagacctccaaaacctttttagttcacatgaagtgatactgaacaagagcttgcagattgagtgct

SEQ ID NO: 123033 - DNA, 1247 bp, Zea Mays
ccatggaaatcctctgcgcaaacaaccttacagaactataataaacaaatgacaagcccattactcgtatcgtatccttcctctattcttgacatggaacttgagcttagtctgggggattctagagctccagcaaagagcgcttccacgcctgctgcactgactcctatacacgcaggtgcgggaggagaaggccatgagcttgcgctggagctaggagtaggagctgccaaaagagctgaacaagacaaccaaaagacacccgtgcaaccagaacatgtgcaggaagaagaagaagaggaagaaacatgcccatacagcgagtcacctgccgagctgagcctcatcggctgccctttgctgcctgcggcctcagcagaaatagggtccgtgaattcttcagaggtgtgcgtgcgacgaggatttggtgtggacgctgttctcgtggatggaggagacgcagcacaaggaagaccggctttgtcgacttcgttcttgccttcggagtttctcgttcggcggcaggctgatgatcaagaagctgctgcagaggatgaggagatgagtggggttggcgggggagcgaggaagaagctgaggctgtccaaggagcagtctgcgttcctggaggatagcttcaaggcgcacagcacactgaccccaaaacagaagagtgatttagcgaagcggctgaaacttcgaccgcgccaggtggaggtctggttccagaacagaagagcaagaagtaagctaaagcagacggaggtggactgcgagtacctgaagcgttggtgcgagaagctagcgcaggagaaccggaggctgcagagggaggtggcggagctgcggcgtctttgctccgccgcctacccgttttacggtgcagcagcagggttcggcgtggccacagcccgagtgtgccctagctcatgcgataacgacgtcagcgaggctgctatcagtggcgctccatcagcagcggcaccaccgccatccaccttgttcgccagctggcctcctcatttcggacccttcaccgtcgtcgtccccccactgctccgccggcagccgtcggcgacgacctcgtgatacgtacgtacgggtggtgccgatggaaaaaactagctctcacctcatcaatggcgtatagtgtactgtgcatgcatgcatgtatgtaaaaaggtaggtatatgcttaatttgtacgtaattaaaaaacgtagtggacaaacaaattgaacacgaatt

SEQ ID NO: 123034 - DNA, 726 bp, Zea Mays
gaggttgggcccagattgacagttcttcggcttcttgggctgggcctactctgaccgctcccgccccaccaccgattctcttcctccgctccgttccccacctccgttggtgcgtccaccgaggcggccgggtcggttcgcctccgccgcggtcgatcaatgaatccatgccggcctcgtggcctggttccttgctctccttattctaggaatgtgcaactgagtgactgctgagctgtagataaatgtgaggagttgaggacattatttacaaacaaatggtatgtagtattccagatctgaagaactagacggagcatatacaacagaagtgatagtatatgaataagagactacactgactgaatctaggacttctggattaatggaaaggcttctcaccactttgttagacttgtccttctctggtgttatactgtcatctgataaaataattcaatagcaagctaagcaacagtatacttcatacatggcagagctcaactttgacttctcagggcttaaaattgaatttatatgacatagcttgtttcatttcagatcatctgtttttcttaagtcatcgcttgtttgattgggttttcagttagcaacatcatagttagcagcccaagattaagaattgtagtatcttctgaagattaagacctcagtcattctccgaaagtatcaatacttggaagtatgaaactgtagatcatgaac

SEQ ID NO: 123035 - DNA, 846 bp, Zea Mays
gaggttgggcccagattgacagttcttcggcttcttgggctgggcctactctgaccgctcccgccccaccaccgattctcttcctccgctccgttccccacctccgttggtgcgtccaccgaggcggccgggtcggttcgcctccgccgcggtcgatcaatgaatccatgccggcctcgtggcctggttccttgctctccttattctaggaatgtgcaactgagtgactgctgagctgtagataaatgtgaggagttgaggacattatttacaaacaaatggtatgtagtattccagatctgaagaactagacggagcatatacaacagaagtgatagtatatgaatagtaaggattttctccaacaaaaattcttccataatctctagatctatcacattaagttatgtcacatgttttgctgaaagcaatagtaacagactcatagtgtccttctggaagaatatgtcctgaagtaaactaatgtaaaagtcaacctttgtaattaattcgagcttagtagtggtcttgtagtgacagtactttagtactttattctcatgacttcttgtgcttactaagctttggcagtaagcttttaatttgcatcttccagcagaagctatatgttagagtcaatttgttctaactgtaaaccatcaaaataactcataactgtatctggtaatacacaaactaaaaattcttgttactctgtttgaaatatcgttatttactgtagttgtttctggtgttataatgtaataaaaaagacagatccagtatcagtggcttccacatgcgtgaagtttaggcgaaggaataaccgaggcaagctttgccctg

SEQ ID NO: 123036 - DNA, 417 bp, Zea Mays
atggaggtgtctggacaagcagcaacagtttctgtgatgactgactggtgtgccttttatggctgcagattcctcgactggcaggtgaaggggctcagagttggaggaggtgcagactggcttattggaattgaaccatcaggcacatttccaacctctgttccactatcgctttcaggaagttcaatggggtggtcaggctcccaagttagctcactatcccattttggccctgtgtcccactttggttcacagtcccaaataggtcctgggtatgatattgttgaggaaatgtgttccttatcgtgcattgatggggctgcccaagacgaccgtgtgtcattagtagacgttataccaactgaatttctatcagcccttgctttggacttggttcttggccagaatgatccatga

SEQ ID NO: 123037 - DNA, 102 bp, Zea Mays
atgattcactctatagtaagtttatgtgtgatgaagcattctaccatttgggagaaaagaatgataaataaatatatgattagcatcattttgaatttttga

SEQ ID NO: 123038 - DNA, 1226 bp, Zea Mays
ccagctcctccttcactaccgtaaccgtaacaaacaaccagcgcaggattatcaccgccatcgtcagggttgttatcggcctccctcttcccccaaccgagatcctaggagataaatcagagccccagcgaccttttccccctctattaccctctcgcgagccctgaccagcaaatcatctaccgtcgggtgctatcaccaccgcgaaatcgagatttagagaggggagatccgccgctagtgagctcgcaaatcgcggttacccaggtcttggcatggtgttctggtgtggtggcacggtgcctaggagccatggctgccatcccgccgctggaccattggcgcttgggcgattgctcgccgggcttgggaattaccgttgtgccatgctatgtcggggaccaagctcacctcaatcaaatcaccgacgagcaagtaatcgaggaccccgatacttagcaggtggaaaatactgagcaggagctcattgaaggcaagttgtgcccttgaccacttttctttacccaataatgttctatataatcattgtggtatttttaggcttaattttgatgggacccaataggtcaccctagtttgctttactttatgccttgttcaccactgaaattttgggtagtatcttctattgctctatgtggttttgggtgttaagataattatgatttatgatcatgctttattattgtgatttcattctttgatgttcatgataagactattttgttaattggaacatggagcttaacttgagataacaatgctaccataagggtggaataggacgcccttggccaagtaattaggaaagctagggagagattaccttacctaaaaggggcaagcgaggaggcgtcgctgtagagtattgggaggttatcgggtcggactatttgtttagctttccgaacgagagattcctatgcttccttcttcctgaattcgtagcgggttttctcgaactagtggaactttggaaaggcctcgtagtgttaccctgcctcgtctccttggtagggatgaatgagatttctagaccccttggcaaatgggtagcatgacttgtgggtaaagatgtgcaacctttgaagagtgtaaaactggtatactagccgtgctcgcggtcaagagcgacttaggactgtcgcatgattaactcatggaattaaacttaatttgtcatatgcatcgcattgtggttttat

SEQ ID NO: 123039 - DNA, 477 bp, Zea Mays
accgtaaccgtaacaaacaaccagcgcaggattatcaccgccatcgtcagggttgttatcggcctccctcttcccccaaccgagatcctaggagataaatcagagccccagcgaccttttccccctctattaccctctcgcgagccctgaccagcaaatcatctaccgtcgggtgctatcaccaccgcgaaatcgagatttagagaggggagatccgccgctagtgagctcgcaaatcgcggttacccaggtcttggcatggtgttctggtgtggtggcacggtgcctaggagccatggctgccatcccgccgctggaccattggcgcttgggcgattgctcgccgggcttgggaattaccgttgtgccatgctatgtcggggaccaagctcacctcaatcaaatcaccgacgagcaagtaatcgaggaccccgatacttagcaggtggaaaatactgagcaggagctcattgaagg

SEQ ID NO: 123040 - DNA, 1730 bp, Zea Mays
tctcttgccattttgcagttgacttggacagccagaactttggaaatggcaagatcaccaaaaggtaggaacctccaagctcgtcaacgtaggtcagcttcttcagatgtgcccttgagctcctgtgagacgaaaggaacaagcaaaggaaatgatgtgtcagtgacatctgagaagaatgaatggaaaggagcaacttgcccagtttgcttggagcatccacatgatgctgttctcctcctgtgtacctctcaccacaagggctgccggccatatatgtgtggtaccaactaccgtcattccaactgccttgaacactttaaaggagcttatgcaaaggaaaaaatggctcttggtgtttcagctgagtctgcatctggccttccattatcctcaaacacactgccatcaagcaaccagccatgtgtaatggaacttgcctgccctctgtgccgtggagaggttaaaggatggactgtggttgagcctgctcgtcagtatctgaaccggaaaaggagaaattgcatgcatgatgggtgctcattccatggctcgtataaggagctttgcaagcatgtgaaatcgaagcaccctacagcaaaacctcgtgaagttgatcctgctactgcagatgagtggaaaaggtttgaatgtgagagagagcggcaggatgccatcagcactatcaggtccatgaacccaggatctgtgatcatgggggattatgtccttgagttgaatggtggtggcaacaaccatttgctctcagatggagataactttgacttaggggaaaggctcaacttcttcacatccttagatcgtactttgaatgagagaattgacctgtacgactcgtcagatggtttggatgaggggtttgacttcttggcatccctgtttacccatggcaggagaatctctactggaggctcattgagcagggcttatagaagacacagggacaggcctagacgttcaacgaattctgctgatgcttctgacattcagcatgagtcagctagcactcaaaggggacagcgtgctgttcgggctacaggcaggacttcacggcgccaccaccacctacgcgaggcagctgagagatgaaatcatttttagaggcggggtgctttttcatgctatccatgtgcaggggacgcaaaataacacaccatggtatgttgctgctctagtggtcggaggtccgtcagattcttccttttttttgtcccattgttgagacagcaaccgaggatataagattggatggagatgaggtctctgtttggcttgtgctgatgcctgcatgatgtgctctgcgatgtgcatccagttttgggatcaagcagctccacttttccggtgctgcctttgcatggattttgtgaatgcccttgccttgagtttcctttccctttctgttgatcaaaggaaacttcaaacagattgttttggccgcaattgctattcgaaacttagatgtcagtctcatgaacagcgtacacattactgcttatgttctggtcttgtagttttgtatccatgcactgtggcttttggatggcttggttattcacttggtagtaatgaaactgtcagctgtgtctgtgtcagctattgcttatggaactgatacctgtagttctattcatgtgcttaaaatgtgtcacatttgtttggcagtataaaaatcgatcgtatattcaggctggcactacatttcgatc

SEQ ID NO: 123041 - DNA, 216 bp, Zea Mays
atggggcggaagcggaaggagctgctgtcgtcggctccatggaggacgggggaggcggcggaggacgaggacacgacaaggatgagccgagaggggaagatggagaaagcacttacagatcaaaatggtgccctgcaaaagctcatggaggcagataaggagaaaaacaatgctttagtgaacgcacaccctcgggagcagcaaaacggagcatga

SEQ ID NO: 123042 - DNA, 1874 bp, Zea Mays
gcagagtttcaggcggccagcttcctcctccccactcgttcggctcaccacctcggtgaccgctgcccttgacgcctgcttcggacgcggcctggccctgaaatctccgtgcgtgtttggccgaaatccacgggagggtgctcgtctttgctgagctgctccggcctccggagcggagctctgcctacttgagttcaggcttgttccgccatccgaggacaagattcggagcgtcgccgaagggaggcgatgaaggggaaaggcggggcgatggaccgcaggtcctccgccaggtggagggtgttgctgctctgcgcattcagcttcggcctcggcatgctcttcaccgaccggttctggacagcaccggatagcagtaaccatatcatgtctcaaagccggaggcaagagcaagagctccaacttgtatcagaggattgcagcacaaagaggaagcatggggaagacaaggatataatgggagaggtaaccaagacccatgaagctatacaatcattggataagtccatctcaacgctgcagatggagcttgcagcaaagcggagcacacttgagctgctccgatctagtggttcaccagtaacctttgaaactagccaaccaaggaaaaaggcatttgttgtcattggagtcaatactgcattcagcagccgcaagcgccgtgattctgtccgggagacatggatgcctcaaggagaaaaactgcaacaattagaagaacaaaagggaatagtaatccgcttcactatcgggcacagtgctacatctgacagtatactggacaaagctatagattcagaggacgctcagcatcatgactttcttaggctggaccatgttgagggataccatgaactctcagctaagacaaaaatattcttctctactgctcttggcatctgggatgctgacttctacgtcaaggttgatgatgatgtgcatgtaaacttaggaatgcttgccactacccttgctcggcataaattgaaaccaagaacttatattggctgcatgaagtcaggcccagttctcgctgacaagaatgttaagtaccatgaacctgagtactggaaatttggggaggaaggaaataaatacttccgtcatgccacggggcagatatatgccatttcgaaagatctcgctacttatatttcaatcaaccagcctatcttgcacaaatatgcaaatgaagacgtgtcgcttggatcatggttcattggtttggaagttaatcacattgatgaaaggaacatgtgctgtggaactccaccagattgtgagtggaaagggcaagctggtaatgtctgtgtagcgtccttcgattggagctgcagtggcatatgcaagtctgttgagaggatcaaagatgtacatgctcgctgtggtgagggggattcagcagtttggagtgctcttttctagcgcataccttctttgcccgtaaatatgtagcatacttgctaagctctcgcggcggacacctgcataggcaactcaagtaaacttgacaaaaaccaaagatcgtggagtatgatctgaaactgcagaaacagtatgttgcttggaaatattctgcaacaacataattttgctccgtcactgttcgtggcttttggcggtgttagggactccaaagtagggttgcaactgatcttacatgtaggggggagagtttcccagctgatgacgcgtatggaagtaagagatcatgtagaggggcattgttttatgcaaattttgacattcttttgcgagtttcacacattcagtcgttcatgagggtgtaccatgatgtaacatatgagaagccgtggacggatgttggtttagcaaatcttgttccaaaagca

SEQ ID NO: 123043 - DNA, 1947 bp, Zea Mays
atccaaccgccctctcctctcttcctcttcctcgcaccacctccaccaccaccctcctctcttctcgcctccaccaccaaaaggggtgagaggcacggggaccgcccgcctcgctcgctggcctgcacactggattcggcgccgcggcggtagttgcagcggcggcctggcagggagatgtcttcacgctcggggtactacaagctgaaggttcaatttaccatttatcctctgatcatcgatttgatgcaagtaaagaggaggttgatcgtgtaacaaaatgtggaggtgatgttggaaggctaaatgttgttggtggcgctgagattggtcctcttaggtgttggcctggaggtttgtgcctatctaggtcaataggagatcaagatgttggtgaatttattgttccagttcctcttgtgaagcaagtaaagctgtctactgcgggaggccgacttattattgcaagtgatggtgtttgggatgcattatctccagaagtagcttttaactgttcacgtgaacttcctccagtgcctgcagctgagcaaatcgttaaaactgctgtgcaatcaaaaggactgagggatgataccacctgtattgttgttgatataatagcagagaaaaccaacccttccatgccacttcctagaaggcaaccgggaattggtgtcttcaaaaatatgtttggcaagaaaaaatcatcggattcatcatcacattcccatgcagatagagaatatatggatccagatatcttggaggaaatatttgaggatgggtgtgcgcttctttctagacggctggattctgaataccctgttcgaaatatgttcaaactcttcatatgtgccgtttgtcaaatagagttaaagccaaaccaagggatatctgtacatgaagattcatcagaacctgggagcttgcgtcgctgggatggtccattcctttgccagagctgtcaggaaaagaaagaagcaatggagggaaagcgtcgttcacgaggttcatcaagaaacagtgggtcaagtgaatagctgccgtgtgtagagtgatcaggtaattactgatcaacaacaccccagcaccaccattttgcagcatttcttctgttgtgacactttcttgatcacatgtaatgtctgggagttctgatctagaactagattgaagtattgaaattgccattgtagaggtggctgctgcttatagctctcatcccaagcgaggagcatgtcttgtcctcagcaaggttcttgctgaggaatgtaggcagctctgctcagcccttgaccttgatggcacatacaggtttaaagattaacatgccaaaatgatatggcttgtctattctaaggtcaactgttgcaacacaaattactcttggtatagacttctgacaaatagcttggcactgtttctgaattaggcctaggtgcttacatcaattttctcttgttgaatccggctttaattcatgactagagactttagagtattatcagtccttgttgaggttcagcctttgctgacaccaatgtaattaacatctaaaaatattctttgaatcagcttgtgattcatcagcaagacgttagttgtcatgtacaatgtacaaaatcttgctaacaggacaggtctgtttcctcctctacgttttgtcattacatggatgaaaattaattggtgtgccaattggaggaaagaatttgttctagtaaatgttgatggtagacgtgactttcactcactgcaggtgtactgatcctttttgtatatcttattttattttttcttagtaatgtatagtagtcctgagtatgaaatttgtttctgcatgggagattccccagccaaaagtatgctgtaatatgttgtccgtagttcagtcgaaaaaatactccatatgcagaatgatgccaagatgtctgttccttgcgtttg

SEQ ID NO: 123044 - DNA, 2481 bp, Zea Mays
gtcccgtactcgtccaaattctcctcgtctcgtctcccatgtgacccatccaaccgccctctcctctcttcctcttcctcgcaccacctccaccaccaccctcctctcttctcgcctccaccaccaaaaggggtgagaggcacggggaccgcccgcctcgctcgctggcctgcacactggattcggcgccgcggcggtagttgcagcggcggcctggcagggagatgtcttcacgctcggggtctacgagcggcgggagcaccggtggcggcagcagcgcagggggaggcgccgcggtgccgctggccttgctgctgaggcgggaggtggccagcgagcgcaccgcatcggagcgaccggagctgcactcgggcctcttcagccaggccaagaaaggcgaggacttcacattcctcaagctcgaatgcgagcgcgtccccggcgtcccgtcctcctccttctccgccttcggcctgtttgatgggcacaatgggaacggggccgcaatttacaccaaagagaatctcttgaacaacatcttgaacgcggtccctgctgatctcaacagggaagactggcttgctgcactcccaagagcgctggttgctgcattcgttaaaacggataaagatttccagactaaagcacgttcttcagggacaaccgtgacatttgtcataatagatggattgttcatcactgttgcatcagttggcgattcccgttgtgtactacaagctgaaggttcaatttaccatttatcctctgatcatcgatttgatgcaagtaaagaggaggttgatcgtgtaacaaaatgtggaggtgatgttggaaggctaaatgttgttggtggcgctgagattggtcctcttaggtgttggcctggaggtttgtgcctatctaggtcaataggagatcaagatgttggtgaatttattgttccagttcctcttgtgaagcaagtaaagctgtctactgcgggaggccgacttattattgcaagtgatggtgtttgggatgcattatctccagaagtagcttttaactgttcacgtgaacttcctccagtgcctgcagctgagcaaatcgttaaaactgctgtgcaatcaaaaggactgagggatgataccacctgtattgttgttgatataatagcagagaaaaccaacccttccatgccacttcctagaaggcaaccgggaattggtgtcttcaaaaatatgtttggcaagaaaaaatcatcggattcatcatcacattcccatgcagatagagaatatatggatccagatatcttggaggaaatatttgaggatgggtgtgcgcttctttctagacggctggattctgaataccctgttcgaaatatgttcaaactcttcatatgtgccgtttgtcaaatagagttaaagccaaaccaagggatatctgtacatgaagattcatcagaacctgggagcttgcgtcgctgggatggtccattcctttgccagagctgtcaggaaaagaaagaagcaatggagggaaagcgtcgttcacgaggttcatcaagaaacagtgggtcaagtgaatagctgccgtgtgtagagtgatcaggtaattactgatcaacaacaccccagcaccaccattttgcagcatttcttctgttgtgacactttcttgatcacatgtaatgtctgggagttctgatctagaactagattgaagtattgaaattgccattgtagaggtggctgctgcttatagctctcatcccaagcgaggagcatgtcttgtcctcagcaaggttcttgctgaggaatgtaggcagctctgctcagcccttgaccttgatggcacatacaggtttaaagattaacatgccaaaatgatatggcttgtctattctaaggtcaactgttgcaacacaaattactcttggtatagacttctgacaaatagcttggcactgtttctgaattaggcctaggtgcttacatcaattttctcttgttgaatccggctttaattcatgactagagactttagagtattatcagtccttgttgaggttcagcctttgctgacaccaatgtaattaacatctaaaaatattctttgaatcagcttgtgattcatcagcaagacgttagttgtcatgtacaatgtacaaaatcttgctaacaggacaggtctgtttcctcctctacgttttgtcattacatggatgaaaattaattggtgtgccaattggaggaaagaatttgttctagtaaatgttgatggtagacgtgactttcactcactgcaggtgtactgatcctttttgtatatcttattttattttttcttagtaatgtatagtagtcctgagtatgaaatttgtttctgcatgggagattccccagccaaaagtatgctgtaatatgttgtccgtagttcagtcgaaaaaatactccatatgcagaatgatgccaagatgtctgttccttgcgtttg

SEQ ID NO: 123045 - DNA, 423 bp, Zea Mays
ttgtcaaacaacacatacataagtgtactctaaatctaaactaaaatacaactgtttgcactaatgttaagcctaactttatatgaattcaagtctccacattttgcggccaccaaatttgaattccattctatgttttcctgtacaacaaataggagaaaactagacatagcaaaaagctccaagcagcacgtggatggtctcgaagctgcccttgtgcttctccctgttcttgatcactcctacatgcccggtgttcctcccgccgctcatcatgaccacgttgtcgacgtcaaacttgatgaagtccatgatcttgttggtctccagatcgatcttgatggtgccatttctgcaaacttttagctatacagaagggagattgtgtttggagtaaagaacgaccaacctcaccacatatgg

SEQ ID NO: 123046 - DNA, 1248 bp, Zea Mays
ccaaaacagctgaaatatattattttattttccacattgtcacgcaaacacaaaggaacaagggcgcacgcgtcacggatcacgttcacgttcacggcgcattgatgaaagccgccatcttgtccagcatctccttggccttgtcgcagtcgggtttgaagaggaagaagacatggccctctcccatggtctccagcagctcgacgccggcggcctgccccaggcggcctcccctcgccgcggccaccgcctcggcgtacgcgcggccgcgccacctgaggaagtcgccctccgcggtacacaccatgacgcgctcacacgccagcgtgtggagtcccggtgcggcgggcgccatggggttcatccgcgggtcttccatgctattagcatcggggcacgcgaagaaccagagtccggcgcccatggtgcgcacggcggggtccctgggctcctcgcccacggcctcggagccccagaaccaggggtggatgagcacggcgcccttgagcggcggcgggcagccctgctgctgcgcctggacgacgtccgggtggatggcgaggtagtggcagacgttgccgccggcgctgtccccggcgacgaagacgcgcgcgagatccccgtgggcggcgacccaggggtcggcggcggaaagcacccacttgagcgcggcgaggcagtcgtcgtaccccgccgggagcgggtgctcgggcgccaggcggtagtcgacggagaccgcgagcgcggggcaggcggcggcgagcctgttgaggaagaggtggtagttgggcgaggcggcggactcggccacgaagccgccgccgtgcacgaacacgacgacgggcagcttggcaccggcgtcggccacggggggcaggtagaggcgggccgagtaggagccgaggtggacgtccttggattggacccccgtggcggcgtcgtggccaggctccacgggcggagccaccaggggccgctcgatgcggccgctcttgtagacccggagcagcgggccgaactcgcgcacgacctcgtcggacgggtcgggggcggggacggggaaggggaataaaggcttggacgacgccatggcggacggcgccggacgcaggcgcgcgcgctcgtgagaaccgcggggatgggcgccgcgccgagtgagtgacggagtgagcgatgcgggctgttggacttgcgcttgccgcttggcgtgctttgtcttgctcgcctgcccagcccaggcggttggtt

SEQ ID NO: 123047 - DNA, 1517 bp, Zea Mays
cctctcagcgcctcagcggcgttcccgtctcctcgttctctcgctcacccggctccgtcggccatgaacacacgagccagcgcgccaagcaccggccaccgtctccggccttacctgacctgacctgaccggctgcatcgatggttccgcaaatacccgacccctgcgacgacgatggccaagatcaccggtgcccgcctgctgcggctctacctcccccgtggccttaccctcctcttcctccccccgcctcccacggccgcagcaccttcgtcacggctctcatcatcgccacctcggtgcttgtcttcctcgctctctgcctctccatacttgtcttcgtccggcgcaggcggctgcggcgtcgtcgagaggcgctccttgaagccgccttggcaccggcggcggccgccaccttccccgacgaaggcgaaggcgacggcggtcccggcggagaggtcgtgcaccacgtgtggcacatccggaccgtcgggctcgacaacgcggcgatcgagtccatcgcgcttacgcggtactgcgccggcggcgtgctcggcgcttccgactgcaccgtctgcctcggcgagttccaggacggcgagctcctccggctgctccccaagtgcgcccacgcgttccacgttgagtgcatagacacctggctccgggcccacgtcagctgcccgctctgccgcgccgacgtgatggacccaggcgccgcggccgccgacgccgacgccgagcaacccccggggaccgacgccgccgacgcctcggccgagcgatccgcaagcaataccccaaccacggaactggagcggctcgatcagcaggccaacgagcaccaccaagagctgcgagtccaaatcgatcagcccgaccactccagctcgctggaactggaacggcgacgtcggcaggttcggcaccacggagcacgggcacagaacttccggcgggtggcttccatggactcgcggtcgccgccgccggtgtcagccgaggtcgatcctgaaggcgagccggccggccgcgaggagcaggggacatgcggtgctgtttgctgcgaggtgtcaccagagcctgctgagctgaagaggtcatggtccgccagcagccggtggacgctcctctagcggcattgccgcgcacgcagctcgctcctgccgctgtgatgggacggaagatctgtatcttgttttttgcctgccactgatcacgcttgtttctgctgatactctgtacagttttcaatttcagcgcggaggttcgctgaacagtcacacctgcattgtggtgttcagcttgcttgttctttgcaagattcagaggaatgcttcggctgctgtataaaaactcaaatatgtccttcctgtaactgaaactccatctgttttatatttctttttttctttatccgagctcagcgtatctctaactggaacttgaaactgtttcgatacgaaagtgatctgtaaatattgatatgatttttaccattcggcatgatgagaaca

SEQ ID NO: 123048 - DNA, 429 bp, Zea Mays
cagggtgcccttggttacgccaattaccagcgagaacccccaaatactgtgtcccatccgtgaacatggaagagccaccgaagacggagaggaacttgtcaagcaaggatacatacccgacttgggcattttggtcttcagttgcggtcgttgcacgagctgctagaggtgtttgtcatcgttgtaacatcagcgtggtccaacatcttccgtatgttcgcaaacattcctccaagccatgaagaggtgctttgttgatcaatctagatgaggaggacgaggtcaactttgtgaaggtacaaatggagaatgtaacacccctggtgttatgtgaactaaaacattggcatgccatcatatgtactggcattatattgctcgtgttacacttagaatgcatccactagactaaaatttcaaaaaaatatg

SEQ ID NO: 123049 - DNA, 2121 bp, Zea Mays
tcgtctcccaccccacccgcaccaaacccctaatcaccacacaaccaaaacccaaacaacacgtgtcctcctacaattgccgacgtcgccgtcgtcttcgccagagcagcgccagcggttgttttgtatctcctcgtcggacccagcgttccagtcgagcatggcttcgattccgcctccgtcttcctccgtcgctgccctcacccgccaaccggcccagttcttgaaatggtgcagtgtatccaaggagacaaaggcatcggtctgcagtttcttggctacaaattcaaacagcactagggtgaaatcagtgggcttgagagtagcattatccttcaaaaatgatggtggttatccagctgacggtttctctgggaatggcaacacgctattgccaaaaagcacatccgttcgtggcgaggaccatccggttgctgatcctgtactcccaatggattcaatgatgacgccagaaatcctctctgctaatttggcacttgttatggacaagttctcagatgatgacacagatactgaacttgatttggatagcccgacagagggcttcgcgtcgattccagatgccattgaggacgtacggcaaggaaaacttgtgattgttgttgatgacgaatcaagggaaaatgaaggagatctgataatggctgcctccttggttaccccagaggcgatggcttttatagtaaggcatggaacaggaattgtttgtgtcagcatgaaagaagatgatctggaaagactgagccttcctttgatggttaccacaaaagaaaacgaggagaagctatgcactgcttttactgttacagtggatgcaaaagagggcacaactactggagtatctgccaaagacagggcaaaaacagttatgactcttgcatctcctgactctaggcctgaggacttcaaccgccctggtcatattttccctttgaaatacagagaagggggtgttctgaaacgagctggacacacagaggcatcggttgaccttgccatgctggctggattacctcctgttgctgtcctttgtgagattgtggatgatgcagatggttccatggctcgcctgccaaagttgcgtgtctttgctgaaagggaaaatttgaagattatatctattgctgacttgattaggtataggaggaaaagagacaggctagttgaacgtgcttctgttgcacgcttgccttcgcaatggggcaatggccatggatattgctacagatctgctattgatggcatcgagcatcttgccatggtgaaaggtgatattggtgacggccaagacattttggtgagggtgcactctgagtgcctcacaggcgacatttttagatccgcaagatgcgattgcggtgaccagcttgcaatggcaattgagatgattgagaaggccggaagaggcgtaatagtttatctccgtggacacgaaggacggggtatcggtctgggccacaagcttcgtgcttataacttgcaggatgatgggcgtgatactgtggaagctaatgaagaacttggtcttcctgtggactcacgagaatatgggattggcgcacagatactacgggacctaggagtccgttcgatgaagctgatgactaatagccctgcgaaatatagtggtctgaaaggttatggactgagcattgcgggcagggtgcccttggttacgccaattaccagcgagaaccgtaagtacctcgagaccaaaagaacaaagatggggcatgtatatggattggctaatgcgcaggttaaccagccaagtggtagccagagcacagaagagaagcattgagcccaaaaaagtgatgcattcttctttttgggagttcctgaaatcttctccctcgatatttccatatattcttttttttctatatttccatatattctttctttcacatagaaggccgttttgttcttcaactgtagctgtaggtttcaagatggttaatgagcttaataaaagcaagtttaataatataagcaactgttcttgtaatgagctttacagtctgtcttagccgatatgtataatggttagcctttacaatgaatatatggtcaactgtttttctcacaaaatttaaa

SEQ ID NO: 123050 - DNA, 1491 bp, Zea Mays
ccactgcctctgctcgcaactatcccgagaacactgccgctgctgtcacctcggatctaccaactccgcctccatagacacctaccaactgttttggagcttgctggtaaggatcattgcgaaaattgctaccaagtaccaactgtttgcatactcaagattagtggaggacgctgtcaagatattacttggtctgcgtgagaaatatgagacttaccataaatgcaaatacactttagaagggatcaatgcagcagtttacttgtcagcaagatacatccctgacaggcatcttcctgataaggctattgatctgatagatgaagctggcagtagagctcggatggaatcatttaaaaggaagaaggaagaacaatgctccattctctccaggtcaccagacgaaaattggcgctggctaacatgttgaagtattctcttgatgagaatgacaaagaggatggtgttaatattgaagtcataggggacaacaagattgcttcgccatcgatgcctccaacttcagtcgatgagtaggttccctcgtgtcacgtcatacagacgaaggctggcagcaccatgactgaaggaccagcagtggtcaattctacacctatagcagacgctagcactgggtcatctcctatcactactagacccagacctcagtcaccataccctaattatccagattccaaatcatcatcctcgccttcgccgtcagcaccttaatttggcaagagtacaagaaaccgggtctagaagatattaaagaagttgagttgttcatatggagccggcatctcaccagaggtgtatgttgtattatgagcgtgacagtgtggctaagtcactgtggcgagtttctgcagcagtaaatatatgaggatgccaaggttagctcaatttctcttacacatcatctctcattgttctagttgagcatgatcttggtagctgtgtgaggttgctgtttttcattagtagatctgtgtaccttatccttgctatactgtccatatatgatgtgtgcatgaaagtcttgcattgaaaatgtcatgtgctacaaatcgttaggactattaatagatgttgccctgtctatctatttatttacatcgctggaaattctcatgccctttcatagtacgcctgtgaaatgctcactgcttttctattggtttatgtgcagttcaagctctacaaggtgaggtctgttcagtttggccagaaaggcatcccctacctgaacacctacgacggccacaccatccgctaccccgaccctctcatcaaggccaacgacaccatcaagatcgatctggagaccaacaagatcatggacttcatcaagttgtatttgccgtttcatggacttcatcaagttatatacttagttaggctcaatgttagcacaaacagttgatgagcaagtttaaatttagagtacacttatgtatgagttatttgacaatgcttatttatgagata

SEQ ID NO: 123051 - DNA, 100 bp, Zea Mays
gaggatttagggctcaatgaagtagctagtctcgccatagatttgatggcagaagaaccaggtccttctagggcaaggactcgtaggtcacagagaattc

SEQ ID NO: 123052 - DNA, 1499 bp, Zea Mays
atgtacctgaaagttttggtactgggcttcactctggtttttggcccatctacagtagcccgcccctccaaaaaccctcccagccaccaggacccctcccagccgccagaaacccgccagaacccttcccagccgccaaaaaccctactcctctcctctgtcctctctggtttctgccaacgtctctgctccagcctccaagtgctccagccagcaggtagcagccagcaggttcctgctgtactttttactgaattactgcaaccaagatactatagtgacttcactcgttcttgcaacggaagcagcaaagacggtagtctgaaaaaacagttcagtaattggaccctcattggatcactgactgcgtctggactgcctgctgctatctatgcccttcagaatagtctgctgcaagtatcattcaagaatctggattccttgaccttttcaatccttaaccagactaagcttttgtggacatcatttttcacatttcttattttggggcaaaagcaatcatccaagcaaattttagcattggccctcttaattagtgccgctgttcttttaagtgttggggagagtactagcaaaggttcaaatggtggtggctctgactatatcttgctatatgggatcattccggttacagtcgcttctatgctgtctggtttggcctcttcattatgtcagtgggcatctcaggttaaaaagcatacctcttacatgatgactatagaaatgtcatttattggaagtgtgtgcttgttagcaagtacctatcggtcaccagatggagaagccataaggaaatatggggttttccatgaatggactttctggaccatggtaccggtattaatgaatgccgtgggtggaattcttgttggtcttgtcacaacttacgcagggttttgttatagtctcagctctccttgtaactgcactgctacaattcgtgtatgatgggaagccaccatcactctactgcctgatggcattaccacttgttgcgacaagcatattcatctaccagaagtatccatatgtggataagaagaagaaagtctgatgcacataattgtcagagatgggaagtatcatcagcaggatgtaatgctaaccttattttgtccacaaggctggaatttgcaccgtcaagtgggccagatgtgactcttgaagagttgcctgttcgtgaatctattttcaattatctactgatctagatatataattaaattagcagtacagtagcctggaatcagtttcagcaggcagttgacatgcttgcatgtaacatctggaaggaggtttcatattaatggtgtttacttgcacagcatgatgaacctactgtgtctgcctttcatggattgttatttatagactgatttgtgaattttgaatatgttatttatgatgacagaaactaagaactaattattttgcgtcaatccttctcattcggaatctgcactatgttagttgtcata

SEQ ID NO: 123053 - DNA, 1453 bp, Zea Mays
aacgaaaggaaaatttccgaaacagaggcggcccgccgggcgagcgcgccggagcccgcatgggtgcctcgtccactccggcggccgcggccgcggccgcgccgagccggcgcaaggtgacgctctatctggtgctcctcaccttgcagtacggcgcccagcccctcatctccaagcgctttgtccgccaagatactatagtgacttcactcgttcttgcaacggaagcagcaaaggttatttgtgcaatcattttattgattgcagacggtagtctgaaaaaacagttcagtaattggaccctcattggatcactgactgcgtctggactgcctgctgctatctatgcccttcagaatagtctgctgcaagtatcattcaagaatctggattccttgaccttttcaatccttaaccagactaagcttttgtggacatcatttttcacatttcttattttggggcaaaagcaatcatccaagcaaattttagcattggccctcttaattagtgccgctgttcttttaagtgttggggagagtactagcaaaggttcaaatggtggtggctctgactatatcttgctatatgggatcattccggttacagtcgcttctatgctgtctggtttggcctcttcattatgtcagtgggcatctcaggttaaaaagcatacctcttacatgatgactatagaaatgtcatttattggaagtgtgtgcttgttagcaagtacctatcggtcaccagatggagaagccataaggaaatatggggttttccatgaatggactttctggaccatggtaccggtattaatgaatgccgtgggtggaattcttgttggtcttgtcacaacttacgcagggttttgttatagtctcagctctccttgtaactgcactgctacaattcgtgtatgatgggaagccaccatcactctactgcctgatggcattaccacttgttgcgacaagcatattcatctaccagaagtatccatatgtggataagaagaagaaagtctgatgcacataattgtcagagatgggaagtatcatcagcaggatgtaatgctaaccttattttgtccacaaggctggaatttgcaccgtcaagtgggccagatgtgactcttgaagagttgcctgttcgtgaatctattttcaattatctactgatctagatatataattaaattagcagtacagtagcctggaatcagtttcagcaggcagttgacatgcttgcatgtaacatctggaaggaggtttcatattaatggtgtttacttgcacagcatgatgaacctactgtgtctgcctttcatggattgttatttatagactgatttgtgaattttgaatatgttatttatgatgacagaaactaagaactaattattttgcgtcaatccttctcattcggaatctgcactatgttagttgtcata

SEQ ID NO: 123054 - DNA, 1119 bp, Zea Mays
atggcagaactttcagcatcgctcaagcatggggaatccaggcatctagcagtgaaaaggctccagccaaaaacgctggggtcaaagttcgttctactaaggaacatagaaaccacactatgctcaaaagctgatcgcacacaagctgctagtgttttgaggccgaagactgcctccaggctccagccatataaagtgataaagagtggggaggagcagatagacctgaggcggctcgacggcgttgggcttggtgagtccgagagcgggttcggcggccgcggccgcaacggcggcggtgtgccccatccgggtgcggtgaccgagcgagtggtgatctggcttaaagatatacagatgatgcttaaagaagggaaggggatgaaacctggagggccctcccgctgtccaacgacagtcgagatggtgatgtcgacagaggaaagtgcagtgggcgggctggcggcggcggtgcgtcccagcaccaaatctaaagtattaaaaccccatggggtttcagcgcctctccgcactccacggacactccagcactcgcgcgtggacgcgtggcggcgtgtcggactcgagctgcgtccgacggacgcgaagtctctggacaggccaccgcacaggtccaaatctctctcctctcagacttctctctcccacgtcgtccctcccggcctcccgagcggcactgtcgtgagtctcgtgagacctgccgcgctccgcgccctctccgacatcgctggccgctacatcgcgtccctgggccacaccgccgcagctttcgccgaggcccgcggccgcacggagcccaacgtcaccgacgccgtcctcgcgctcgaggatcacgcgctcggcggcttccccggcgcggccgaccccacgcggccgttgctctgttccggcgcgctcgcggagctcgcccagttcgtcgctgcggtgagggaggtcccgttcccgaagcccctgccgaggagggatccgggttgcggctccgtcgacgggtgggagagcttcgcggcggcggggaggcagccaccgctgaaccacgttccacattggcttccctgcttcccggagggttgggaggaacggttgcgcgttcgctgctag

SEQ ID NO: 123055 - DNA, 258 bp, Zea Mays
atggcgtccatgatgggaggagacttggtggaggcgtacgtgctcaagaacgcgtgcaaggagaagctccggcgcatggaggcggcggcggcggcggccgacgataagacgagcaagcagggccgcctcgcggagaagaaggtctcaggcagaggacgacgcctgcttgggctcctgaagaagaaggtgcacccaaaagcggccgcgtcgtcgtcgccacccgaaagcggcgctgaagaagcagcctcgtcttcttga

SEQ ID NO: 123056 - DNA, 1555 bp, Zea Mays
atcgtcaaaccgcccgcggtccaaaatccaaaccctgcgagtgtatagaagaagaaccccccaccccatcgcaacccgcaatggtcgcggcggaagatccggaacacttcttcgccgcctcgccgccgctgcgcgacgctgccgttgtcgccgccagcctgcaggagttcgtcgcgcgcaattcgcacgcatcatcagacggcgtcgggcggcggcgcatcgtctgcgtcacgtcgggcgggaccacggtgccgctggagcagcgatgcgtgcgctacatcgacaacttcagctccggccaccgcggcgccgcgtccaccgagtatttcttaaaggctggctatgcggtcattttcgtccatcggcgagggagttgccagcctttctccaggttcctgcctgatgactcgtttctccacttctttgatgtcacaacagattcgaaggttcaagtggccgagtcccaggcaacggtggtaaagagagcaattggggattatcgcaaggctactgaaggaggctctctgctgaaactcccattcaccacgatatttgagtatcttcagttactgaagatggttgctacatccatgagctgtgtgggtctccacgggatgttctatctcgctgcagctgtgtctgacttctatgttccatgggatagcatggcaaaacataagatccagtcagccggaggcccactggatatgaagctcagccaggttccaaaaatgctccccgttctgcgcaaccattgggcccccttggccttctgcgtatccttcaagctggagacggatccagacattctagttcagaaagcagagacggctctgagcaagtacaggatggacgttgttgtggccaatctacttgcaacgtacaaggaggaggtcgtcatcatctcgaatggcaaaagcaacaccattcgaaggtgcagcaaaggcgaggatctggaggagcatatcatcaagctcctagagaagagccactccaagtttatttacagcagcacggaagggtgcagtaagaacgactacgaaaagcttataccgttaggcatcaaaagtctggcttaagggaaacattgatcggttctggagctcaaattaatagggaagccccatcagcactcttgtagtgtttggatggatggacgaggaaggatgaagagggatgggataggatcattctaagttgacccatgtttggtttggaggtctagagtcacggtcaaggaatatttttcaaaaatagtggatggggccatcccttaaaaaataagggacggagtcaactcagagttgatcccatcccatctctcgttgacaccgaaccaaacacatcataaagctctacatgcagtgtgtacatttgctggtaatgtatatgtaagcaggactaataggattgttctgttctcacacgcacacaaacacgccaccaaaaaagatggtccaaagttgtatgtatcgtttgctattcacctgttaattaatggctttgtaatcagaaatgattattgttcaaattgtttcttaacttctccgatggc

SEQ ID NO: 123057 - DNA, 138 bp, Zea Mays
gatctggaggagcatatcatcaagctcctagagaagagccactccaagtttatttacagcagcactcttgtagtgtttggatggatggacgaggaaggatgaagagggatgggataggatcattctaagttgacccat

SEQ ID NO: 123058 - DNA, 1285 bp, Zea Mays
ccatcgtcaaaccgcccgcggtccaaaatccaaaccctgcgagtgtatagaagaagaaccccccaccccatcgcaacccgcaatggtcgcggcggaagatccggaacacttcttcgccgcctcgccgccgctgcgcgacgctgccgttgtcgccgccagcctgcaggagttcgtcgcgcgcaattcgcacgcatcatcagacggcgtcgggcggcggcgcatcgtctgcgtcacgtcgggcgggaccacggtgccgctggagcagcgatgcgtgcgctacatcgacaacttcagctccggccaccgcggcgccgcgtccaccgagtatttcttaaaggctggctatgcggtcattttcgtccatcggcggtaatccacaaagctacatcagctgcttcgttgcaaaaacaatcccacaacttttacttctcgtctttcagctttatcaactgttcagtatccacataatgcaaaaaaaaagaagaaagattcttcacataaatcccattatgcttgcatgaacgcagagggagttgccagcctttctccaggttcctgcctgatgactcgtttctccacttctttgatgtcacaacagattcgaaggttcaagtggccgagtcccaggcaacggtggtaaagagagcaattggggattatcgcaaggctactgaaggaggctctctgctgaaactcccattcaccacgatatttgagtatcttcagttactgaagatggttgctacatccatgagctgtgtgggtctccacgggatgttctatctcgctgcagctgtgtctgacttctatgttccatgggatagcatggcaaaacataagatccagtcagccggaggcccactggatatgaagctcagccaggttccaaaaatgctccccgttctgcgcaaccattgggcccccttggccttctgcgtatccttcaagctggagacggatccagacattctagttcagaaagcagagacggctctgagcaagtacaggatggacgttgttgtggccaatctacttgcaacgtacaaggaggaggtcgtcatcatctcgaatggcaaaagcaacaccattcgaaggtgcagcaaaggcgaggatctggaggagcatatcatcaagctcctagagaagagccactccaagtttatttacagcagcacggaagggtgcagtaagaacgactacgaaaagcttataccgttaggcatcaaaagtctggcttaagggaaacattgatcggttctggagctcaaattaatagggaagcccc

SEQ ID NO: 123059 - DNA, 225 bp, Zea Mays
gacactgtcggatacactcttccttatgaattcgggaagttaatttctgacataaaggaaaacactcctggaattgaaaatgccatcatttccactcattgccagaatgaccttagccttgcaactaccaacacattagtgggtgctcatgcaggagcacgacagttagaggtgactattaatggtattggtgaaagagctggaaatgcttcattggaagaggtg

SEQ ID NO: 123060 - DNA, 2724 bp, Zea Mays
acatacacacgcgcacagccgcactcggttccagctacagagaattcgtccaggaaagtaaaaaaactcccccattcgcgagggacaggagggaggagtcaccgcgtgagctcaggaggaagagggagaaggagaggccgccggcggcggcgcggcagaccgggaaccgccgtgtagcactggggtggtggacccgcgcgcccatgcgtcggtgaggtggtggggcccgcttggcgctcgagttggaatggcggcggcagggaggtggtgggcggtggtccttgcggtcgcggtgctgctctggccgggccgggtcgtcgccaacaccgagggcgatgctctatacagcctgcggcagagcttgatagatacgaacaatgtcttgcagagttgggattccactcttgttaatccatgtacatggtttcacgttacgtgtaacagcgataacagtgttatcagagttgaccttggaaatgcacaattatctggcgtcctagtgccacagcttggtcagctgaaaaatctccaatatttggagctttacagcaacaaaataagtggggcaataccccctgaactggggaacctgactaaccttgtcagtttggatctgtatatgaacaacttctctggcaatatccctgaccgcctagggaatctattgaagctgcgtttcctacgtcttaacaacaacagcttggttggtcccattcctgtagccttgaccaatatctccactctccaagtactggatctctcgagtaacaacctctcaggaccagtctcatccaatggctccttttcactcttcacccctataagttttaacaataatccaaatctttgtggccctgttactacgaagccctgccctggggatcctcccttttccccaccgcctccattcaatcctccgtctcctccaacccaatcaactggtgcttctggccctggagcaatcgctggaggtgttgctgctggtgctgcattggtttttgctgttccagcaattgcatttgcaatgtggcgccgtcgtaaacctgaagagcatttcttcgatgttcctgccgaggaggatccagaagttcatcttggtcagctcaaaaagttttcgttgcgggagcttcaagttgctactgatacttttagtaacaagcacattttaggaagaggtggttttggaaaagtgtacaagggaaggcttgctgatggctcattggtagcagtgaaaagactaaaagaggagcgcacacctggtggtgagcttcagtttcaaacagaggttgagatgattagcatggcagtgcacaggaaccttctccgacttcgtggtttctgcatgacacctactgaacggttgctggtctacccatacatggctaatggcagtgtggcatcacgtttacgagagcgccaggcatctgaaccacctcttaaatgggaaacaagaagacggattgcactgggatctgcaagaggtctttcttacttgcatgatcactgcgatcctaagatcatccatcgggatgtcaaagctgcaaatattcttttggatgaggagtttgaggcagtcgtaggtgatttcgggcttgccaagcttatggactacaaggatacccatgtcacaactgctgttcgtggaacaattggacacattgctcccgagtacctatccactggcaagtcctctgaaaagaccgatgtttttggatatgggatcatgcttctggagcttattactggacagagggcatttgatctagctcgtcttgcaaatgatgatgatgttatgcttcttgactgggtgaaaggactgctgaaggagaagaaggtggagatgttggtggacccagacctacagaatgcctacgaggagatcgaggtggagaaccttatccaggtggcactcctctgcacgcagggctccccgttggagcgtccaaagatgtcggaggtggtgaggatgctggaaggtgacggcctggcagagcgttgggacgaatggcagaaagtagaggtggtgaggcaggaggctgagtcggcaccgctccgcaatgactggatcgtcgattccacgtacaaccttcgtgctgtggagctgtccggtccaaggtagtagccactccatgactccgatgaaagaattcaacactgaattgcctagattcagtctaattgctgcttgtgtatatgaaaggtagcttttggaattgttagcggcagtcaatatgaagggatggtttttttttttataattcctcgctagcctcagaagtcggggggtaggctgcagttgtgttaaggtgaaaattcgtatacccgagggtgaatttttaaagcattgttgtagtggttcggggaatgtagcagcgatcgtccaattgtactacgtgctatgaagaacagtgctaccttttggccatagttttgcgttttgaaaaatctatttaggttttctttgtgtaaaaatacaattgtcattgaattgacgatacacaactaattatgagactaaagaatttgtggaagttttactttagcttagggttccatctatcctggcggtgccatcggagtccaccaaaaagccatggagggaacaaatcgtttctggattaatttctgaatataaatcatcactagaagcacagtagctagcatgcaaacatctatcataaaaaaattagtatgcctagtacgattgtctcattaaataaaaat

SEQ ID NO: 123061 - DNA, 2829 bp, Zea Mays
acatacacacgcgcacagccgcactcggttccagctacagagaattcgtccaggaaagtaaaaaaactcccccattcgcgagggacaggagggaggagtcaccgcgtgagctcaggaggaagagggagaaggagaggccgccggcggcggcgcggcagaccgggaaccgccgtgtagcactggggtggtggacccgcgcgcccatgcgtcggtgaggtggtggggcccgcttggcgctcgagttggaatggcggcggcagggaggtggtgggcggtggtccttgcggtcgcggtgctgctctggccgggccgggtcgtcgccaacaccgagggcgatgctctatacagcctgcggcagagcttgatagatacgaacaatgtcttgcagagttgggattccactcttgttaatccatgtacatggtttcacgttacgtgtaacagcgataacagtgttatcagagttgaccttggaaatgcacaattatctggcgtcctagtgccacagcttggtcagctgaaaaatctccaatatttggagctttacagcaacaaaataagtggggcaataccccctgaactggggaacctgactaaccttgtcagtttggatctgtatatgaacaacttctctggcaatatccctgaccgcctagggaatctattgaagctgcgtttcctacgtcttaacaacaacagcttggttggtcccattcctgtagccttgaccaatatctccactctccaagtactggatctctcgagtaacaacctctcaggaccagtctcatccaatggctccttttcactcttcacccctataagttttaacaataatccaaatctttgtggccctgttactacgaagccctgccctggggatcctcccttttccccaccgcctccattcaatcctccgtctcctccaacccaatcaactggtgcttctggccctggagcaatcgctggaggtgttgctgctggtgctgcattggtttttgctgttccagcaattgcatttgcaatgtggcgccgtcgtaaacctgaagagcatttcttcgatgttcctgccgaggaggatccagaagttcatcttggtcagctcaaaaagttttcgttgcgggagcttcaagttgctactgatacttttagtaacaagcacattttaggaagaggtggttttggaaaagtgtacaagggaaggcttgctgatggctcattggtagcagtgaaaagactaaaagaggagcgcacacctggtggtgagcttcagtttcaaacagaggttgagatgattagcatggcagtgcacaggaaccttctccgacttcgtggtttctgcatgacacctactgaacggttgctggtctacccatacatggctaatggcagtgtggcatcacgtttacgaggttctttattctttattataatttataaaaaacctgattccatagtcccaactaaacaagcagaacgttagcttcctgttctcattaaactttctgattccatagagcgccaggcatctgaaccacctcttaaatgggaaacaagaagacggattgcactgggatctgcaagaggtctttcttacttgcatgatcactgcgatcctaagatcatccatcgggatgtcaaagctgcaaatattcttttggatgaggagtttgaggcagtcgtaggtgatttcgggcttgccaagcttatggactacaaggatacccatgtcacaactgctgttcgtggaacaattggacacattgctcccgagtacctatccactggcaagtcctctgaaaagaccgatgtttttggatatgggatcatgcttctggagcttattactggacagagggcatttgatctagctcgtcttgcaaatgatgatgatgttatgcttcttgactgggtgaaaggactgctgaaggagaagaaggtggagatgttggtggacccagacctacagaatgcctacgaggagatcgaggtggagaaccttatccaggtggcactcctctgcacgcagggctccccgttggagcgtccaaagatgtcggaggtggtgaggatgctggaaggtgacggcctggcagagcgttgggacgaatggcagaaagtagaggtggtgaggcaggaggctgagtcggcaccgctccgcaatgactggatcgtcgattccacgtacaaccttcgtgctgtggagctgtccggtccaaggtagtagccactccatgactccgatgaaagaattcaacactgaattgcctagattcagtctaattgctgcttgtgtatatgaaaggtagcttttggaattgttagcggcagtcaatatgaagggatggtttttttttttataattcctcgctagcctcagaagtcggggggtaggctgcagttgtgttaaggtgaaaattcgtatacccgagggtgaatttttaaagcattgttgtagtggttcggggaatgtagcagcgatcgtccaattgtactacgtgctatgaagaacagtgctaccttttggccatagttttgcgttttgaaaaatctatttaggttttctttgtgtaaaaatacaattgtcattgaattgacgatacacaactaattatgagactaaagaatttgtggaagttttactttagcttagggttccatctatcctggcggtgccatcggagtccaccaaaaagccatggagggaacaaatcgtttctggattaatttctgaatataaatcatcactagaagcacagtagctagcatgcaaacatctatcataaaaaaattagtatgcctagtacgattgtctcattaaataaaaat

SEQ ID NO: 123062 - DNA, 195 bp, Zea Mays
cctcaagttttcaagacaaaagacagtaattcttccatacagaaattttccaacagcgcgaccaagtccatgaacgccactggtcttatcaatgatgtcatccttgtcgtatttatcaagacccttaacaccatcataagtcttgcaaacaagagcaagcatattatccattccaatgtactctgtgagaagcct

SEQ ID NO: 123063 - DNA, 288 bp, Zea Mays
atgggcgatgcagtgatccgtcttcccttcggcgctcttggtgcagccgagctgcaggcaccggcgtcccccgccgtgggccttgcagtaggccgtgcggctctcggcgcccttgtagcacccgggcttctggcacctctgcccgccaccgtgagcgatgcacaggcccgacgcgcctcgcgcgcccttggagcaccctttgaacctgcacttcttgggatgccggcgttgagtctgctgtccaggattgcttgccaccgtcacaacatcagagctcgcgccaccaaa

SEQ ID NO: 123064 - DNA, 618 bp, Zea Mays
gaatcctacatatatttccaatctaatgaggaggggatgtggcaaactatgttgaaacgcaaatacttaaagggcctgcccattggggcggtggggagaaaaccgggcgattcccaattttggtcgggtttaatgaaagccaaacataagttcctggacttcattaggttcaaggttaataatggaaccaataccagattttgggaggaccggtgggtgggcaattttaagcttaaagatcgtttcccttctctatataatctgactaggaaaaaagggagctcggtggctgatgttttcaggtcagtaccgctgaatgtttcttttaggcgagggttgacgggggcaaaccttgaggcttggtttagattggtgtcgttggtgctggttgttcaggttaatagtgcgaaagatgtgggtgagtgggatttacaccaaaataagaagttctcggttaattccatgtatctggcgcttatgtcaaatggtattattagacataataatcctctctggaaattgaagataccacttaaaattaaggtttttctatggtatcttggtaggggggttattctgactaaagataacttggcgcgtagaaactggaaagggaat

SEQ ID NO: 123065 - DNA, 351 bp, Zea Mays
ctattttccattcccaaatcaattcaaatgcagttttaaattacaaatttatttagaatgcacagttcaagaactccagcatgaatataatttgtttaattaattaatttattatattatttaatcaaatgctttcaaatataaaattcatacacactaacatagagaatgggtattttaagaaatatattccctaatataaaactctttagagaacaattataaatattcatttcaaccaaggggtaacaaattcatatagagattcttttatttaaatctttattaggaacgtgtttattttaggtgatgttgcatcaaatgtaagaaaattttattggaaggcattct

SEQ ID NO: 123066 - DNA, 1319 bp, Zea Mays
cgatccttagggttagggttttagaaaaaccccagcgagtggacagtcccgcgtatccgacggctcgacacatccgaagccgacacaacacttcacgagcgcgaatctcagcactgccctctataatagagctcgcgcgggcatcgcggccatcttcccagctccgcctccttttcctgccttcctcctcactagtcgctcccccgcggctcgcgcaggcgggcgacacaacgaggctaaatccctatcgcgaggaggcgtgtgaggccagcggctttgcgatgacagcaccagcggacaaggggaagaaggccaagactgatgccgacggcggcgaggagaacgaacagatcgacggcgtcctcgtcctctccatcgagaagctccaggagatacaggacgagctcgagaaggtaaatgaggaagcaagtgacaaggttatggaggtggagcagaaatacagtgagatccgcagacctgtctatctcaagaggggtgacattatcaagaccatcccggacttttggctcacagcgtttatgagccatcctctattaagtgagcttctgactgaagaggaccagaagatattcaagtacttagactccattgatgtggatgattctgatgttaaggcaggatactccattcatcttaacttctctgagaacccgtactttgaggacacaaagcttgcaaagacctatatctttgctgatgatggaacaaccacaataaaagcttccgaaattaagtggaaggaaggaatgggacctgcaaatggaaatggtattaacaagaaggggagtaagcggccattagtagaggaaagtttttttagctggtttggtgatacagagctcaagagtcttgctgatggtgtgcaagatgaggtggcggagatcataaaggaagatttgtggcctaatcctttgaagtacttcaacaatgaggttgacgatgaatttgaaggagatgaagatgatgatgatttggatggtgatgatgacgatgaaggcgatgatttggagaactgagcccttgcgcttggttcagaatgttgtccgtggatgatgtggctgggcggaactgtgacccttttgggagattttttgttgttgttgtttgacttagctggaactcaacgtagggaactgtttaatgccttatgaagtcaaccaacttgaaaggagactgcttatatcataatctcggtatatctagcaacgcaatttgacctcagtgtcctgtttgtgattcagtttttgcttcggtcggttgcctaaagatgacgtattgccttcagtttgtgctcaaca

SEQ ID NO: 123067 - DNA, 420 bp, Zea Mays
atggggagaggagcaggacgactcacttgtgcctacacacgactcgagctcttctggtcgcagatcgagggggttgtggcgggtgcagagccgcatggttgtcgttccctcgcatcacgccaggggatgtggcggatgcggatctggagccgctcggtcatggctcccgagcataatgccgaggccgaggaggccgggggggggggttgcagcgccaatgatggggtctggggaggcgctgaggacgcgaggatgggcggcaacagcgttcgtggtaggggcgagcgtggtggggatggcgaaattggcgggctacacgcgccaccgcgtccgcctcctcctggcagggggcgcgtggtagcaggggcagattcaggcctgtggccactagggcccaggccctactcttgggccgactaa

SEQ ID NO: 123068 - DNA, 744 bp, Zea Mays
ctcggtcctgccactcccatggccgcgccccccccctgcttctctctctcagcgctcgcggctctttctctcctgctccgtccatggctgtttgcctctgctcgcggcgtccctgctcgcccagccgagctctccactgcccagctccatctcacggcgctctatctgctcggttccatggccgcggtactccagctcgtcgtgccctgctccctctgtttccatggcaggctctctgctcgtcgcgcgcgcttggacgctctccctggtggccgcctgttctccctgtgtaccgcgcgagttctttggtagacgcccgctgaccgtgctccacttcgcccatcgcgacgctccagttccaactcgctgcgcgccgagctcttcgctgttgtccgtgcgcgcgcgccgctcgtcgacctctctgctcacgcatagctcgctcttttcttatttgccgcgcgcacgaatttcatctgctcccacagcatgtcgagttcccgcaccatcatcgcttctgtcacaagctcgttgaccacagttatcttgaccgtgtcagctcgcgactgtggtcatgttcatcgaattcgccaacactttgttgccgattcgactgtcgtcgtttcgcgtattgtcgagcccatcgttttccctgtcttgtactcgcatggttttctgctcgccggtgcgccctcttggctcgctcggctttaattcccaatcgcgtcgtctattccaccggttagc

SEQ ID NO: 123069 - DNA, 742 bp, Zea Mays
ctcggtcctgccactcccatggccgcgccccccctgcttctctctctcagcgctcgcggctctttctctcctgctccgtccatggctgtttgcctctgctcgcggcgtccctgctcgcccagccgagctctccactgcccagctccatctcacggcgctctatctgctcggttccatggccgcggtactccagctcgccgtgccctgctccctctgtttccatggcaggctctctgctcgtcgcgcgcgcctggacgctctccctggtggccgcctgttctccctgtgtaccgcgcgagttctttggtagacgcccgctgaccgtgctccacttcgcccatcgcgacgctccagttccaactcgctgcgcgccgagctcttcgctgttgtccgtgcgcgcgcgccgctcgtcgacctctctgctcacgcatagctcgctcttttcttatttgccgcgcgcacgaatttcatctgctcccacagcatgtcgagttcccgcaccatcatcgcttctgtcacaagctcgttgaccacagttatcttgaccgtgtcagctcgcgactgtggtcatgttcatcgaattcgccaacactttgttgccgattcgactgtcgtcgtttcgcgtattgtcgagcccatcgttttccctgtcttgtactcgcatggttttctgctcgccggtgcgccctcttggctcgctcggctttaattcccaatcgcgtcgtctattccaccggttagc

SEQ ID NO: 123070 - DNA, 1380 bp, Zea Mays
ccaccaaaagccccaagccaaatccgccatggctatgctcgcccgcgcgcgcctcccacctcgcacccaccttccccccatcaccaccgatggcggtggcgccggcgtggaatttcgccgtaagatccacttcctctcttctgagctgcacgtcgacccgttcccgctcctcgccatcaaccccatgctccgctcggcgccgctgccgctcctccgcgattccctccgcctcctcacctcccacggcctcacaaccctcgacgctgcgcgcgtcttctccgccttcccctccctcctcacctccccgcccgaggagcccctccgcttcctctccgccgatgcgccgctcccgccaccgctcctccgctccgcggtggtccggtccccacgcctcctggccgcatccgttcccgacacgctccgccccgcgctgctcttcttccgccgccgcgtatcgctccgtcgggagccgctccctctcgccgccgcgctgctccttgctttcaacgttgagcgcaccctcctccccaaactcctattcctccgtgacgccacggggctccccgactctgccgtctgtgcggttctcaggcgtgcgcccgccatcctctcctacgggatcgagaccaacctcaggcctaagctagagttcctcgcggagcgcatgcagagggaccctgccgcggagctagccgagttcccgcactactttgcattcagtttggaggggaggatcaagccgaggcacgaggcgttgagggaaaggggcattgagatgccacttaaggatatgctaacaagcaacgatgacgatttcagggagcggctggtcaacgtgacgctgtcagacactaaggcaaggctgtgagctggcattcagatgcaccctaagcctttttactgcattgcttatgaaatagcagtcctttgagtttgggttctgtgaagcaagattatccaacaatgtcaccaaatggaaccggcgacaatttggaatgtatttatggttcacatgtcaattcgaagctcagcctttgtaatgttgagatacatggagttcacctggagaagcctgattgaatctctgaatggatattcacttgacatataaacagcgaaggtaggttaaagttgatgtacagctaatggtcccattgaactctaagttatgtttcctacaacgtggagtaagaatgggcctgaggcttagttgttcgagaacgaaggacaattatgagcagctgtggatctccctaaacataggtgcttagtaatcagccaaaggagtttagtagtagcattctgcttcttattttctttcttttaatttttttttatggacatgaatttaagaatgaatacacaaatttgtttttcctc

SEQ ID NO: 123071 - DNA, 900 bp, Zea Mays
accttagaaaaaacgatctcctaaccggctactgtcctagacactccactcagcttcgccatggccacggtcgcgaggcacctcgtcctgtgctcctccgccacctcctcctcctccaccccgtcacaacgccggcgggggcccctgccgcccgacgccacagcgggcacggacaggcagcagcccaccacgcgcaggctggcggtggctgcgtccacggcgctggcggccacggccacggctgcgctgtccgcgcgccggcccgcgccgcccccgcccgcgatggctgcggaggcggccgcggtgcccgcgccggcgacgccgcccgggcccgtgccgcggtggggcacccggtcgtacgtgcgcgagcggtacttcgagccggagctgaccgcggaggaggcggccgcgcgcatccggcagaccgcggaggggatgcgcacgctgcggcccatgctggagaccatgtcgtggaagtacgtgctcttctacgtgcgcctcaagtccaagtacctcggcctcgacctcaccaccgccatggccggcgtccccgttgcccggcgcgctgactacgtacgcgtcgctaacgagctcgtcgacaacatgacggagttggatcgcttcgtgcggactcccaaggtctacgagtcctacctcttctacgagaagacgttgaagtcgctggatgacgtggcagagttcctcgtttgatgcagacccatgcacgaatgcagccgtagaagtggtgccagtcaaactgatttaaagtttgacaaaatttacaataatgatatcgatattctctatctctaacaaatttactatatacactgtaattagtttgatggtacttcttttatgtcataaatattaatatttttatgaattctttgaataata

SEQ ID NO: 123072 - DNA, 1269 bp, Zea Mays
atgcaggggttactgtgcactccccctcgcctgcttctcgcggaagaagccgcccacgccccacaccggaaacttctcgctcaacgtctctccctctcgacgcgtctctggaagggcgatttccggcgacgcggcggcgaatctaccggcggaaggtcgcgtccgcgccggtcccggtcgactgtgaaagaagacgaagtggaggtcgtcagcaggcagttccgttcgcgagcgaagacgaagaggcctcaaatccgcttccgccgaggttactccttttacctgagaaaacttgaatttctacagcaagatgccttagaggcaaaagtgcaagcatttccagaaattgctaagtacgacggggatgacataagtgttgaacctgcatctccgtcgacccctccaacagttactgaaccatctgttgatgaagaggagttctactgccccgatcatggaaaagcaaacaatgccacatcttcgcagccgatgtcaaacacctcaagtggccagcaatttccccctccaccccctttatggcctacgggcttcatgcaccagactcctatggattgcaacatgatgggaaaccttaattttcctagtcctggtcaaggtccaacaacaatgtgggctcccattcagacaggaaatactagttcccaatctaccatgattccggcctcgcaatctgcagtctattggaatcattacatgaactttgtgaggaatcctcttggtttagttggagtgaatccttttccagaatcctatcctccatcacatactagtacaccattgcagggttccaatactataccttcattacctgtaaacttggagtcagatgctgaacatagtgttcaggacatcaatagtccagaaaaaaatgcacctccagttcagaaacaaaagaaatcgaaggaacaaaactttactggtccagaagacatactcctttgcactacatggttgcaaattagtagtgaccctattgtgcacactggacaaaggagggaggggctttgggctcgaattgaaaaaaggctctgggctggtggcgtcgccggcaagcgcaagaaggctgtcatgagcggcaagcccaagcgtccgccctctgccttcttcatcttcatgtctgaattcaggcaggagtatcaggttcaataccctggcaacaagagcgttgtggctatgtcttctttgttcgtgttggtggatcaggtgagcaaggcagcagggggaaagtggcatgctatgtcagattaa

SEQ ID NO: 123073 - DNA, 634 bp, Zea Mays
acaagaagcatcgtccatatttccccctcctcctctcccccccccccttgggagaccagcttttgagctaattcttcttcgacagctcccgccagatctcctcctgccgtcgtcctcaattagctttaatttctcctgtcctgtcctggatcgagtcgttggagttagagggccacaatcatatctccataggtttcgtgccagcgaacgtgcgagagcagcagcaggttgactgaagagagatcgaggccggggacgcggagatggggaggggaaagattgtgatccgcaggatcgataactccacgagccggcaggtgaccttctccaagcgccggaacgggatcttcaagaaagccaaggagctggccatcctctgcgatgcggaggtcggcctcatcatcttctccagcaccggccgcctctacgagtactctagcaccagcatgaaatcagttatagatcggtacggcaaggccaaggaagagcagcaagtcgtcacaaatcccaactcggagcttaaggtttgctctagataaataaatccctctgtatattctcatgtgtttgcttgtttaattaaaagattgctatatgtttttgcattcatcttgaatatattctttaatttata

SEQ ID NO: 123074 - DNA, 4312 bp, Zea Mays
  misc_feature (1)..(2): n is a, c, g, or t
nnaaatgctgctacaactattgcacattcataggtacaaaaacaattagcaagagccaaattatcatgtgaaaggctagacagtagacaccaaaatatttcatacgagataagttgagcaagtggaagttattctatggccaacaataaaacaaaaacagggctatcacagctaaactacttcccctgcttcattttagaggtgcattaggattcaaataaggctttaagtgtactttgaccataaatttctcttaggccccgtttgtttcgttggaattgaattccattttaataattataatttagacaaaactaattaagtttatatatttatatatgtaatatatttgtatattatcctaaatcatatgagagagatagttatatactacatttatgttatagcgaaacaagtataagagtatgctataagttgtacatcggaaaaataacatgtaaatctatagaatcaatttctatctcccactccatgaatttgagatagacttatatgataactttggaaagtggtagaatgtcacattctaaaaaaaatagactgttctattagtaagattctaattcctcaaaatgaaaggaaacaaacgggacattacaataaacgaaacccagaaaaatcaatgttgttttcaaagctttgtgagatatgaatatgatagatttttcatacactaagcctgcgtataattttattaactgtcagtcaaattttgtaaaacagccttttcccataaaaaaaagagtatatcaaaacatattctgatgatgctctagatatatatacacaaaacactgatgccaaaccacatatatcaaaaattgacaaacatcatggctagtctctgtagaattgtataaaacactacattaattggtactgcatattaattggttattacaggcagttgatgggagaggatctttctgggctgaatgttaaagaactgcagtccctagagaatcagttggagacaagcctgcgtggtgtccgcacaaagaaggaccatctcttgatagatgagatccacgaattgaatcgaaaggcaagtttatttcaccaagaaaacacagacttgtacaataagatcaacctgattcaccaagaaaatgctgaattacataaaaagatctatgagactgaaggaccaagtggagttaatcgggagccaccaactccattcaactttgcagtagtagaaaccagagatgttcctgtgcaacttggactcagcacactgccccaacagaacaacattgagccatcaactgctcctaagctaggattgcaattaagcccatgaataagagtaaaactggcgtcttatgatcccgaaggaaactatttattgtaaagagatgatactcagagtaagacatatttgtggcagggagatttgaaatatgaacttgtaaatgtaatgcaaataatttccagactggaattgggccgtggaattcagaggatgattgcattctagttgcatttgatgtttgatgatacttatcatattaaaagtttaaaactttaaaagggtgcaaagattgctactacacttgctaggcttgtataaacatctgaccatatgtactagtattaggaaaacagaaaagaaggcagacagctgtcgaacatctccatgtgtttctaaaaggaaatgtttcaataggggacaatgatgctacctcagagtacaaacagagtctagtctccactcaattgagttttatattcctctcaagtgttatcaagggttttagtaggacacagggtattggtcatttgtcgagcctgtgcttatttgaggtactgggcagctttatacaattacaaatcagggctaaaggaaactaccgtgaaagggatgggcgtcattccacaggcaaccatcaggatcatgacatcgcaggtgcaggtacaggtgcatgacattgaatctgatctccttaagtgctagaaagcaagctacagtgtccaggttgagcgtgaagcaggatacaaagctctagccattgccaagatcatgtggatacagaaattgttgactgcattgggcatagaacatccacagatggctcgtctatggagtgataacctgggggctaggtatttgttgtcaaatcctatcttccatgctcgggctgggcagatcgagccctcagggtggagctgtagagagtggtagcagcgccaaagcgaggagacaccaccttagtgagctcctcgaggatgaggtaatcgcggaccttatggaaacacggaaacgggactgagctagtgataagtccaaaggtaatcatagcactcgttgaggctgtagaaaaggttgagaacgagcgtgcgatcggagactggctccccgagatcacagacggaggcagtcatgcctttcatctggcggcaatactcagtgacagagaggtccccctggaccaaagtctaaaaggagacgtcgagttggagtgcacgagcctcacggttatcgaggaattgttcctcgacatcaacctaggtctggcagacagtgccgccaccctcacgaatgacatcttgtagctcaagagtgactgtcctgaggatccaagagaggatcacactatccatccatcgagtgtttacaagtcgtccgactaatcgtgattaatcgcgattagtcgggctggtctcctagaagagggcgattaggtggacgacgtgattaggatttcaagtcgtccgactagtcgtcgacctgggcgattagtcgtccggtcgaacgcttcctggtcgtttcttgtcgtcgcaattttggtactgggcttcactctagtttttggtccatctacagtagcccgaaaacatggtgctgctgctgatgcattttgtttggatgctgatctgctctaggtagcagccaacaggtaatgcagtactttttactgaattactgctagtaattatacctatattactttcagtttggactttggatggattcagttttacactttgaattactgctagtcttctactaattatgtctatattattgcagaaatgcagtgcttatatagttatatacatatacatatgtccataaatctataggacgactaacggacgaccagaggtcgactagaaccgattagtcgacctaatcgtcgccctaatcgcgattaggcgtctggtcgctgctctaactcgaccagctggtcgcccgacttgtaaacattgcatccatcaccaggcggggatagtgatggtcgctatgatggtgaggacgtggtcgtctaggacgtatccctacatggtgaggaggacaaggtcgtgccaatgagtataggtggaggaagccacgtcaaggatgatggggaccatagagcggatgttctagatacatgccgccagggcatggtggttgtaatgacggcagcctcgtacgccaaaagggagtcgaccactaggggctccaagagagggtcaaggtagggagagccgagcaaatggcgctcagcctcgacaagctgtctggcaagggtatcagcagtggtgtgctcgtgttcctatgtgagagcagcatcgcgttcgcgctcccgggtagcagcgacaacagccttagcagtcgtgagagccgtaaccaggttggagtgagcagtcatgacgtcgggtgcgaaataggatggggcgattaggctatccgcaactgttacccctaaatttttcccactatatcactttttcccctattttttcatctccttaagcggttccccctaaatactccccctataccccactacaactataaaatatcattttctatatcaactatcaattttttatctactaacaattactcgtggacccacagcacagtgtttgggggatgaacagtgacacgctatatctggggggagagagaagggggccggcgcgtagggggcgctgtaggaggcagcgctgcggctgtagagtgccccctacaggcgccatgcaaggggagggggctgcccagggggcagcgttgcagttagccttagatacaggtcagtggcgccgaggccgaggccatccaggcccatgcctaggctagaggcggccaggccggctgggaccagacaagaggtgactaggctagttgtacctaggacgggggaggcctggccggcagcgcccacgacgagggcggcaaggcaggtagcgctagcggccacgtcaagggtggccaagcctgcaacacccaggccagggccagccgaggggtaggcagctgctgagggtcggggaagggaagactagccgcaacaaggac

SEQ ID NO: 123075 - DNA, 122 bp, Zea Mays
tttttcccactatatcactttttcccctattttttcatctccttaagcggttccccctaaatactccccctataccccactacaactataaaatatcattttctatatcaactatcaatttt

SEQ ID NO: 123076 - DNA, 776 bp, Zea Mays
attacaggcagttgatgggagaggatctttctgggctgaatgttaaagaactgcagtccctagagaatcagttggagacaagcctgcgtggtgtccgcacaaagaaggaccatctcttgatagatgagatccacgaattgaatcgaaaggcaagtttatttcaccaagaaaacacagacttgtacaataagatcaacctgattcaccaagaaaatgctgaattacataaaaagatctatgagactgaaggaccaagtggagttaatcgggagccaccaactccattcaactttgcagtagtagaaaccagagatgttcctgtgcaacttggactcagcacactgccccaacagaacaacattgagccatcaactgctcctaagctaggattgcaattaagcccatgaataagagtaaaactggcgtcttatgatcccgaaggaaactatttattgtaaagagatgatactcagagtaagacatatttgtggcagggagatttgaaatatgaacttgtaaatgtaatgcaaataatttccagactggaattgggccgtggaattcagaggatgattgcattctagttgcatttgatgtttgatgatacttatcatattaaaagtttaaaactttaaaagggtgcaaagattgctactacacttgctaggcttgtataaacatctgaccatatgtactagtattaggaaaacagaaaagaaggcagacagctgtcgaacatctccatgtgtttctaaaaggaaatgtttcaatagggg

SEQ ID NO: 123077 - DNA, 1290 bp, Zea Mays
catacatgcatgaggatgagcatcgcgagtcgcggcgctccacgtaacccttgtaccaccatccggtccgggtgtggccagccgcgtcgtactcggcggccgggagacgactttgacctgcttgcacggctggcccggggccatcgtcagttcgtcacaacctgacgtagtgcttgggcacagcgcactgaaaaaaaaaacattaccgtcgcgccgagataaatacgcgctgcggccggacaggctagctagaccggacgcgcacaaggcaataaataaaaagcccaacgctgggctccgctagctctcggtctctctggagtctggactcgcctccacggctccaccatgtatcccaaggcggcagacgaaggtgcgcagccgctggccacgggcatccccttcagcggcggcggcggctactaccaggcgggcggcgcgatggcggcggcgttcgcggtgcaggcgcaggcgcccgtcgccgcctggtccaccgggctctgcaactgcttcgacgactgccacaactgctgcgtgacgtgcgtgtgcccgtgcatcacgttcgggcagaccgcggagatcatcgaccggggctccacgtcctgcggcaccagcggggcgctgtacgcgctcgtcatgctgctcaccggctgtcagtgcgtctactcctgcttctaccgcgccaagatgcgcgcgcagtacggcctccaggtgagcccctgctccgactgctgcgtgcactgctgctgccagtgctgcgcgctctgccaggagtaccgcgagctcaagaagcgaggcttcgacatgagcataggatggcatgcgaacatggagaggcaggggcgcgccgccgccgccgtgccgccgcacatgcatcctgggatgacccgctgacgctctgccgctcgcctcacttctgctgaggaaatcaagtgatttggtattggtccgctcccagcaggcagtatcaactactgtaaccaatccatgatctgtatgcggtatcgggctgaactgatactttatggacttgttgcttcaacttagtccgtaaaacgctcaagaccacatgaaaatatggtccataaaacttgttcaaaaatagacattttgcactatattttaattctatgagataaaccatgattatgtttaatctctactactattaaaaacttaaggggtagtttgccttcccatggtttggcctctccctagttgtgacaggtgggctcccatgtctctatatgtgaatttcgtcgacctctcttacggcggttaccttctctc

SEQ ID NO: 123078 - DNA, 450 bp, Zea Mays
tctcactcagtacaaccgcacctatctgaatagtcttctctgcccaccaatccaaatgattttatcaccttcactcccacaaatgcagtgaagaaccacaatccaatcacctgacattacataagcagcatgtggtgatgctgcatgggaggaggaggtggaggagcattaggcatcttcagaaagaacgaagtcgagagcagagagagtgagacttggacctggtcacggcccatcctcaccggcaactgccgcctctgctgcccgggcggcgctccagcagcacgctgctggaccggacgaatgtacatctcgtgtagccgccggaagccgccaagcgaaagcacgacgctgcgaagcatctgctcggagaatccagtgtaggcccactcccgcacgcacgccgcctcccacagccgctcgtcccgcgccagcagtcgccacccgcgg

SEQ ID NO: 123079 - DNA, 1322 bp, Zea Mays
accgccacatccgcgcctctcgataccaaacagaacaagccgcacagtgcggtcctgtcctgcgtagtttgaccacgacgcgaccagcccccgctcctctcctcctcccttgccgaagcaccccacagcagaagcgaaaacggcaaagccagccggcgggctaggcaggcatgcttgcccgctgacgcagctgaagcgaggcgacccgcagccgccatggatccggcgtccgaggaactcgagcgccgcagccgctatctcagctcgctcatccgccgcactaagcttagcgccgtcccggctccttctcagccggagcccgagcccggggtgacgcaaccgactccggagccggagccggagtccgcggtggagaagcgcggggaggccaaggcggagccagtggtcgatgaggaagagaagcgggaggccaaacaggccggggacgggaaggggaaagagatcaaggggaaggacgacgggggtcccaaggaggacaacagaaggaaggtgtcggtgcgggtgcgcgccgccgacatgcccctgccgctgcagcgccgcgcggtccggctcgcctacgaagccatcgccgccatgccgcgcctcgacagcaagcgcctcgccctcgcgctcaagaaggaatttgatacggcatatggtcctgcttggcattgcattgttggaacaagctttggttcctatgtcactcactccctgggaggtttcttgtacttctctgttgacaaggcctacattcttctcttcagaacagctgttgagccactagtccgtccgcgatgaggggccatgaaacagtcaactagctggcgcattctgtattcgacatttaactgcagaaggttaagaggagtagaaccactatcgccctcggtgcaaatatgtagacctaatctgctgtaactagtttttccatgtactctgcacagatctgccatgtaaaccttcaactttagcaatcggagctgtaactcgactcaattcttcagggcgtgtttagatgccagggaactcccacgcctggggacgctgcttgtgcctggagcaacccatttgcatcctgtattgtgttgtaaccttagtcggacgtagagatttgagattcaatcatcggttctgatcgatgctccatatatgatctgcgcgcttttaactggcttctagattcagaaagaatgtttagtgtcacatgttcagaaacatattgataggtgaaacctgaaattactttctcaattccacctctgtactagtagtctgataatcattagataccttatattattatggagctgagtgaggcg

SEQ ID NO: 123080 - DNA, 112 bp, Zea Mays
atgggaccagagtcatcggatataggaggtagaagaggggcattaccgaaccaggatcaaggaggaagggagttgcaacagcatgtacctaagatgcttttccccaagtttg

SEQ ID NO: 123081 - DNA, 312 bp, Zea Mays
atgtggctagggcgcactcctcgatcgatgaggccgatggcaaggctctgcacgcccccgccgaacttcacgctggtgatgcgtcgatcgcctgggccggcagcgacgacgacggtgacaagtgataagggctgcctggctgaggcggtgcgaggcaagaagcctgctcgtcgcgcctcgagagggcagcggtggggaccgatatctagggttgtgatgggagaagaaactgaggagaggccgaaagcggatggggcgaggaggttggtgtgggaggaagaggaggaagcggactgcagaggtgttgcctag

SEQ ID NO: 123082 - DNA, 504 bp, Zea Mays
atggcgtccggtggtaggaccatggagagcgtgcggtggggagagttatcgagtggcctgcgtaggaggaagacgcgcggccatggacgaccggaagtggaaagcaggggcacagcgagcttgagggagcgagctaaggtggcgcgacatgggagcaggcgcgcgcgtagggaggctttggccgggcgccgttggagatgggcgcgctggaaacggccgagaaggaggaatccgagcgccgtccagggagcaggcgcggtggccatggcgagcacagggagctccgggggaaaagccgcggtccgagcagggaacgggaggaacaccgacgagcctgcgatgccagggagcagggcgcgagctcagccggaactagggagcaggacaagggcagacggcgccatggagatggagaccgagcttgaagacgcagctgcgtgccatgggcgagctcgggcagaggggccaggggcgcagcgctggaggagaaagaggagcggctag

SEQ ID NO: 123083 - DNA, 273 bp, Zea Mays
atggggaaggagccgagctggagcaaggagaagaggggggacgcgacgctgggagaaacgccggcaagggagcaggatggccgcgaccatggcgagcagaggatccactcgcgtggtcctgtgcacgcggctgggcgagccccatggccggaccaaggaggacccgagtggagcaaggagggacgccatggaggttggggaaagcagcgaccggcgctagaggaagatggaattctgggaatggagctacgagaagaaagcaggagcggctga

SEQ ID NO: 123084 - DNA, 270 bp, Zea Mays
atggagatctttgagtatgttaggcaaatggattcgtatccaaatatttcaatcgcttaccggatattatttactgtgcatgtaactgttgcatcagctaagagaagcttttcaaagttgaaattgttaaagaactatttaaggtcaacaatgtctcaagaacggctcaacggattggccactttatgtattgagaagaaattattggacaaggttgatatcaacattattatcaacgacttcgcataagaaatgttagaagaaaatttt

SEQ ID NO: 123085 - DNA, 1325 bp, Zea Mays
tgctttcactgtgctgattgaactgaattaataaatgtagttcttgggttggatttcacactagtttgttatcgtttcttttgttggtggcatgaaagttcttcccaaaacttgttattactaattcctgttaccatgtgcagggcttgcagatagtggagtggaagtcaagcaagcaccagcaagtcctgtacccaaatcagttgaatcctcacttccacttgtcaagataccgacaccagaatcaagcaaagaaaacagtggcgttatgtggatatcctcacctgatcggcttgaagatcctcgaaggccatttcagtactcgaacagctctggctctccctgcgtttcagaatcagggtctgacatttatagcaaaagagaggtcatacagaagctaagacagcacctcaagaaacgtgatgagatgatcatggagatgcaaactcagattgctgatcttaagaactctattaacattcaagtgacacagtccacaaacctgcagtctcaattggatgttgccaatcgtgatctgtttgaatccgaacgagagattcagcatctgaggaagatcattgcagatcactgtgtcgcagaagcactctcccatgagaaacctttgcaagctggacattggcagtcagatgctacaaatggtcattcaaatggttatgctgatggttgtgttgatgatgctgatctgcattgtgttggcattgagaagagaaagggagaggtagagagggtggagatgctgaagaaagaggttgttgaactgaaggaagtcatcgagggaaaggacttcgtgcttcagagctacaaggaacagaaggcggaactctgtttaaagatcagggagctgcaggaaaagctctcagcacaagtgccaaacatcttgtaggatctatgtgtagtgcttttttagaagatcgaatctaagcataatgttgtctgttccatgagcagcagaggggatcccgcttcagtgaggattgcagaggaagctcttggcatttggcaatcgtcatgcatgcggaacgccatgctaggatctttgtggaatgattctcttttactttttagagggggattttgcataatgttaggttggtttgtttctttcttggctgccataatgttaggttcgtttgctttcttcccttttcaatatctggcccttggttgcagagggtttctttttctcagttgctaggtgcgtagggtagctcaattgaacttcatactcaagttgctgtacaggttctcagttttcaagagataaaaaaaaccgtagtgtgcctctgcctctttcagggcagttc

SEQ ID NO: 123086 - DNA, 791 bp, Zea Mays
atggctagacaaggaaaaaaggaaggagcagagcacaaaaaaaacaaagttgcaagagagccatggctcgcaagcacaggtagcagaagacagcactttcgagcacaacatgcgggacttccaacagtatgagattacaaatagcttcactcaactgttgcaggagaccgactgctcgcctaccagtcgaggggccgactgccgatggtcccaacaactgcattcagcaacagcaatggtccaaaacaggactacaggagtaccctgtacccgtagcagattggcagtagtgtctgcgggctgcggcccctcctccacacgtgacgtgacacgttggtggggtcaccgtccggaacgtgccaaacagctacaggcatcagggctcggtcgcggtcggcgtcggcccgacggccccaagcagaacaaacaagggtcgcctactgccgaggcgtgccctcgtatatggcctgtcgccttctactggtcctcgtctggactcccactgctgcggaggcaaatgtatcagatgaagtgaatgcatcatcatggacctgtgtggtccccgccggccgtgtgaggccagggcccaggccgactggccgtggtggttattgaggacgtgcaaattgaggcctgattgcacgccatgatgtgtcacacccgggttccgtgggtagtaacgcgaaaataaatcatcaagtatgttgcgatcaagtctcacacatatattgactcattatatagaaacgaatgtcatatcatttatatataacagagtgttgtataaaata

SEQ ID NO: 123087 - DNA, 2463 bp, Zea Mays
atggcatcccctccgccctctccatctcccgccgcgctcatcgcgcatctcgccgctgtgctctcctccccggactggcgcttccacccctcgctcccgcaactccctgccctcctcgcgccgtccctaccccgcacactcctcgtcccgttgccgctccgcctcgcggccgcagtcgcccgcgccgccgcgccgtcccgccacctcctcgacatctcactcccggtcgtgctccgcctccacgccctctccccgccgccgctccgtccattcttcgaccgtcccttccgctccctcctcacccacttctcccgctacgcgctgacgccgctcatgctccggctgttcgcccacatgtaccgccacgccccgcctgcacccacgggtgctacctacaatgcactcatccgtgccctctgccgccgcgccgatctccgccacgcccaacggtacctcagcctcatggtccgctccggttggcgccccgacgctttcacgttcaactctttgatattgggttactgtcgcacgcagcagctggaagtggcccatgacttgttctgcaaaatgccgttcagaggattctcacaagatgcggtttcttacgctgctctgatcgaaggattttgtgaggcaggcaggatcgatgaggcactggagttgttcagggaaatgacgcaaccagacatgtacacacacgcggccttggtaaaggggctgtgtgatgccggaagaggagaggagggtctatgtatgctgcagaagatgaaggagctgggatggaggccaaccactcgtgcatatgcagcactggtcgatttatggtgtagggagcagaaggctgaagaggctgagaaaatactgaatgagatgtttgacagtgggttgatgccttgtgttgtaacatgcacaattgtcgtgaatgcctactgcagggaggggaggatgagtggtgcagtgagggtgtttgaatccatgaggtttaaagggtgtgaaccaaatgtctggacatacaatgcaattgtgcaaggtttctgtaatgctgggaaagtgtacaaagcaatggctttgttggaccagatgagagaatgtggagtagagccagatgttgtgacatacaatttgttgattcgaggccagtgcattgatggtcatataggaagcgctttcagattactccgtttgatggaaggaaatggtttagctgctgatcagtacacttacaatgtgttgattgatgctctgtgtaagactgggaaagttgatgaagcttgctctctttttgatggcctagaatatagaggcataagacctaattctgtgacattcaatacggtgataaatgggttatgcaaggctggtaaattcgatgttgcgtgcacatttttggaaaatatgatttcagctggttatgcaccagatacctatacatatagcccattcattgaaaatctatgcaagacgaagggatcacaagaaggattattctttatagatgagatgctacaaaaagatgtcaagccttcaacggtgaattatacaattgtaatcaacagacttttcaacgagaggaactatgggttagccacaaggatttgggggcaaatggtgtcacaggggtgtagtcctgatgttgtcacttatactacttctgtgcgggcatactgcaatgaaggcaggcttgatgaagcagaaaatgttgtgacggagatgaaaaaatgtaggaccattgtagatgcaatggcatataacactttgattgatggccatacaagtattggacagacagatcgtgcagttacaatcttgaagcacatgacgggtgttgcttctatgccaaatcattttaccttttttatcttgcttagacatcttttacagaggaggctagcagaacatgtacctttgaaagcaacttctgtgtggaagactatagagcttgctgatgtctttgaattatttgagctaatgaagaagaacagcgtcccttctagtgcaagaacttatttgtccattctggaggggttttctgaagaaagaagattggatgaggtgacttccttggtttctcttatgaaagaagagaatctacctctgaatgaagatatatacaatgctcttgttaattgcttttgcaaattaaggatgtattctgatgcttgggcattgctttgttccatgattggacatggttttttaccaaacttaatattttaccagtatctgctttctgggcttactgctgagggacaagcagatagggctaaagaaattttcagaagttcgagatggaaagagtacaataccgatgaaattgtatggaaagttataattgatggcttcataaggaagggtcatgcagatatgtgccatgacatgatatccatgttagaacagatgaaatgcaaaccaagtgatgaaacatatgcaatgctgacagaggaattgcccaccagggaatag

SEQ ID NO: 123088 - DNA, 540 bp, Zea Mays
aaccatcaagttccacaaaatcacatctgcttcgactccaccgccgcctccttccttctttcctcgccgccacccgcgccgtgagagcaccgagccgtccgcgatcacgctgcgctctcctacaggcaacggagccggagccggagccccagttgcagctggctccgctgaattcggggctcgccgaataccgcctccagtcgtctgcgtccgggtgcaactgaatccggttaaggtaccgtctttgtagacttggctggagaaattggttgtttctatgatgaagactaagacgagtaggagcttacagaagtctgggagaggtaatcaggtccaaggagaagggccaaactgggttcttgttgctgggggttttttgcttagcgcgctttcagtcaagattgggtgcaaactaaagcagtggttcaatgggaagcagcaaaataatacttccaaagctaaaagaagacctgaagcatgcgagctgcactcagacctctaccggttcagtgaccaaactggctgttgctactctgtttc

SEQ ID NO: 123089 - DNA, 780 bp, Zea Mays
gggccgacgagctcgaggacagtggccaaggccgccggtgcgacacgttgccgtcaggcgtcagcgaaagcgaatcctccacctccccatcggacttgagggatatcaaatagactttttcctttcgaagacccatcgtaggcccagctacagcccatttagcccatctcgcgactacagtgtacagccgcaaatcgggagaaggggtttttatgtctcctcgcccgctccgaatcagctcgaggtagcagctccccccgcaaaaaccctagctttacctccccacaagcgcctccaagatgaagctcgtcaggttcttgatgaagctgaacaacgaaacggtgaccatcgagcttaagaacggcaccgtcgtacacggaaccattaccggtgttgacatcagcatgaatactcatctgaagactgtgaagctgacactaaaagggaaaaatcctgttacccttgatcaccttagtgtgaggggaaacaacatccgctattatatccttcctgacagcctaaacctggagactttgctggttgaggaaacaccaagggtcaagcctaagaagcctacttctgggaagcccttgggccgtgggcgtggccgtggtcgtgggcgcggtcggggtcggggacgttgagcatgctagctgcttttggaaattgcattgcgtgcatctgcagtgtaatctacattcctatcaattgtacgaagtatgcctttgattatgcaaccatgtatcaattgtttttttttgccagaaataaaaaacaaat

SEQ ID NO: 123090 - DNA, 928 bp, Zea Mays
gggccgacgagctcgaggacagtggccaaggccgccggtgcgacacgttgccgtcaggcgtcagcgaaagcgaatcctccacctccccatcggacttgagggatatcaaatagactttttcctttcgaagacccatcgtaggcccagctacagcccatttagcccatctcgcgactacagtgtacagccgcaaatcgggagaaggggtttttatgtctcctcgcccgctccgaatcagctcgaggtagcagctccccccgcaaaaaccctagctttacctccccacaagcgcctccaagatgaagctcgtcaggttcttgatgaagctgaacaacgaaacggtgaccatcgagcttaagaacggcaccgtcgtacacggaaccattaccggttatccggtcgattatggtttacatatacggacagctatcttcagatagtgttgacatcagcatgaatactcatctgaagactgtgaagctgacactaaaagggaaaaatcctgttacccttgatcaccttagtgtgaggggaaacaacatccgctattatatccttcctgacagcctaaacctggagactttgctggttgaggaaacaccaagggtcaagcctaagaagcctacttctgggaagcccttgggccgtgggcgtggccgtggtcgtgggcgcggtcggggtcggggacgttgagcatgctagctgcttttggaaattgcattgcgtgcatctgcagtgtaatctacattcctatcaattgtacgaagtatgcctttgattatgcaaccatgtatcaattgtttttttttgccgtggatttatgttgatgaggttaccatgtgatcatatgttctttccctagaacttttaagaacaattaaatactatctttaagacttctctagacacatcacacatagctcttgtt

SEQ ID NO: 123091 - DNA, 879 bp, Zea Mays
gggccgacgagctcgaggacagtggccaaggccgccggtgcgacacgttgccgtcaggcgtcagcgaaagcgaatcctccacctccccatcggacttgagggatatcaaatagactttttcctttcgaagacccatcgtaggcccagctacagcccatttagcccatctcgcgactacagtgtacagccgcaaatcgggagaaggggtttttatgtctcctcgcccgctccgaatcagctcgaggtagcagctccccccgcaaaaaccctagctttacctccccacaagcgcctccaagatgaagctcgtcaggttcttgatgaagctgaacaacgaaacggtgaccatcgagcttaagaacggcaccgtcgtacacggaaccattaccggtgttgacatcagcatgaatactcatctgaagactgtgaagctgacactaaaagggaaaaatcctgttacccttgatcaccttagtgtgaggggaaacaacatccgctattatatccttcctgacagcctaaacctggagactttgctggttgaggaaacaccaagggtcaagcctaagaagcctacttctgggaagcccttgggccgtgggcgtggccgtggtcgtgggcgcggtcggggtcggggacgttgagcatgctagctgcttttggaaattgcattgcgtgcatctgcagtgtaatctacattcctatcaattgtacgaagtatgcctttgattatgcaaccatgtatcaattgtttttttttgccgtggatttatgttgatgaggttaccatgtgatcatatgttctttccctagaacttttaagaacaattaaatactatctttaagacttctctagacacatcacacatagctcttgtt

SEQ ID NO: 123092 - DNA, 261 bp, Zea Mays
taatactgaccttatctttttcgggcgtacattgaagtatttcttaaatttgcacaagacattgggtcctggaattgatggctaggaagtatctttgaaagtaatgatgagcatagtggtacttcttggacttgtcataacttccatctattggggagtgaacaagtttgttttaatgatccttcacttccaaagtctgatcgtaagaagaaaaaggaaaaccctaaacttgcatcaaagagagtctgaaggttctgctct

SEQ ID NO: 123093 - DNA, 117 bp, Zea Mays
atggttggagatggtctaacagctcgtgtagtcatgtacaaccacgatctgcaagtgaagcaggtgggtgtgaatgtggagccaacaaccaaggttcaaacactcacttatacataa

SEQ ID NO: 123094 - DNA, 810 bp, Zea Mays
tatatacagatgttgcctgctttcttgaactagcaaaccagtctcccgcatagctagcaccacaacctatcgtccttgtatatatagtactactaggctgtggtcgatgatggcgtgtccgagccaaggaagaagacagcagaagctagcaaacaacatgagtggtgccatggacatggtgcgagccgcgtgacccaaacaaactacatacgcctgcctagctaggagagagcagacattgagagctcagaagcgtgcgtgcacacgtaaggatcgatgtgctgaggaggaaaagagaaggagatcgaagggattattaaagttctgtcacgtctttttgctgccggctatcgatcatgtggagcctggtgcggcgatggcgatgggggcggcggaggcggacggcgcgggtggtggacgagagcgcgctcggcgcagacggcgatactgacggtggcgccgccgctccggccgcgggcggcgcggtggtggcgccgacactgggtggcgctctagccagggcgctgctggcgctggcgtgcgccatccgcttcgacggcgcggacgtcagcgcgacggaggaggcgtgggccgtcacggggtggcggccgcgcgccgccgacgaggtcagccacctcatggtgcgcgagagcatgcgctacgccatctacgcgtagccgtatatatatattattatgtacctagcagagtaggattattctacgtctctataatctatatatacgtatccatgcatgcatatacgtaccacttgggcatgtaggaatatatatgcatgtatgtacgcag

SEQ ID NO: 123095 - DNA, 1091 bp, Zea Mays
gttgaagttacaagggtaggcctgttgcagttgtgggagctgtcttattaaaatcattaggtcacgggttcaaagcagcctctgtgcatttgcagtggtaaggcttgcttccgtttatcccttcctcaactccactcatgtgggcctctggcactgggtctgccctttacttttagttaaagttgatagaatgcttctgttcaccgttacaaccttaccctccttcctgtctagctgcatggctttctcttcatgcattcaaaagagttgtattttttcctatcctgttctacttgatattcttttcctgtcattagtttgcgtttctgttatctttcagggcctttcaagatcaatggagtaccgatccgccgtgtgaaccagacctatgtcattgctacatcaaccaaagttgacatctctggtgttgatgtcgccaagtttgatgacaagtactttgccagggagaagaagcagaaggtgaagaagaccgagggcgagctttttgagacagaaaaggaggcatccaagtcactgcctgacttcaagaaggatgaccagaaggctgtggattctgctctgatcaaggctatcgaggctgtcctggagctgaaaacctatcttggcgcccggttctctctcagggatggtgacaagccccatgagatggtattctaagtttctagttttggagttcgtaggaagctgttttgtctgtgttcttgtacttctgagttttgtaccagtagcgaacgtttcattgtgattgaagtcttcctgccaaatattataagatctaagaaagttctatccgtgttggtggttcagcagtgcattatctgcatttggttccttaggtagtccatggtatcttgaggtcccattttgtttgaattgctgactgtcaggtgtttttgctgttggtttggaataaacttggcatgtagcttgccgaaactggaataaacttgacatgcatcgtacaaatgagtcaatagcatggaacggctagttcctgaactagctgaggggccgtgcaatgaatatgccttgtgcaggaggtaaatgtgcatgcaatagttaaaagagaa

SEQ ID NO: 123096 - DNA, 1190 bp, Zea Mays
ccacctgtaagccgccgcacacatatatatgccgtgaccaaaccgtcgcttccatttttcgaccgccgccgcccccagtccccgatccgaagctgtgcctcgtaccatttcgatccaatggcgccgacgtcgaagctgtcgacgggcatcaagcgcgcttcgcggtcgcacacgtaccatcgccgtgggctgtgggccatcaaggccaagaacggcggcgccttccccaaggccgacaaggccgccgccgccgtggaacccaagttctaccctgccgacgacgtcaagccccgcgttcccagcacccgcaagcctaagcctaccaagctcaggtcgagcatcacgcctgggacggtgctgatcctcctcgcagggcgcttcatggggaagagagtggtgtttctcaagcagctcaagtctggcctgctccttatctctgggcctttcaagatcaatggagtaccgatccgccgtgtgaaccagacctatgtcattgctacatcaaccaaagttgacatctctggtgttgatgtcgccaagtttgatgacaagtactttgccagggagaagaagcagaaggtgaagaagaccgagggcgagctttttgagacagaaaaggaggcatccaagtcactgcctgacttcaagaaggatgaccagaaggctgtggattctgctctgatcaaggctatcgaggctgtcctggagctgaaaacctatcttggcgcccggttctctctcagggatggtgacaagccccatgagatggtattctaagtttctagttttggagttcgtaggaagctgttttgtctgtgttcttgtacttctgagttttgtaccagtagcgaacgtttcattgtgattgaagtcttcctgccaaatattataagatctaagaaagttctatccgtgttggtggttcagcagtgcattatctgcatttggttccttaggtagtccatggtatcttgaggtcccattttgtttgaattgctgactgtcaggtgtttttgctgttggtttggaataaacttggcatgtagcttgccgaaactggaataaacttgacatgcatcgtacaaatgagtcaatagcatggaacggctagttcctgaactagctgaggggccgtgcaatgaatatgccttgtgcaggaggtaaatgtgcatgcaatagttaaaagagaa

SEQ ID NO: 123097 - DNA, 1116 bp, Zea Mays
ccacctgtaagccgccgcacacatatatatgccgtgaccaaaccgtcgcttccatttttcgaccgccgccgcccccagtccccgatccgaagctgtgcctcgtaccatttcgatccaatggcgccgacgtcgaagctgtcgacgggcatcaagcgcgcttcgcggtcgcacacgtaccatcgccgtgggctgtgggccatcaaggccaagaacggcggcgccttccccaaggccgacaaggccgccgccgccgtggaacccaagttctaccctgccgacgacgtcaagccccgcgttcccagcacccgcaagcctaagcctaccaagctcaggtcgagcatcacgcctgggacggtgctgatcctcctcgcagggcgcttcatggggaagagagtggtgtttctcaagcagctcaagtctggcctgctccttatctctgggcctttcaagatcaatggagtaccgatccgccgtgtgaaccagacctatggagaagaagcagaaggtgaagaagaccgagggcgagctttttgagacagaaaaggaggcatccaagtcactgcctgacttcaagaaggatgaccagaaggctgtggattctgctctgatcaaggctatcgaggctgtcctggagctgaaaacctatcttggcgcccggttctctctcagggatggtgacaagccccatgagatggtattctaagtttctagttttggagttcgtaggaagctgttttgtctgtgttcttgtacttctgagttttgtaccagtagcgaacgtttcattgtgattgaagtcttcctgccaaatattataagatctaagaaagttctatccgtgttggtggttcagcagtgcattatctgcatttggttccttaggtagtccatggtatcttgaggtcccattttgtttgaattgctgactgtcaggtgtttttgctgttggtttggaataaacttggcatgtagcttgccgaaactggaataaacttgacatgcatcgtacaaatgagtcaatagcatggaacggctagttcctgaactagctgaggggccgtgcaatgaatatgccttgtgcaggaggtaaatgtgcatgcaatagttaaaagagaa

SEQ ID NO: 123098 - DNA, 899 bp, Zea Mays
ccacctgtaagccgccgcacacatatatatgccgtgaccaaaccgtcgcttccatttttcgaccgccgccgcccccagtccccgatccgaagctgtgcctcgtaccatttcgatccaatggcgccgacgtcgaagctgtcgacgggcatcaagcgcgcttcgcggtcgcacacgtaccatcgccgtgggctgtgggccatcaaggccaagaacggcggcgccttccccaaggccgacaaggccgccgccgccgtggaacccaagttctaccctgccgacgacgtcaagccccgcgttcccagcacccgcaagcctaagcctaccaagctcaggtcgagcatcacgcctgggacggtgctgatcctcctcgcagggcgcttcatggggaagagagtggtgtttctcaagcagctcaagtctggcctgctccttatctctgggcctttcaagatcaatggagtaccgatccgccgtgtgaaccagacctatgtcattgctacatcaaccaaagttgacatctctggtgttgatgtcgccaagtttgatgacaagtactttgccagggagaagaagcagaaggtgaagaagaccgagggcgagctttttgagacagaaaaggaggtaggtgtctgagtaaaaaagatccattattttgtcgacccttgcttcatatctgttgaatctgcaggcatccaagtcactgcctgacttcaagaaggatgaccagaaggctgtggattctgctctgatcaaggctatcgaggctgtcctggagctgaaaacctatcttggcgcccggttctctctcagggatggtgacaagccccatgagatggtattctaagtttctagttttggagttcgtaggaagctgttttgtctgtgttcttgtacttctg

SEQ ID NO: 123099 - DNA, 498 bp, Zea Mays
ccacctgtaagccgccgcacacatatatatgccgtgaccaaaccgtcgcttccatttttcgaccgccgccgcccccagtccccgatccgaagctgtgcctcgtaccatttcgatccaatggcgccgacgtcgaagctgtcgacgggcatcaagcgcgcttcgcggtcgcacacgtaccatcgccgtgggctgtgggccatcaaggccaagaacggcggcgccttccccaaggccgacaaggccgccgccgccgtggaacccaagttctaccctgccgacgacgtcaagccccgcgttcccagcacccgcaagcctaagcctaccaagctcaggtcgagcatcacgcctgggacggtgctgatcctcctcgcagggcgcttcatggggaagagagtggtgtttctcaagcagctcaagtctggcctgctccttatctctgggagaagaagcagaaggtgaagaagaccgagggcgagctttttgagacagaaaaggagg

SEQ ID NO: 123100 - DNA, 926 bp, Zea Mays
ccacctgtaagccgccgcacacatatatatgccgtgaccaaaccgtcgcttccatttttcgaccgccgccgcccccagtccccgatccgaagctgtgcctcgtaccatttcgatccaatggcgccgacgtcgaagctgtcgacgggcatcaagcgcgcttcgcggtcgcacacgtaccatcgccgtgggctgtgggccatcaaggccaagaacggcggcgccttccccaaggccgacaaggccgccgccgccgtggaacccaagttctaccctgccgacgacgtcaagccccgcgttcccagcacccgcaagcctaagcctaccaagctcaggtcgagcatcacgcctgggacggtgctgatcctcctcgcagggcgcttcatggggaagagagtggtgtttctcaagcagctcaagtctggcctgctccttatctctggtgagccacgcttggttcgctgcctctgatcacagcataagttttgagttgaatgttagatgtaaatctttacgcgctggttggctcaatctgtgaactatattatttgtagagtttttaaagaatccgaattcagtctggactataggacctgcatgcgtgatataagggcatccgggctttggtgacaagggaattggaggggattgaaggggaggaaagttcatgctattcaaaattgaatagcaagggatttcctcccctccaatttccttgtcaccaaaccagtccttgtacattgcagacgaggtccaaagaacggtcttggcccagaaagtttagaaccttacctaagacctggcttcagcaaataaatatttgtgagggagggggagtctcggccaccagaatgcgagagctgagagagaatcggatgatgattttttatttgctggagccctaccctcaatgctcatagtagcatcat

SEQ ID NO: 123101 - DNA, 586 bp, Zea Mays
ccacgtgcctacgggagccccggccgggattgttgcccctagtgctccggcaggatctaacgaaggtgcgcactcacggattcgggcgcttgggcaaccgagtggaggagaattgctcgccggagcagctccatcgtcatgccttggcatccgccgcggaccggcttcgacaccccgctattgccagaaccttcggacatgagataaagttgtacacaatatggaaggcagggtcagaacgaaggttgaaccagtgttgaagctgtgcgcaaggaagcttcggctcaatagcagaaaaaggaaccgacttaaggaggaaaagtctatttagtccggtaaattgttcttaagttaatactaaatatgaaggacatgaatgtaattgtacacaggctgtgttctatgcctataaatagatgaacagtaccctcgtactgttcacgctgatttgtactcgctcgtgcgtcaagcttgtattcaaatcttctgtcgagccgaaggtacaaatgtaattcaatattgttcttattcctccatggttatataataaagatatgtaaataatgttatgtgattattcatgtga

SEQ ID NO: 123102 - DNA, 1429 bp, Zea Mays
caacaaccaggccacaagcgcccgagcggcttaaaccctagctcgccgtcgtgctcggctcgccaccccgcgcctgctcctttcaggccctaaccgttcgccgccgcgcattcgagcacacgcggaagcgcacctagtgccatggcgaagaagcggaagcgcaccgacgcgcccgcagaggcggccggcgcagagaagcctgacgactccgcgccggcgcgcccggagcgcacgctcttcggcttcaaggacctggtccccgacgccgagcccgcctccgcgggcgccgaggccgcggtggcgccgttccggaacagggagaaggtactcatcacctgctcccgccgaatcacgtataggtatcggcacctgatgcaggacgtgctgtcgctgctcccgcatgcgaagaaggacagcaaggtcgagtcgaagcagagcaaggggaacgcgctgaacgagctccttgagctcaggagctgctccagctgccttttcttcgagtgcagaaaacagaaggatctttacctttggatggtgaagtctcctggaggaccatcagtaaaatttctagttaatgctgttcacaccatggaggagttgaagcttaccggtaaccatctgaaagggtcacgcccacttcttacattttctacaaattttgatgagcaacctcattggaagcttgtgaaggaaatgataactcagatatttgctactcctaaagatcaccgtaaagcaaaacctttccatgaccatgtgtttgtcttctccattgtggatggccatgtttggtttcgaaactaccagatttcggttccccacaatgagattgataaagttgataaaggtggtctggataaaatgacacttattgaggttggccccaggttctgtttgaatccaatcaaaatatttggtggtagttttggtggtcctacatggtatgagaacccatactacatttcccccaatcagatccgtgcactagagaagaggcagaaggcaggcaaatatgccaagaaggtgaaggccaaggtgaggcggaagatgcacgagatggagaacacgctggagcctgatgagtttgctgagctctggaaaggggagtaactggtctttgatcgaccctgtcaaagtcgtgaagcaccagcaactccttccacttccaccaagcgcaggtcttgtttaccattgtggcagtgccgactgtcgaggttgtggaagttttgtatcacaaagcatacttttatttatataaaatcggattttagtgataagataacttctgcctatatgacattcttctcgtgtttgcttctagtggatgtggtgccaagtggagtatatctctcttggatccaacggtcattaccgttctccgtgtcagccgcggaattttaaactatttttttataagaaaatgtttaat

SEQ ID NO: 123103 - DNA, 258 bp, Zea Mays
taaattttttagcaacaaataattatttttttagttttaattttaaaatcttaaaaagatgcattcaaaatttacaatttggtttggcgggtggggaggcccgcacaggcaagtcctgcaaagtaaggcagtgtcaatacccgcgccagcctcttcccccttcaaaaattgcggtgcaggttttgaccccgcactgcgagcggctctcaccgcagcgctttgttttccttactcattagtttaaggcaaggttctacg

SEQ ID NO: 123104 - DNA, 1269 bp, Zea Mays
atggcccttccaaacgggaccttacaagtgcatgtaaaaagtgagctttcagattctagcaaacggcggggggagcagagcacggttcagaaacgaaagagagttagagcacggttcgtcgcgggggaagcaggagaggagctgacacggcggcgggggcgagacggcggggaggcatggacgggcacggcggcggagccgcagtacgtggccaccgggcagatcgagccggacctcgccggcgccgcactcacggtgctcggtgatgtagcagccgacgcgaagcaggagcaccgcgacccggtgtacgcccaggtgctctcgagtgttcttggggcgatacatgactggtcagagaaacggctgcttgattaccatgaatggtacgggaagggcatggctgccaccggcgctggggcaatggtgattccgctgtctctggcactttccacgagcaagatcatcgcagagagtgtgcctgggatgggcatcgatctggcagactccgagctcgacggcatcgggagcttcgctggcaaccgtgtggagtttctttggagtccactcggtatcaaactaggatgtattcttgcaggaagtggacctagcagtgtatccagttccagctacaagagccctatactgaagaaggctaggatagaggttaacaggtcatctcagccaataaggacgacctctgttagtggacagccagcattggagaacgagctcggacaagggaacagcatggtcatccaacgagacgacgaccccagcgagaccatggcacggctcgccaaggacacggagcagctggctcagttcgagctggagaacttcagcccggtgctgaagcggtggcacccgttcccgggcgcgtccgcggtggccacgctccacagctgctacggcgtcttgctgaagcagtacgtggccaaggcgacgtgcctgaccaacgagctcgtgcatgtgctgcacgcggcgggcaggctcgagaaggccctggtaccgatgatggtcgaggacgtggcggacagcgacgacggcggcaggtcgttggtcagggaggtcgtcccctacgacgtggactccctcgtggcgcgcttcctcaggacttggatcaaggagaggctcaggtccgattctacagcggcgacggctacgccggcgagtgggccggcggccagagtcacggtatcggcgcccagacctgctccgacggcagcacgtacgccggcgagttcaagggcggcgtcaagcacggcctag

SEQ ID NO: 123105 - DNA, 1251 bp, Zea Mays
gaatacgcaggaggtctgcgtatttttatattaagaagaaaaaaggggggaaccccaaaacagaaacaacagttttacaaactcacaccaccattaacgcctaagacagctcctctaaatggatcttttatcacttcataagattgactgccgaatccttgcaggatcaacagtgtggtcgatgccattcagcttctggtgctcccaacaaatattcagaatcacgacatcagaatgcattggctgatagtcctttgcctgatgctcaggattatggtgatggtgctgcagtatgttatgcatctgtacaatatcccattattcaatttacggttgccgagcttaggagaagaagaaagaattgttttatggttgttggacaatttaatcttggttttatcattggaaagcttggccaggatctgtttattgtagatcagcatgcttctgatgagaagtacaactttgagtgcctttcgcagtctacaattttaaacgtacagcctcttctcgagccactgagacttgatctatcaccagaggaagaagtaattgtttctatgaacatgagcaccatcagaaaaaatggtttcgttttggcagaagatttgcatgcttctcccggtaaccattatcttctgaaagctgtacctttcagcaaaaatattacatttggtgttcaagatgtaaaggagttgatctccatgcttgccgatagtcaaggagactgttcaataatcagtagctacaagctggatacagccgactctgtttgcccttcgagggttcgtgctatgttggcttctagggcttgccgaatgtctactatgataggcgatccactaacaaaagctgagatgaagaagatacttaaaaacatggctggattgaggtccccttggaactgcccacacgggaggccaacaatgcggcacctagctgacctgcgtactatgaaggcgaaagatatcgcgtttaaacgctaggccctgttggctgccggcctgccgcgcgtggggggcctacgctcaacggaaggatgtttctatgctcttccgctttatgttgaagaatacaagaagtgcatatgtgccccgcccccgcttgtaaattacggcgtacgcacgtcgcgccgcccccgcatgcaaggtccatttgtttgtttgttttttgtcagaaggaatacctgtggtgatatttatgtccagtctccagggatgtatggtgttctgttttggcaaatagaagctt

SEQ ID NO: 123106 - DNA, 2061 bp, Zea Mays
tctccaccggaggcgggaggcgtagggtttaggcgcggaatggcgggaggaggaggggggcgcggcgaatcctcgccggcgatcaagccaattagtaaggcggtagtgcaccgcatctgctctggccaggtcatcttcgacctttcctccgccgtcaaggagctcgtcgagaacagcctcgacgctggcgctacctccgtcgaggtcagcctcaaggcctacggcgaggagtggttcaaggtcgccgacaacggatgcggtatatctccctccaacttccgggctcttgctcttaagcaccacacgtccaagatatcagatttctctgaccttggatccctggttaccttcgggttccggggcgaagctctgagctcgctctgcgcgcttgggaaactgacggttgagacgaggagcaaggatgagctagttgggacgcatttggagtttgagcactctggcgtggtggttagtgaaaggaagaccgcacggcaggttggaaccacggtgacagtagaaaagttgttctccaccttgccggtccggagcaaggaatttagcaggaacattcggaaggaatacgggaaagtgatctcgctgctgaacgcttatgcattgattgccaaaggggtcagattactctgcactaatactgttggaaaaaattctaaaatggttgtgcttagaactcaaggaagcagttcgatgaaagacactatcattactgtatttggtccaaacacttttaaatgtcttgagcccttcagtgttaccacctcggatggctgccagatagagggctttctttcaaaacctggacctggtactggtcgcagttcaggagatagacaatttttctatgtgaatggcagacctattgatatgccaaaggtcacaaaacttgtcaacgagctatacagaagctcaaatgccaaacaatatcctgtggtaattctagattttcatattccaactacatcctatgatgtgaatattgcacctgataagagaaaagttttcttctcatctgaaagcatgattctgcaatctttgcgggaaactgttgaaaacctgtactcccctcaacaatgcagtttctcagtcaatcacatcaaagatcctgaaaaggaaggggatgctgttactgataggcataatgaagacacaaatgcaatcgtaatggtgaatgttccatcttactacaacaatgatgacaatgaagaaacagacaatgaggatcaggtttctccagagaaccagaaattgccttcagtggctagagatgcgagccccctgtcaggaggcacaaccactcaggctgatagatctgcttggcttccatcctttgcatatgaccagccaaaaagatcgcctaaagaaggaagaagtttggtattgggtagaaattgttttagaactgggcttgctgcaaagccaactcattcaagtactgttcagtcttctctcctgaactttgtatcactaaacaagcggaaacacgaagatgattgcactcttatttctgaagctgcagtgctgagaagagagacatgctctgaacatatgaggagatcaagtttagaagcaaactttgttacaccaaacaagcagaaccatgaggatgattgcattatttctgagtctccagtgctgagaagtgggacatgctcagaactatacaagaggacaagtttagaagtcaattttccatcaccaaataagcagaagcatgatgacaattgcactcttatttctgaaatccctgtgttgagaagaaggacaaattcagaacaagcgagaggaacaagtttagaagcaaattcagcacctgagttcaatttacctctggaaacaaactctttaaaacagcactcctcacaatattttggatctgtgaggacagatgtttcaccacagcattctaaacaacctaatattgtgaccattggggcaggggtaacaggtccatgtgatgttgacactacagaatctgatatggtaggcaaactgtttgttgttagatatactgttcttgagttatatttggacatctgccaataa

SEQ ID NO: 123107 - DNA, 223 bp, Zea Mays
ctggccttggtgctccctgcacgcaggggaacagcaggggagaaaagaagctcgtccatggctgttggccgagcagaactccgaccaaggggacagtaggagggtgccgcgccatggctgctgcgctgtggaggtcgtcggccatgggaggcagagagcacacagggaggtggagctgagctccctgctgcacgccgtgtggaagaagacagggagaaaaaga

SEQ ID NO: 123108 - DNA, 1375 bp, Zea Mays
ggccgttttttttatgttgggcttccggtcgcattcggcccattcgctcgaaccgggggagcctgttgacttctacggtctatctcgaagtcacagacgccgcgtcgccgcgaagcgcatccattcgtcgccgcagcacgccggcggccggcgggcaggttgcttcgatgggctctcctacgcgggttcggaggacgaccggtttcactctcctcctggtgcttctgttcctctcgccgcccgtgtcagctggacaaccaaaaggtgtgtgtgtttcaccaggtggacggttccctgccttttcatctgaaggcaagcctcctggaagagcacccaaggggcgcagagatctagcactgtgtaggatattccgtcagaaaacatgttgcgatgtgatgcagacatttcctgctctggtctcagtaagaaaccttgcattggctggtgaaggcagtcaagaatgtattcatttgtgggaattgcttgagtgctcaatatgcgatccacgagtgggtatcaggcctggacctcctgttgtatgtgcatcattctgtgatatggtcttcaaagcttgttcagagtcgtacttctctatagatacgaaaacacaggccttgtctccttgtggtttagatgacatcctttgtggcaaaacacataaatgggtctctaacggcacagagttgtgccgtcttgctggtttctctgttcaaatttctgagaccagctctggtggagttggtcacactttctgctatggtgggaaagcaagtttggattccatctctgattcatggacttcttcaaaagaccgtccaacattaagtggtgtggcttcatgggacgttcaagattttcagagatgggcacgagaaatgcctatcggtgaaagagtttcgtgggcgattggaggaatggttctcacagctggccttatttttatcagcaaaagaaagagctacagccatcaccagaagcaagctgctattgctcgcaatatgagattgagaaggctggattctagagccaacccacaacaaacaaagcggagctaggaaggcataggcaacttagtgttactcatagaggattcttggacttgtgcttctacttttgtggatcggtataatcaacaactgtgaacaatagattgtactgtgtgtgagtccatcttgttgcttagatgcaccagctacgacctccgtgtcatccttgtgtggaagaagagttctataagttgtcactgagtattcctggaatgcagaacttatgggctgtgacgagatcatgtacatattatttggaaatgacttttttgatgccatcgatatccggcgacatgcctacatgatttgtgatctgtgagttcatctaa

SEQ ID NO: 123109 - DNA, 2960 bp, Zea Mays
ccaccatcggccatcgcgccctccccaaatcgcctcgtccgcccaattatgctcctcaaaccgcacgcgcgcgcgcgactcaccgccgttgtcgtcgtcgtgttcgcggagatccgcggggctcgcccatccccctcctccctgctctcctccccagcacccacggcccgctgctgcccctccgcgcgccccctcgccaaaccctagcttggccatctccccccactgccccggcgccaccacctgccctgccctgcgcgtggccggcggcgccgaccgccgccattgtcttacggaggcgtccgagtcccgacgcgttggaatgcgctgactgaagtgtgatcattgaggttctggttaaagaaacttctagtatcgattggcttccctcccatggacaagatacaatctgattgcccttatcctggatgtttcttttgtgtcatgaaggaggcgaaccctagtaaacgaagagcaagtgtgttaaagtactttagggaacttccttcccaagacgatgatggtcaagttctccctattagtggtctctggaacacagcaatggctcacccaaatgatcccgagttcatcaacttgggcatatttgaatgcatggcatctcttatatggaaagggttgaaaaacaggcgttggcttgcacatgatcagaatatttacatcccatattatgcagctcacataattggatcatacacaatgaatatggaggagtttgcagagcgtgctgttcgtgctggtgtaatacctccattagttgaattattaagaggtaggttgacatgggtcgagcaaagagttgctgttagagctttgggtcatttggctacatatcctagtacatttcctgcagttgccgatcatggggaagtacttgaacttgccattcaacttgcttcgagctcgctagaaattgtgtactctcacttttaccagtttgtggatcgaagacttggctaccattgcgaccttcttactcgtggcatgggtggtgtggaaatggagtcccgcaaagctgaggaatgggcaagtcaactgcagtgctggtctttgcaactcattaactgctttgcatttaagcctgaattcctccatgatatttgcaagcctgattttctagtcaagttacctggaatgtggggtggacttgtaaatgagaactcacctgctggtgttggtttgctaagaacaatctgccagagcaaggttggccgaggtcatgttgctaacattcctgctactattgatgctttatgcaacattgctcgttcttcagatgactggcaatacatggcagttgattgtctgatctggttaatgcaggatgcaagtacttgtcataaggttaaagatatagttgcgccaacactgatagatttatcagatatttcggcactgggtgattataaaaagcttggtgacacaattgtcacagtcctccaagaatgtatgcaacagagtgggaactcacgtggtgcaattggtgttcagaccaaatcagaaattgatgagcttttgagatccaagcaaagtctgaaattggaaaagagtatgccaaaggaggatcttcatataaaacaagctgcggcattggttgtcaagttggaaggcaattcactgttctcctcagggaacatcgcaggagctgcagagaaatactctgaagcgcttgcgttatgtccgatgaaatccaagaaagagcgggtggttctctacagcaatcgagctcagtgttaccttctcttgcagcagccattggctgccataagcgatgctactcgagcattgtgccttcacagccccgtgaaccgtcatgccaagagtttgtggcgaagagctcaagcgtatgatatgcttggtcttgcaaaagagagcttgttggacgcaatccttttcataaacgagtgctctcagtcgaacgatcccgacttatccctgaagcaaaacaaagtccctgactatgccgagcggttggtgaagaagcagatgcgctccgcttggctattcagggaagcagctctgaagcacgggggcgtacactgtgaaggagatgctagcgacgcgtttggccaggatgctgacgactctgagtgggaaacggctagcgaaagcgacgccgagaatgatgacacgggagaagcggatgatggaactgaatggaagaacgatggacaccgggaagatatctgtgagaaaagctgaggagcagggcaagctgaacctattcagagggagtcaaactgagcagtgacagaagcagctgctgggccttatgaagtctgctgcgctatcagcctatcaagcatcagatctttctaatgcagcgatctggtaacatttctactgtcctcgtcaaagcaaagccccagttaaactaattccccacgtcttgttgtttggtcagttgagttattgcgcctgcgaccattcaatgtttccccttagatgttggttctggtttggtgtttgtagcatgctctttctttcaccagtttctcaactctttgaatgaacaaaactgtgcattatttgttcttttttttactattatttctgtagtctggcgaagaggccataatactggcacccttccctttccactggacttatctggaacgagaagagcacgtttccgtctacctgctttttttggctataccatgtcaactagcaagtaggggttgttaggttgggtcatgctcttacaatgaaactggcgtgctgggcacttgctctgctagtctgcttgcctgaagcttcttgagagcgttgctgggggcaaaaatgccgacagacgtgttagtgtgtgccagtgcgtgcgtgttacttcttgtgcttgcacagatgctttcagtaagcacatcaatgtttgtgtgtacaaatgtagcatgaatgagtaattggagcgtgaatgatttgtaccgcgactgtacctcctttgc

SEQ ID NO: 123110 - DNA, 723 bp, Zea Mays
atcaattgagggcctccgccacaagccacagccgctccgagtcctgcccgactgctccacaggccactcgtcaccccaaaccaaaacgaagctgcgggcctgcggcggcagcaacagagagcagagatgctgcaattcccggcgctgatgcggcagtggccatcgccgccgctgatcccggcgtccacgctgctccccgtgccggccacctcccaggaggacgaggtcctcctcgccatggccgagtccgacctcgaggacaagttgaatgagatccggaagaccaacagccacctgattatcatcgggaagcccacaggcgacaccaaggaggagtatgacgctgaggtggaggacgacgatgcagacaacgtcgaggagtctgatggcgatgacttcgaccaggagactggttgacccaggcggctccccgctccccccatgcttcgccggcatccttgagcgtcgccatccccactgcccagtctgtatttcgcaatccctgagtcgctcctgctatctagatgttctgtgttaccctattctgctgctgctgtctgttcccggaatttgagcatgtccttgtcatgtggacctcgtctatgaaactactagatgattaatcgatccaatttaaacgctgtagtactttcctctatctgtgccagatactgctacttctttccattttattctttgtgccaagaccaataagttcttgtc

SEQ ID NO: 123111 - DNA, 581 bp, Zea Mays
acaaccaccccacccccaatgttaacatccaaccaggagatcaaggtcgcctactcgccttcacctgagatcgtcatcagtcgcacgaaacaggaaggagataagaggcaagtggatacagtgaagaagtgtgtgaacatccttttagacgccacaaagggtcgctattgccatacgccaactggtgaccagggaaagacaccgatctagatttgttaggggcagtggcggaagtacctcctgcgctgtgtgtttctccttgtagaagttatttgggggtgttcataatacatcggtacgtttggatatttccaaaaggtagaattcagcaaatatatggggtttttctaggttgaacattattacctgtgcccaagtaatggtgtgtacatgaggcccaggtatacctttatagtttgaagcagcgattgaataccatccaaaaatagcatttgtcgaatacacaatagcttagtacacgttaacaaaacctagcaggaaatggctgtgtgctagaaggtcctttgtatttgacaaaatctactctggaagcattcacaagttcagtagaaaagacacag

SEQ ID NO: 123112 - DNA, 1642 bp, Zea Mays
aagcaagcgtgcctcccgtgaaccgagagcggtccacccgccgtgtccgtcaagtgaaaccatggacgtgccgctcccgctgctgctgggctccctggccgtttccgtcatggtatggtgccttgtgctccgccgcggcggggacgggaaggggaagcggccgctgccgcccgggccccggggctggccggtgctgggcaacctgccgcaggtcggcgccaagccgcaccacaccatgtgcgcgctggcgcgggagtacggcccgctgttccggctccggttcggcagcgccgaggtggtggtggccgcgtcggcgcgggtggcggcgcagttcctgcgcgcccacgacgccaacttcagcaaccgcccgcccaactccggagccgagcacgtggcgtacaactaccgggacctggtgttcgcgccctacggctcccggtggcgcgcgctgcggaagctgtgcgcgctccacctcttctccgccaaggcgctggacgacctgcgcggcgtcagggagggcgaggtggcgctgatggtgagggagctcgcccggccgcggcggggagagggagggcgggccgccgccgtggcgctcggccaggtggccaacgtgtgcgcgaccaacacgctggcccgggcgacggtgggccggcgcgtgttcgcggtcgacggaggggagggcgcccgggagttcaaggagatggtggttgagctgatgcagctcgccggggtcttcaacgtcggggacttcgtgccggcgctcgcctggctcgacccgcagggcgtggtcggcaggatgaagcggctgcaccgcaggtacgaccacatgatgaacgggatcatcagggagcggaaggccgccgaggaaggcaaggacctgctcagcgtgctgctggccaggatgcgggaccagcagcagcagccgctcgcggagggcgaggacaacaggatcaacgagactgacgtcaaagcgctcctcctcaacctcttcacggctgggacggacacgacatccagcacggtggagtgggcgctggccgagctgatccggcatccggacgtgctcaggaaggcgcagcaggagctcgacgccgtcgtcggccgcgaccgcctggtgtccgagtcggacctcccgcgcctcacgtacctcacggcggtgatcaaggagacgttccggctgcacccgtccacgccgctgtcgctgccccgcgtcgccgccgaggagtgcgaggtggacgggttccgcatccccgccggcaccacgctgctggtgaacgtgtgggcgatcgcccgcgacccggaggcgtggcccgagccgctccagttccggcccgcgcgcttcctcccgggcggctcgcacgcgggcgtcgacgtcaaaggcagcgacttcgagctcatcccgttcggcgccggccggaggatctgcgcgggcctcagctggggcctgcgcatggtcacgctcatgacggccacgctggtgcacgcgctcgaatgggatctcgccgatggcgtcaccgccgaaaagctggacatggaggaggcctacgggctcaccctgcagcgcgccgtgccgttgatggtccggcccgcgcccagactgctgccgtctgcctacgcagcgcagtagaaaaaggattctctt

SEQ ID NO: 123113 - DNA, 520 bp, Zea Mays
tatgtatgtattttttagaatatatttttaatttttttgattcatggcggactaaaggctcatatgcacctggtacacggatcatggatggatcgatcatgtgtccataactagctaagtccgtcctgcgactgaggcatgcggcaaccggataagatcagagatgatccgcaaacagggatagttcctgaacggatttgaattgaatgaaatgatccatcaatgcgatatgggctgcaaaccgagacagatctacaggaagaatcttaagcccgagcccacgtacgttgccggcgatggccgatgcgtcatcgcagccgctgtcgtcggctgggtgtcttcttctgttcttcccgcccggtcgagcctgtccatctaccctggtcgatctccgcgcggctgcgattcctagctgtccatgccgcaatgcttcttcggttcttcccctgctgcttctgtcttgccttggcgtaactattcatgtcgccgcaaccgcacgcgcgccctggcaggacgctgc

SEQ ID NO: 123114 - DNA, 1366 bp, Zea Mays
aactggtggtcccaattcaaccagcgagttaagttgtatggtgtcggcgtgttgatgtcccaatccaaccacctgttgtttgttgtttagtccgatccggaccacttctttattaatataatcggcagctctcctgcctggttcgtttcaaaaaaaaaaaaaccggtggggacctaggactggtgatctgaatctgacagacatattaaccctgcatgtttcaaaatcagtgccaaacaacattaacaattgttcacagatggatttagagtttgtataatttttttgttgaagtacataatcactatcagtatcctggaaatatatatttctggaatgaaggggcacgatagtgtgcctatttcattgatacagatgagagcatactggaaatatgtgcactaatatttttggcatgctagataaaatcttacatgcaggcaattccagttggtgcattgacataatccttttttacatgaccatttccactgctctaagtttgtagttttgatacagctactactggacagcgaaggcgagcctaccatgcctattgttagtctggaggatgatgctatgaaccctgcatggtgtgctgtagctgaagaacggcaggttgttggagaggcatctcgggctcagtcgaactcagttgaaactcttctttgtcgtgaagacccaaattccttaaactacgaagcattgcttccctgggactatccgattctgtcccaatgcaggaatgagatgcttgatgggaacctgaatggatatgggttgcctgatcaccataatgtggatcttggaacgcctccagatcttcagcttgctgactttcagtttggttctcaggaaagccttggcagctggctggatcgcatctaggaagataactagtgtgaactgtttgctcgaacagcctgatcgatgggcttctttttgcacaggatatggtaaccggtggtggctattttgggacttacacaacacaaagattgcatgcttgcattagtattgtatttgtgttgcgctgtcaaacatcatctggaaaccaagaacctttcgcccttttctattttctttagaagaaatgaacaacctttaacagctggctactagacttgaagtttagttgtatgtttggcacggttggtgcaaccctgcattgccccgttgtatatacggtccgtgccttcaaatcttttgcattgagttcagggtgtccttgtaatagctatggaaacctgagggggcagtggatggatgtgtatggagctccagctgcgcctagtctaatctctagattgcaaagttttggactttacacatgcaccaggcaagtaaaagcaatttttagaaggta

SEQ ID NO: 123115 - DNA, 1884 bp, Zea Mays
aaacgaacgagcgcgcgagcaatctcggttcgcgtgcgcggcttgccaaggaaggaaagggtcggggcgaaggaagctgcaacggtcgcccgcctttcccagtccccgccgtgccacgagctttcccgcctccgccttgcgatttccaagccctccctcttcacacccacccctgtcgccaatagcagcagtggccagtaggggggagactgggatctgggaacgggagggcgttataattggtcggcgcggcggacgtgccggccgcgcacgcatccggaccgggtgcggtagccagtaggcgccgttccgccgccgccgccccttcgcccgacgtcactcgccggcgcggaccccgcgcgccactatggcgaggtcatggctgataacatgtaggggaattgctaagaaaataagatatgcaaatcctagcgctaatcgccaaataagccaactgattgcagaagcacggagggaatgcccaaactgcagttatgttattgataacagcgatgttgccatgcagtggcctgggctgcctgctggagtcaagtttgatccttctgaattggagttgcttcaacatttagaacaaaaggttggcctgggagattcaagaccacatgtgctcattgatgaatttattccaactatagacaatgatgagggaatctgctattcgcatcctgaaaatcttcctggtatgaaaacagatggtagcaatgctcatttcttccatagagtttcaaaagcgtatggttatggccagcgcaagcgtcgaaggattatcaactgcagcgatcacactgttcctgatgatcgtgtgagatggcacaagactggaagatccaaagccatatatgacaatggcgttataaaaggttggaagaagataatggtgctgcacaaaactttgcgaagtggtggtaagcgggagagagctaaatgggtaatgcatcagtatcaccttggaaaagaggaagatgaaaaggacggggagcttgtagtatctaaaatcttcttccagttggcaaataagagtatggaaatttctgaaacagaaactgcttgtgaagaacctgaagcacctgcttcagtgattggtccgaaaactccaaagacaatcacaccgcagccacgtcatcctaaaagtagtccatgtgaaactcagcagaatatttccattgtgcaggatcagctactactggacagcgaaggcgagcctaccatgcctattgttagtctggaggatgatgctatgaaccctgcatggtgtgctgtagctgaagaacggcaggttgttggagaggcatctcgggctcagtcgaactcagttgaaactcttctttgtcgtgaagacccaaattccttaaactacgaagcattgcttccctgggactatccgattctgtcccaatgcaggaatgagatgcttgatgggaacctgaatggatatgggttgcctgatcaccataatgtggatcttggaacgcctccagatcttcagcttgctgactttcagtttggttctcaggaaagccttggcagctggctggatcgcatctaggaagataactagtgtgaactgtttgctcgaacagcctgatcgatgggcttctttttgcacaggatatggtaaccggtggtggctattttgggacttacacaacacaaagattgcatgcttgcattagtattgtatttgtgttgcgctgtcaaacatcatctggaaaccaagaacctttcgcccttttctattttctttagaagaaatgaacaacctttaacagctggctactagacttgaagtttagttgtatgtttggcacggttggtgcaaccctgcattgccccgttgtatatacggtccgtgccttcaaatct

SEQ ID NO: 123116 - DNA, 1736 bp, Zea Mays
gatcacgcggcgcatttgggattcgggtttggtcaggcgagggtttagtgtttgcgagggccccttcttctacaccccttctgcactataggaatgcggcttctgggtcgcgcgttcctctcatttggatcagattggatgacttgcgagttcctatgtcggactctgatctgccttggccggtgccgtgacttgtgagcgaaaccggcttttttcgattgtgggaattacagaggtcatggctgataacatgtaggggaattgctaagaaaataagatatgcaaatcctagcgctaatcgccaaataagccaactgattgcagaagcacggagggaatgcccaaactgcagttatgttattgataacagcgatgttgccatgcagtggcctgggctgcctgctggagtcaagtttgatccttctgaattggagttgcttcaacatttagaacaaaaggttggcctgggagattcaagaccacatgtgctcattgatgaatttattccaactatagacaatgatgagggaatctgctattcgcatcctgaaaatcttcctggtatgaaaacagatggtagcaatgctcatttcttccatagagtttcaaaagcgtatggttatggccagcgcaagcgtcgaaggattatcaactgcagcgatcacactgttcctgatgatcgtgtgagatggcacaagactggaagatccaaagccatatatgacaatggcgttataaaaggttggaagaagataatggtgctgcacaaaactttgcgaagtggtggtaagcgggagagagctaaatgggtaatgcatcagtatcaccttggaaaagaggaagatgaaaaggacggggagcttgtagtatctaaaatcttcttccagttggcaaataagagtatggaaatttctgaaacagaaactgcttgtgaagaacctgaagcacctgcttcagtgattggtccgaaaactccaaagacaatcacaccgcagccacgtcatcctaaaagtagtccatgtgaaactcagcagaatatttccattgtgcaggatcagctactactggacagcgaaggcgagcctaccatgcctattgttagtctggaggatgatgctatgaaccctgcatggtgtgctgtagctgaagaacggcaggttgttggagaggcatctcgggctcagtcgaactcagttgaaactcttctttgtcgtgaagacccaaattccttaaactacgaagcattgcttccctgggactatccgattctgtcccaatgcaggaatgagatgcttgatgggaacctgaatggatatgggttgcctgatcaccataatgtggatcttggaacgcctccagatcttcagcttgctgactttcagtttggttctcaggaaagccttggcagctggctggatcgcatctaggaagataactagtgtgaactgtttgctcgaacagcctgatcgatgggcttctttttgcacaggatatggtaaccggtggtggctattttgggacttacacaacacaaagattgcatgcttgcattagtattgtatttgtgttgcgctgtcaaacatcatctggaaaccaagaacctttcgcccttttctattttctttagaagaaatgaacaacctttaacagctggctactagacttgaagtttagttgtatgtttggcacggttggtgcaaccctgcattgccccgttgtatatacggtccgtgcct

SEQ ID NO: 123117 - DNA, 2105 bp, Zea Mays
tctcccctcttcgcccagccgctgccacgcccacgcgcaatcagaactgcaggccagcaccacctccacccccccccccccccccccccgaacggctataattaggcggttgccggaatcccctctgtctcgcaccgcagcaattccccggccccttcgcaccgtttccctctgcgctcccaccccccgccccccgaaatcaccgccgcgccccgcgtctcgcccacgctcacaaggaaaggaggggaggagaccggggcccagacgccaacgcgcggacccctcgagtagggcgaggtccgggctccgctcccggtttccggggagagtgcggaggacccccatcgtgcgcgccattgaactctgctcccggctgctcgccggggagagggcggaggacccgatcgtgccgtctcaacccgctccgcacccgcgcggccgcgggcgtggtgctcccgcgccttccgggcgcctcctgcttctccgtgcgccctcggctccatggaggccggctactgcaaccgcaagaagaccgacggcatctgcgagtcagtctgcgacagcgagtttggctcgaagtcagtcctgagcatgtcaaggctgaagtgcgcactgcggggatttgatctgagggttctcttgatcctactgattggtgtgccaattttgatctttgccatatatgtgcatggccagaaggtgacttacttcctccgaccaatctgggagaagcccccaaagcccttcacaatactccctcactattaccatgaaaatgtctcgatgggtaacctatgcaagttgcatggatggaaagtcagggagactccacgccgtgtctttgatgccgtgctcttcagcaatgagcttgacatccttgatatccgctggcacgagcttagcccgtatgtgtcagaatttgtgctgcttgagtccaattcaacttttaccggcataaagaaggaccttcacttcaaggaaaaccgccaacggtttggctttgcagagtcacggttgacctatggcatgataggtggaaggtttgtgaagggagagaacccatttgtcgaggagtcgtatcaaagggttgctctcgaccagctcattaagattgcgggcatcacggatgacgacctgctgatcatgtctgatgttgatgagatcccaagtggacacaccatcgacctcttgagatggtgcgatgacgttccggagatactccatctccagctcaggaactacctctactcgttccaattcctacttgacgacaagagctggagggcttcagtgcacagatacagagctgggaagacgaggtatgcacatttccggcagacggacgacctcctggctgattcagggtggcactgcagcttctgcttccgctacataaacgacttcatcttcaagatgaaagcctacagccacgtcgaccggatcagattcaagtacttcctgaacccgaagaggattcagcatgtgatttgcgaaggggctgaccttttcgacatgcttcccgaagagtacacgttccaagagatcatcgccaagctggggcctatcccgagtacattctccgccgttcatctccctgcctatctgctggagcaattcgatcggtacaggtaccttctcccaggcaactgcgttagagagagtggctaggcagctggctgcccgccgtctgcatcatgaccctgaggcgcacggacgtcgctctctcgcggatgtctgtcttatggcggcgggggttgtgtccgatacgattggctgacttagttgagtgatcgcttggctgctggttgagttcatatgggatttttgtgtaccgtgtaacagaaaccatggaaggcctgacggctgcgtagcgcagcgcgtgcttgatcgctgctgcgttcttgtttggcagaggagagctgagagctttttgttcgttgcttccatgattgatatatgatgaactcagaacctgttgtagatctcataccgccgagcgacattcagattctttctttctttgctcgtgatgtacattgccgttcacttacctagttacgttgagccatagatgtttccaatccagtttctgactgtttctcata

SEQ ID NO: 123118 - DNA, 999 bp, Zea Mays
tctcccctcttcgcccagccgctgccacgcccacgcgcaatcagaactgcaggccagcaccacctccacccccccccccccccccccccgaacggctataattaggcggttgccggaatcccctctgtctcgcaccgcagcaattccccggccccttcgcaccgtttccctctgcgctcccaccccccgccccccgaaatcaccgccgcgccccgcgtctcgcccacgctcacaaggaaaggaggggaggagaccggggcccagacgccaacgcgcggacccctcgagtagggcgaggtccgggctccgctcccggtttccggggagagtgcggaggacccccatcgtgcgcgccattgaactctgctcccggctgctcgccggggagagggcggaggacccgatcgtgccgtctcaacccgctccgcacccgcgcggccgcgggcgtggtgctcccgcgccttccgggcgcctcctgcttctccgtgcgccctcggctccatggaggccggctactgcaaccgcaagaagaccgacggcatctgcgagtcagtctgcgacagcgaggtgaggcaccgctccggctccagccagacagatctgtccctttccctaccgctccgccgcgtgtaacgcctctgcggatcgcctggtccgccggggggagacgcggacgcggtcgtcgcggtgcttgtcttttcctcttccacgctgcttaaacgcgttttgctccacgctgagctgcttgcttgcttcgaccttttcaccgctccagttgcgcggcgtgttcgcggcggctgctattttgccgatctcagcagggttgctgtcttggatcgggtgctcgtgagatttccacagcctgggatcgcatatgctcgcttaattgcgtccgcggcaggcatcttccacctgccgcgggtgctgtggattaggtggtgctaaacaaactggggcgcctggatgcttccggctgcgctagaatctctccacctgtat

SEQ ID NO: 123119 - DNA, 1687 bp, Zea Mays
aacaccttcgtctccccgtgcacaacgagagatccccacggccgccgaggaacccctcctcatcctccttgcacaccccctcggcccctctcatgcccgcagggtcagaggccgtgggcgagcccggcggctgcggacacgtcgaggaggagtacgagattcgcaacgacgagggctttgtctacaaggttcaccgagggctctaccccgacgccgcgccctccaccacccagacggcggcgggccccgaccccaaggctgccggcctccgccgccgccgccgcgcgctcctccgcctccgcgccaagcgcctccgcgacctctcccgctgggaggccctcgcctccgaacttctcgccccgcttcccgctcccccgccaccggctccgacatcccaatcccctcccgtcgctgcctcctcctcctccttggtctctgtcctcgacgagctcctcgcacaggctgacattcaagttgagctgatgaagaaggtgtgccagtggtgcgacgaggccaactctatctgcgacgcaggagaggctgccattgtcgattcgatagttgcgctgcctatgtggggcgccaactcgtcggagctagtggcagcgctatgcagcccagataaaaatacccctggtaagttggatgaaccgaatgggtgccaagaagcttctggagtgtcttcagcggcagctgaaatgataaaaaatagtgtcgagaaacagacaatgggtcatgaccttcctcccattctcactgagagcaggacgaggaaaagagtagctaatctttcaggcacaaagaggaagaaggcatcaggcactccacgatcaataacgagaagaaaggcagcgtccagtccagcaagagttccagacatatttggtagcccggggccactaaccaggagaagggcagcagctcaaaatgtaccaacagggaactcgtaataggtggctcttatctacaagccaaaacgccttataatttggttggaacagagagagccatgtgtttgtacacaagtgttgtttgttgttgatgtagctagaaaatccaaaataactactcactccgttcttttttatttgtcgcatattagtaaaaaataaactagccgacgacaaatattcaagaacggaggtagtagttcataattgggggagtgacttttttttggctagtgatgtcaccactttagccatcaattgaacatcttgtgtatttgtgaagttccagccgcagatggtatttagtgtgcaatcaagtattgctgtattggtagtgagttgttcacgtaagtgcatggctgctctttggaaacattgatcatgtaatggctgttggttctctggtttttgtaggacatgctgcttttgaagtgcaagcttctcgtgctgttctatttctcattccaatcgggaggcgtttcagagcacaaggcctaccgttggaagcttgggcattccaggccgaggtccagtacagtgctgatctgtagactacgaaaagttagacatgatctcgtagcatattttttaatctcacctccttaactggatgtgtgcgtgtgtcatgtataaggagacaatcaggctttttaacactgaggatgtgttttctattttaacttggactgtttgtaagcagacctaaccctgaaactagtctactctagatttcgtag

SEQ ID NO: 123120 - DNA, 889 bp, Zea Mays
aagtttttgtattcgcccaagcccggcccatccaccatccgctgctactcttcatcacaaaccctaataaatccatctccgcctctggttcgtcctccatctcctcccaaatcgcggcaccaagcacccgaccgctttccgcatggcttcccacatcgacttccgctgcttggatgagggcctcggcggcgagcgcggcaagcgcaagcgtcgcgaggatgccgaggcggcggccgcggattccatggacctcgatgccgacgcgcaccggccgtctaagctccgcgccatgccttccctctccgacccctcgaagccggcctccttcggccagcccacctacgacggcgtcatcgcagggcggttgtcgggacggcggtggaaggaggcccgcacccggcgagcgtcggccgtggcggtgtcgcggaagccgaccccgctggagcagcgcgtccgggagaagtcgctgaagcgcgcgtaccaggcccgcaaggcggagctcaaggaagagatccggcagaacaaggtggccaagcggaaggcccgcgaggagcgtgagaagcggaagcaggagaacgtgctccgcacgggcaccaaactgcagagggtcaccaacccaaagacgatccagaagatcgccaagtccaagaagcgcaagcagctcaaggtcgtccccgacgagttcctcggcggcaagaagtcggtggccaaccggcgcatgcaggtgcctggactcgaaaattgaatctgacaggcctcgatctctctgtatctgttctgtggcggcgttgagttggcaaggttagttcgacgacgattttgtacttgcttctggttatgtagtttgaagcgtgattaaattaagcgattaaaatggcgtgcaatagaa

SEQ ID NO: 123121 - DNA, 1567 bp, Zea Mays
acgttttagagaagtatgtggcgaacatgacattacagagaagccatcgtttcatagtgacaaaatagtaaaaagctcgtccctgtctcgggtatcgtcgctggtcgctgccgcagccttcgtcctccctctcccactcccgatcgcatccaccctggaaccctagcggcccagcccgcgaccatggcgcggcggtcgacccctctcctacgccgccttctcgccccgtcaccttccctccccactcccctagccgacgccgtatcccgccgcaccgtcacctacatgccccgcccgggggacggcgctccgcgcggcgtcaccctcatcccgggcgacggcatcgggcccctcgtcacgggcgccgtgcggcaggtgatggaggcgatgcacgcgccggtctatttcgagacgtacgaggtccacggcgacatgcccacggtccccgccgaggtcatcgagtccatccgccgcaacaaggtctgcctcaagggcggcctcgccacccccgtaggcggtggtgtgtcctccctcaacgtgcagctccggaaggagctcgacctctacgccgcgctcgtcaactgtttcaacctccctggcctgcctaccaggcacgacaacgtggacatcgtcgtcattcgggagaacagtgagggcgagtactcggggctcgagcatgaggtcgttcctggcgtcgtggagagtctcaaggtgataacaaaattctgctctgaaagaattgcaaagtatgcttttgagtatgcataccttaacaatcgaaagaaagtgacagcagtgcataaagccaatatcatgaagcttgctgatggtttgttcttggagtcttgccgtgaggttgcaaagaagtaccctggaattaaatataatgaaatcattgtggacaactgttgtatgcagcttgttgcaaagcctgaacaatttgatgttatggtcaccccaaatctttatggcaatctggtggctaatgtagctgcaggtattgctggaggcactggtgtcatgcctggaggcaatgtgggtcaggaccatgctatcttcgagcaaggtgcttctgcaggaaatgttggaaatgagaaaattgtggagaagaagagagctaaccctgttgcgctgctgctatcttctgccatgatgttgaggcacttgcaatttccatcatttgctgaccgtttggagacggcagttaagcgtgtcatagcagaaggcaagtacagaaccaaagatttgggcggcaccagcacaacccaggaagtgatagatgctgtcattgccaaactgggttaaacacaaaccgtgtgtttaatacaatttttttcctcatggactaggtaactagtccttactaaatgtttgttcttggtataggtttagactttagaccaccattttgttcggcaaattcttgtacaatcttcaggtatcttgtttctggcctggtttgggtgtgtggtgtaactgagcaaactcgtattaatttttacgcaaatttttgtgaccttaattcttaactggaaataagagaaaaatatggaacagttctcctttc

SEQ ID NO: 123122 - DNA, 1675 bp, Zea Mays
acgggctcacttttcacgcgtttctccaagccgctcgactagggttaggagactggctccatggcggcggccggcgagcaggcggccagcaagcaggcggcggccggcgagcaggcggcggccgacgaccaggccacggaccagcgcgcgcgggcaggcatcgtgcgcgcggcgaggcacgagctggcgggcgctgagcgcgcgaccccaggcgagtttgctgcagggcgtgcgtccagcgagctggtggccacgggcttgctggcgaccgcgggacagcacgccgcacctggtattggcttatctgatgcttcagtagccttggacgaagaggaacctgttggaatcgattggagttacaatgacactcactggcttggtatggatgagcatactggtttagctgggatagatctttctgcacttccgttggtggattgggattcattagaaattcaagaagaaaaggaagaggaaggaataatagaaatctgcaatgagcaacaactttatgggctgctggggttaaagaaagatggtggtagtacaacacaaatggttactgagtcattctcaaattcaagggctgctacaacagatgcttctggaatgcttaatatgcagattacccaagcagtagctatagatgtgactgatcatatttcagaggagagaacaattgcatatgacgaggatagcccatgtatgaagttaggcaccccgtatccttctatggaaaaattcagattggctatgagacaatatggaataaataaagagtttgaattgggtattgaggcaacttgtccaaacaggtatagagggttttgtaagtctgatggttgcccttggacaattgttggtcacaaacaagcagacaacatcactgtcatggttacagtgttgaacgatgtccatacatgcacatctagcagcaggagaaagaccactacaccaacctgcaagtgggtagcttcaaaagctgtcgtcattcttagagagaatcctcagatgcgttgtgtagaactgcaaaaaaagttagaaaaagattacaagtgcaaaattggctatgacacagtttggagaggtagagaaaaggcattggatttgttgtgtggctcgtggaaggcagaaattttaaaaaggtcacctgatagtgttgttgagattgactgtaaggtggttagtggtagggtatattttcaccgatttttttgtgcacttggtccttgtattgaggggttcaaatctggttgtagaccgtggcttggtattgactctaccgccctaaatggtcgctggaatggtcatctagctgcagcaacgggcgtggatggtcataactagatgttttcacttgcatttggattcattgactctgaaacgacagagaattgggtttggtttatgactcaactgaaaaaggctttaggagaatgtcctttacttgctatttgcacagatgcttgtaaaggtcttgagattgctgttgggcaagtgtttccacaagctgaacaaagggaatgttttagacatctaatgcagaattttataaagagatatagtggtgaaagtggtggacatatgtggcctgctgcaagagcatatgacaaagaagcttatgagaaacatttggatattatttataggggtattcctgatgctaagttgtggt

SEQ ID NO: 123123 - DNA, 86 bp, Zea Mays
agaacgcggaaacgggaaacctgccggcccgttcttcccctggccttctcgagtcctctccctgctcgctgtcgctgcccctgtcc

SEQ ID NO: 123124 - DNA, 429 bp, Zea Mays
atgactccccccgcagtgctggccatcgctatgaaactgccttcgccgccgcgcgtgactgagacgacggtgtcggggaccgaggggacgggccaggagttgtcaatggacgactacctggtgggcagagtcgctatgtttgatgcccagactgggctgccgcctactggggcggaggctgggcaactggcgttggtaccgtttacggtgcctgctgacctcgtgggtacagcgaagggtgacacagggacttcattggacccatggtcaaaattttgcgccaccactgatggcggaggcgaacttgcctcggcggttgccgcttctggcgtaactgggtctgtcgcgcggcagctgcgatatatgtcaggtgacgaccttcgtggaccaggttgctttgggggcactgaccttgcagctgatttctga

SEQ ID NO: 123125 - DNA, 2267 bp, Zea Mays
ccaccctctcgcctcgccataaagggcgggggccgctagggttagcgcatcggaatcaatcgtgtttctcgcctccacgccgagaccaatccagccaccgccaactctttgcctcgcctctccgattcgagggaacgatggagtgcgtcaccgatatgcccctcgcgacgctggacagccgaccgcgcaagcggcagcggctcgggtgggacgtcgttcccgccgagatgtatcaggttacgcggccgcggcttggttgggacgtcggccccgccgagatgaatcagtttgcactttgtggacaagaagttgtgaatgccttcagtgctgcagtgttgggcctatcttcaggttgtgtttcttctcaagtcaaccaagagcagcctcatgatggttcccctcctctgagagaagatgacaagaatgggcattatgtttttgctgttggagataatctcacatctcgctataagatcaatgcaaaaatgggagaaggtacctttggtcaggtgttggagtgttgggataaggaaacaaaagaaatggtggccataaagatcatcaggggcattaagaagtacagggatgctgcaatgatcgaaattggcatgcttgagaagcttggtaaatatggtgaaagcagatccaggtgagtttgctggttcagttagcacctatatgcgtgcttacgttcataagattgcttgtatataagctggtctattttgcagttgtgttcaaattcggaactggtttgactatcgtaaccatatctgtattgtaagtacattgttagattatgacaattatgcactgacccaaaaatataaccatatggtgcttaaacgttggtgaatttggattaatggtgagcaggtctttgagaggcttggaccaagcttatatgattttctgaggaaaaacaattaccgctcattcccaattgccctagttcgggagtttgccaaacaactgttggaatgtatagcatgtgtgtgcacagttctttctattacccctcctgcactataatgcatatacattagttttgtgcattatctgtgctgcattgcagcctgtcattaatccattactcatgcttgtactccagggagtatctaacatcatgtgatgtttttgtatttaccctctctctgtaatgtgttgcagttatgcatgaattgcgcctcatacacactgatttaaagcctgagaacattctccttgtttctccggagtacattaaagtgcctgattacaaagtatatcttgttcttttatatttaattcacctacccaagatttaccttgtgctatgcttgttcttttattgtgtattggtagcgggggtagaaaaatatggtactgatcctcttttttcatttgccaggtctcatcccaatccccaaaggaggggtcctattacaagcagttgcccaagtctagtgctatcaaggtgattgatttcggtagcactacttatgatcaacatgatcagagttatgtggtatcgacgaggcactatcgggctccagaagttatattgggtatctatcgtgtctattgaaaagcttttcctagttcagctcgatttggtgatattttatgattgtgtggatcttgttcaggacatggatggagttacccatgtgatatctggagtgttggttgtattcttgttgagctttgcacgggtgaggcgttattccagactcacgaaaacttggaacatctggctatgatggagagagttcttggacctttgccgtaccatatgcttaagagggcagatcggcactctgacaaatacatcagaaaaggacgcctgaattggcctgagggttgcacctcgcgggagagcatgaaagctgtgatgaaattgtccaggcttcagaatctggtgatgcaaaatgtggaccaggctgcgggagatttcattggtcttttgcaagggctcctgaagtatgacccagcaagccgtttaacagcacgagaagcactgaggcatcctttcttcaccgaagggtttgggcgaagaagatgatacgtccttgaagcagaccttgtttgtcctctgtctctgaccaaactgtatataaagctgaaatggagctgtttcaatcttgtttgaaacgtcgtgtaactatagttgtatcacaagggaagtcagacggatactttttactaatcctgacttgtttgagttttgcaagccaattcaatgaaagtttgggttgaacagaatgtgttgcttgaaatattaaaac

SEQ ID NO: 123126 - DNA, 2186 bp, Zea Mays
ccaccctctcgcctcgccataaagggcgggggccgctagggttagcgcatcggaatcaatcgtgtttctcgcctccacgccgagaccaatccagccaccgccaactctttgcctcgcctctccgattcgagggaacgatggagtgcgtcaccgatatgcccctcgcgacgctggacagccgaccgcgcaagcggcagcggctcgggtgggacgtcgttcccgccgagatgtatcaggttacgcggccgcggcttggttgggacgtcggccccgccgagatgaatcagtttgcactttgtggacaagaagttgtgaatgccttcagtgctgcagtgttgggcctatcttcaggttgtgtttcttctcaagtcaaccaagagcagcctcatgatggttcccctcctctgagagaagatgacaagaatgggcattatgtttttgctgttggagataatctcacatctcgctataagatcaatgcaaaaatgggagaaggtacctttggtcaggtgttggagtgttgggataaggaaacaaaagaaatggtggccataaagatcatcaggggcattaagaagtacagggatgctgcaatgatcgaaattggcatgcttgagaagcttggtaaatatggtgaaagcagatccaggtgagtttgctggttcagttagcacctatatgcgtgcttacgttcataagattgcttgtatataagctggtctattttgcagttgtgttcaaattcggaactggtttgactatcgtaaccatatctgtattgtaagtacattgttagattatgacaattatgcactgacccaaaaatataaccatatggtgcttaaacgttggtgaatttggattaatggtgagcaggtctttgagaggcttggaccaagcttatatgattttctgaggaaaaacaattaccgctcattcccaattgccctagttcgggagtttgccaaacaactgttggaatgtatagcatgtgtgtgcacagttctttctattacccctcctgcactataatgcatatacattagttttgtgcattatctgtgctgcattgcagcctgtcattaatccattactcatgcttgtactccagggagtatctaacatcatgtgatgtttttgtatttaccctctctctgtaatgtgttgcagttatgcatgaattgcgcctcatacacactgatttaaagcctgagaacattctccttgtttctccggagtacattaaagtgcctgattacaaagtatatcttgttcttttatatttaattcacctacccaagatttaccttgtgctatgcttgttcttttattgtgtattggtagcgggggtagaaaaatatggtactgatcctcttttttcatttgccaggtctcatcccaatccccaaaggaggggtcctattacaagcagttgcccaagtctagtgctatcaaggtgattgatttcggtagcactacttatgatcaacatgatcagagttatgtggtatcgacgaggcactatcgggctccagaagttatattgggacatggatggagttacccatgtgatatctggagtgttggttgtattcttgttgagctttgcacgggtgaggcgttattccagactcacgaaaacttggaacatctggctatgatggagagagttcttggacctttgccgtaccatatgcttaagagggcagatcggcactctgacaaatacatcagaaaaggacgcctgaattggcctgagggttgcacctcgcgggagagcatgaaagctgtgatgaaattgtccaggcttcagaatctggtgatgcaaaatgtggaccaggctgcgggagatttcattggtcttttgcaagggctcctgaagtatgacccagcaagccgtttaacagcacgagaagcactgaggcatcctttcttcaccgaagggtttgggcgaagaagatgatacgtccttgaagcagaccttgtttgtcctctgtctctgaccaaactgtatataaagctgaaatggagctgtttcaatcttgtttgaaacgtcgtgtaactatagttgtatcacaagggaagtcagacggatactttttactaatcctgacttgtttgagttttgcaagccaattcaatgaaagtttgggttgaacagaatgtgttgcttgaaatattaaaac

SEQ ID NO: 123127 - DNA, 2140 bp, Zea Mays
ccaccctctcgcctcgccataaagggcgggggccgctagggttagcgcatcggaatcaatcgtgtttctcgcctccacgccgagaccaatccagccaccgccaactctttgcctcgcctctccgattcgagggaacgatggagtgcgtcaccgatatgcccctcgcgacgctggacagccgaccgcgcaagcggcagcggctcgggtgggacgtcgttcccgccgagatgtatcaggttacgcggccgcggcttggttgggacgtcggccccgccgagatgaatcagtttgcactttgtggacaagaagttgtgaatgccttcagtgctgcagtgttgggcctatcttcaggttgtgtttcttctcaagtcaaccaagagcagcctcatgatggttcccctcctctgagagaagatgacaagaatgggcattatgtttttgctgttggagataatctcacatctcgctataagatcaatgcaaaaatgggagaaggtacctttggtcaggtgttggagtgttgggataaggaaacaaaagaaatggtggccataaagatcatcaggggcattaagaagtacagggatgctgcaatgatcgaaattggcatgcttgagaagcttggtaaatatggtgaaagcagatccaggtgagtttgctggttcagttagcacctatatgcgtgcttacgttcataagattgcttgtatataagctggtctattttgcagttgtgttcaaattcggaactggtttgactatcgtaaccatatctgtattgtaagtacattgttagattatgacaattatgcactgacccaaaaatataaccatatggtgcttaaacgttggtgaatttggattaatggtgagcaggtctttgagaggcttggaccaagcttatatgattttctgaggaaaaacaattaccgctcattcccaattgccctagttcgggagtttgccaaacaactgttggaatgtatagcatgtgtgtgcacagttctttctattacccctcctgcactataatgcatatacattagttttgtgcattatctgtgctgcattgcagcctgtcattaatccattactcatgcttgtactccagggagtatctaacatcatgtgatgtttttgtatttaccctctctctgtaatgtgttgcagttatgcatgaattgcgcctcatacacactgatttaaagcctgagaacattctccttgtttctccggagtacattaaagtgcctgattacaaagtctcatcccaatccccaaaggaggggtcctattacaagcagttgcccaagtctagtgctatcaaggtgattgatttcggtagcactacttatgatcaacatgatcagagttatgtggtatcgacgaggcactatcgggctccagaagttatattgggacatggatggagttacccatgtgatatctggagtgttggttgtattcttgttgagctttgcacgggtgaggcgttattccagactcacgaaaacttggaacatctggctatgatggagagagttcttggacctttgccgtaccatatgcttaagagggcagagtatgttccataccaatgcaagtctgaacatcaatgctgtgaggtctggtcgatatcttgtcttactaatccttgtttgtagtcggcactctgacaaatacatcagaaaaggacgcctgaattggcctgagggttgcacctcgcgggagagcatgaaagctgtgatgaaattgtccaggcttcagaatctggtgatgcaaaatgtggaccaggctgcgggagatttcattggtcttttgcaagggctcctgaagtatgacccagcaagccgtttaacagcacgagaagcactgaggcatcctttcttcaccgaagggtttgggcgaagaagatgatacgtccttgaagcagaccttgtttgtcctctgtctctgaccaaactgtatataaagctgaaatggagctgtttcaatcttgtttgaaacgtcgtgtaactatagttgtatcacaagggaagtcagacggatactttttactaatcctgacttgtttgagttttgcaagccaattcaatgaaagtttgggttgaacagaatgtgttgcttgaaatattaaaac

SEQ ID NO: 123128 - DNA, 1783 bp, Zea Mays
ccaccctctcgcctcgccataaagggcgggggccgctagggttagcgcatcggaatcaatcgtgtttctcgcctccacgccgagaccaatccagccaccgccaactctttgcctcgcctctccgattcgagggaacgatggagtgcgtcaccgatatgcccctcgcgacgctggacagccgaccgcgcaagcggcagcggctcgggtgggacgtcgttcccgccgagatgtatcaggttacgcggccgcggcttggttgggacgtcggccccgccgagatgaatcagtttgcactttgtggacaagaagttgtgaatgccttcagtgctgcagtgttgggcctatcttcaggttgtgtttcttctcaagtcaaccaagagcagcctcatgatggttcccctcctctgagagaagatgacaagaatgggcattatgtttttgctgttggagataatctcacatctcgctataagatcaatgcaaaaatgggagaaggtacctttggtcaggtgttggagtgttgggataaggaaacaaaagaaatggtggccataaagatcatcaggggcattaagaagtacagggatgctgcaatgatcgaaattggcatgcttgagaagcttggtaaatatggtgaaagcagatccagttgtgttcaaattcggaactggtttgactatcgtaaccatatctgtattgtctttgagaggcttggaccaagcttatatgattttctgaggaaaaacaattaccgctcattcccaattgccctagttcgggagtttgccaaacaactgttggaatgtatagcatttatgcatgaattgcgcctcatacacactgatttaaagcctgagaacattctccttgtttctccggagtacattaaagtgcctgattacaaagtctcatcccaatccccaaaggaggggtcctattacaagcagttgcccaagtctagtgctatcaaggtgattgatttcggtagcactacttatgatcaacatgatcagagttatgtggtatcgacgaggcactatcgggctccagaagttatattgggacatggatggagttacccatgtgatatctggagtgttggttgtattcttgttgagctttgcacgggtgaggcgttattccagactcacgaaaacttggaacatctggctatgatggagagagttcttggacctttgccgtaccatatgcttaagagggcagagtatgttccataccaatgcaagtctgaacatcaatgctgtgaggtctggtcgatatcttgtcttactaatccttgtttgtagtcggcactctgacaaatacatcagaaaaggacgcctgaattggcctgagggttgcacctcgcgggagagcatgaaagctgtgatgaaattgtccaggcttcagaatctggtgatgcaaaatgtggaccaggctgcgggagatttcattggtcttttgcaagggctcctgaagtatgacccagcaagccgtttaacagcacgagaagcactgaggcatcctttcttcaccgaagggtttgggcgaagaagatgatacgtccttgaagcagaccttgtttgtcctctgtctctgaccaaactgtatataaagctgaaatggagctgtttcaatcttgtttgaaacgtcgtgtaactatagttgtatcacaagggaagtcagacggatactttttactaatcctgacttgtttgagttttgcaagccaattcaatgaaagtttgggttgaacagaatgtgttgcttgaaatattaaaac

SEQ ID NO: 123129 - DNA, 1421 bp, Zea Mays
ccaccctctcgcctcgccataaagggcgggggccgctagggttagcgcatcggaatcaatcgtgtttctcgcctccacgccgagaccaatccagccaccgccaactctttgcctcgcctctccgattcgagggaacgatggagtgcgtcaccgatatgcccctcgcgacgctggacagccgaccgcgcaagcggcagcggctcgggtgggacgtcgttcccgccgagatgtatcaggttacgcggccgcggcttggttgggacgtcggccccgccgagatgaatcagtttgcactttgtggacaagaagttgtgaatgccttcagtgctgcagtgttgggcctatcttcaggttgtgtttcttctcaagtcaaccaagagcagcctcatgatggttcccctcctctgagagaagatgacaagaatgggcattatgtttttgctgttggagataatctcacatctcgctataagatcaatgcaaaaatgggagaaggtacctttggtcaggtgttggagtgttgggataaggaaacaaaagaaatggtggccataaagatcatcaggggcattaagaagtacagggatgctgcaatgatcgaaattggcatgcttgagaagcttggtaaatatggtgaaagcagatccaggtctcatcccaatccccaaaggaggggtcctattacaagcagttgcccaagtctagtgctatcaaggtgattgatttcggtagcactacttatgatcaacatgatcagagttatgtggtatcgacgaggcactatcgggctccagaagttatattgggacatggatggagttacccatgtgatatctggagtgttggttgtattcttgttgagctttgcacgggtgaggcgttattccagactcacgaaaacttggaacatctggctatgatggagagagttcttggacctttgccgtaccatatgcttaagagggcagaaaaaggacgcctgaattggcctgagggttgcacctcgcgggagagcatgaaagctgtgatgaaattgtccaggcttcagaatctggtgatgcaaaatgtggaccaggctgcgggagatttcattggtcttttgcaagggctcctgaagtatgacccagcaagccgtttaacagcacgagaagcactgaggcatcctttcttcaccgaagggtttgggcgaagaagatgatacgtccttgaagcagaccttgtttgtcctctgtctctgaccaaactgtatataaagctgaaatggagctgtttcaatcttgtttgaaacgtcgtgtaactatagttgtatcacaagggaagtcagacggatactttttactaatcctgacttgtttgagttttgcaagccaattcaatgaaagtttgggttgaacagaatgtgttgcttgaaatattaaaac

SEQ ID NO: 123130 - DNA, 1879 bp, Zea Mays
ccaccctctcgcctcgccataaagggcgggggccgctagggttagcgcatcggaatcaatcgtgtttctcgcctccacgccgagaccaatccagccaccgccaactctttgcctcgcctctccgattcgagggaacgatggagtgcgtcaccgatatgcccctcgcgacgctggacagccgaccgcgcaagcggcagcggctcgggtgggacgtcgttcccgccgagatgtatcaggttacgcggccgcggcttggttgggacgtcggccccgccgagatgaatcagtttgcactttgtggacaagaagttgtgaatgccttcagtgctgcagtgttgggcctatcttcaggttgtgtttcttctcaagtcaaccaagagcagcctcatgatggttcccctcctctgagagaagatgacaagaatgggcattatgtttttgctgttggagataatctcacatctcgctataagatcaatgcaaaaatgggagaaggtacctttggtcaggtgttggagtgttgggataaggaaacaaaagaaatggtggccataaagatcatcaggggcattaagaagtacagggatgctgcaatgatcgaaattggcatgcttgagaagcttggtaaatatggtgaaagcagatccaggtgagtttgctggttcagttagcacctatatgcgtgcttacgttcataagattgcttgtatataagctggtctattttgcagttgtgttcaaattcggaactggtttgactatcgtaaccatatctgtattgtaagtacattgttagattatgacaattatgcactgacccaaaaatataaccatatggtgcttaaacgttggtgaatttggattaatggtgagcaggtctttgagaggcttggaccaagcttatatgattttctgaggaaaaacaattaccgctcattcccaattgccctagttcgggagtttgccaaacaactgttggaatgtatagcatttatgcatgaattgcgcctcatacacactgatttaaagcctgagaacattctccttgtttctccggagtacattaaagtgcctgattacaaagtctcatcccaatccccaaaggaggggtcctattacaagcagttgcccaagtctagtgctatcaaggtgattgatttcggtagcactacttatgatcaacatgatcagagttatgtggtatcgacgaggcactatcgggctccagaagttatattgggacatggatggagttacccatgtgatatctggagtgttggttgtattcttgttgagctttgcacgggtgaggcgttattccagactcacgaaaacttggaacatctggctatgatggagagagttcttggacctttgccgtaccatatgcttaagagggcagatcggcactctgacaaatacatcagaaaaggacgcctgaattggcctgagggttgcacctcgcgggagagcatgaaagctgtgatgaaattgtccaggcttcagaatctggtgatgcaaaatgtggaccaggctgcgggagatttcattggtcttttgcaagggctcctgaagtatgacccagcaagccgtttaacagcacgagaagcactgaggcatcctttcttcaccgaagggtttgggcgaagaagatgatacgtccttgaagcagaccttgtttgtcctctgtctctgaccaaactgtatataaagctgaaatggagctgtttcaatcttgtttgaaacgtcgtgtaactatagttgtatcacaagggaagtcagacggatactttttactaatcctgacttgtttgagttttgcaagccaattcaatgaaagtttgggttgaacagaatgtgttgcttgaaatattaaaac

SEQ ID NO: 123131 - DNA, 1537 bp, Zea Mays
ccaccctctcgcctcgccataaagggcgggggccgctagggttagcgcatcggaatcaatcgtgtttctcgcctccacgccgagaccaatccagccaccgccaactctttgcctcgcctctccgattcgagggaacgatggagtgcgtcaccgatatgcccctcgcgacgctggacagccgaccgcgcaagcggcagcggctcgggtgggacgtcgttcccgccgagatgtatcaggttacgcggccgcggcttggttgggacgtcggccccgccgagatgaatcagtttgcactttgtggacaagaagttgtgaatgccttcagtgctgcagtgttgggcctatcttcaggttgtgtttcttctcaagtcaaccaagagcagcctcatgatggttcccctcctctgagagaagatgacaagaatgggcattatgtttttgctgttggagataatctcacatctcgctataagatcaatgcaaaaatgggagaaggtacctttggtcaggtgttggagtgttgggataaggaaacaaaagaaatggtggccataaagatcatcaggggcattaagaagtacagggatgctgcaatgatcgaaattggcatgcttgagaagcttggtaaatatggtgaaagcagatccagttatgcatgaattgcgcctcatacacactgatttaaagcctgagaacattctccttgtttctccggagtacattaaagtgcctgattacaaagtctcatcccaatccccaaaggaggggtcctattacaagcagttgcccaagtctagtgctatcaaggtgattgatttcggtagcactacttatgatcaacatgatcagagttatgtggtatcgacgaggcactatcgggctccagaagttatattgggacatggatggagttacccatgtgatatctggagtgttggttgtattcttgttgagctttgcacgggtgaggcgttattccagactcacgaaaacttggaacatctggctatgatggagagagttcttggacctttgccgtaccatatgcttaagagggcagatcggcactctgacaaatacatcagaaaaggacgcctgaattggcctgagggttgcacctcgcgggagagcatgaaagctgtgatgaaattgtccaggcttcagaatctggtgatgcaaaatgtggaccaggctgcgggagatttcattggtcttttgcaagggctcctgaagtatgacccagcaagccgtttaacagcacgagaagcactgaggcatcctttcttcaccgaagggtttgggcgaagaagatgatacgtccttgaagcagaccttgtttgtcctctgtctctgaccaaactgtatataaagctgaaatggagctgtttcaatcttgtttgaaacgtcgtgtaactatagttgtatcacaagggaagtcagacggatactttttactaatcctgacttgtttgagttttgcaagccaattcaatgaaagtttgggttgaacagaatgtgttgcttgaaatattaaaac

SEQ ID NO: 123132 - DNA, 432 bp, Zea Mays
atgccgtcgtcggcccttctcttcctgctcgtcgcccacctcgccgtcggcgagcccacgaccctcgctgccacgccgtcgacgctgaccaagtcagaccacgcaatcaccctccggtggtcgaacctccccgacccgagcccactcgactactccccgccgtcgtccgccgacctcgactacctcggcttcctcttgctcaactcctccgcctcctgggctacgggtgccgacagcctcacgctcccgcgcctgcccgaccttcgcgccccctaccagttacgcctgttccgggggctaccgccgccagtcgagcgctccaagggtccgctcgttgaccaggacggggacccggccgctccccaacgccggcaccggcgccgccgtctccggcaatgtggcctacgagggatctggcgcgcggcccgctga

SEQ ID NO: 123133 - DNA, 2132 bp, Zea Mays
cgtcatcttcgcacacagcttcagctagctagctcatcatctttgcacgcgtacgtacgtcgatctactaccaagtcacggccagcacactgatcacctgctgacagagtgatcgatcgagcgatgacgacgcgcgcgctcgtggccatggcgctgcgcttcctccgcgagtacgtgcgggcgtcggacctggccgtggccgccgcggtgctcttcgcgtgcagcgcagccaggagccggctgtcgtcccgcccgggcgagccgatgctgtggccggtggtcggcatcatcccgacgctcttcgcgcacctcgcggccggcgacgtctacgactggggcgcggcggtgctgctgggccggtcgcggggcacgttcgcgtaccgcgggacgtggggcgggggctcctcgggcgtcgtcacctccgtgccggccaacgtggagcacgtcctcaaggccaacttcgacaactaccccaaagggccctactaccgggagcggttcgcggagctgctcggcggtggcatcttcaacgccgacggcgactcgtggcgcgcgcagcggaaggccgccagcgccgagatgcactccgcgcggttcgtccagttctcggcgggcaccgtcgagcgcctggtgcgccgcgagctgctgccgctgctggaggcgctcagcggacgaggggggccagagagcgcggcggcggcggtggacctgcaggacgtgctgcttcgctttgcgttcgacaacatctgcgccgccgccttcggggtggaggccgggtgcctggccgacgggctccgcgacgtgccgttcgcgcgcgcgttcgagcgggccacggagctctcgctcacccgcttctacacgccgcccttcgtctggaagtccaagcggctcctcggcgtcggcagcgagcgcgcgctcgtggaggccgcccgcgccgtgcggaagttcgccgagcggaccgtcgccgaccgccgcgccgagctgcgcaaggtgggggacctggccggccgcttcgacctcctctcgcggctcatgtcgtcgccccctcccgccggctactccgacgagttcctgcgtgacttctgcatcagcttcatcctcgcgggccgcgacaccagctccgtcgcgctcacctggttcttctggctcctcgcctcccacccgcacgtggaggcccgcgtcctcgacgacgtcgcccgcggcggcggcgacgtcagcgccatggactacctccacgcggccctgaccgagtccatgcgcctgtacccgccggtgcccgtcgacttcaaggaggccctggaggacgacgtgctcccggacggcacgctggtgcgcgcgcggcagcgggtgatctactacacgtacgccatgggacgggacaaggccacctggggccccgactgcctggagttccgcccggagcgctggctgagcaagagcggcgcgttcgcgggcggcgccgagagcccctacaagtacgtggtgttcaatgcggggccgaggctgtgcgtcggcaagcgcttcgcgtacacgcagatgaagatggcggcggcggcggtgctggcgcggttccgggtggaggtgctgccggggcaggaggtgaagcccaagctcaacaccacgctctatatgaagaacgggctcatggtgcgcttcgttcgcagggagcagcggcacgagctcggccaccctctgcctgctgcagctgcagatgcaggggaagattgaagaagatcagttggaggcccctttttcacgggatgaagcgcaacatcaccattcacccgggaaagaaccaaactccgggcggaagacgtccaatgcgcaaatattaatatgaatatatgaatgggtgaatgagcccatgcatggatatatattgtggcatacttgtgctatgtacttcctgttcctctgtgtgtacgtgtatcgtggtaatgccgtccagatcccgatgaaaaatcactttgtcgtgtgttccaagaaacgagtgtacatttgctccgtctgtttgaaattacaaacgttatttaatacttactccgttttaatttaagatttgtttaactttttttatcaaaattgatcaactcgttttattcaaaaaaaattgctaaaaacaaaaaatgaaa

SEQ ID NO: 123134 - DNA, 2043 bp, Zea Mays
cgtcatcttcgcacacagcttcagctagctagctcatcatctttgcacgcgtacgtacgtcgatctactaccaagtcacggccagcacactgatcacctgctgacagagtgatcgatcgagcgatgacgacgcgcgcgctcgtggccatggcgctgcgcttcctccgcgagtacgtgcgggcgtcggacctggccgtggccgccgcggtgctcttcgcgtgcagcgcagccaggagccggctgtcgtcccgcccgggcgagccgatgctgtggccggtggtcggcatcatcccgacgctcttcgcgcacctcgcggccggcgacgtctacgactggggcgcggcggtgctgctgggccggtcgcggggcacgttcgcgtaccgcgggacgtggggcgggggctcctcgggcgtcgtcacctccgtgccggccaacgtggagcacgtcctcaaggccaacttcgacaactaccccaaagggccctactaccgggagcggttcgcggagctgctcggcggtggcatcttcaacgccgacggcgactcgtggcgcgcgcagcggaaggccgccagcgccgagatgcactccgcgcggttcgtccagttctcggcgggcaccgtcgagcgcctggtgcgccgcgagctgctgccgctgctggaggcgctcagcggacgaggggggccagagagcgcggcggcggcggtggacctgcaggacgtgctgcttcgctttgcgttcgacaacatctgcgccgccgccttcggggtggaggccgggtgcctggccgacgggctccgcgacgtgccgttcgcgcgcgcgttcgagcgggccacggagctctcgctcacccgcttctacacgccgcccttcgtctggaagtccaagcggctcctcggcgtcggcagcgagcgcgcgctcgtggaggccgcccgcgccgtgcggaagttcgccgagcggaccgtcgccgaccgccgcgccgagctgcgcaaggtgggggacctggccggccgcttcgacctcctctcgcggctcatgtcgtcgccccctcccgccggctactccgacgagttcctgcgtgacttctgcatcagcttcatcctcgcgggccgcgacaccagctccgtcgcgctcacctggttcttctggctcctcgcctcccacccgcacgtggaggcccgcgtcctcgacgacgtcgcccgcggcggcggcgacgtcagcgccatggactacctccacgcggccctgaccgagtccatgcgcctgtacccgccggtgcccgtcgacttcaaggaggccctggaggacgacgtgctcccggacggcacgctggtgcgcgcgcggcagcgggtgatctactacacgtacgccatgggacgggacaaggccacctggggccccgactgcctggagttccgcccggagcgctggctgagcaagagcggcgcgttcgcgggcggcgccgagagcccctacaagtacgtggtgttcaatgcggggccgaggctgtgcgtcggcaagcgcttcgcgtacacgcagatgaagatggcggcggcggcggtgctggcgcggttccgggtggaggtgctgccggggcaggaggtgaagcccaagctcaacaccacgctctatatgaagaacgggctcatggtgcgcttcgttcgcagggagcagcggcacgagctcggccaccctctgcctgctgcagctgcagatgcaggtgggtgctccacgtatatatgtgtgtggttattacaaatcacaacctcatggatatatatattcatctgttttttcgttgaacaggggaagattgaagaagatcagttggaggcccctttttcacgggatgaagcgcaacatcaccattcacccgggaaagaaccaaactccgggcggaagacgtccaatgcgcaaatattaatatgaatatatgaatgggtgaatgagcccatgcatggatatatattgtggcatacttgtgctatgtacttcctgttcctctgtgtgtacgtgtatcgtggtaatgccgtccagatcccgatg

SEQ ID NO: 123135 - DNA, 1445 bp, Zea Mays
acggaacaaccaacttgccagaggacgacacgacccaggccacagaccctgccccgccggcaccgaacggctactgtaaatgtcgtgaccgtctcgtccccgtccagtccaccttttcctcctctccgactccaccgccgtcacgccatctcgccgggggcggaaccccgaccgcgagtatggggaacatcttcgtgaagaagcccaagatcactgacgtcgatagggccatcctcaccctcaagacgcagcgccgcaagctcgcccagtttcaacagcagcttgagaaggtaatcgaagcagaaaaggaagctgcacggcagttggttcaacagaagaagagagacagagctttgattgctctgaagaagaagaaagctcaggaagagctgttgaaacaagttgacacatggcaaatgaatgttgaacaacagctggcagatattgaactagcaagtaaacaaaaggctgtatttgaaagcctgaaggctggaaatgctgccctgaagtctatacagaatgagataaacattgatgatgtccaaaagctgatggatgacacagccgaggctaaggcttatcaagatgaaataaatgctgttctgggcgagcagctttcagctgaggatgaagaagctgtcatggccgagtttgaaaatttggaagctcagcttgccgttgagtctttgccagacgctcctgctaccgaagtaaggcctgaagagaaaacgaaagctccggctgacacagaagctgctcctgaggacatcgatgacgttattgagcttcctgatgtgcctacgaaagtgccagagaggcctgaagctccagaaaaaaacaaagttttggaggagccgctacctgcataagtggatggagctgagatgaatacggcacacttttagtttgcaggaaattgtaacatacccaccatttcattgtactatctcattctcagaatttcatcgtgtacagcaagaaaaatttgttgtctttgactatcagttgtcaccagtttggatttctcagtgcccgtttattatcctatcctacggggtaaacataatatttttccattgtgtttctttgtaaggcagaaatgctgaagtctgcaagcacataccttgttccgtatgaatatatacgtgtgttttttttgtgccaaagctgtaaaatgtacggcatttgtaggtgccatttgttgcttgaatttaattggtggagcgtgtaagatagaatactcaaatcagagcagtctgtctgtatcgagtacattgaattgcctatataaggtgcctttttttgtttttgcagttctttttctttctccctttgggtcactatatatgcatcctagtgtacaatttcgtttcattataaacaaaaaaaaggaactgttgttttgcaccagatacacaggtcataagcagcaaaaaaaaaaaaga

SEQ ID NO: 123136 - DNA, 1585 bp, Zea Mays
gtggcacccttccctgccgtgagctacggatggtccgtcatcctcgcttgtgtcgaattccggccgtcctctgtcgcgccgtgggatcgtgtcagattcggtgtccgtctcgcgtcgtcgcgcgggagctgctgtaggtggcaattgggatctggggttggatagagcggcgtcgatcgatgaatcggagtaacttgcgagtttctagttttccagggaattatcgtgtcttgatcggttggtttcgcatagggtgccctgattggagtcgtgtcacagcaccgatccaggtcgatatatatgcctcgtgatcgggagtgaagaaaaattctctccttgtaatattccatgctatagtccagccaatcaacgttataactgctaattttgttcgtacagacatcaatacatcagtttctggagcgcatttcaagactcgtttttgctttcgccacaccttacagtgtattacaataattggtgttggatttgtgaaatttgcttgctagtacagacagtttaacttgatgtacttggatgttatagttcatcttttgattctagcttaatacaacatgttgtcatcaggtgctgactatcctgattagatggtcatgatcctcagttcatcacatttaatcattgcaatatcacctctgctaaaaatataggagtgtatttatgtatgcttctcttcccttccagcttgagaaggtaatcgaagcagaaaaggaagctgcacggcagttggttcaacagaagaagagagacagagctttgattgctctgaagaagaagaaagctcaggaagagctgttgaaacaagttgacacatggcaaatgaatgttgaacaacagctggcagatattgaactagcaagtaaacaaaaggctgtatttgaaagcctgaaggctggaaatgctgccctgaagtctatacagaatgagataaacattgatgatgtccaaaagctgatggatgacacagccgaggctaaggcttatcaagatgaaataaatgctgttctgggcgagcagctttcagctgaggatgaagaagctgtcatggccgagtttgaaaatttggaagctcagcttgccgttgagtctttgccagacgctcctgctaccgaagtaaggcctgaagagaaaacgaaagctccggctgacacagaagctgctcctgaggacatcgatgacgttattgagcttcctgatgtgcctacgaaagtgccagagaggcctgaagctccagaaaaaaacaaagttttggaggagccgctacctgcataagtggatggagctgagatgaatacggcacacttttagtttgcaggaaattgtaacatacccaccatttcattgtactatctcattctcagaatttcatcgtgtacagcaagaaaaatttgttgtctttgactatcagttgtcaccagtttggatttctcagtgcccgtttattatcctatcctacggggtaaacataatatttttccattgtgtttctttgtaaggcagaaatgctgaagtctgcaagcacataccttgttccgtatgaatatatacgtgtgttttttttgtg

SEQ ID NO: 123137 - DNA, 934 bp, Zea Mays
atggaaagctcctctgtcatgccctgcccctctgctcaactccggtcgcgcgcctctccttcggattgtgccctgtgtttgtccagcctgcttgtagctcgccgtcgacctccccggcacgtccctccctcgccttggcgccgctgcggactcgaccgacggctggggccggtggatgcctcgccggggtgctgtgctgctaccaagccgccgctccaatggccgtggagagctctggcaagccaccggacggttggacagaactccaccatcggcgccgtgttaggtagtcgccttgcctctttgtcggacttctcggaattctttacccatgctcggatggcgccgccgcagccaacactttgctccgcgccgtggccgccctcgttcccgccttctctctcggaaggaacccttagtaacacatggggtgttacactggtggcctgggatgatgccatggaacgatgtgggactagggcgcaacttggagcttgcgatccccaagccgtcaaacgtctcaacttacatgcaattcaaggtggtctataaacaaggcaaagcaaatttggtggcagatgcactctctagagtgggatatcttatggctaagtaggtggttagtgaagtgcaacctctatggatccaagagattgtaaactcttatgtaacagattcagaagcacatgctttttggttagactttgtgtccacaatcctaatgaccaaggattttggctgcacaagggcattatcaagaagcataagctgatttgggtgggagaaaactctgctctaggaaccaagataattgttgcactacatgatagtgtgcttgggtacactcaggagtctaggctacatatcatcgagttaaaaaattatgtacttggagaggactgaaggcggatgtagatgattttgtgaaacaatg

SEQ ID NO: 123138 - DNA, 795 bp, Zea Mays
atggcgctccagccgcgaaagtgggcagcctactggatcttggcatctcaccgtcgctgctcacttccactccatctgctgtcagaggcgcttaggatgccccaacccgctgcttttgtctccgtgcagccgtccgatggtcaacccacaccgagcaacgtctcgaacaagaagatgaagcacggtggcgaggcactaatcttggatggcgtcggggaggtcgccgtcaccatcggtcgcaactcgcaacagcctctctccacaaccctccacccgagccataattaccaacaagatgatttccataaaattgttgcacgaactttgagccaaggatcaacaccgatgagcatggatttccatccacttcaacaaactcttcttcttgttggtaccaatgttggcgacattggattgtgggatgttggtaccaaagacagactcgttgtaaggaacttcaaagtctgggacctcagtaaatgtataatgattctccaggcatcactggttaaggatccagctgtgtcagttaatcacataatatggagtcttgatggaaccttgtttggtgttgcttattcaaggcatattgtacaaatttattcctataatggtggcgacgatattagacaacactcggagattgatgcacatattggtggtgtaaatgacattgcatttggattctaccttgcttgggcaacacaacattttcactcttcgtgcttcttgaacttcttccttcatcgacatcctaaagagttctgctactatcactggttcactggatattaa

SEQ ID NO: 123139 - DNA, 2066 bp, Zea Mays
atatctatatctggattgttccggccctcccccttcttcgattttgtgggcggcttctcttttttttcttcctgttgatgtgcgaatttagaggggataagagcttttggggggaatctgatggaatccgatcgattttctcgccgttcttggtcgatctgtcggggaagaccgagtcctctgcttctgctctcatccatctgtagagtgcaacatgcagtgccccatggacactgctgctagtggaacctcgccagtgatgcaattccatagcaatgctgatgagtctatcgcccattcatctccattggcaacattaatacaacgttcacagcgccattgctatggggatggatccccaggcgaatttccccttgctgtgagcccctccattgttctccatgtgctctcatcttgtgatctaggtccgaaagatctcgccaatctggaggctacatgcgtatttttcggcaaacctgcaagttttgcaccagactttgcattgtcacttccggagcttgcggcatttgatatgtgccagaaaaggaccatgtttaagcagatgaagcaagaagatcaggagtgtctgaaacaacggtgtggaggctcttggaagcatgttcttgggtacattctggttagggagaagaatggttctcgggtgattgccgggccaggccatagcatcattatcacctcaaatggagatgtatattcgtttggagcaaactgctccggtcagcttggccttggggattcagaagaccggttcaagccatgtgttattaggtctctacaaggcatcagaatcacacaagctgcagttggttcgagatgcacaatgcttgtgagtgacacaggaagcgtctactcatttgggaaggaggatttcagggtcgcagaactagttgacggtgctcattttcagatcacaactcctaggattgaggagtcactgaagggtgtgtttgtagttcaagcagccatagggggttacttctctgcagttctgtccagagagggtcgagtgtacaccttctcatggggcaaagccgagaggcttggccacagttcggatccttcagatgtcgagcctcgtcttctccctggactcgaggatgttcctgtcgcatacatctctgcaggaaattgctaccttcttatgctggcctaccagccaaatggaatgtctgtgtactctgtaggctgtggtttagggggcaagcttgggcatggatgcaaaaccaacaatgggatgcccaaattggttgaacagttccagtccatgagcttcaaaccagtttcaatagcagctggcacttggcatgccgtggcccttggcgctgacgggcgtgtgtgcacctggggctggggccacaccggttgtctggggcacggcgatgaggagtgcagggctgttcccacagtggtagaaggattacgcgacgtgaaggcggttcatgtctccacgggtgaatacacgacgtttgtcgtcgctgagaatggggacgtctactcctttggatccggtgaatccttggctttccagttggacgatgaggcggaggaggaaccggattcctcgacaccgagcatagtcagctcgctcaaggatctgaacaagaaggtcgtgcagatcagccacacaaacgcctcgtactggatgaactcggaaatgggccacccgcacacatttgcggtcatggactccggcgacgtctgtgccttcggaggaggggtcagaggccagctcggcgtgaagctgcatgagggcgtcgaaaaagtgcgcgtcccgatgaatgttccaatcggtctcaattgatccccttccaccagcattcgcctgaacattttgcgatggcactctgcttccgcgaacattctgtttgggccttcagaccagtggcgtaagcttagacatgctaggatgtgaatattagggatgatttgtttttatctgaactcttcgaagtgatatagatcgtctgcataaagtttacctaatccgtgaccgctcttttatccaaaccatttaaagcacctatgtctctagttagatttcggta

SEQ ID NO: 123140 - DNA, 2798 bp, Zea Mays
cttttctacttccttagctaacttcccagccccgacaccttggccgccgctccgtgcgcacccagttgctgaggttgcaacgctgcagccggcgaggatcggatgaaccaccaacccctcctataaatcctagtacgatgcctcgatcgggcctatatctatatctggattgttccggccctcccccttcttcgattttgtgggcggcttctcttttttttcttcctgttgatgtgcgaatttagaggggataagagcttttggggggaatctgatggaatccgatcgattttctcgccgttcttggtcgatctgtcggggaaggtaagatttgttcatggtttgtgggggatttggctggatttcgaaggtttggagcggccatggtggtgactggtgagcggatatggggatttttggtgatcgagtggggaatcggtctgttggatgtctttaaaacgggattttgtgatactgtaggaatttttcggtggaaccatagcttttgttgcgatataccgctattgaccacggatcatcatgttttaaaatctttttttttcctcagaggtatgggatgatcgagtgctaaacgctccgttaaggtctgatctgcgtcgatcttgatttcaggatgcgatctattgttaaatgacggatgcattttcctgccatcctttgtgttgctaagccgtagtttattctgatgctaatttgttagggagactatatgatcagtctgtcttctgcagacagcaacttagatgaaacgcagctatgaatgtgatcatctaactctttgttgctgctgctgttctccttccagtttgtgtaaaacctgcacttgctgcacaatctatttgtcgaaagtgtgacggactgtcatttgtttctcttatcagaccgagtcctctgcttctgctctcatccatctgtagagtgcaacatgcagtgccccatggacactgctgctagtggaacctcgccagtgatgcaattccatagcaatgctgatgagtctatcgcccattcatctccattggcaacattaatacaacgttcacagcgccattgctatggggatggatccccaggcgaatttccccttgctgtgagcccctccattgttctccatgtgctctcatcttgtgatctaggtccgaaagatctcgccaatctggaggctacatgcgtatttttcggcaaacctgcaagttttgcaccagactttgcattgtcacttccggagcttgcggcatttgatatgtgccagaaaaggaccatgtttaagcagatgaagcaagaagatcaggagtgtctgaaacaacggtgtggaggctcttggaagcatgttcttgggtacattctggttagggagaagaatggttctcgggtgattgccgggccaggccatagcatcattatcacctcaaatggagatgtatattcgtttggagcaaactgctccggtcagcttggccttggggattcagaagaccggttcaagccatgtgttattaggtctctacaaggcatcagaatcacacaagctgcagttggttcgagatgcacaatgcttgtgagtgacacaggaagcgtctactcatttgggaaggaggatttcagggtcgcagaactagttgacggtgctcattttcagatcacaactcctaggattgaggagtcactgaagggtgtgtttgtagttcaagcagccatagggggttacttctctgcagttctgtccagagagggtcgagtgtacaccttctcatggggcaaagccgagaggcttggccacagttcggatccttcagatgtcgagcctcgtcttctccctggactcgaggatgttcctgtcgcatacatctctgcaggaaattgctaccttcttatgctggcctaccagccaaatggaatgtctgtgtactctgtaggctgtggtttagggggcaagcttgggcatggatgcaaaaccaacaatgggatgcccaaattggttgaacagttccagtccatgagcttcaaaccagtttcaatagcagctggcacttggcatgccgtggcccttggcgctgacgggcgtgtgtgcacctggggctggggccacaccggttgtctggggcacggcgatgaggagtgcagggctgttcccacagtggtagaaggattacgcgacgtgaaggcggttcatgtctccacgggtgaatacacgacgtttgtcgtcgctgagaatggggacgtctactcctttggatccggtgaatccttggctttccagttggacgatgaggcggaggaggaaccggattcctcgacaccgagcatagtcagctcgctcaaggatctgaacaagaaggtcgtgcagatcagccacacaaacgcctcgtactggatgaactcggaaatgggccacccgcacacatttgcggtcatggactccggcgacgtctgtgccttcggaggaggggtcagaggccagctcggcgtgaagctgcatgagggcgtcgaaaaagtgcgcgtcccgatgaatgttccaatcggtctcaattgatccccttccaccagcattcgcctgaacattttgcgatggcactctgcttccgcgaacattctgtttgggccttcagaccagtggcgtaagcttagacatgctaggatgtgaatattagggatgatttgtttttatctgaactcttcgaagtgatatagatcgtctgcataaagtttacctaatccgtgaccgctcttttatccaaaccatttaaagcacctatgtctctagttagatttcggta

SEQ ID NO: 123141 - DNA, 2028 bp, Zea Mays
cttttctacttccttagctaacttcccagccccgacaccttggccgccgctccgtgcgcacccagttgctgaggttgcaacgctgcagccggcgaggatcggatgaaccaccaacccctcctataaatcctaaccgagtcctctgcttctgctctcatccatctgtagagtgcaacatgcagtgccccatggacactgctgctagtggaacctcgccagtgatgcaattccatagcaatgctgatgagtctatcgcccattcatctccattggcaacattaatacaacgttcacagcgccattgctatggggatggatccccaggcgaatttccccttgctgtgagcccctccattgttctccatgtgctctcatcttgtgatctaggtccgaaagatctcgccaatctggaggctacatgcgtatttttcggcaaacctgcaagttttgcaccagactttgcattgtcacttccggagcttgcggcatttgatatgtgccagaaaaggaccatgtttaagcagatgaagcaagaagatcaggagtgtctgaaacaacggtgtggaggctcttggaagcatgttcttgggtacattctggttagggagaagaatggttctcgggtgattgccgggccaggccatagcatcattatcacctcaaatggagatgtatattcgtttggagcaaactgctccggtcagcttggccttggggattcagaagaccggttcaagccatgtgttattaggtctctacaaggcatcagaatcacacaagctgcagttggttcgagatgcacaatgcttgtgagtgacacaggaagcgtctactcatttgggaaggaggatttcagggtcgcagaactagttgacggtgctcattttcagatcacaactcctaggattgaggagtcactgaagggtgtgtttgtagttcaagcagccatagggggttacttctctgcagttctgtccagagagggtcgagtgtacaccttctcatggggcaaagccgagaggcttggccacagttcggatccttcagatgtcgagcctcgtcttctccctggactcgaggatgttcctgtcgcatacatctctgcaggaaattgctaccttcttatgctggcctaccagccaaatggaatgtctgtgtactctgtaggctgtggtttagggggcaagcttgggcatggatgcaaaaccaacaatgggatgcccaaattggttgaacagttccagtccatgagcttcaaaccagtttcaatagcagctggcacttggcatgccgtggcccttggcgctgacgggcgtgtgtgcacctggggctggggccacaccggttgtctggggcacggcgatgaggagtgcagggctgttcccacagtggtagaaggattacgcgacgtgaaggcggttcatgtctccacgggtgaatacacgacgtttgtcgtcgctgagaatggggacgtctactcctttggatccggtgaatccttggctttccagttggacgatgaggcggaggaggaaccggattcctcgacaccgagcatagtcagctcgctcaaggatctgaacaagaaggtcgtgcagatcagccacacaaacgcctcgtactggatgaactcggaaatgggccacccgcacacatttgcggtcatggactccggcgacgtctgtgccttcggaggaggggtcagaggccagctcggcgtgaagctgcatgagggcgtcgaaaaagtgcgcgtcccgatgaatgttccaatcggtctcaattgatccccttccaccagcattcgcctgaacattttgcgatggcactctgcttccgcgaacattctgtttgggccttcagaccagtggcgtaagcttagacatgctaggatgtgaatattagggatgatttgtttttatctgaactcttcgaagtgatatagatcgtctgcataaagtttacctaatccgtgaccgctcttttatccaaaccatttaaagcacctatgtctctagttagatttcggta

SEQ ID NO: 123142 - DNA, 857 bp, Zea Mays
tcgatggcgtgctgctcactgcgcaacacaaaacagcaagccggcagcgcgcggagccatcggggctgctgttttggatcggcaccgctgcgcagagacttggacgccacggctgcactccgagcaggggctccttgctgccgcaccagggaaaaggaggaaggggcgagcagcagcaggggaggaaagtcggctgggaggaagatgaacagggaggcgctgaaaagaaaaaaaaattctgggcgtcatccatagaagctgctgctgcctgcgctgaaccggatcgaaggggagctcggcgtgtgctacgggagatggccggctagagcagagggaatagggagctcggccatggagaggctgctggaatttctgggcgcctgcttgggggctcggctgggggatttttctgggcctccatgggagggagctagaaatcagggtgccatggggctctgcgcgtccagcagcaagggcgccgaacagagggaggaggggctcagccttggaggttgcagggagatggaaatcgctgctcgcctgcaggggacgcactggagagatggcgaccaggggaaactcgcgaccatggaagtcgcagggaaaaacaggggcgccagtgacctgctgttccatgaacgctggagcttgggggagggagagccgaggcgctgcgcggggaagaaaggcgccatggctggggcgtcggccaagggaaactgctccctgcagggagcgagcgccagggaggagggcaccatggtggccgaggggaggagctgagctccctgcgcttgctgctcgctggaggaagaagaaggcagaaaaagaaagtggcggctgaaaaaaagataggg

SEQ ID NO: 123143 - DNA, 1214 bp, Zea Mays
atggagtatgtggaggacataacttgttatccggtttgtgcctctgcttctggtgctattgcagaactcatcgagaatagttatgttccacctgactggctcattcttctgcaagtggttctgaaaagaataagtactgaagatgaaaatgagtctgctcttctgttcaagcttctaggcacaatagttgagggtggacaggaaaaagttgttgaacagggtttcgcagtcctcgtagcaatggtgcaagcttgggagagctctgcaccagatgaaaacaagacacctgaaaagaggttttggcagtcaggccagtctgctattgcccaaacaatttcattactgttacaaaaagcttggttgtttcaagctgacaatatggagggctctgcattaccacctctgtcatgcgtaaatgatgcttctgtgttacttgagtttgtcatgagttctgtcacttgcatggaagaaactgaaagtctgaaggtctttgagctggtagctacatgggctgacgctattgccaactgggactcctgggaggagatggaggatcagggtgttttcaacacaattaaagaagttgtcaatttccaccagagatttgacctcgacggtctcttcctgaaaacacactttgtgagatgtcattccactaggtattcattctgtcatggttctgttttaatacacgcaggtcactcaagcagatctgaagttattcttagtccatatgtggtgaggttggtcgttctttactccaaacacaatctcccttctgtatagctaaaagtttgcagaaatggcaccatcaagatcggtctggagaccaacaagatcatggacttcatcaagtttgacgtcggcaacgtggtcatgatgaccggtgggaggaacaccaggcgtgtaggagtgatcaagaacagggagaagcacaagggcagcttcgagaccatccacgtgctgcttagagatttttctatgtctagttttctcctatttgttgtataggaaaacatagaatggaattcaaatttggtggccgcaaaatgtggagacttgaattcatataaagttaggcttaacattagtgcaaacagttgtatttttgtttagatttagagtacacttatgtatgtgttgtttgacaatgcttatttatgatatattgaatggtacttatttatattatattaattataatgttgttcaat

SEQ ID NO: 123144 - DNA, 197 bp, Zea Mays
tttgagttcatgtgacttattttagaaacttgagctcacaagctttctcttatctggtctctatatggtggaattatatcattttataatctctgttcgttcagtcagtcgttgtgaactctcttctaatcgctcacttcattggccgtgttgtaccaagacatattgcatggagtaaacaataacatcagttagcc

SEQ ID NO: 123145 - DNA, 109 bp, Zea Mays
agttttttcacatacttttttataaaattaaattagtgaaactacaaaattcatgtattgatttatataataattctgcattccaaacagtgtacctaatgagttattt

SEQ ID NO: 123146 - DNA, 2101 bp, Zea Mays
ctccccacctgaccgccagcgccagccgcgcgtgcgttaatgctgccagtgtccggcacggcgccactcctcgctggcgcgcctcggctcgatgggcagcgagctgggcacccgtcatgcaggccgccactgcctgccagcaccgccgtccccatcgtcgtcaagactctccacagtaactacatcagagccaagttgcgcccggtgcaccgccgtggactcggtttgcctctggtgtgcacctgctccggcctccggaatccggatgcctgatgccagccagttcagccctacctgcgtggctgcgtctgcatctctgccgctgctgctgtcttcgcagctcgcaggccacggttcgtctgcaaaacactgggcggtgccggtgagcctaccaaacacgtcgatgagtttgacgtgtccaaagagtgtgggtacttcgttttgaaacccccaggccatgttgttgtaaacctgcgatccatccattcaaaggttgcttgctactttgactcgcattctttgctacaccggacctatatacatttctaataaaactaccaccaccagaacttcttaaaaatccaatttgaaatctgtccgtcgatacgaactctaccaacgagagagaatttctgttcgtgttcggttagtcttggtacaccagttccacccaccaccagagaaagcccatccccgttactaataagtcccgtccaaagctcgacaccgcaccgcatcgaccagctacacgaatcagacggcgccatggccggcacgtgcgcccacgtcgagttcctccgcgcgcagccggcttgggcgctggtgctggccgccgtgggcctgctcgtggccgtccgcgccgctgcccgcttcgcgctctgggtctacgccgcgttcctccgcccggggaagcccctgcgccgccgctacggcgcctgggccgtcgtgacgggcgccaccgacggcatcggccgcgccgtcgcgttccgcctcgccgcggccgggctcgggctcgtcctcgtcggccgcaacccggagaagctggccgccgtggccgccgagatcagggccaagcaccccaaggtccccgaggtgcgcaccttcgtgctcgacttcgccagcgaggggctcgcggccggcgtcgaggcgctcaaggactccatccgtggcctcgacgtcggcgtgctcgtcaacaacgccgggctgtcctacccgtacgcgcgctacttccacgaggtggacgaggagctgatgcgcagcctcatccgggtcaacgtcgagggcgtcacgcgggtcacgcacgccgtgctgccaggcatggtcgagcggaagcgcggcgccattgtcaacatcggctccggcgccgcctccgtcgtgccttctgatccgctctactccgtctacgccgccaccaaagcgtatgttgaccaattctcaagatgcctctatgttgagtacaagagcaagggtattgatgtgcaatgccaggtgcccctatacgtggcgacaaagatggcatctatcaggaagtcttccttcatggttccatctactgacacctatgctcgtgctgccgttcgtcacattggatacgagcctaggtgcacaccgtactggccacactctgtcgtgtggttcttgatctcgattcttcctgagtcccttatagacagcgtgcgcctgggcatgtgcattaagatccgcaagaaggggctggccaaggacgccaagaagaaggcactgtgattgatgtttcagaatgcaggtccagattcgaagatttcctcatcacctgtagtagacatgtgccttgctgtagtcactttattagctccggagtctgttaagaatcgagaatgccattgctccatccacggttatgatgttaaaaattattattcttcaattcaaaatgtaacactaatacgagtaatgatgaatgcaattaacttgaagaagttgtgtaactcaattatttttctggacaatttcacgtttttgtgaagtttctttgcccgcgcatgactttaaatggaattttctgtaaacagagtttgctgtttatggagaatttaatactctcccttccacatttgtcttg

SEQ ID NO: 123147 - DNA, 1476 bp, Zea Mays
agttttgtaaacccactgaacattcacgttcgcagcgcaggcatcgaacacaaagtagctggcggctcggcgcacctacagcgccgtataccgagtccgagaccacgactccacgagacgacacaaaccccagtttaggaacagttggaaaagagggagaaatggagaacggcggcggcaaaggcgacgttcccaacgatgcgaacgaacattgccctggaacgcagtcggaggaggcggggaaggcggatgcctgcgctgggtgccccaaccagcagatttgcgccaccgcccccaagggccccgatcccgatgtggttgctattgttgagaggttggctactgtgaaacacaaattattagttttgtctggaaagggaggtgttggaaagagcacattctcagcccaactctcctttgccttagctgaaatggaccatcaggttggccttcttgacatagatatatgtggccctagcatcccaaaaatgttaggcctcgagggacaagatattcatcagagcaaccttggttggtcacctgtgtatgtcgagtccaaccttggcgtgatgtcgattggtttcatgctgcctaatccagatgacgctgtcatatggaggggtccccgcaagaatggactgatcaagcagttcttaaaggatgttgactggggggagattgactatcttgtagtggatgctcctccaggaacatctgatgagcacatctcgattgtgcaataccttcaagccacaggaattgatggcgctataatcgtcacaactccgcagcaggtctctcttattgacgtgaggaaggagataaacttctgcaagaaggtcggcgttcctgtcctaggtgttgtggagaacatgagtggcctgaggcagccactttcagatctcagtttcgtcaagcctggtgaggcgggcgagacagacgcgacagagtgggccctgaactacatcaaggagaaagcccctgagcttctgtcagtcatggcctgcagcgaggtatttgatagcagcaagggaggcgccgagaagatgtgccgtgaaatgggggttcctttccttggcaaggtgcccatggatccgcagctgtgcaaggcggctgaggaagggaggtcatgcttcagtgatcagaaatgcggtgccagtgcgccggctcttcagagcattgtaaagaagctgatcaagactgggtgagaaaataatgttggcctgctgggaatctggtagtgagaattgagatgaacaggtgtcagagttgtcatgaccaatatatatgttattgtgttttgaacactgaatctgtgtattagactattagtgccagtactagtattggatctgtaagtttttttttgttcgtgaatcaccagtgggtggactgggtgtacaaactgcggccatatttctgctccacgaagtgaaatatgtttcgaggcactgcctgtatcacgaatcatgctta

SEQ ID NO: 123148 - DNA, 1457 bp, Zea Mays
ggctcgttcttcctcttctcttctttgcgttttgggccggttttctgcatccacgattttgtggagtttgatcgtctcttaccaagaggggtgtaaccttgtttcatttgcgaaatttgagggcaccttgaagttgtttcgatcgctgggttgctttactcaggcttagttcatgggtgttcgtgtttttgagtattctttatttggtgttggcagattgccctggaacgcagtcggaggaggcggggaaggcggatgcctgcgctgggtgccccaaccagcagatttgcgccaccgcccccaagggccccgatcccgatgtggttgctattgttgagaggttggctactgtgaaacacaaattattagttttgtctggaaagggaggtgttggaaagagcacattctcagcccaactctcctttgccttagctgaaatggaccatcaggttggccttcttgacatagatatatgtggccctagcatcccaaaaatgttaggcctcgagggacaagatattcatcagagcaaccttggttggtcacctgtgtatgtcgagtccaaccttggcgtgatgtcgattggtttcatgctgcctaatccagatgacgctgtcatatggaggggtccccgcaagaatggactgatcaagcagttcttaaaggatgttgactggggggagattgactatcttgtagtggatgctcctccaggaacatctgatgagcacatctcgattgtgcaataccttcaagccacaggaattgatggcgctataatcgtcacaactccgcagcaggtctctcttattgacgtgaggaaggagataaacttctgcaagaaggtcggcgttcctgtcctaggtgttgtggagaacatgagtggcctgaggcagccactttcagatctcagtttcgtcaagcctggtgaggcgggcgagacagacgcgacagagtgggccctgaactacatcaaggagaaagcccctgagcttctgtcagtcatggcctgcagcgaggtatttgatagcagcaagggaggcgccgagaagatgtgccgtgaaatgggggttcctttccttggcaaggtgcccatggatccgcagctgtgcaaggcggctgaggaagggaggtcatgcttcagtgatcagaaatgcggtgccagtgcgccggctcttcagagcattgtaaagaagctgatcaagactgggtgagaaaataatgttggcctgctgggaatctggtagtgagaattgagatgaacaggtgtcagagttgtcatgaccaatatatatgttattgtgttttgaacactgaatctgtgtattagactattagtgccagtactagtattggatctgtaagtttttttttgttcgtgaatcaccagtgggtggactgggtgtacaaactgcggccatatttctgctccacgaagtgaaatatgtttcgaggca

SEQ ID NO: 123149 - DNA, 1660 bp, Zea Mays
cgcggcgctggctcgcgaaggacggcaaggatcgcgtcgccgcacagcacggagcggggttgcggggtggggactccatggagcgtccacaccatgcagatcggtcttccagggagatattgggagcggcagatcgggggagggggagtaaatcgcgcatacgtacagagactccatggaaggcgtccacgcgatgcagagattgggagcgacaaatcgggcatcgaacacaaagtagctggcggctcggcgcacctacagcgccgtataccgagtccgagaccacgactccacgagacgacacaaaccccagtttaggaacagttggaaaagagggagaaatggagaacggcggcggcaaaggcgacgttcccaacgatgcgaacgaacgtaaggaatcgttccccctgtgccttctgattgccctggaacgcagtcggaggaggcggggaaggcggatgcctgcgctgggtgccccaaccagcagatttgcgccaccgcccccaagggccccgatcccgatgtggttgctattgttgagaggttggctactgtgaaacacaaattattagttttgtctggaaagggaggtgttggaaagagcacattctcagcccaactctcctttgccttagctgaaatggaccatcaggttggccttcttgacatagatatatgtggccctagcatcccaaaaatgttaggcctcgagggacaagatattcatcagagcaaccttggttggtcacctgtgtatgtcgagtccaaccttggcgtgatgtcgattggtttcatgctgcctaatccagatgacgctgtcatatggaggggtccccgcaagaatggactgatcaagcagttcttaaaggatgttgactggggggagattgactatcttgtagtggatgctcctccaggaacatctgatgagcacatctcgattgtgcaataccttcaagccacaggaattgatggcgctataatcgtcacaactccgcagcaggtctctcttattgacgtgaggaaggagataaacttctgcaagaaggtcggcgttcctgtcctaggtgttgtggagaacatgagtggcctgaggcagccactttcagatctcagtttcgtcaagcctggtgaggcgggcgagacagacgcgacagagtgggccctgaactacatcaaggagaaagcccctgagcttctgtcagtcatggcctgcagcgaggtatttgatagcagcaagggaggcgccgagaagatgtgccgtgaaatgggggttcctttccttggcaaggtgcccatggatccgcagctgtgcaaggcggctgaggaagggaggtcatgcttcagtgatcagaaatgcggtgccagtgcgccggctcttcagagcattgtaaagaagctgatcaagactgggtgagaaaataatgttggcctgctgggaatctggtagtgagaattgagatgaacaggtgtcagagttgtcatgaccaatatatatgttattgtgttttgaacactgaatctgtgtattagactattagtgccagtactagtattggatctgtaagtttttttttgttcgtgaatcaccagtgggtggactgggtgtacaaactgcggccatatttctgctccacgaagtgaaatatgtttcgaggca

SEQ ID NO: 123150 - DNA, 327 bp, Zea Mays
atggggcgcggcgcgtggatgggatcgccgatggttgtcggcgggtgggggcgcgaatcacggacgcaacagctaggattgcgtcctcgacggctgacaatggagcggggacacgaaccacgggcgcgagagcagtggagagcgcggatcaaggccgcaatcacgtccgcgagcagtgattccgctcgatttgggcgtcgaattgccttccatgtagagcgcggggagcacgggatggtcacagagaaaggggaggcgcgggaggaggtggcggaccttccatcgacgttgcgaggactgtgggtttggagatctggcttccattga

SEQ ID NO: 123151 - DNA, 520 bp, Zea Mays
tggagcgtcaaagattgcaaaatgcaaaacttttgaaatagaatgaccgttaaaagtttaacgataacacatagacctgacaaaatatgagtcactcaatgctcaaccaaccactacgataccattacaccaattataggttttagacaatcagataagaaaaatttattctcggaagcacttccggggaagaaacacaactctctttgcatgctttcatcactctttgcatgctttcatcagtttgttcatttacttggtgctgttcatgtggcggatcagctccagtgctgctgggaatgatgttgaaactagcagcccttccacccctccagtccttagatgagggcccatcaacagtcttctgggtagctgcaaggatccacatttactacactgaagatcacaaacagattgctagacaaagtttccattcaaccaatttcgcaaagcataccagtgatggcatgaacagtggtcatcagaccctcaacaataccgaacttgtcattgatgacct

SEQ ID NO: 123152 - DNA, 524 bp, Zea Mays
gattcatcgagggtcagctttaaccgcattggtgcgcgtgggagagacccgatacgaagagtacgggggagaaaacagccgccgcgacggattcacgtcggcggcgagtgttggactgcaattgggctatacggaggcagtccggttcctagcaaagctctgggagggattaatcggagagtggttggctgaggctccgggaattcgtcgtcggacgagcattgccgccgcggaacacctgttgtcgtggctgagcttcgttgcctttcaaacgcggcgcaggatcgaatggccgggattgggcgataactcttcgtcgtggcagatttactaaagagacccggacttattcataatcaacccgcagtccatcacaggtgtagcctgagtcttcgaaattttatgaattagcctcggtagtcttcagtattcttgtgcgcaatccagggagtggttaaaaaggaataaaaaattatagaaatgagttttatattaaaataattctagaaacttgtttcaatcat

SEQ ID NO: 123153 - DNA, 234 bp, Zea Mays
gttcatacaaaaaggagaaataggctacttcatgataggatgagagatcttgtgttcgttaaatttaaatccaaactaaggggaaagagggagagaacatgcagagatcctttagagagggaagttgatgatgttgttggtgatgatgaaaatgaattcattactggtattatacctcttccaaatggcgttgttgaactagcgcaagatggaacatcacagggagaacaaaca

SEQ ID NO: 123154 - DNA, 2489 bp, Zea Mays
gccgcggcgacgcccgaggcctgcaaaaccctaaccactcaggttctgccggccaccgccaccaccaccaccagtccaccaccatgctgacagccactcccctaccccatcagctcctggccaccttcctcctcgtcctggcgtcggcgacccaacctgcagtccctgcctccaccgaccgcgcagcgcttctcgccttccgcgcgtccctgtcgccgccctcccgcgccgcgctatcctcgtggagcggcccgctctcgccatcctggctcggcgtgtcgctccaccccgccacggcgccagccccttcggtcaccactccctccgttgccgaactctcgctccggggcctcaacctcacgggcgtgatccccgcggcgccgctcgcgctcctccgacgtctccggacgctcgacctctccgccaacgcgctttcgggagagcttccctgctccctcccgcgctcgctcctcgcgctcgacctctcccgcaacgcgctctcgggggctgtccccacctgcctgccgtcctcgctccccgcgctccgcaccctcaacctctccgccaacttcctccgcctcccgctctccccgcgtctctccttccccgcgcgcctcgctgcccttgatctctcccgcaacgccatctccggcgccgtcccgccgcggatcgtcgccgaccccgacaactccgctctcctcctcctcgacctctcccacaaccgcttctccggcgagatccccgccggtatcgcagccgtacggagcctgcaggggctttttctcgcggacaaccagctttccggggacattcctccggggatagggaacctgacctatttgcaggtgctggatttgtcgaataaccgattgtccggttcagtgcctgccggacttgcaggctgcttccagcttctgtacctgcagcttgggggtaaccagctctctggggcactccgtccggagctcgacgcactagctagtctcaaggttctagatttgtcgaataacaagatatctggggagattcccctgccgctggctgggtgcaggtctttggaggtggtggacttgtcaggaaatgagatctccggtgagctcagcagtgctgtagcgaaatggctgagcttgaagttcttatcactggctggtaaccagctctccggccacctacctgactggatgttctcgttccccctgctccagtggcttgatttgtctagtaataagtttgtgggtttcatcccagatggggggttcaatgtcagtgaagtgcttaacggtggaggtggtcaggggactccatcagagagtgtgcttccaccccaattgtttgtgtcagcttctgtggacacggtgtcatggcagttggatttggggtatgatgttcaggcaactactggtatagacctgtctgggaatgagctctgtggggagataccagaagggttggttgacatgaaggggttggagtatttgaacctctcctgtaattacttggctgggcagatccctgcggggcttgggggcatggggaggttgcatacgcttgacttctcacataatgggctgtcaggggaggtgcctcctggaattgcagccatgacagtgcttgaggtgcttaacctctcctacaatagcctgtctgggcctttgccaacaacgaagttcccaggagcattagctggaaacccaggaatttgcagtgggaaagggtgctctgagaatgcaaggactccagaagggaaaatggaaggtagcaatcaccgcggttggcttggtggctggcatggagagaatggatgggtatctcttggtgcattttgtatcagcacaatgactagcttctatgtatcattagcaaccttactatgctcctctaatgcaagaaacttcgtgtttcggcctgtgagggttgaatattaacaagaggggagattgcaaaatcaggttgttttgaagttcgagcgactctggtctgcagctgattaacaagaaatatgagcatatgagatggatatcttcagccaagaggaagtgctgtctcttttaatgatcaatcaagctctcttgattgtttcctaatattcttgatcttgggatgtgtagatctagttctaatattcctactgttatagaatgcaatcacctgctggtgcttggttgtagccctggcgtgtttggaggattggacaccaaggatgcacataatttgaagcgctggtactgtgaaccacttcagatgtaaatattttctttggtttttagttctgatctagtttaaaactggacatgtatttagtgttgttgagctacctttcgatgttatattatgtcaatttgctggaagatcatttgataacaattgtctaatccagtggattagtcgtgtagattgtgaagttcgttatgtttcttcttagtgctatgtatatcatctttctgtctgaacttagtttgggggtaaaaggctttgttattatgtgactg

SEQ ID NO: 123155 - DNA, 103 bp, Zea Mays
gtactccacacatctcaagtaggtccgaacaaatctggttggttgggttccaacttccaggagctattacttaatagcagcatgcatatctttgaatatgttg

SEQ ID NO: 123156 - DNA, 1205 bp, Zea Mays
gttccatccccgttcgttccacgaaccaaaccaaacacgctccacaaaaagaggtcagtgtggacgcttgaccgcgaaaattatatagacttctactcggctgcatctttgctccggtcgatgcacgacaagaggagaatggggacggaggccgacgccgcagccgtggacctactccggtcgcagatcccgttccagaccgacggggagttcgttctcccgccgcgcggcgtcgggctcgtcctcgtcgacctctgcaacggcttctgcaccgtcggcgccgggaacctcgctcctgttgcaccaaacaagcagatcagtaagatggtggaagaggccgcgaggctctctaagctgttctgtgatagaaacctaccaatatttgcattcctggatacccattatccagataagccggaaccaccatatccccctcattgtattattggtactggggaggaggactttgttccagatctggagtggttggaaaaggagccaaatgtgactataaagaggaaaagttgtattgatgggtatatcagctgcatagagaaggacgggtctagtgtttttgctgattggattggaaaatatcagataaaaactgtcttggtgctcgggatatgcacggacatctgtgttttggattttgcaagctcaactctggctgctcgaaatattgaccgagtgcctccattacaggatgtcgtgatttattcaggggggtgtgctacatatgaccttcctgttgagattgctactaatatcaaaggagctcttgcccatccacaggatctgatgcatcatattggactctatatggccaaaggaaggggtgcaaagatagttgacagggtggttattgaaccttgaataaaaaaactttccctcgtcacagtgatgttgctagggtttccttccattgtaacaaccagatatatatatgcatcttggcagaaagttgttgagattttttataatgctagcgacaactatatattttttttaaacgggccggcaggagatctacccgttatattaaaaagatgggagcccaaagggggcgaggtttaaaatacaaagacaccccacaaaagcacaccccacaaaagcaggaccaagccgaaaaacacaaacacacaagactaaactgaaaggagattaggagaaaagccaagttcaaacacacaaaactaaagaga

SEQ ID NO: 123157 - DNA, 914 bp, Zea Mays
gttccatccccgttcgttccacgaaccaaaccaaacacgctccacaaaaagaggtcagtgtggacgcttgaccgcgaaaattatatagacttctactcggctgcatctttgctccggtcgatgcacgacaagaggagaatggggacggaggccgacgccgcagccgtggacctactccggtcgcagatcccgttccagaccgacggggagttcgttctcccgccgcgcggcgtcgggctcgtcctcgtcgacctctgcaacggcttctgcaccgtcggcgccgggaacctcgctcctgttgcaccaaacaagcagatcagtaagatggtggaagaggccgcgaggctctctaagctgttctgtgatagaaacctaccaatatttgcattcctggatacccattatccagataagccggaaccaccatatccccctcattgtattattggtactggggaggaggactttgttccagatctggagtggttggaaaaggagccaaatgtgactataaagaggaaaagttgtattgatgggtatatcagctgcatagagaaggacgggtctagtgtttttgctgattggattggaaaatatcagataaaaactgtgagttgtcttgatacagaagatttcagagatagactttaccctattgtgtatgacttgggggggatcggctcaatgcaggtcttggtgctcgggatatgcacggacatctgtgttttggattttgcaagctcaactctggctgctcgaaatattgaccgagtgcctccattacaggatgtcgtgatttattcaggggggtgtgctacatatgaccttcctgttgagattgctactaatatcaaaggagctcttgcccatccacaggtaccggatcactgacggccatacattcaaaaaatcaa

SEQ ID NO: 123158 - DNA, 1497 bp, Zea Mays
agagcgctcccctaccctttttcccctcctcgcagtcgcagcagcagcgcacaccagaaaagcttttctgcctcctctccaccttgcttcccgcaactaccacgcacgccgaatacttggcaagaagaaaccctttctcgtcccgttgaactggcgccgtcgactccaccggggcacgctgtcgcgggttgctctccggtcctcgttctccttgctgctgaatccgctagtggagatcgacctgatttctcctgtcctgtcaattggattttagcccggctttcaaggtagagaaagaagctgtctggtccatcatggccttcccaactccagcttctgtttttgttgacgagaaccaacagataaatagaggtaagagggctgctggatcaaggaccaaagggctgaagccgtcggagaatcctgggaatctagagaggagagctcttcaggatttgtccaactttgccaaaggcacaggtttgaagggcacttccaccctgaaagagaggtcccagcgcaaggcttttagtaatgtgaccaacactattaaaggcactgctttgaaggacaggcccatcacgaaagagaaatctacccagaaacagaggtcacagaacccagtgaaaatattatctgatgaagatatcaaactgtgtcatgagtgggctaaggatggggtggaagggtttcactcaacacaaaatgattctcagaaggttgataaggatctgctagccaaacgtgtcaagaagaaagtggcgtcagtaaactcagccttgcgtggttggtcagatacggtatttgattctctgatgtttccagctagggaggttttatatgaaccaaaagtgctggagctggaacctgagattctccgggacatcagttgggatctccctagttcagtagatggtaaagcaaagctggatgaagactgtcttgcctatgatcagcttgaccagtacccatctttggagaacaatccagttacatttgagctgagagacgagccagcgatcccgcagctgggagtgcattgaagaatcccgcagctctgcttgctgctttgctctagaatgctaggtcttgaacccctgatgtttttctccagctatgttctggtggatgtgggtggtataggatttcacagtttgatcactagtacctgatccagcggaagcgacagcgcttcctgtttgttatgcttgctgatgggcgatggttgtggaactgctgatggtataattctaatgttttcagcaaaacaaacctatatggtctctatatttattctcctgagtcatatgacttggcagtgctttagatagcgacaatggtcctaaatatagcgagattcttgccacgtgctagcaagagacaaaggaggggtcaggttgattgtccagaggtcacatcaggagactacggtccggttggtttcagttttttttttcagactggtcgctaaaaggttttgcgtactataaaaaaaat

SEQ ID NO: 123159 - DNA, 510 bp, Zea Mays
tataagacacggctcaaacacatgtttccaaaaaatcctccacgagatcagagcgcaagcctccctcgcggacgagatctctgggtacatccctctcgcaaacgaagaaattgccacaaaacatggagaggttttgggacagagtgcgtttgctgtgctcgaacatcaacgaaacacaacccaaaaaggacgaacagttctttcttttagaaagtagtagaaaagatgtgccagccgaaagggcccagaaaatcaccgagggtgtcagatccaggtgagtttaagctggctcggattcaatctcgcaagatggcagtatgattgccgattgcctgaaccggatccagttcaaggtccaaacaagaagctgatcttgcaaaccacacacgatttttgtctagatcaacgaaaaattcaacacaaaaccactaatatggcgcaatcaatgaaaaaacaacacaaaaggattgccaagcttaacggttcacaaaagctagaagggaacggaaa

SEQ ID NO: 123160 - DNA, 1280 bp, Zea Mays
catcatcccgttccgccgagtgagcacatcacatcagatcaaaatcggcgcgtccaagcgtggttccggcgtgtagctagtacacggggagacgagccgggagcccctggccacaagtctccccggcgagtcctccaccacaagctcgcccggcagcggcagctcactgattgctccagttgcgtgctcgcgcgcgcaagctcgtcctcctccatcgcagtcggtggccttatcttgttcgtccttgcctccctcgttgttgcgacttgcgagacgacaggacaggatagcgagctgggcctgggagtatagaccgcagacagagaggtggagcggccatgaagatccagtgcgacgcgtgcgagggcgcggctgccaccgtggtgtgctgcgccgacgaggccgcgctgtgcgcgcgctgcgacgtcgagatccacgccgccaacaagctcgccagcaagcaccagcgcctcccgctcgaggctctctccgccagcctcccgcgctgcgacgtctgccaggagaaagcggcgttcatcttctgcgtggaggaccgggcgctcttctgccgggactgcgacgagcccatccacgtcccgggcacgctctccgggaaccaccagcgctacctcgccaccgacatccgcgtcggcttcgcctccgcttcgtcagcgtgcagtgacgcctgcgacgcccacgacgactccgaccaccacgccccgcccaaggccgccgtctcctccgcggcgcagcaggtgccctcgccgccgcagttcctgccacagggctgggccgtcgacgagctcctgcagttctccgactgcgagtccagcgacaagctgcacaaggagtccccgctcgggttcaaggagctggagtggttcaccgacatcgacctcttccacgagcagacgccgaaagccggcaggagattggctgaggtaccggagctttccggaacccaggccgcgaacgacgcggcgtactacaggccagccaaagccactgccactgccggcgccggggtgcgccagagcaagaaggcccggaccgaggtcaccgacgacgaggaccacctcatcgtccctgatctcggctaaaataaaagaaagggcaggagttttgtttcttctcctgctgtgtgtacaaccagtgtcgtgtcgtgcatctttgactgtagtattgcacagctgtgaacatgataactctaagcacactttgtgtctttgttgctacgctagtctatactatacttaaagcaccagtttcaacggtcgtca

SEQ ID NO: 123161 - DNA, 1408 bp, Zea Mays
gtgtagctagtacacggggagacgagccgggagcccctggccacaagtctccccggcgagtcctccaccacaagctcgcccggcagcggcagctcactgattgctccagttgcgtgctcgcgcgcgcaagctcgtcctcctccatcgcagtcggtggccttatcttgttcgtccttgcctccctcgttgttgcgacttgcgagacgacaggacaggatagcgagctgggcctgggagtatagaccgcagacagagaggtggagcggccatgaagatccagtgcgacgcgtgcgagggcgcggctgccaccgtggtgtgctgcgccgacgaggccgcgctgtgcgcgcgctgcgacgtcgagatccacgccgccaacaagctcgccagcaagcaccagcgcctcccgctcgaggctctctccgccagcctcccgcgctgcgacgtctgccaggtacgtacatcaccagcgcattgcgcatgcgccacacgcggcacaaggcaggcaggcacgagctaacaacgaggccaccaccccgccccgcgcgcgctcgcaggagaaagcggcgttcatcttctgcgtggaggaccgggcgctcttctgccgggactgcgacgagcccatccacgtcccgggcacgctctccgggaaccaccagcgctacctcgccaccgacatccgcgtcggcttcgcctccgcttcgtcagcgtgcagtgacgcctgcgacgcccacgacgactccgaccaccacgccccgcccaaggccgccgtctcctccgcggcgcagcaggtgccctcgccgccgcagttcctgccacagggctgggccgtcgacgagctcctgcagttctccgactgcgagtccagcgacaaggcaagacgatagcgcaagctccggtccatgaccaacaacctgcctgcgtgcacccaccgtctcatgcatggtcttgtgtgtgtgtgtgttttgcagctgcacaaggagtccccgctcgggttcaaggagctggagtggttcaccgacatcgacctcttccacgagcagacgccgaaagccggcaggagattggctgaggtaccggagctttccggaacccaggccgcgaacgacgcggcgtactacaggccagccaaagccactgccactgccggcgccggggtgcgccagagcaagaaggcccggaccgaggtcaccgacgacgaggaccacctcatcgtccctgatctcggctaaaataaaagaaagggcaggagttttgtttcttctcctgctgtgtgtacaaccagtgtcgtgtcgtgcatctttgactgtagtattgcacagctgtgaacatgataactctaagcacactttgtgtctttgttgctacgctagtctatactatacttaaagcaccagtttcaacggtcgtc

SEQ ID NO: 123162 - DNA, 1441 bp, Zea Mays
aattgtaaagttagtgtgataggaatcacattcaatggtacttctgcctacggtgaatctggaaagttccattacaacactagaagttaggctattccatcttctacctctgttttttacatgttgtatttgtattagttttggcgtaggtcaaacatttatatctttggccatcattttttttaaaatgtataggttaacaacataagatttatgtttttagattcactatgaaaaatactttcataatatatggttcacatgttgcaaaactacatagtttttttcctgaaactgatggtcaaagtaatgtttgacttaggacaaacttaatacggcttgtaaaataaatggatggagtatgttaggctaccttatcgaatttaaacatggatcaagggtacatattaggaatagctggcttggtcaagaaaccaaatatataggaaatgtttctgtccccaaaacatttacttacatttagttctgttaagggcacgttgatacggctgggacgtttaggggaatggataggggagattagcagagcttgggactgagggatggagcagattggatagggagatcggcgagaacagctactatcacccacgaccgatgaagccacgatgaccaaagccctctccgaaaggaaagcaacttcttcgatgaaatccctgcctttgatggaatctttgaagaaagctatggctgatgcaaaaaagcccaggtccatacaagacttgctgaaggagcaggtggctaaactcagagaacaagcatccggtggaggcggagggaatgggaatcgccgtggaggcagtggtggttctggtggcccagatgatgagtccttcaaggaagcattggatgaagtagtccaagttatcttagccactgttgctttcatacttgtgtacatccacataatcagaggggaggagctttaccgtcttgccagggactacaccagatatctcgtcactggtaagagaactgcccgactgaagcgttccatgcaaaagtggcacaacttctccgaaagcttcatgcagaaggaaggctcagaagaggaccaatatgagaaacctacatggtggcaacagcctcagaaacttgtgcatcttatggaggagctttgcaggggaaattggcgtccccatgcccaggagtcgtagttgatggtgtaccatcacgcccctcttttttttttgacccattgcagaatgcaaaataggaacgtgggctggtgcagtggagtaaggtcgcctggaccagtgttttttgttgttgttctttatcggctatttgtctctggtttcttaaaagtatgtagagagtgagtgaattcgtggcatttttgcagttgatgggaccgtgttttgagactgtaacctgccaatcaaacgttggagatacctttgcatctggtcgatcaaaa

SEQ ID NO: 123163 - DNA, 691 bp, Zea Mays
ttctgaactacttacatttgatgtgaatgcagatttgattctagttaactattcaagaagtaggagatgatgagctacttccaaaccactacttgcaagcctcaaagcagggtcgttgtgaacaaacctataccaggtcttgggagcacaagtcagcatccgttatattcacatgctctcagattccacaggctgcaacagaaggtgtacccaaggctacttctcgttgctgctagccacaaaaggcttactcctgtatgtgtcttaagtggaaagggaaatgctggcactgctgatgatcctttgatggaatctttgaagaaagctatggctgatgcaaaaaagcccaggtccatacaagacttgctgaaggagcaggtggctaaactcagagaacaagcatccggtggaggcggagggaatgggaatcgccgtggaggcagtggtggttctggtggcccagatgatgagtccttcaaggaagcattggatgaagtagtccaagttatcttagccactgttgctttcatacttgtggtaattgttttgtttttctggtttcttctacattttctggaacacttatttgcacagttagcaccgggcatcatagactgctgaaacaccgttgcttttgagtagacagaatagtatcaatagacttcatgctcttatgttttcttctcttata

SEQ ID NO: 123164 - DNA, 483 bp, Zea Mays
tccaagcctaaaccaaagcagcctggctgtgcctacacgcttgccttatcttctcccgttcaccccgccgtgcgcgcgcgcccccgcggcgacaaccgggcgaccgccgccgacctacgccaggtgccaagccgttcctcagtcccatcacgaggccttcaacgagcccttcgccggcgacgagaaaatttgattctagttaactattcaagaagtaggagatgatgagctacttccaaaccactacttgcaagcctcaaagcagggtcgttgtgaacaaacctataccaggtcttgggagcacaagtcagcatccgttatattcacatgctctcagattccacaggctgcaacagaaggtgtacccaaggctacttctcgttgctgctagccacaaaaggcttactcctgtatgtgtcttaagtggaaagggaaatgctggcactgctgatgatgggaatggataggggagattagcagagc

SEQ ID NO: 123165 - DNA, 745 bp, Zea Mays
caccaaatctccctccaaaactatatattcggcttgaacttcacaagaacaatgagaccctggttcaggctttacgtcaagtacttggctaacatcacatggagctttcacttcctttgacatccatatgcactactgtgattccacacaagtacaaatcgatggtgctgcagcagggagaacatgacgacaaggggcaaggtttgacgatgtcgcgacggggctgcctaaacacaaagacaacggcgtggggcgagtggcgcacgcacgcgtcgcagcaagacgatggctgtttaaggcttggcatttcctcaagcagagcaagggcgctgagatggcgatatccatggatggagatgagtgcccgggcgagcagagcgagcttacggccgggcgagcacacggctgggtcgggctcagcggccatggcgagcataggacgccggcttggtggagcgcgtagagaagggatcagggagaggggcgcgccatggctggagctccggcgagcagcaaacagagagcagggcgcggcagctagggcgggctagagggcaagcagggaggagcgaccggcgctggggcacacggccaggagatccgcccggaagctgagcgcaagacagaggagagcagccgggcgccatgggaggggccgagttggagttgggcacacggcgctgagaacgacgatggtttggggaagaagcctgcgcgtggaaggggataatgcactgcgagaaaa

SEQ ID NO: 123166 - DNA, 348 bp, Zea Mays
gatgagaccctggttcaggctttacgtcgagtacttggctagcatcacatggagctttcacttcctttgacatccatatgcactactgcgattcgacacaagtacaaatcgatggtgctgcagcaaggagaacatgacgacaaggggcaaggtttgacgatgccgcgacggggctgcctaaacacaaagacgacggcgtggggcgagtggcgcacgcacgcgtcgcagcaagacgatggtttttcaaggcttggcatttcctcgagcagagcaagggtgctgagatggcgatatccatggatggagatgagtgcccgggcgagcagagcgagcgtatgaccgggcgag

SEQ ID NO: 123167 - DNA, 1322 bp, Zea Mays
ttaccaaaaataacttagttgttgctgctgtccgcatggcgcgaagaggctgtgcagacccgacgaagcgagacgcggaggcgtcggggctgcacggattgatgacgcggctgctctcgccgagcaggaacgagtcgtggcgctatggttctcgctgcgcgcgacagcacagcaagcacgaggagaggcgtggttgcaggattttttttttttgatgtggtgcggcatgtgggagcagcaggggtgtggctgcaaggagagcgacgtcgagaccatgccgtggatccacagcgctacaaggcacagcggggcagcatggattgagcagcgcaccggaataaaagtcgacgatgttgtcctcgacacagtgctccacaccgatagtttgacaacaccgaaaagaggcgagcagggctgcgcacaacacaagcaagacaacacgcagtcggctacgcatatcgtcgagcaggtagtgtgtgtggtggagcagcggcatgggaagggacagcgtcgtccagggaaacagggagggcactggttgggagagggactcggcctacagccaccatggctgggcgctgcggcgttgatccgatccctgctgctggatgtttgggacaaagagaaggcagggaagtgccatgagcacatgggctcgccggcgagcaggagcccggcgaggccacgacggcgccctgcaggggatccccggcgagcaacgccatggcaaggtggagatcagcatagggagcagaggctcatccaaagcacagagaaaggaagggctcggcagggggaaacagccatggatggaaaagctcctgcgccgctcctgctgcgtccaagccatagaaaaggggctaggcgtcgagcacagtggaggagaaagggcgtcgttccctgcacgtgagctcaaggaaaaacagagaggagggagggcgctgggcaagggagatgagctgagcgcagggaggtggagctgagctcgcctgctgcaaggacgccaagtgcagggagcagagggtcagccatgggagagaggggagctcgcaggggaaatcgccatggctgctggccttacttcctgcgcgtggctgctgcgcgtggaacaaggagcagggggcggctggagatacgccggcgccatggacgccagggaggagcttcagcgccgaggaagaaggagcaggggcgccagcttgctgctcgccatggaggggagcacggctccctgctgctgctgccgtgggatgcctgctgcgcgatggagaagaagacagggaggctgcggtggcggctggaaaaaaatgaggggtgggaat

SEQ ID NO: 123168 - DNA, 101 bp, Zea Mays
gcctgcaaaattgtgtggattttcataaagtgtcttaatgccagtagtactgtattaataactttacaatgcaattcacataaaaacagctaatgcaattg

SEQ ID NO: 123169 - DNA, 1850 bp, Zea Mays
caactaattgaccggaatagcgagataacttgctataactgaacctagctcgataatcgcaagaactgcgaagtcgacgaaagtttcgtgacttacacaatttatcgagcaccttaatgagcatcgcactagcacatttatttattcatcgatccagctattctgaataatttatcagcttaccgtttccacagctgacacgaatccgcgagattggtagcgattttccgatccaggcaatttgtcgagcgtttagggaatatcgcgctgctagcttcgtcttcacccgattcttgagatttcttgctgacgcgcggaacgacgacgagatcgtgtttggagcgagctggtgaggtgggggtcgagcaggggatgacgtgtttgacgactcgacggcaaacgacgcgacgacgagctgggcaggatccgagctaataggtacagtatgtgatagcgatcaacacgatggacgaactaagtcgtgacgaagtcgaccgacgagtgaaaataaggaacacgacagtcagtcggcgaactgaagattggaagcgacagccgatgaagagcttatctccagagagccgcgcgagggaagctgaaaattaatctgacagtggttcagcggcaactgatagccggtagaggaacgcgactgcgcgcagaggagcagggagaagactgttggtttcccatttagcgagcagatggtgcacggagttaacgatttgaacatgcggagacacagaccaccaaggaatcacgacgagacggtaacctcacgggcgaggcgctagcgctaaaggctgagcagagaacccaagttcgacagcgagcagggagacatgtaaacccccggacgcgacggcgatttcacaccgaggcgaccaacttcggatccggaggaggccgaacgcgacagcaaagcacggcacaatcccgagcaagggtaggaagggagagggatccgcgcggcatggcgagggaggagcagtgcgcgaacgacagggatctcggcaggactgcggcggccacggggacgagctgcagcaaaggaccggaccgagctcggcggtgctgtagagttgagggcgagctcgggcatggagtcatcgcatagctccaactctccaagtcgacgaccactagggtgctgctgcaggacggaccttcaccggcggtgactgggacaggagcatggccacacagccgaggcgagcatacacgacgaccggccttggatctgggagcagggacacgcgcgtcggggcttgaagaccacgaccgacgcaggaaagatatggacacagttcggcgagcttccatgggcgacgtccacggatttgaagctgcgacggccaaggcaggagctcagggcgagcagcaccggtatccagacgagagggaggtggagggccgagctgggggtgggcgctggagagagagcgcgcggcataggcgaccgcaccagggaacagcgatggccaacagagaaactcacgcgcgcggtaactctgcggctgggagggcgcggcagccatggcgagcaggagcaggggctgggcgagctggaggatggcagagggagagagaagcaagggagggcgccatggctggagcacgcaggatccagcggaatggcggcgagcagggcaagcatccagggatccggacgctgagcgctagtcaccggagcagggagctgggcgagctcgaccatggggttgagagcggccatgggtggggagctcgagcagggagccgggcgccgagaaacgcgcgcagaaaacaggacgccatggaaaagcttcagcaggggaaaaacgcaggggatgggcaggaggccgagcgcc

SEQ ID NO: 123170 - DNA, 522 bp, Zea Mays
atggagtcattgcagagctccaagtcgacgaccactagggtgctgctacaggacggaccttcatcggcggtgactgggacaggagcatggccacacaaccgaggcgagcatacacgacgaccggccttggatctgggagcagggacacgcgcgtcggtgcttgaagaccacgaccgacgcaggaaaagtttggacacagttcggcgagcttccatgggcgacgtccacggatttgaagctgcgacggccaaggcaggagctcagggcgagcagcaccggtatccagacgagagggaggtggagggccgagctgggggtgggcgctggagagagagcgcgcggcataggcgactgcaccagggaacagcgatggccaaaagagaagctcacgcgcgcggtaactctgcggctgggagggcgcggcagccatggcgagcaggagcaggggctgggcgagctggagaatggcagagggagagagaagcaagggagggcgccatggctggagcacgcaggatctag

SEQ ID NO: 123171 - DNA, 1211 bp, Zea Mays
tatccacccttctctctgtctcggcatctgtttgagcagtacaaaccctatttttggaattttatagcattgtttcgtgatcagtcagttatatttaacatatgatctaattatcccaagcacgcttcctcgacttcctatctcgactctcccaagtcacaaccctcgacctcccccctactccaactactggaagcgccgatccatcaggttctgatcgattcttctgccccgatccgcagcggcaagcggagatgaactgcgagacctgtcagctgaaagaactggagctggaactgacggagatcagggatgttctgcgctgtattttgcacaccatattcttccatagaaccctcagcctggttcgccccaaagatgttgactgtgatttcctcgatattacttatgtacaatgtggtctaccggaactagaaaaggaagttgacgaaaagatagaccagttcagtgcatgggtggagaaacacccaaaccgcagaagccagatctgcctctcctttttcgacgagaaacacagacaccctggttggtttgtcaacaaaacagagcgcatctattgggagcaatggttcatcaatttgcaagtcatgttccccaaaagatacagcaagtcaaacagctccaaagggctgacaaacatccaagcaaatgccgtggaggagaccagcacaaggcgtgctgcattggaggcgtcgattaacgaagtgctgttccagatcataaagttcgccaacgagaaaaaggaccacattcctgctatccctgacaggattttcaatcacgagatcatgatcccaagctcggattctgtatttggatggaacacggacgtcattcgcagagttctgaatagcgggcacccatactcgctttaactgaagacgacatctcagtgggcgcccgtattcagtttattagcgtgctgccgccctgtttggaagacggctctgttaaccatcgtggtgaaccatataatatgcctaaggaaaaacctagttctgtgtacatcaccctgctcatctggcatgtacatactgtgttgggatcttgctcatcggtcaaacattcttaagttcgattaagtttataaataacaatattatgattctaaataagtttatcatgtaaaagtatttttcatgattgatacttattgcgaagcatctccgagtgagttaggtggttcgagt

SEQ ID NO: 123172 - DNA, 1337 bp, Zea Mays
gattggttggtcttcgagtcggcttggactcttctcttcctcgccaactcctccgtggcgccgccgtcttgcctgcagctttttgagccttcgtcatatccacccttctctctgtctcggcatctgtttgagcagtacaaaccctatttttggaattttatagcattgtttcgtgatcagtcagttatatttaacatatgatctaattatcccaagcacgcttcctcgacttcctatctcgactctcccaagtcacaaccctcgacctcccccctactccaactactggaagcgccgatccatcaggttctgatcgattcttctgccccgatccgcagcggcaagcggagatgaactgcgagacctgtcagctgaaagaactggagctggaactgacggagatcagggatgttctgcgctgtattttgcacaccatattcttccatagaaccctcagcctggttcgccccaaagatgttgactgtgatttcctcgatattacttatgtacaatgtggtctaccggaactagaaaaggaagttgacgaaaagatagaccagttcagtgcatgggtggagaaacacccaaaccgcagaagccagatctgcctctcctttttcgacgagaaacacagacaccctggttggtttgtcaacaaaacagagcgcatctattgggagcaatggttcatcaatttgcaagtcatgttccccaaaagatacagcaagtcaaacagctccaaagggctgacaaacatccaagcaaatgccgtggaggagaccagcacaaggcgtgctgcattggaggcgtcgattaacgaagtgctgttccagatcataaagttcgccaacgagaaaaaggaccacattcctgctatccctgacaggattttcaatcacgagatcatgatcccaaggtgaccccttttccttggacgtgttgacagctcggattctgtatttggatggaacacggacgtcattcgcagagttctgaatagcgggcacccatactcgctttaactgaagacgacatctcagtgggcgcccgtattcagtttattagcgtgctgccgccctgtttggaagacggctctgttaaccatcgtggtgaaccatataatatgcctaaggaaaaacctagttctgtgtacatcaccctgctcatctggcatgtacatactgtgttgggatcttgctcatcggtcaaacattcttaagttcgattaagtttataaataacaatattatgattctaaataagtttatcatgtaaaagtatttttcatgattgatacttattgcgaagcatctccgagtgagttaggtggttcgagt

SEQ ID NO: 123173 - DNA, 1136 bp, Zea Mays
ataatatttttctaaaaccgcatattcgtctcttcgatactatttttctaagatcggatattttaatggtacagatctaattatcccaagcacgcttcctcgacttcctatctcgactctcccaagtcacaaccctcgacctcccccctactccaactactggaagcgccgatccatcaggttctgatcgattcttctgccccgatccgcagcggcaagcggagatgaactgcgagacctgtcagctgaaagaactggagctggaactgacggagatcagggatgttctgcgctgtattttgcacaccatattcttccatagaaccctcagcctggttcgccccaaagatgttgactgtgatttcctcgatattacttatgtacaatgtggtctaccggaactagaaaaggaagttgacgaaaagatagaccagttcagtgcatgggtggagaaacacccaaaccgcagaagccagatctgcctctcctttttcgacgagaaacacagacaccctggttggtttgtcaacaaaacagagcgcatctattgggagcaatggttcatcaatttgcaagtcatgttccccaaaagatacagcaagtcaaacagctccaaagggctgacaaacatccaagcaaatgccgtggaggagaccagcacaaggcgtgctgcattggaggcgtcgattaacgaagtgctgttccagatcataaagttcgccaacgagaaaaaggaccacattcctgctatccctgacaggattttcaatcacgagatcatgatcccaagctcggattctgtatttggatggaacacggacgtcattcgcagagttctgaatagcgggcacccatactcgctttaactgaagacgacatctcagtgggcgcccgtattcagtttattagcgtgctgccgccctgtttggaagacggctctgttaaccatcgtggtgaaccatataatatgcctaaggaaaaacctagttctgtgtacatcaccctgctcatctggcatgtacatactgtgttgggatcttgctcatcggtcaaacattcttaagttcgattaagtttataaataacaatattatgattctaaataagtttatcatgtaaaagtatttttcatgatt

SEQ ID NO: 123174 - DNA, 708 bp, Zea Mays
ataatatttttctaaaaccgcatattcgtctcttcgatactatttttctaagatcggatattttaatggtacagatctaattatcccaagcacgcttcctcgacttcctatctcgactctcccaagtcacaaccctcgacctcccccctactccaactactggaagcgccgatccatcaggttctgatcgattcttctgccccgatccgcagcggcaagcggagatgaactgcgagacctgtcagctgaaagaactggagctggaactgacggagatcagggatgttctgcgctgtgagtgctctaaattttagtttttttcacatctcttctcatctctctatgttcgttgaaagggggcttctgttcgcctcaataaattgctctctattgacaatttgacatgacacgggagctatactgtactgtattcattcacatccttattcgttgttatggtttcagtaatttttggaatagagtaatttcaagttgcagttttgaaatcataattgtggttagctagtggggtttaccttggtttcgctcatggggaaatgtaaatgctgtatggatgtacggcagtggaagcttaactaaaaattgggctaatagtgaagctactctgcagaagatcatattatatcacacagttgtatattgttcaatgctttgttgtgcttatctcgttccagagtccttgctgtt

SEQ ID NO: 123175 - DNA, 951 bp, Zea Mays
atgtcgtcgtcgtcgtcgtcgatggactgcgtcatctcctcctcaaaggacaacgagaaggagatcacgcctccaccgctcaacagcggggcggcggcgtggtggacgggggacacggtggcggtggtgacgggcgcgaaccgcggcatcgggcacgcgctggcggcgcacctggccgagcagggcctgtgcgtggtggtgacggcgcgggacgaggcgcgggggcaggccgccgcggccgcgctccgccacggcgcgggacccccgcggggcgccgtgcggttccgccgcctcgacgtcgccgacccggcatccatcgccgccttcgcgtcctggctgcgcgacgagctcggcggcctcgacatcctggtgaacaatgccgcggtgtcgttcaacgagatggacaccaactccgtggagcacgcggagacggtcctccggaccaacttctacggggccaagatgctcaccgaggcgctcctgccactgttccgccgctcgccggcgaccagcagccggatcctcaacgttagctcccagcttggtctgctcaacaaggtgaaggacccgcagctgcggagcatgctgctggacgaggcggcgctgacggagggcgacatcgaggggatggcgtcgcggttcctggcgcaggtggcggacggcacctggcgcggccgcgggtggccagaggtgtggacggactacgccgtctccaagctggcactcaacgcctactcccgcctgctggcctccaggctggccggccgcggggtcagcgtcaactgcttctgccccggcttcacgcgcacccacatgacgcggggcctcggcaaccgcaccgccgacgaggccggacgcgtcgccgcgggcctcgcgctgctcccgcccctccacctgcccaccggcaagttcttcaaatggcgcacgccgcagctctactccaagctctga

SEQ ID NO: 123176 - DNA, 853 bp, Zea Mays
gtttattctgcttcatagtacccgtttgtggtaacagtaacaacatcatacccatgaagaaacactgaatgtttgatgccggtaccattttctcatgctgttttatctaactgctccaagctattagctgttgcaaaactcttgcataatggagggatcattgatgattgcagcttactggagatcttgacaagatggttgcactacaaaggttattggagccatatggcatctgtgaggtcgccagaactggacgagtagcactggtccgcgaatcgaaggtggactccaagtacctccgcggctactctcttccactgtagccttgcagtcgtgatgatgatggcaccatgaagagctcggctggttgtttatagagcagaccatctcgcgctgggttgtgttgtgcgattacaggacttgtttctttcatgtcgtgaactcccccggcctgcgtgtccaataacgcgtgttgaggctgcatgtgtattccaacgactgtcagaataagatgcatatcgtatctgtttacttcagtgaagagatgcatggatcgttcgaaatcaggttgcccacgtttcgtagtggaacatgtggagccgtggagaagaggaacacagattgcatataggatattagctgcctctatttcagcctctggttaaatgggacatatcagctgcgcatattaaatcgtatccatttattttatatctaaagcctgttctgtatatttttgcaaagaacaacttggagcaggatgaaagtggtacaggataatgatggaggggattctttgcaaaatatatagcaacagatgttagatccaagatgattgggcatgatttaatat

SEQ ID NO: 123177 - DNA, 2097 bp, Zea Mays
atccggccaccgagctagcacgacttgacgcccacactgccaaagtgccaagtgccactgcccctgccaccagcccaccaccagacccgccaccttcgcgctccacggcagcggcatgtccgtcgcctcctcccaccgcctgcgaccgtcgccgtcgggcccggcgcggcgcccgggatccgcggcgccgcgcgtagcgttctggccagccggtgcctcgcccccgtatcgcggccgctgcaccgtcgtggcggcggcggctgccgctggcgccggcggcgaggcatcttcggcccccgtggctgtgtcggctgtcgcccccgcgggcgctgccagggacaaggtgcggcgccacacgatttcggtgttcgtcggggacgagagcggcatgatcaaccggatcgcaggggtgttcgccaggagaggctacaacatcgagtcgctcgccgtggggctcaacaaggacaaggccctcttcaccattgtcgtctccgggaccgacagggtgctcaaccaagtcatcgagcagctcaataagcttgtcaacgtcctgagtgtggaagatctatctaaagaacctcaggttgaaagagagctgatgcttataaaactaaatgttgaacctgatcagcgtcctgaggtcatggttttagttgatattttcagagcaaaagttgttgatatatctgagaaaacacttaccatggaggtagctggagatcctggcaaaattgctgcagtgcagaggaatctatggaaatttggaatcaaagaaatttgcaggacaggaaaaattgctttgagacgtgaaaggattggtgcaacagcccgtttctggcgattttctgctgcttcttacccagacctgatagatgcgttgccgaaaaatccacttacatctgtaaataggacagttaatggcagttttggtcaaccatccaatgctgggggtgatgtttatcctgtggaatcttacgagagcttatcagtgaaccatgtacttgatgctcattggggtgttctggatgatgatgatgcgactggacttcgctcgcatactctctccatccttgtgaatgactgtcctggtgtcctcaacattgtaacaggagtctttgctcgcaggggctacaatatacagagccttgctgttggcccagctgagaaggaaggcatttcgcggattacaacagttgttcctggtactgttgaatccattgagaagttagttcagcagctttacaagcttattgatgtgcacgaagttcatgacattacccactcaccttttgctgaaagggaacttatgcttattaaggtttctgtcaacactgctgctcggaaggaaatcctagatattgctgaaatcttccgagcaaaacctgttgatgtttctgaccacacagtaacgcttcagcttactggagatcttgacaagatggttgcactacaaaggttattggagccatatggcatctgtgaggtcgccagaactggacgagtagcactggtccgcgaatcgaaggtggactccaagtacctccgcggctactctcttccactgtagccttgcagtcgtgatgatgatggcaccatgaagagctcggctggttgtttatagagcagaccatctcgcgctgggttgtgttgtgcgattacaggacttgtttctttcatgtcgtgaactcccccggcctgcgtgtccaataacgcgtgttgaggctgcatgtgtattccaacgactgtcagaataagatgcatatcgtatctgtttacttcagtgaagagatgcatggatcgttcgaaatcaggttgcccacgtttcgtagtggaacatgtggagccgtggagaagaggaacacagattgcatataggatattagctgcctctatttcagcctctggttaaatgggacatatcagctgcgcatattaaatcgtatccatttattttatatctaaagcctgttctgtatatttttgcaaagaacaacttggagcaggatgaaagtggtacaggataatgatggaggggattctttgcaaaatatatagcaacagatgttagatccaagatgattgggcatgatttaatat

SEQ ID NO: 123178 - DNA, 2256 bp, Zea Mays
atcacaatgccacgccggatgccaagtctctcaaatctggaatcctttcacgccgccactctcccctttttccttctctcttcgtcgttgtggctcctgccttcctgcctcggcgcatcgactcgcggagagggacagcacagcgcctcctccccatcctttctccattcccagatcgaaggtccataaaaaaccatccttttgcatctgattgagcactgtctttgtgcaagagaacaatttagttgtacatacaaacaaaaagaagtgggagtatttttcagagtttattagaagagactgtttcgaggacccaggtcagagaaaggcgagaagctttagcagcggcaatggtctggtcaatggacccgcaggtgaccgtccacggcgactgggtgtcagccgtggtgccgctgatgaagctgctgtgcctggcggtgatcggcctgctcctcgccaacccgcgggtccaggtcgtgcccagggccaccttcaagctcctgagcaagctcgtcttcgcgctcttcctcccctgcctcatcttcgtccacctcggcaagtcggtcaccatagacaacgtcctgcactggtggttcatccccgtcaacgtgctcatcagcactgccatcgggtgcgcccttgggtacatcgtggccctgatctgccgcccgccgccgcacctgttccggtttacggtgatcatgaccgggttcggtaacacggggaacctcccgatcgcgatcatcgggtcagtctgccacaccaacgaccaccccttcggccctgggtgcgacaccatgggcatcgcctatgtctcgttcgcgcagtgggttgcggtcattcttgtgtacactctggtctaccacatgatggagccaccgatgcagttctacgagatcgtcggggaagggaatgagatacagcaggaacccgagctggtcagcaactacagtaggtccctgcttcatgaggcggagtggccagggatggtcgacaaggaaactgagcattcgaagacaccgttcatcgcgagagttttcatgagcatttcaggttcctcacagaacacgttccctgacatcgatttcaccgaagaaggaacttctgcagctggaccaagcagtcctaagtcgctccgatgtctggcagagccaagagtggtcaggaggattagggttgtcgccgagaagactccgatccagcacgtccttcagcccccgacgatcgcctctttgcttgccattaccatcggcatggttcctgtcctgaaagattttgttttcggggctgatgcgccgctctcgttcttcaccgacagtttggagatcctagccgctgctgtggttccgtcggtgatgttgattctcggaggcatgctcgcggaaggcccaaaagacaacgccttgggcatgaggactatcatcggtatcattgtggccaggctcttggttctcccatgcattggcatcggtgttgtgaccctggcagacaggttgcatctgctcgtggaggaaaaccatatgtaccgctttgtgctctccctgcagtactccaccccgagtgctatcctgcttggagcgatcgccagtctcagaggctatggcgtcaaggaagcatccgcccttctgttctggcagcatatttgtgcggtgttctctctttcactctacctggttgtatacttcaagttgttttctttcatatgaagacaatggccatccatccatccatccatccagttctggcatatatacgtagctatcaagtaggatgctagaagaatgggttttcggcatcggctcctatcagtcagaagtgtttataattcggtagttatttaagtttcagttgtgtgtgttgtttgtgaacaggagatacagacagttattgtctgttcatttcggtcgatatattgatgtgtattttcatgatgctattgttgtatgcaaatcattacctggataaaattagtagaccaggatagactgatagtagtgaataacatggttgcctgatggtcaatatatgaagatgatcagtgttcagtcttctcgtggaagacccaaatcaggcgaccttgctacatgacatcaaggatgtgattcatttgtgtcaattgactttcagcattcctcctagactgtgcattcagatggattacccctttgccccgaaggagcaaataaccatttgctttggcatgggaaattctctctgtatgttcttttgattgaaggtttgggctgaggctatctt

SEQ ID NO: 123179 - DNA, 2255 bp, Zea Mays
atcacaatgccacgccggatgccaagtctctcaaatctggaatcctttcacgccgccactctcccctttttccttctctcttcgtcgttgtggctcctgccttcctgcctcggcgcatcgactcgcggagagggacagcacagcgcctcctccccatcctttctccattcccagatcgaaggtccatgtgagtattgcgtgaatcttgcaagttttggttccgtcgcggtttctggttttcttgctgattggttgcctgaatctttgccaagacctgaaattcgagagatgtaggaagtttagaacacgagtcaggtaccaagcaccgagtatttgcaagatccgcaccggttccaagctagaattgttccacctattgatcctgtataataccgtttcgtagttttttcctccgttgctgaatcttctccattaatttggtgtgcagaaaaaaccatccttttgcatctgattgagcactgtctttgtgcaagagaacaatttagttgtacatacaaacaaaaagaagtgggagtatttttcagagtttattagaagagactgtttcgaggacccaggtcagagaaaggcgagaagctttagcagcggcaatggtctggtcaatggacccgcaggtgaccgtccacggcgactgggtgtcagccgtggtgccgctgatgaagctgctgtgcctggcggtgatcggcctgctcctcgccaacccgcgggtccaggtcgtgcccagggccaccttcaagctcctgagcaagctcgtcttcgcgctcttcctcccctgcctcatcttcgtccacctcggcaagtcggtcaccatagacaacgtcctgcactggtggttcatccccgtcaacgtgctcatcagcactgccatcgggtgcgcccttgggtacatcgtggccctgatctgccgcccgccgccgcacctgttccggtttacggtgatcatgaccgggttcggtaacacggggaacctcccgatcgcgatcatcgggtcagtctgccacaccaacgaccaccccttcggccctgggtgcgacaccatgggcatcgcctatgtctcgttcgcgcagtgggttgcggtcattcttgtgtacactctggtctaccacatgatggagccaccgatgcagttctacgagatcgtcggggaagggaatgagatacagcaggaacccgagctggtcagcaactacagtaggtccctgcttcatgaggcggagtggccagggatggtcgacaaggaaactgagcattcgaagacaccgttcatcgcgagagttttcatgagcatttcaggttcctcacagaacacgttccctgacatcgatttcaccgaagaaggaacttctgcagctggaccaagcagtcctaagtcgctccgatgtctggcagagccaagagtggtcaggaggattagggttgtcgccgagaagactccgatccagcacgtccttcagcccccgacgatcgcctctttgcttgccattaccatcggcatggttcctgtcctgaaagattttgttttcggggctgatgcgccgctctcgttcttcaccgacagtttggagatcctagccgctgctgtggttccgtcggtgatgttgattctcggaggcatgctcgcggaaggcccaaaagacaacgccttgggcatgaggactatcatcggtatcattgtggccaggctcttggttctcccatgcattggcatcggtgttgtgaccctggcagacaggttgcatctgctcgtggaggaaaaccatatgtaccgctttgtgctctccctgcagtactccaccccgagtgctatcctgcttggagcgatcgccagtctcagaggctatggcgtcaaggaagcatccgcccttctgttctggcagcatatttgtgcggtgttctctctttcactctacctggttgtatacttcaagttgttttctttcatatgaagacaatggccatccatccatccatccatccagttctggcatatatacgtagctatcaagtaggatgctagaagaatgggttttcggcatcggctcctatcagtcagaagtgtttataattcggtagttatttaagtttcagttgtgtgtgttgtttgtgaacaggagatacagacagttattgtctgttcatttcggtcgatatattgatgtgtattttcatgatgctattgttgtatgcaaatcattacctggataaaattagtagaccaggatagactgatagta

SEQ ID NO: 123180 - DNA, 91 bp, Zea Mays
catttatgaccatttaattgaccacattatggatgtgttcgaatattcatttgtgcataattttagtatttttactatttaaatataggag

SEQ ID NO: 123181 - DNA, 124 bp, Zea Mays
ctcaaagaaaacattgaatagttatggttgtacgaatgaagcaatttaaccagagatataaaatatcaacaatggtaaccataccattttacacccatgatcaatgacccacttgaaggttgtc

SEQ ID NO: 123182 - DNA, 336 bp, Zea Mays
agtctctcccatgactctcccctctcctatcttttgtgggcgccgtgtcttcaccacttctccctctcgtcgtatgctaccgccggtgatctcttctgtggcgacgtactggtctctgcgcgttgccgtgggagtgcgccgggaccttgggtggccgcccgagtcctcgggacgaatcaagcgcctctggtgctcgcggcagttcttgtcgatcgacggggagggagccgtgtcgcgcatcgtcgcagaccgcaacgcgtccatcggcattgttgcgtgaggacacgagccacctgaagatcatcctggtacctggaatctcaagtcccaggcaag

SEQ ID NO: 123183 - DNA, 423 bp, Zea Mays
atgccgaaagataaaaatggtcacatgaagctgtcagattttgggctgtgcaagccaattgactgttcaaagctctcaacgttgagtgaagatgaacccatgggtgatgacaacatgagggaatcaatggatattgatagttctttgtccaatacagcaaatggtagaagatggagaagtcaacacgaacagcttcagcactggcagatgaacagaagaaaactggcattctcaactgttgggacaccagattatattgctccagaggttctgctgaagaagggatgtggaatggaatgtgattggtggtctctaggcgcgatcatgtatgagatgctagttgggtatccaccattttatgccgatgatccaataactacatgccgaaagcttagcacacttataggcttatcctcgaaataa

SEQ ID NO: 123184 - DNA, 1194 bp, Zea Mays
aaaattcatgagaacgacgatgattccggttcggactatccatcaaacattaagcatgcgatgaacaatgtccttcccgtcatcgcccaacagctagaattccacttctatcatcgaccccataacatcacacaacctaacgacataataacggatcgagccataattaccaagcgcacacctcgtattactggtatttctaacttaatcgtatacgtatacaaagcgtcttattttacgatcataaaaccgagagtaaaaatagcgaatcggctcaccacatcacaactcgatttgctagttgcctgaacgacgacggcctttagcttgacgacgagatcgaatagagaatggtgagcgtgaggatttcacagcgaggaggagcgacatcttggatttttggtcctatatttaatcgaacacatcggaagcgaggcacaacaggaatgatagtgaggcttgacggcgaacgacgtgacgacgaacgacgacaaacgacaaggtcgacaacgcaattggggattaaagccgagcgagccgagagggcgcactggcgagcaggaacgactggcgaactgtggtttaggcgaacagaacgcgacacagggagcttgaggtgcggattcacgcatccacagccgaacggcggagctgagaccaggctcactagcgaggtaggagagggagatgcacaagtagaggctgagctgctgaaattggaagacgacgacgggacgatgccgaggtgaacgcagcagggagctggctgggcgcgcgctcggctgacagagagcaggcaggggcgctaggcgaggcaaacgcgaccaacgaccatggccgagctggagcaggcgctaggcgcgcagaccgagccaccggaaggcgccgagttgggtccgagctaggacgcggcacgcgcggcaacaaagagctccaggcggtgccgagcaggggggaaatcgccatggacgagcaggcaacagagagaagcaggggcgctcgtgggaaatcggctaggcgttgcagggaggagatccgagctgggacgccaggaagaagaggcttgggggcgccggcgagctggaggagctcgggaggaggagcgctcggccacaggggagcttcgcgccggagatgcagaccgagcttgagggagcggcgcctggggaagagaagagagagcgacgcggcagg

SEQ ID NO: 123185 - DNA, 1338 bp, Zea Mays
aagcattttaataaataattaatacaaccacaacgcacggttactaccgtccggagaactgacgcaactaatataactaattaatacaagccttgaactaataataaaaactagcgaatccagtgtactattactagtcgatacaaaattcatgagaacgacgatgattccggttcggactatccatcaaacattaagcatgcgatgaataatgtccttcccgtcatcgcccaacagctagaattccacttctatcatcgaccccataacatcacacaacctaacgacataataacggatcgagccataattaccaagcgcacacctcgtattacaggtatttctaacttaatcgtatacgtatacaaagcgtcttattttacgatcataaaaccgagagtaaaaatagcgaatcggctcaccacatcacaactcgatttggtagttgcctgaacgacgacgaccttcaacttgacgacgagatcgaatagagaatggtgagcgtgaggatttcacagcgaggaggagcgacatcttggatttttggtcctacatttaatcgaacacatcggaagcgaggcacaacagaaatggcagtgaggcttgacggcgaacgacgtgacaacgaacgacgacaaactacaaggtcgacgacgcgattggggattaaagccgagcgagccgagagggcacactggcgagcaggaacgactggcgaactgtggtttaggcgaacagaacgcgacacagggagcttgaggtgcggattcacacatccatagccgaacggcggagctgagactaggctcgctggcgaggtaggagagggagatgcacaagtagaggccgagctgctgaaattggaagacaacgacgggacgatgccgaggtgaacgcagcagggagctggctgggcgcgcgctcggctgacagagagcaggcaggggcgctaggcgaggcaaacgcgaccagcaaccatggccgagctggagcaggcgctaggcgcgcagaccgagccgcaggaaggcgccgagttgggtccgagctaggacgcggcacgcgcggcaacagagagctccaggcggtgccgagcaggggggaaatcgccatggacgagcaggcaacagagagaagcaggggcgcgcgtgggaaatcggctgggcgttgcagggaggagatccgagcagggacgccagaaagaagaggcttgggggcgccggcgagctggaggagctcgggaggaggagcgctcggccacaggggagcttcgcgccggagatgcagaccgagcttgagggagcgacgcctggggaagagaagagagagcgacgcggcagg

SEQ ID NO: 123186 - DNA, 1311 bp, Zea Mays
ctttccgcccaaaacacttcccagccctccacgcaccccgctgccgcggctcgaacataaaccctagagccgccggcccggtcgcgctagcgacacaaatctcaaatcacccggagagaactcgctcgcgaaggctgaactcatggctcgcgtcttcgttgggaacctggatccgcgtgtcacggcgcgggagattgaggacgagttccgcacgtttggggttctgaagagtgtatgggttgctaggaaaccaccagggtttgccttcattgacttcgatgaccgcagggatgcacaagatgccattcgcgatttggatggtaagaatggttggagggttgagctgtcaaccaaagatggtggtggccgtggccgagaccgtaatggttctgatatgaagtgctatgagtgtggtgaagttggccactttgcacgtgaatgtcgcttacggattggttcgggagggctgggtagtggaaggcgtcgcagccgaagtcctagatatcgcagccggagccgaagtcgcagccggagcccaagacatcgaaggagcccaagctatggcagaaggagctacagcccacgagatcgttctcctaggaggcgaagttacagcaggtcgccgccactgccaccaccgcctcctagaaataacagcatgtcaccacggggagcccgagaaatgagcagatcgtcaccaccacctcccaaaaataacagcagttcaccacgggaagcccgagaaatgagcagatcgccaccaccacctgccaaaaataaccgcagttcaccacgggaagcccgagaaatgagcagatcgccgccgccaccacctcccagaaataacagcaggtcaccaccgggagctcgagatgtgagcaggtcgccgccaccacctcctgatgccagaagaagctatagcagatccccagaacagcagccccagcacgagtccccatatgccaatgacgcctgagaatatttagctgctcaaagatgctggaaaatgctaaggggcccagcatgttttgcccatgcgcgtcggtacaacttataggatccagtctgagattttgctcgtgttttgggtttcccttggacacaccgctgctgataccattgtagagggaggagcataacgtttccgtttcgagtattgactttgggcacttatagctgtcaagacatgacctggttcttgttagatttatatcactagattgcttttgaattcggacgaagtgttaatcgtgggctatgttgagatatttgtctaccttttcaggacgctttcgaagaaacattttccta

SEQ ID NO: 123187 - DNA, 1970 bp, Zea Mays
acctcttaccgctcctccagccgcagcagcagcgacacgcaccgccggctcgacacggcctttacgcccagctcgccgcaggcgcgggcgatggtggtctgcgtctgggaccggacgaagcggacgcgattgggcgtgggcacggaggccagcgtgtcgcggagcgtcacgctgttgatggcgttggcgttgctggggaagtcgggcgtgctggagcgagagcgtggcgtcgcactcgcacaccaggagctcccacaccttcttgccgcgcgcgtccaggatgggccgcgaccgcgagcagaagtccagctcccacttccggatcgacgccgggacagtcaggcagcgggcgggagtgagagcgatggccgtcgcggagtgtggtgtggtgatctcaaatcttccgcttgggccgtgggccggcccaagaccgtcaagaagccctacctaaaacggtgaggcaaacggataacgacgacctgatttgggaaagaaagcaaaagaaacgaaactagagggtagaacacgacggtgtccggcgtccgtaaaaaaggaggagaggaggccagggaggcgggggcagcaagaatggcgtgctccaccggtctctgcttcttggcgtcgattcctcctctctcagcctcttgttcttctggctcctcctgcttcctcatgatcaagcgtgtgtcctctgctccgtccttgtccagatggacgatccaatacaagcaattgggacatacaatatatcggagaagccacgttctggcctttgctagtgcagatgcaccacaaggcaaaagaagctcaggtgagaatgttgtgatggttgatccactggaagctaagcgcctagctgctaaacaaatgcaagaaattagggccaaagaaaagctgaaggtgcattgttgctgtattggagtgtatcattccttagactaaatcaaataatcaatcatatatgctaatagatggaaccttcgtagtaaggaaaagtggaaaacatataccttttgtttgggccaattgttggtgctgaatcgttgtttcagaaaactggaaacagaactaggcttttccctgttcatgctgtcctgcaatatgagaacgagaaacaccattgtagtatttgtttggtcgtaattttgtgttccggagctgaatcggaacggttcctaggtgtcaaatgcaccctaaattaaaaaaatctacctgtggtggaaattatagctcataagagagatgctgaaattcatttagtgaaacatatatgtttattttattatttcactaatgtatggtctccactttctgttaacaaatagttatttaatcatccattaattggtgtctgtttgtcctggagaacatcatctgctgcactcccctctgaatcccaatatcagtctatattatatattgatgcttcattgtgttttcttactcttcaaatttgatccgaatcactggtctgttgtgtagaggcgccgtcaagcagaagcgatcaacggggcattggcagtgataggactcacggctggattgctagtggaggctcagacaggaaaggacatcttagggcagctagctggatatctgacggctatttctagtttatttgggcaataacactggaccatggttggagatttatttttcacgttccacggccaggagaggtcttatctgaatcttatttgatggatccacccaatttttttgggagctgatcccagatggatgtggaatagcgcacccagacttgtatgttgatcaagcacgatagcatgggctgaacattagtatttctatgtagcacatcaatttctgacgatagcgcctgctaaagagcagttctattcatactcaaatgtgaaatgttgaagtcttcgagaaatcttttccttcttctgcccaaaccattaagctgatggcacattggcacctgcagtggattgatgagtctcgct

SEQ ID NO: 123188 - DNA, 1388 bp, Zea Mays
acctcttaccgctcctccagccgcagcagcagcgacacgcaccgccggctcgacacggcctttacgcccagctcgccgcaggcgcgggcgatggtggtctgcgtctgggaccggacgaagcggacgcgattgggcgtgggcacggaggccagcgtgtcgcggagcgtcacgctgttgatggcgttggcgttgctggggaagtcgggcgtgctggagcgagagcgtggcgtcgcactcgcacaccaggagctcccacaccttcttgccgcgcgcgtccaggatgggccgcgaccgcgagcagaagtccagctcccacttccggatcgacgccgggacagtcaggcagcgggcgggagtgagagcgatggccgtcgcggagtgtggtgtggtgatctcaaatcttccgcttgggccgtgggccggcccaagaccgtcaagaagccctacctaaaacggtgaggcaaacggataacgacgacctgatttgggaaagaaagcaaaagaaacgaaactagagggtagaacacgacggtgtccggcgtccgtaaaaaaggaggagaggaggccagggaggcgggggcagcaagaatggcgtgctccaccggtctctgcttcttggcgtcgattcctcctctctcagcctcttgttcttctggctcctcctgcttcctcatgatcaagcgtgtgtcctctgctccgtccttgtccagatggacgatccaatacaagcaattgggacatacaatatatcggagaagccacgttctggcctttgctagtgcagatgcaccacaaggcaaaagaagctcaggtgagaatgttgtgatggttgatccactggaagctaagcgcctagctgctaaacaaatgcaagaaattagggccaaagaaaagctgaagaggcgccgtcaagcagaagcgatcaacggggcattggcagtgataggactcacggctggattgctagtggaggctcagacaggaaaggacatcttagggcagctagctggatatctgacggctatttctagtttatttgggcaataacactggaccatggttggagatttatttttcacgttccacggccaggagaggtcttatctgaatcttatttgatggatccacccaatttttttgggagctgatcccagatggatgtggaatagcgcacccagacttgtatgttgatcaagcacgatagcatgggctgaacattagtatttctatgtagcacatcaatttctgacgatagcgcctgctaaagagcagttctattcatactcaaatgtgaaatgttgaagtcttcgagaaatcttttccttcttctgcccaaaccattaagctgatggcacattggcacctgcagtggattgatgagtctcgct

SEQ ID NO: 123189 - DNA, 1299 bp, Zea Mays
acctcttaccgctcctccagccgcagcagcagcgacacgcaccgccggctcgacacggcctttacgcccagctcgccgcaggcgcgggcgatggtggtctgcgtctgggaccggacgaagcggacgcgattgggcgtgggcacggaggccagcgtgtcgcggagcgtcacgctgttgatggcgttggcgttgctggggaagtcgggcgtgctggagcgagagcgtggcgtcgcactcgcacaccaggagctcccacaccttcttgccgcgcgcgtccaggatgggccgcgaccgcgagcagaagtccagctcccacttccggatcgacgccgggacagtcaggcagcgggcgggagtgagagcgatggccgtcgcggagtgtggtgtggtgatctcaaatcttccgcttgggccgtgggccggcccaagaccgtcaagaagccctacctaaaacggtgaggcaaacggataacgacgacctgatttgggaaagaaagcaaaagaaacgaaactagagggtagaacacgacggtgtccggcgtccgtaaaaaaggaggagaggaggccagggaggcgggggcagcaagaatggcgtgctccaccggtctctgcttcttggcgtcgattcctcctctctcagcctcttgttcttctggctcctcctgcttcctcatgatcaagcgtgtgtcctctgctccgtccttgtccagatggacgatccaatacaagcaattgggacatacaatatatcggagaagccacgttctggcctttgctagtgcagatgcaccacaaggcaaaagaagctcagaggcgccgtcaagcagaagcgatcaacggggcattggcagtgataggactcacggctggattgctagtggaggctcagacaggaaaggacatcttagggcagctagctggatatctgacggctatttctagtttatttgggcaataacactggaccatggttggagatttatttttcacgttccacggccaggagaggtcttatctgaatcttatttgatggatccacccaatttttttgggagctgatcccagatggatgtggaatagcgcacccagacttgtatgttgatcaagcacgatagcatgggctgaacattagtatttctatgtagcacatcaatttctgacgatagcgcctgctaaagagcagttctattcatactcaaatgtgaaatgttgaagtcttcgagaaatcttttccttcttctgcccaaaccattaagctgatggcacattggcacctgcagtggattgatgagtctcgct

SEQ ID NO: 123190 - DNA, 1274 bp, Zea Mays
acctcttaccgctcctccagccgcagcagcagcgacacgcaccgccggctcgacacggcctttacgcccagctcgccgcaggcgcgggcgatggtggtctgcgtctgggaccggacgaagcggacgcgattgggcgtgggcacggaggccagcgtgtcgcggagcgtcacgctgttgatggcgttggcgttgctggggaagtcgggcgtgctggagcgagagcgtggcgtcgcactcgcacaccaggagctcccacaccttcttgccgcgcgcgtccaggatgggccgcgaccgcgagcagaagtccagctcccacttccggatcgacgccgggacagtcaggcagcgggcgggagtgagagcgatggccgtcgcggagtgtggtgtggtgatctcaaatcttccgcttgggccgtgggccggcccaagaccgtcaagaagccctacctaaaacggtgaggcaaacggataacgacgacctgatttgggaaagaaagcaaaagaaacgaaactagagggtagaacacgacggtgtccggcgtccgtaaaaaaggaggagaggaggccagggaggcgggggcagcaagaatggcgtgctccaccggtctctgcttcttggcgtcgattcctcctctctcagcctcttgttcttctggctcctcctgcttcctcatgatcaagcgtgtgtcctctgctccgtccttgtccagatggacgatccaatacaagcaattgggacatacaatatatcggagaagccacgttctggcctttgctagtgcagataggcgccgtcaagcagaagcgatcaacggggcattggcagtgataggactcacggctggattgctagtggaggctcagacaggaaaggacatcttagggcagctagctggatatctgacggctatttctagtttatttgggcaataacactggaccatggttggagatttatttttcacgttccacggccaggagaggtcttatctgaatcttatttgatggatccacccaatttttttgggagctgatcccagatggatgtggaatagcgcacccagacttgtatgttgatcaagcacgatagcatgggctgaacattagtatttctatgtagcacatcaatttctgacgatagcgcctgctaaagagcagttctattcatactcaaatgtgaaatgttgaagtcttcgagaaatcttttccttcttctgcccaaaccattaagctgatggcacattggcacctgcagtggattgatgagtctcgct

SEQ ID NO: 123191 - DNA, 3287 bp, Zea Mays
acctcttaccgctcctccagccgcagcagcagcgacacgcaccgccggctcgacacggcctttacgcccagctcgccgcaggcgcgggcgatggtggtctgcgtctgggaccggacgaagcggacgcgattgggcgtgggcacggaggccagcgtgtcgcggagcgtcacgctgttgatggcgttggcgttgctggggaagtcgggcgtgctggagcgagagcgtggcgtcgcactcgcacaccaggagctcccacaccttcttgccgcgcgcgtccaggatgggccgcgaccgcgagcagaagtccagctcccacttccggatcgacgccgggacagtcaggcagcgggcgggagtgagagcgatggccgtcgcggagtgtggtgtggtgatctcaaatcttccgcttgggccgtgggccggcccaagaccgtcaagaagccctacctaaaacggtgaggcaaacggataacgacgacctgatttgggaaagaaagcaaaagaaacgaaactagagggtagaacacgacggtgtccggcgtccgtaaaaaaggaggagaggaggccagggaggcgggggcagcaagaatggcgtgctccaccggtctctgcttcttggcgtcgattcctcctctctcagcctcttgttcttctggctcctcctgcttcctcatgatcaagcgtgtgtcctctgctccgtccttgtccaggtatggtcttgcttctttgttgccccgcctcctggccaattcgttgaagctttcttgaaatcccaaattaagttgctcgatgatgttaaattttgtttttttccttgttagacgagaattttgcattgttgttcctgaagctagccaacacgaaaactgtttggtgttgatttctgttctctgcagtcttatgaacttaccttaaactgctataagtattaaagattattttgttggaactccacattctggtgtatctggtttcctttcttaccatatgtagactagttactaatttcaagttcaaaccctgttcttcagttacaaacccttggaaaaaaaaattcgtttcgactttttgttcaactgcaaagtgtttccacttcctcatttggggttgcaagcagctaggagacccgtacttttgaattaatatcagttgattttacttagttcttgtttgtttgggattataatccactcagattatataatctaacttattttaaacaaaacatcagttcaaaataagttagattatatttttttaacagaaaggggattccccctatttcattaagaaataggaccacagttttaacaacattcaaacgaaaaaactacttattacaccacttagctcatagaactaaaagagcataagcaagccatccaggcctaaggtggatcactacagtttctgacaaaaaagtcataccgcacaaccactgcaaccactaccaaccagtttttggcaaggccgaccacacacaaagccccagcgaccagacaaaagcaacacattgtgaaacaaataccctagaaccaaaagggccttcgagagccaggcaagccacacatctaaaacaaacagacatcacgctcaacgttagttgcacagtcttttatccatcggcgcccagccaaaattcctgttgaagacctccttaaccattcttctgagaagggagcttccttccagcagcatctttcttgaagtttctttctgaagaatcgcccaagcatccaaccaagagcagcacagaaacacaaggttaacagcatttaaagaggaaatgttgttgaaacagaaatcatttctatgcttccacaacgaccagagaactgcactgcaaccaacagtgatcaaatttttttcatgacctttgaatttgcataaccatctcccaaacatatcattagcatttttgggaagagttagagacggacaggacatctgaataattttccaagaaaaagatgcaacctggcaattataaaagatatggctggttgtttcaagacaaccacaccactcacaatttacattcccttgccagtttttctttctcagattttccttggataagattttatcatttatgaccagtcagaggaaaactttaattctctgaggtatttttgccttccagatgaaccaacaaggatccctgttcatatttactttaaagtttctataagatgatttcactgaaaatcctttcttatcaagcaaccaacatggtttatcatttctgtctataagacagaaatctgcacagttattttttaaatcatccaacagattgaccccagctccaaataatcttcttctaaagattaaggagttacagttgtctcttaaggcccaattcacatttatctctttattaagagataactcaaaaagtcttttgtatctcatggataaaggttcatcaccacaccacttatccaaccaaaaactagtagagacaccatttccaatttccatttttctgtttttacaatattcctgcttacagtccatgaggcctcgccaaaattgagagtctccttgtttttttataatcctaaacaaacatgctcttagtttactaataatagctaattctggttttgattagtgacatcaatagtactcgcattacaactttactgacctctgagttatattacttttctctcatagatggacgatccaatacaagcaattgggacatacaatatatcggagaagccacgttctggcctttgctagtgcagatgcaccacaaggcaaaagaagctcaggtgagaatgttgtgatggttgatccactggaagctaagcgcctagctgctaaacaaatgcaagaaattagggccaaagaaaagctgaagaggcgccgtcaagcagaagcgatcaacggggcattggcagtgataggactcacggctggattgctagtggaggctcagacaggaaaggacatcttagggcagctagctggatatctgacggctatttctagtttatttgggcaataacactggaccatggttggagatttatttttcacgttccacggccaggagaggtcttatctgaatcttatttgatggatccacccaatttttttgggagctgatcccagatggatgtggaatagcgcacccagacttgtatgttgatcaagcacgatagcatgggctgaacattagtatttctatgtagcacatcaatttctgacgatagcgcctgctaaagagcagttctattcatactcaaatgtgaaatgttgaagtcttcgagaaa

SEQ ID NO: 123192 - DNA, 2065 bp, Zea Mays
gaggagaatttctatttatgacagataagaatggtggtagggatgcatcaatgtgacatggtttaaagtagcagaatacatgccgccaccaacagggaagatgagttattggtgttgcttcatccatccaatgcaaaccataagaagctcccaaccccacctcccaagaggcacctgggaattaacatggttgatgggaggaccaagctagtagtgtacacgctgccatcaaagattgaaaagaaggtggtcaatgaacagatgtatgtccagacgtaagatatgtgttccttggcattgaacaggaggccaaggattttgcattattgtaccatagcgagaggctggtaattgcttatggtctgattagcactccggcgaggactccacttggtgtcattaagaacctgaggaaatgtggtgactgccacaatcccatcaatatcgtgtccaggattgttaggagagagcttattgtgagggacaataagaggttccactctttcaagaatagatagtgctcctgtggaggactggaggctattggtgataatggattaaatctgttcttctcatcggtgttgctgccatacttgtatggagctgccagccatggtttcaattgataataagcagtatgaaggtatccgatggtattgttagtattttctcatccttaaatatgcttaggacatgcttatggtatttagctgcaagcacttgtatgatgcaagattatcactacttgatatactaaccaatcctactctcctctgtatcagtatattgtttctcataggaaatatgtgctagtttggaatatatagctatatggttgtaagagctaattcttgctttaatttggacgaatgaagtaaagtggatcttatatatttgtacgcatatatatgcacacacacaccatagttgcatggaaatgctcgatgtaaagagaaataataattctgagtctatatatgctcaaatttttttggtctgagaggaaagactaagaggaaagaacattgcaacaaacaaaaaaattctccctccccaccattctgaaggccaagtatttaccaaacaaatccttttggactgctactcataatggaccaaggtttgtcttctagtcctcatcttgcagatcaagaaagatctcgtccaaaacacaatttaccaaatccactctggcaacaccccattaatggtcaagcccctggcgtccaatctgacagtccattcatggccaccttatcctggcagttactcagaattcgctatcgagtgtgccagtgttcttgatgaccatggtctgctcaatattgttttgactgtcaaggtgtttctgggaaaggggaagcaggcatggcgacgacacgcgcaggcaccgcgatggcatttgagcgaggtaaggggataacgatctgagctgcaccatcacggcgacgacgtttcagggggaggggcagggggctcctggtggtgggcctggtggctcgcggtggcacaatggagtttgagggagtgtgggcaagtcatcgcggcgcctcatcttgggatttcgcggcattggtgtgctgggtcacgtagacgttgggacaggggatggagggcgaaccgtcctcacctttgctttcgcgaagccgtcgaggcgccggagccggccgttagcggcgacagcgccgcgcaccaggtcctacacagttgtggcacgcgcgacatccaggccgaccactgcctcgaccgtggcgcagcgcgtgcgggcgtagcccgagattgtcaccgggtgcgtctggatccgagactacgctggagcatggatttgagacgagccgcctcggacgaggacgggcaggtcgcgacatcgtcgacgtcgtgggtgagaaaagtaagttggtgacggagggttcacctgttgcttgttttgttggtgtgtggcgctgaagaagcacggcagagggggggcggagttgaaggaggagtaaggcgcggtggagaggtgggtggtgccgaagaagcgtgagggaggaggggaacccggggccggacttggaggaggagc

SEQ ID NO: 123193 - DNA, 907 bp, Zea Mays
gctaccatagatttactccacccggagaccataccgaagcaattatattttgtcaaagtttgggatccagtttaaatgagtgacacacgtactgaatatcagaatgcttcaaatttgctatattagctctgatcaagtatttaatatcaatttcctaatggttccttctactttgtatccctgcaatgtaagccataattatttgttgtgttgttttctcgttgtatttgtcaattacttgtgtttgctttcattgaaatcatcgtaagcttagggggtgtttgggaacaaagtttttctgcagttttggaagaatactgcagtattctcaaatactgcagtattatatacataatagtgtttggcaagctgtgtaaaatctctgttttcaaaactgaagtattgcaaatactatagttgttttaaggcattctaaacttagctctggacctcagttttcaaaactgcggtatcataaactacggtattgtcataactaaagtatagtatagtatttcaaaaactgtggttttcaaaaactttgttcccaaacagggccttactgtttgatatatacaggttgagaaatggaacgagcagagggagcatgggacgtttccaggacctctctgaatgtaccgcccgagacctccagttggaccagtcaacaagttggccaggcagtcctactgttccattctgcattcctacttccagaatcgtaaatgccttttgtcccttgctcttcaaccagtcaccacaaaactgttagtgatgcctctcgtatgcagctctaataatttggctacagttgccccacatgcagccttgttttgtgtgtggactgtggacctcattttgtaaacgtctgaatggacttgcattttctttctatgtataaaaaaaa

SEQ ID NO: 123194 - DNA, 1020 bp, Zea Mays
atactacgcaacaagatcgactcgtcagagtccaaattttcctgcgtgttcgttgtcgtgttccgtgcccgtacgcctgatctacctaatatctactatctatctatctatctatctatctatctatctatctatctatctatctatctatctatctatctgtctgtacacatgagcctagacgaccaagcaggcctttagaggcccatcctaaggaatccggcatcaacaggcctggttttgagctgggccacgcggtctgttggaagggcttggtattgtgctggcggaccagatgggccagaagagccgcggttttcggacgctgggctccggtctttctcgcctccttctcagccttcaggggcggctcgcggaagccatcgtggttgacccgaccagcagccgagtgcccgattacaatcagccatcgccaccacctccctccgcggctccgccttccgccgcgaacacgccgctgtctcgaccccttgtcctcctccttcagcaagatggcggagattgagataaaaacagcacctgctgacttccgcttccctacaacaaaccaaacaaggcattgttttactcgctatgtcgagtaccacaggtgtttgaatgccaaaggggatgatgctggtgtttgcgaaaaatttgccaagtactacaggtccctttgccctggagaatgggttgagaaatggaacgagcagagggagcatgggacgtttccaggacctctctgaatgtaccgcccgagacctccagttggaccagtcaacaagttggccaggcagtcctactgttccattctgcattcctacttccagaatcgtaaatgccttttgtcccttgctcttcaaccagtcaccacaaaactgttagtgatgcctctcgtatgcagctctaataatttggctacagttgccccacatgcagccttgttttgtgtgtggactgtggacctcattttgtaaacgtctgaatggacttgcattttctttctatgtataaaaaaaa

SEQ ID NO: 123195 - DNA, 1209 bp, Zea Mays
atactacgcaacaagatcgactcgtcagagtccaaattttcctgcgtgttcgttgtcgtgttccgtgcccgtacgcctgatctacctaatatctactatctatctatctatctatctatctatctatctatctatctatctatctatctatctatctatctgtctgtacacatgagcctagacgaccaagcaggcctttagaggcccatcctaaggaatccggcatcaacaggcctggttttgagctgggccacgcggtctgttggaagggcttggtattgtgctggcggaccagatgggccagaagagccgcggttttcggacgctgggctccggtctttctcgcctccttctcagccttcaggggcggctcgcggaagccatcgtggttgacccgaccagcagccgagtgcccgattacaatcagccatcgccaccacctccctccgcggctccgccttccgccgcgaacacgccgctgtctcgaccccttgtcctcctccttcagcaagatggcggagattgagataaaaacagcacctgctgacttccgcttccctacaacaaaccaaacaaggcattgttttactcgctatgtcgagtaccacaggtgtttgaatgccaaaggggatgatgctggtgtttgcgaaaaatttgccaagtactacaggtccctttgccctggagaatgggttgagaaatggaacgagcagagggagcatgggacgtttccaggacctctctgaatgtaccgcccgagacctccagttggaccagtcaacaagttggccaggcagtcctactgttccattctgcattcctacttccagaatcgtaaatgccttttgtcccttgctcttcaaccagtcaccacaaaactgttagtgatgcctctcgtatgcagctctaataatttggctacagttgccccacatgcagccttgttttgtgtgtggactgtggacctcattttgtaaacgtctgaatggacttgcattttctttcgtgcctgcgaccgcgtcgtcctgtactgcggcttttgtgtcgtcagtaagctggcattgtagtaatggcctatgaatgtgggtgtacctttcccgtttaaattaagggtctccaattctggaggattggaggggattgagtttaaaaataaactgatttcccctcttattcacctctaataaaagtggcaatttgaatttccaa

SEQ ID NO: 123196 - DNA, 1113 bp, Zea Mays
tgccaatagaaaaggcatcgaaattgtatcgaacacaagactttatttagatccaaacaattcaaaaccacaatatcgatacactgctcattgcggcagacaaagctgaccacctagagctgtttattgcaaatataagcatgtgacacattacaatagcacaggttatgtggcataaataattaggcttggctgcttcacaagataaccagtggcagcaactctgaatctgatctatcgtcgaccacatcagcatttcatcttctttacatctctttcctcgctctcatccacagcatcagcttcccagggagcatcactctctgagcgattcttgacaatgtcaccagcgaagtcatgcaggactgacctcggcgacccatgggtcgtttcggccgtaacagtgaagctctgatagatgagcaagccaccaaacggcagcacctgctcaaccatgttgctgcaagcataggcctcagcatccagtttcgtcccccaggtcttcgcattgtcccgatcaccgaagatggtcacggcaacagagaactcagttggaccaaagcacctcagcaccctcttaaccaggtcaccataagagaaagagcccgggttaaagcccatgacctcgtagcttgcatagctgaagccgtcctctggggtcacatgaatggtcgacaaagcagggccatgaacagcattcatggagtagccacagggctcgaagtcgaagtcacagatctccatctctgggatgatgtccgagataccagagagcttggtcatctccttggcgcacagcgagtaaccatcagcagtggtcttgaagaagacagaagctttcttcttgtccagcccagtcatgcacatctctagagtaacaacaggctcctcagggtgctcagcggcgtagtagacgtgccacttctgcccgggcttcgcagagtcaccaatcacataagcattgccaccggacttgaggccaccgaagaagcgattcaggaaggcaacctcgtcagcgaagttcttgtgtggggaaggctgtgcttcagggaatatgaacgttccacgggagtatttaactgcagcgagtggcaacaggagctcttcagcaag

SEQ ID NO: 123197 - DNA, 1118 bp, Zea Mays
gcagatgccaatagaaaaggcatcgaaattgtatcgaacacaagactttatttagatccaaacaattcaaaaccacaatatcgatacactgctcattgcggcagacaaagctgaccacctagagctgtttattgcaaatataagcatgtgacacattacaatagcacaggttatgtggcataaataattaggcttggctgcttcacaagataaccagtggcagcaactctgaatctgatctatcgtcgaccacatcagcatttcatcttctttacatctctttcctcgctctcatccacagcatcagcttcccagggagcatcactctctgagcgattcttgacaatgtcaccagcgaagtcatgcaggactgacctcggcgacccatgggtcgtttcggccgtaacagtgaagctctgatagatgagcaagccaccaaacggcagcacctgctcaaccatgttgctgcaagcataggcctcagcatccagtttcgtcccccaggtcttcgcattgtcccgatcaccgaagatggtcacggcaacagagaactcagttggaccaaagcacctcagcaccctcttaaccaggtcaccataagagaaagagcccgggttaaagcccatgacctcgtagcttgcatagctgaagccgtcctctggggtcacatgaatggtcgacaaagcagggccatgaacagcattcatggagtagccacagggctcgaagtcgaagtcacagatctccatctctgggatgatgtccgagataccagagagcttggtcatctccttggcgcacagcgagtaaccatcagcagtggtcttgaagaagacagaagctttcttcttgtccagcccagtcatgcacatctctagagtaacaacaggctcctcagggtgctcagcggcgtagtagacgtgccacttctgcccgggcttcgcagagtcaccaatcacataagcattgccaccggacttgaggccaccgaagaagcgattcaggaaggcaacctcgtcagcgaagttcttgtgtggggaaggctgtgcttcagggaatatgaacgttccacgggagtatttaactgcagcgagtggcaacaggagctcttcagcaag

SEQ ID NO: 123198 - DNA, 2109 bp, Zea Mays
gttacatttccacggctcccaccagcgtgagtgcgtgaccagccccaatgccctccaaaccctagtccacagctcctgtaccctggcggccatgccggatctgagcaccagctacctccctcccttccctgaactgtccctcgatgcgggggccctcgccgtcgaccacgcggggaatgctgcagccgccgcctcggccgatgcggcgtccgcgtacgcgtcttcgtctgcctctgtgggcagcggcgtagacgacctcgttattccagcggaatgccggtggaagggccatgtccgcaccttcgacatggcgggcgcgggcgctgtcaccacttgccccgccgcgcggcgtggcggcgggaagaagctgtcactgattccgtcactcgagccggcacggacgcaggcttcagcatcggctccgacgctcgaggaacgcgtgagcgagtgggcggctaagaaggcagcggccggcgttccgactcatcactgcgtgctgcctttcctcaccggggcgccaatggcggtcgaatgtcgtttgtgctccaagattatttatgttggagaagaaataaaatgttcagttaaaaagtgtccacaaatgttccatctcaaatgtgttgcggaagatacttcaaactttaccgttgaaagcttcaggtgccctcaacattattttgccggctacctcttccatatgttaatgaagacttaaatattgattcaatcatcagggattatgctgaggctgtttataagccacccccctatacatctatcaggcgcaatgtatatctgataaaaaagaagcgcactggtgttcgcgtggatattgggtgcacaaactgcagggctgattctacttgcaaagaagactgtgaatgcaggggtctttctatgagttgttccaagaattgtcgctgctcagatctatgtacaaacaggccattccgcaaggataagaaaattaaaattgtgaagacaaagcgatgtggatggggtgctgttgcgttggagccattggagagaggtgattttgtaatcgagtatgttggtgaagtcattgatgatgcgacatgtgaacaaaggctttgggatataagacggcgtggtgacaaaaacttctacatgtgtgaaatcagcaaagattttacaatagatgcgacatttaaaggcaatgtgtcacgttttctaaatcacagttgtgagcccaactgtaaactcgaaaaatggcaggttgatggtgagacaagagttggtgtctttgcctctcgttccatcgaagttggagagcccttaacttatgattacaggtttgtgcattttggagagaaagtgaagtgccattgcgaagcagtgaactgccagggatacctgggcagccaaataaagaacccaattcaaagcattcttgccactgtagcaccgcaagtgcagttgcgagagtattcgcccatgcaccacgaagctccaagattgaagccaataaatcacttgttaccctggaccaactgtatagaggtctcttttaacctgagaagcaaaaggaaaattgaccggctatgctgggcccgcaagaagaagagaacatccctcgtgccatcttcaacaagcatgccagcatcgccgagtgaagttcctgccgcggatttctaactgcccttcgttgaagagcaagcctgccctgtataataatttcatggtacattctttacatgcattggttggaaacgattctttcacattgctcatcaatggtgttgtaacctgcaacattctttatttggtttcatagggcattcagtcagtttacgggtggtagtttgtcggaacatgtacccaatttttctgatgaaacaaatgtttgagcttcatgtaatgttggctgctgttttttttatgcgagataatgttatgaaactggatagtccctgtaaacatggcttaaaacatgacagaattattttcttttaggagaatgctaccccttttattttatgtacaaggaattgataaaaagagcagaggtcctagcggcctaggcgtgcgagagcctagagcgcatatctaatcatcagtttaatataaaggcgattaacgaagacacgg

SEQ ID NO: 123199 - DNA, 835 bp, Zea Mays
gttacatttccacggctcccaccagcgtgagtgcgtgaccagccccaatgccctccaaaccctagtccacagctcctgtaccctggcggccatgccggatctgagcaccagctacctccctcccttccctgaactgtccctcgatgcgggggccctcgccgtcgaccacgcggggaatgctgcagccgccgcctcggccgatgcggcgtccgcgtacgcgtcttcgtctgcctctgtgggcagcggcgtagacgacctcgttattccagcggaatgccggtggaagggccatgtccgcaccttcgacatggcgggcgcgggcgctgtcaccacttgccccgccgcgcggcgtggcggcgggaagaagctgtcactgattccgtcactcgagccggcacggacgcaggcttcagcatcggctccgacgctcgaggaacgcgtgagcgagtgggcggctaagaaggcagcggccggcgttccgactcatcactgcgtgctgcctttcctcaccggggcgccaatggcggtcgaatgtcgtttgtgctccaagattatttatgttggagaagaaataaaatgttcagttaaaaagtgtccacaaatgttccatctcaaatgtgttgcggaagatacttcaaactttaccgttgaaagcttcaggtgccctcaacatgggtgtatggtttgtaagcaaaagatgttcttttggcgctgcggacgttgtacagttgcagcacatacgaaatgtgcaccatggccagtggttcacctaaaaaatgatcaaggaagtgcaatttgctggaggcatccttctgactggctgctgcaaaataag

SEQ ID NO: 123200 - DNA, 1146 bp, Zea Mays
gtttagaaactctttttttaactgtttgccggagccggaggcggtttcgactttggagccctccgaggctcttcagaaagaaacaagaaaatctgcaaacgaattgtttgtccaggagaaggcccccgacgggattattctttctccccgcgtgctctctatctctcccctctttctctccctctgcccgacgactaggccgccgccgccacggccccgccgccgccgccgtgcccaggtctttgtcggtccttgtccggcaacgagcaccctacagatggctgggaggcacaccattattctgatgcagccatctcaaaatagggcttctagaacatttatggattacaattcgattaatcatgcattggatggaatctgtgggctttatgaaaggaaaattagggatatcaacccaatgatcccaaacataacttatgacatcagcgacctctataacttcattgatggcctagccgacattagtgcgctggtttatgatcactcgattcaggcattcctgccatatgatcgacagtggataaagcaaaagttgtttcaacacctgaagaaattggctcagcggtagcacaactgttgtttgttcttgatgccttttatccaacaaacaagcatgcgtgacaataggtgtccaatcagtggtattgggagttgtttcttgtaaactttgtaatgttacatgacagatttgctcccttgtattctggatgtttgactcggatttcattggtggcttgcttgtggttgtggtatgctaaacttgttttgtttcgcagtgctgggaatcagataacccttttgcctgttgtaaaaaagattttttcctgtagatggtttctatgtattattgttctttagaaacatgccctacggccataaagtctttaggacaaggttttgtcaatcttgaaggctactagcaccaatgacttgattatcatggttattaaaacgttaaaacgacatgaaccaacttttcaaagttgaaaagtttaaacgtttaaacgaacgttgaaacgtctttttagacttgacatagaatttcaaatatagaataagttcatacataagttgagctcacaaaccaaatagcattagcataaaaagaaacagatcaagttcaac

SEQ ID NO: 123201 - DNA, 1246 bp, Zea Mays
gtttagaaactctttttttaactgtttgccggagccggaggcggtttcgactttggagccctccgaggctcttcagaaagaaacaagaaaatctgcaaacgaattgtttgtccaggagaaggcccccgacgggattattctttctccccgcgtgctctctatctctcccctctttctctccctctgcccgacgactaggccgccgccgccacggccccgccgccgccgccgtgcccaggtctttgtcggtccttgtccggcaacgagcaccctacagatggctgggaggcacaccattattctgatgcagccatctcaaaatagggcttctagaacatttatggattacaattcgattaatcatgcattggatggtatgtatgatttgaaacagacctgcttcagaaaaattcaattagaactctctagttagcattatttgtatgcccatggtggtcttcatgtcatcctatactcagggaaaaaacagtgatatttaactatatcttgtagaaacgtggtattaatctatctttagaggttttgatcaacatgtatggatgtagtcctctttgtttaaacttgttgctgggtgacctgatgttttacccctagctttactgttagcaataggctactttgacatggatcaggcttatgctcttccaaaaatcagatttgcatatctgcactgcttcttgatttatttcccttctagagttcacaagttacttgtaacactcaactgaaatggcaggaatctgtgggctttatgaaaggaaaattagggatatcaacccaatgatcccaaacataacttatgacatcagcgacctctataacttcattgatggcctagccgacattagtgcgctggtttatgatcactcgattcaggcattcctgccatatgatcgacagtggataaagcaaaagttgtttcaacacctgaagaaattggctcagcggtagcacaactgttgtttgttcttgatgccttttatccaacaaacaagcatgcgtgacaataggtgtccaatcagtggtattgggagttgtttcttgtaaactttgtaatgttacatgacagatttgctcccttgtattctggatgtttgactcggatttcattggtggcttgcttgtggttgtggtatgctaaacttgttttgtttcgcagtgctgggaatcagataacccttttgcctgttgtaaaaaagattttttcctgtagatggtttctatg

SEQ ID NO: 123202 - DNA, 1042 bp, Zea Mays
gtttagaaactctttttttaactgtttgccggagccggaggcggtttcgactttggagccctccgaggctcttcagaaagaaacaagaaaatctgcaaacgaattgtttgtccaggagaaggcccccgacgggattattctttctccccgcgtgctctctatctctcccctctttctctccctctgcccgacgactaggccgccgccgccacggccccgccgccgccgccgtgcccaggtctttgtcggtccttgtccggcaacgagcaccctacagatggtatgcccgcatcttctcttcccttcctgctgtgcgaaaccgagcagcacccaaagactaacctaagctatttggctatttgtaatcggacctgatctaataagtgtatacatgaattatgcctactaacttcgattcttattgaaaagaaaaactattggggtgtaggtgtgcgcactcatatgcttgttgggggtgccggtggttggatggttagcttactcggaaaatcggacctgatctaattgcaagtgtatacatgaattgtgcctactaacttggatttttggatggttacctttgataagcaagtgatgtgctaatgcttttattgacctgtttggcttttggtttattgagtggtttgggaatgctgtgatatctatgaattatgtcgtgaaaattctggtccatacttgtccccttctacaatttaccaaaaatacttagttataagcttaagatcctcagatgactctgcttctatgttttgatgtgtaaggttatagactcattcagctgtatgaacatgctgcaatgtgtcatctgctaactaagcttcatatctcaaacttaatgttcttttcagaacatgaaatgaagtggtctcgatgttcaggtataatatgtggaactgttgttttgtatttagacagttgtatttttttattttaagatgcttcgatgctgaagctaagctacgtagcagcatgacaccatagcaggagttagaattactagatgacaaaggttgctgaagaa

SEQ ID NO: 123203 - DNA, 643 bp, Zea Mays
ttttagtggttgtggtggttccctcgggcgtgcgagctatgatcctgggggccagcgacggcgaggctcccccgagacgggcgagcagtggcgccctgaggcgggcaagtggcgacggcgctcccctaggaccaagcgacggtgacgctcccgaggcgggtgggcaagcggcgctagcacacccatacccagtggcgacgatggttgcgcgaggcgcggtatacttcgacaacatcggtggtggccatgggcgacgtgggtggcacctgcggtcgtgcgaggctcggtcgtctccggcgagggcggacacgcgaggagtggtatacttcgacaacatcggtggtggccatgggcgacgtgggtggcaccatcggtcgtgcgaggcgcgggcgtgggtggcttcggcgtccttcgatgaccaactcctccgatctgtggccttggcggcgtcctccagcgacgacatcctccaatcctttatttatgcatgcagctgttggttgagctcatactaagattttttcattaattatgatgtacggtgtaggtatttatgcaacattctataacaatttatgctttgtgcgatattagttatccaacttttgcatgtatgttgtgtgaatgaaaatgccattcaaaa

SEQ ID NO: 123204 - DNA, 1229 bp, Zea Mays
aaaattcccacgcccggcggttctacggtcgagccaagccccctcaactgctgaacggagagttcgacctagcacgcccggccgccgccgcagcccgcaatggcgtcccttttcaaggaccccagcaagctctcggcgtacagggaccgccggttcaaggggacgcaggaggagtatgaggcggcgctgcttgcgtcgacaacgctgtacatcggtaatatgtccttctacaccacggaggagcaggcctacgagctcttctcccgcgccggcgagatcaagaagatcatcatggggctcgacaagaactccaagaccccatgcggtttctgctttgtacttggtgtggtacatgcatatctatggaaaagcaatgggtacggacagggcaaccccgcagcagaacgccatgggcgacggcgcttgcctctgctgtactactctagggaggatgctgaagatgctgtcaaatacattagtggaacgatgcttgacgatcgtccaatccgcgttgatttcgattggggctttgaagaaggcagacagtggggccgtggacgaagtggtggacaagtcagagatgagtaccgtacagattatgatcctggaagaggtggttacggtaagatggttctgagggaactagaagcacagcgagaattagttgactatggtggatcttttcaaccgaatgcaccacctccctatgagagaagtgagcggaagagaggacatggagattctcataggaatgacagaggagattaccagcggaaacgctaccggaacgatgaccggtcagcaccagaggagtccaagagagcaccggactctgatccagcggagaagaatcctagattccgtgagaaaggtgactctgacgaagaagaggatgactacgacggcaaacgtcgtcgctaaagctgtggaacagccgttgctactacatgcagctgttctggtgtccagacgttgcagaagagtccacagctagcagcagtatccggatctcgccctgttgtacaacagatttaattcttcggtcggccattcctccttttctagtgctcctatcatctgttaatctgaatgtgcgcggtgttacatgtgctccaagtggggcactgttctcacagatacaatgagccttatctgtacgtttgctgctgatgaagcttgagaccagtgcatatattaattctaacagattgttaccgaacccaatcttc

SEQ ID NO: 123205 - DNA, 1154 bp, Zea Mays
gaacgggagagttcgaccaaaattcccacgcccggcggttctacggtcgagccaagccccctcaactgctgaacggagagttcgacctagcacgcccggccgccgccgcagcccgcaatggcgtcccttttcaaggaccccagcaagctctcggcgtacagggaccgccggttcaaggggacgcaggaggagtatgaggcggcgctgcttgcgtcgacaacgctgtacatcggtaatatgtccttctacaccacggaggagcaggcctacgagctcttctcccgcgccggcgagatcaagaagatcatcatggggctcgacaagaactccaagaccccatgcggtttctgctttgtactgtactactctagggaggatgctgaagatgctgtcaaatacattagtggaacgatgcttgacgatcgtccaatccgcgttgatttcgattggggctttgaagaaggcagacagtggggccgtggacgaagtggtggacaagtcagagatgagtaccgtacagattatgatcctggaagaggtggttacggtaagatggttctgagggaactagaagcacagcgagaattagttgactatggtggatcttttcaaccgaatgcaccacctccctatgagagaagtgagcggaagagaggacatggagattctcataggaatgacagaggagattaccagcggaaacgctaccggaacgatgaccggtcagcaccagaggagtccaagagagcaccggactctgatccagcggagaagaatcctagattccgtgagaaaggtgactctgacgaagaagaggatgactacgacggcaaacgtcgtcgctaaagctgtggaacagccgttgctactacatgcagctgttctggtgtccagacgttgcagaagagtccacagctagcagcagtatccggatctcgccctgttgtacaacagatttaattcttcggtcggccattcctccttttctagtgctcctatcatctgttaatctgaatgtgcgcggtgttacatgtgctccaagtggggcactgttctcacagatacaatgagccttatctgtacgtttgctgctgatgaagcttgagaccagtgcatatattaattctaacagattgttaccgaacccaatcttc

SEQ ID NO: 123206 - DNA, 1067 bp, Zea Mays
ccgagcatcggatcccctcgcctcgcggtgctgacgcagcttcccctgctgcctccaggaccccagcaagctctcggcgtacagggaccgccggttcaaggggacgcaggaggagtatgaggcggcgctgcttgcgtcgacaacgctgtacatcggtaatatgtccttctacaccacggaggagcaggcctacgagctcttctcccgcgccggcgagatcaagaagatcatcatggggctcgacaagaactccaagaccccatgcggtttctgctttgtactgtactactctagggaggatgctgaagatgctgtcaaatacattagtggaacgatgcttgacgatcgtccaatccgcgttgatttcgattggggctttgaagaaggcagacagtggggccgtggacgaagtggtggacaagtcagagatgagtaccgtacagattatgatcctggaagaggtggttacggtaagatggttctgagggaactagaagcacagcgagaattagttgactatggtggatcttttcaaccgaatgcaccacctccctatgagagaagtgagcggaagagaggacatggagattctcataggaatgacagaggagattaccagcggaaacgctaccggaacgatgaccggtcagcaccagaggagtccaagagagcaccggactctgatccagcggagaagaatcctagattccgtgagaaaggtgactctgacgaagaagaggatgactacgacggcaaacgtcgtcgctaaagctgtggaacagccgttgctactacatgcagctgttctggtgtccagacgttgcagaagagtccacagctagcagcagtatccggatctcgccctgttgtacaacagatttaattcttcggtcggccattcctccttttctagtgctcctatcatctgttaatctgaatgtgcgcggtgttacatgtgctccaagtggggcactgttctcacagatacaatgagccttatctgtacgtttgctgctgatgaagcttgagaccagtgcatatattaattctaacagattgttaccgaa

SEQ ID NO: 123207 - DNA, 1539 bp, Zea Mays
gaacgggagagttcgaccaaaattcccacgcccggcggttctacggtcgagccaagccccctcaactgctgaacggagagttcgacctagcacgcccggccgccgccgcagcccgcaatggcgtcccttttcaaggaccccagcaagctctcggcgtacagggaccgccggttcaaggggacgcaggaggagtatgaggcggcgctgcttgcgtcgacaacgctgtacatcggtaatatgtccttctacaccacggaggagcaggcctacgagctcttctcccgcgccggcgagatcaagaagatcatcatggggctcgacaagaactccaagaccccatgcggtttctgctttgtacttggtgtggtacatgcatatctatggaaaagcaatgggtacggacagggcaaccccgcagcagaacgccatgggcgacggcgcttgcctctgctgtatgctgcatttcatcatagtgtatatgtatttatctcttatcttgccgcccacccctaaacaattatcttcaactgctcctatggtcactgttgatttttgcactctagtgagggtgtggtatagtttgtcaattttgatgagagttgaaatttagtaacatataatgttccaaactggtgatttcagtggccatttgggaatttttatatgtaaaagcttgtaccacagctgttttctgtgcttggttctgagcccttcaccagaagcctaggatgtgagttcatgggcactgatatttaggtactactctagggaggatgctgaagatgctgtcaaatacattagtggaacgatgcttgacgatcgtccaatccgcgttgatttcgattggggctttgaagaaggcagacagtggggccgtggacgaagtggtggacaagtcagagatgagtaccgtacagattatgatcctggaagaggtggttacggtaagatggttctgagggaactagaagcacagcgagaattagttgactatggtggatcttttcaaccgaatgcaccacctccctatgagagaagtgagcggaagagaggacatggagattctcataggaatgacagaggagattaccagcggaaacgctaccggaacgatgaccggtcagcaccagaggagtccaagagagcaccggactctgatccagcggagaagaatcctagattccgtgagaaaggtgactctgacgaagaagaggatgactacgacggcaaacgtcgtcgctaaagctgtggaacagccgttgctactacatgcagctgttctggtgtccagacgttgcagaagagtccacagctagcagcagtatccggatctcgccctgttgtacaacagatttaattcttcggtcggccattcctccttttctagtgctcctatcatctgttaatctgaatgtgcgcggtgttacatgtgctccaagtggggcactgttctcacagatacaatgagccttatctgtacgtttgctgctgatgaagcttgagaccagtgcatatattaattctaacagattgttaccg

SEQ ID NO: 123208 - DNA, 933 bp, Zea Mays
gagagttcgaccaaaattcccacgcccggcggttctacggtcgagccaagccccctcaactgctgaacggagagttcgacctagcacgcccggccgccgccgcagcccgcaatggcgtcccttttcaaggaccccagcaagctctcggcgtacagggaccgccggttcaaggggacgcaggaggagtatgaggcggcgctgcttgcgtcgacaacgctgtacatcggtaatatgtccttctacaccacggaggagcaggcctacgagctcttctcccgcgccggcgagatcaagaagatcatcatggggctcgacaagaactccaagaccccatgcggtttctgctttgtactgtactactctagggaggatgctgaagatgctgtcaaatacattagtggaacgatgcttgacgatcgtccaatccgcgttgatttcgattggggctttgaagaaggcagacagtggggccgtggacgaagtggtggacaagtcagagatgagtaccgtacagattatgatcctgatatcctttgatgctattctattacagtttactccattctaatttggtgctatatagaacatagaaagtcataacatgtttccatacatgctccagacctccatgtgtcatcttaagttcacctataaaatgacatgttaaaactcggccggtgagagaaagaccgccctcccggtattatattaagaagagaccgaaacaatggttctggccgagaaaatccccgaaccttggccccctattactaacaggccagcgtcagttgtccactctgcaacggcccaaccggagggtggcgcacagggcatcgtaacccgatagcggatggggcacgagggaatttttttaaccaagcttaaaaattcgccccgagggggatcaaacctaggacctggatgtgctacatg

SEQ ID NO: 123209 - DNA, 713 bp, Zea Mays
gagttcgaccaaaattcccacgcccggcggttctacggtcgagccaagccccctcaactgctgaacggagagttcgacctagcacgcccggccgccgccgcagcccgcaatggcgtcccttttcaaggaccccagcaagctctcggcgtacagggaccgccggttcaaggggacgcaggaggagtatgaggcggcgctgcttgcgtcgacaacgctgtacatcggtaatatgtccttctacaccacggaggagcaggcctacgagctcttctcccgcgccggcgagatcaagaagatcatcatggggctcgacaagaactccaagaccccatgcggtttctgctttgtactgtgcgggcctcttcccttccttgatacgtcgcgttaattggctctttgattttggattcggtgctgtagtttccttcaatctacaggaacataaccttcgccctagtttaattagaaggggagatagtcccaattgttctgctggaatgtagtttgatgcaattagacgctgagtagatgggttccagacctgtttatgtattgatttgtttcctcagtagtgtgagttgttcatctgctagttgcaattggacattgcttcgtgaaattttatttgctgccaggaacatgtgagatgcctagaacatgaatagagaactgtgctatctcagcatgtacattcctcaggatattgcaataga

SEQ ID NO: 123210 - DNA, 639 bp, Zea Mays
ccgagcatcggatcccctcgcctcgcggtgctgacgcagcttcccctgctgcctccaggaccccagcaagctctcggcgtacagggaccgccggttcaaggggacgcaggaggagtatgaggcggcgctgcttgcgtcgacaacgctgtacatcggtaatatgtccttctacaccacggaggagcaggcctacgagctcttctcccgcgccggcgagatcaagaagatcatcatggggctcgacaagaactccaagaccccatgcggtttctgctttgtactgtgcgggcctcttcccttccttgatacgtcgcgttaattggctctttgattttggattcggtgctgtagtttccttcaatctacaggaacataaccttcgccctagtttaattagaaggggagatagtcccaattgttctgctggaatgtagtttgatgcaattagacgctgagtagatgggttccagacctgtttatgtattgatttgtttcctcagtagtgtgagttgttcatctgctagttgcaattggacattgcttcgtgaaattttatttgctgccaggaacatgtgagatgcctagaacatgaatagagaactgtgctatctcagcatgtacattcctcaggatattgca

SEQ ID NO: 123211 - DNA, 644 bp, Zea Mays
cggaaggggatccacctgcgccccctgccaacttctcgggaaggtaaaaatcggtatgtttggtcgtcggtgtggaatgtgaattcttcgatgttcatcgtttggaagtctccagattctggatgtcgtcgccgccatggcagaaaggaattccaaaggctccaagagcacgccgccagcctgtcgactcttccatctcagttctcagatctgctcatcatcatcatcgtcatcattcactcctttctcctttgtcaggttagtactggcgctcccgacccattcattagcaggagatggatagataacgccgcagtctgcagatcctgttcatacagtccgtccctgtgtggtatagatggtcggcagcagccattatatttgtgatgtcacgtttctgctcgagcctctacagaatggcagggagtagggactaggtcgctatcgagacgacactgttccattcgtgacgtctcgtgcttatctcttcaatgagatctgccctgttcgtcttcagtcaatttttcgctcttggtgaagattcttgtagtccttgataacagctgtgtcgtctgcgtagaacgttgtatgtgtttcatcaacattttaatatacaatatatatatagagaaagattgtatatt

SEQ ID NO: 123212 - DNA, 987 bp, Zea Mays
ctatttatctgaaatccaagcatgcgaataatctcatttctcttgataagtggttttgtgaagtttgtgttattgtttgtttcaacaggccacgaggcagaaaaagaaaagcggatgcattgaaggaagaaaatacagaaacacctaaaagtgatgctgtggatcctccaaagaaaagaggacgtccaaaaggtgtgggatccagcaatgggacacccagtacctcagctactccgagcacaaaggggaaaactgccggcaaggttaccaaagaaacacctaaaactggccccaaccttaaaaaagaacttgagaagaactccaaggacaaggctaatgtttcaactgggacaaaagatgataagagtgtgagcaaacctaaggaggctattatcaaaggcaaggattcaaaagacgaaggcaagtccactgaaggaaaagctaagcctggtcggaaaccaaaaaatgctggtactcctgcgggtgattctgacaaagagaagcaggaggtagaagtcaaggcagctgaaatagaggaggcatcaggaaatgcttccacagggaagaagcgtaggaggaaggcttgaagttagcgctgatgaacttctcttgtaaatggatgtgctccctcctaggtttgctcctttaggaccttgtattattgagtgttaacttggaatttcgtctgattggtccctagtagttagttaggtgtggaagcaacatttgctatagccgtagtgttaggagtaccatgtgttcgttgtggtcaggtccatggtgcattggtgctgagccttaagcggaatgaaccctatgctcgctgtgaggcccatggcatcgtgttgtcgggtggtgttgtagcttgttgatgccctattttatattattatacgcgattgaagcagtggattttgtagcaaatgtaccttttggactaggatgttggcctggttttcgagttgtccttgtttctctgctacatgc

SEQ ID NO: 123213 - DNA, 1132 bp, Zea Mays
attctctcctctctctgctctctcgcgtgcgagcgcccaagtcgagccggccctgcacgcaagcaagcctgccgcacagccatgcaccagcagctccaagcgctggccgagcgtgccgcccagcgccgaacgcccagcctcgccgagcgcgcaggcagcccgagccgaagccgactgcgcgacgccgcgaccacactcggcgagcgtccgagctcgaccgatgccgcgccctgcccgctcaccacgcgaccgagccgtttccattgccgttacacctccctgcgttatggaacttcaaacggacacccgtttccttctttccctctccctgatttctctctggtaacggcgccattgatggccgttcatggcgccggttgccgcgcctctccctctcccggcgtcctccctctcttctctctatttaaggtaataccgagcgccagttcccgaccactttgagctcgcgcccacgcatttcattcctctgttggtcgtccatcgtcgttgtggagctcgccgcagtgaagctcaacaccgccggagacctcgacgtcgttccccgtcctccccttgagcgccgtcgacctttccccgcgtcggcgacctcctctgctgccttggccgagccctgcccgacgaactcgaccgcggctgacccctgccggtcctctgctcgtcgccgcctctgttctttgtcgccggcaagcagctcgtcgtgacgcccgtggccgcctcgacgtcatcccctgctccgttcgacgacccgaggccgtccctgcctcccctgggccttcgtgctcgtgctgtgccgtgtcacgcgccaaagccgtctggttgtcccttcttcgtgcccaaagccccacggtcgtggctccctgcttctctggtatgtgcattccagtggtagaagaaggcgatcttctagtctaccccctgaagtataagttgaataagatatctaacccctgcagcgattcattatttttaaatttgtatatattggaatccaaatcatgtgtatgtggaacgattaacttcatgtgtatgtgataagatattttagttagtgtctctgctgtctttcgagtttgtgcattttaatttggttatacccattgagaattaattt

SEQ ID NO: 123214 - DNA, 3502 bp, Zea Mays
ctgctaggtttggcctcagatgatgaccaggatgaattgtcgacagatcctgatgaactgtgatcgaagaaagtgaagatatgagtggcgatgaggaggatatgttccggaacctcctcttgagagctggtttttgtcttacatacaaagataactatactcaaccacaagttatctaagagagaaaattataacagatgctactgcgatagctggattccttactgatctgcgtgtttatctggataacccagcaaaggttaagcgtatgcttcttccaaccaaagtatccaccaagagtggtggaaccaaagatacttcaaagtgtgattcaagctcaagctccacaagcctcattactttgttgatggggattagtgccttgaagcaggctattatagatttgcttctagatataatggttgaatgttgccaaccttcagaagaaagtggttcctcagcaagcactaaagcttttcccgattcaaatggggctagctctccaccagagcttagtgttgaaggtgatctaacagaatatgcatgcagtgatgtgtatgcgagagttgaatctaatagtgatgatattcgggatagtcctgtaatttgtaatgcaggtttggctgcaactgagattgctgtaaataatatagaacattcctgttttcctccagaaacatctgctgctgatttgccagcagatgaaggctccgagcaggcttcctggtcaaaatgtccagagcaatcagaggaattgttagggttgattgttaattcattgagggcattggacagcactgtcccgcatgggtgctgtgaaccaagaaggcggccgcaggctgtccggaagattgcacttgtcctagagaaagctccaaaacagctccagcaagatttgatttcccttgtaccgaagttggtggatggttcggaacactctcttgcagcttgtgccctgttggatcatcttcaaaggccagatgcagagccttcattgagattgccagtttttggtgctctttctgagttagaacttgaaagtgatatctggaaacaagcatctgttcatgcactcgaattattgtctgactcgaacgatgagcctcttgtagctgccattacttatgttcttaaggcggcatcacagtgtgagcatctttctgtagcggttagagctgttagatggagattgaaagatttgggaactgaagttccacattgtgtgcttgactttttatctaaaacaattcaaacccagctagatgtagctgaagctatattgaaggatattgattctgattgtgagcctgaaaacaattgcctagcatcaacatcaccttctagtacttgttctacagatgggctttcagctgaagggatgtattcttggcaagagcaagctgtgcatggaagaagtcatctatcagatgtttttgcactgatagaaatgttatcaatgcctggattatttgttgaagtcgcacaggttattgagagggctttattgcgagggtcctttggtctacaattagtagccatggtgctggaaagaagacattcttacaggtcaagttcaaagtctgggtctgttgtgaatgattcacagaacaaagaagttctgttagatgggcagtttgaacctttatctgtccaagaaaatgatttcacttcagtccttgcacttggtgaggtattatctctatctacagaaacgaaggttcaagattttgtgcggatgctttatgctatcatatttaagatctatgctgaggatcatcataggtatagaatccttaagggccttgttgaacgagcaacaaatacatcagataactgccgagcagttgacatcgatatggatgtcttggtatttcttgttaaggaggagtatgggatcgcgagacctgttttgaacatgatgtgtgaggttgctgaagttgctcaggctgaccgtgcaaatctttggcaccaaatatgtgctactgaagatgaaaatattcgtcttcgagaggacatggaaatggagcaaacaaatttcaccaatgaaaagattgcactaaaccaacggctaactgagttggaggcaactattggcagtctaaggtctgagctaaaagctgagagggatcgttttactcgtgagaagaaggcattatctgatcagatgcgagagattgagaatcagttggaatgggtgcgatcagagaaagatgatcagattgcaaagctctcctctgaaaagaggaatcttcatgatcggcttaatgacgcagagtcacaactcgccttggtgaaagcacggaaacgtgaagaattaaagaaagtgacaaaggagaaaaatacattagcagaacagctgaagaatgctgaagcttcaaggaaaaggtttgatgatgaattaaaacgttatgcagctgaaacacagactcgtgaagaaattcgaaaatcacttgagaatgaagtgagaaggctgacacagacagtggggcaaacagagggagaaaaaagggaaaaagaagagcaaattactcgttgtgaagcatacattgatgggatggaatccaaactgcaagtttgccagcaatacatccggacacttgaaacgtccctccaagaagaggtggcccggcatgctccactatacggtgtcggcgtcgaatcattgtcgtttaatgagctggaggcactcgcaaacatccacgagcagagtttaaggcagatcaaagctatccagcaaaggaaaggtagcagccatctcttgggtggcaccgccctttctcacatccctgccctattctccccgccgcctccttcagcggcagttggctctccggcctcacggatccccgcatccccaatggcaccaaacggtgcagggatgcacgggaacgggcaccacatgaacagcacgactggcggccgctggttcaacccgagctgagtgataaggtgcaaagattttgtgattcaacgggccacatttgcataggcgtattttgcagccgctgagcaagcccaacgtcaaccccattttgttcctggccttccgtcaggctttcttcttgtacttaggctctcctcaccataagatctaagtggatgtgcagaacacttctggcaatataggcatagtggagttcggaatatagatggcgggggtaggtcttctggtgaggtcggccttacttggtagtgccgtcgtcgtcttgatatcgcatgggcgtggagagcttggtatgaaataatgcatgtaataatcaagtgaaccgatggaaataccaggtacaagtggagggctatgggaatggttgtgcttgttcactttctaaaggcattcaggttcatttgttttagaggagtgttgcggatggtaaagacgaccgagttcgaagcttttattttctttagagttgcatacatagtagtccttgcacatgtcaggggtgtcacttcggtataaacttcgaaagcagaacgtgtttgcatcgcatgcctctaagct

SEQ ID NO: 123215 - DNA, 2179 bp, Zea Mays
cccaaccaagccatcgctcctgtcctgcatctccatgagccaaagaccaaggaaaaagaatagggagaaaacacaccccgaaaaacaaaccaaaaatccccaatccatgaagcccaccacttccgccgccgccgccgccgtggcggcggttaccgtcaccaccgatgacccatccccttcgccgtccgactcaacgtcggcgacgttcacggtcgaccgccgtggggacgcttccgcctcctgccggtggacgctcccggacttcccccgcacccgcgcccgcaccttctacagccgatacttcgaggtcggcggcttcgactgccgcctcctcctctacccgcggggcgactcgcaggcgctgccggggtacctctccctctacctacaggtcctcgaccccaaagccccggtgtcgtcgtcgtcatccaccacgaccaccacctcctccaaatgggactgcttcctcagctaccgcctctccgtagtccaccccaccgatccagccaagtcgctgggccgcgattcctggcaccgattctcgtccaagaagcgctcccacggatggtgcgatttcgcgccctcctcctccgcccccttcctcttccagccccacgatgccctcgtcatttctgctgacatatctgtgctgtctgaggcggcctctttctccgatgccgacggtcgttttaactggaaggtgctcaattttggcctcttccgagaaatgatccgcacacagaagatcatgagccctgcattttttcctgcatctgcctctgctggcgggactgactgtgggctccggattagcgtctatcagagcaatgtatctggcgcagagcatttatctgtttgtctggaaagcaaggagcctgttgtgcaggtagcatccgggtcatcggcattggcatcaggtggtacagggagtggtgtgccagatggtgatcgtgggtgctggtgtcttttccgcatttcgatccttaatcagaggtctggtgggagccatatccacaaggactcatatggtcggtttggtgcggacagtgccagtcttggttggggagaatacatcaagatggatgagtttttggctgctgacggcggataccttgtagatggagctgtggtgtttagtgcctcagtgcatgtcataaaggagtcaaactcattcagtcggagcttgccaatggttcctggaatatgtggtgctggtggtgggcgtgctggggctaggaagtcagatggacactttgggaagtttgtgtggaggattgaaagcttcacaagacttaaggagcttctcaaaaagcgcaagatcgcgggtctgtgtatcaaaagcagacggtttcaagttgggaatcgagattgccgtcttattgtttatccacgggggcagtctcaaccgccatgccacctgtcagtgtttctggaagttacagatccccgaaatacaactactgaatggagttgctttgtgagccatcgtctctctgtcatcaaccaaaaagtggaggagaagtcgatcatgaaagagtctcagaatcgttactctaagtcagcgaaagattggggttggcgggaatttgtgacattaactagcctctttgatcaggatgcaggttttcttgtgcaggatactgttgtattttcagccgaggttctcattctgaaggaaacagcaactatgcaagagcttacagatgaagattctgaaacttgcagttcaacttatggatgtcagattgaagctttaccaaagcggccatcattcacatggaaagtggaaaatttcgtgtcttttaaggagattatggagtccagaaagatttttagtaaattttttcaggctgggggctgcgagctgcggataggtgtatatgagtcgtttgatacgatctgcatatacttggagagtgatcagtcatctgggtatgatcctgataagaacttttgggtgcactataaaatggctatagttaaccagaagaattctgcaaaaactgtgtgcaaagaatcttcaatctgcacgaaaacatggaataattcagttctccagtttatgaagacttcggacatggttgacactgacgctggctttcttgtccgggacactgttatttttacttgtgaaatcatagactgctgcccatggtttgatttctctgaccttgaggtg

SEQ ID NO: 123216 - DNA, 1078 bp, Zea Mays
aagtaaatggagttacaagaatgaatatagaaagtaacataggagcaattcagatattcttagttacaataacacatttttctacaagttggtcaggctaaatttattttgtctgtactataacttagcaacagatatataatttagtacatggtcacaattaggaacctaccctctatagcctgagcatgtaatgcaaatatgtcaagtactggggcagttgcaacatagctatagcagcataaggtacttaagctgtaacaagataggtcttgaaaacatctcaaaagcactgaacattcttaagcggaggtgccagaggaagccttggcggttggatctgctcttggccaagctctcgttgtggcggtctctattccttcagcctatgggaagaagcttttggtactcgacaacctcagacttctcttcttggcaatcttcttgtcaatgattctagtgtgcttcctctgaagggtcaagggttcacaatccactggatcttaggtgccttgctcaccttgcctacaaagcaaataggttagcttaaaaaacttcagaaatcaatggctcattgtcatgaatcctattcctaagatacttgaggatagaagagtaaataaccaagacatttatccaacagataacaagcacagagtactaatagaagagtaaataaccaagatatttatccaacacataactgattctaagatacttgaggatctccatattaagtgagcataacatataaacaatctgctttttgttacatgggtctaatggtttataaaatgcaaacaagaaaaaagtgtgaaccgcatattgctcatgtgtttttcagttataagatgtgtagaccctgagttcctggcctgaagaaaacaagtctgttagatattttggaaaaaaattctgataaccgcatattgtcaaaactaagtttttttatttatctactaataaccaacacataatcatgcagtctataagagaaacaagttaagaatggagaatttcaaagggaaactcataatttgaagtagctagatgttactaatcagctttatattcttcc

SEQ ID NO: 123217 - DNA, 532 bp, Zea Mays
aagcttattgtatttgcacatgtagatgggatctcaaatgggacccctgttcacccgtccgtcacaatctagacagaccccaaacaccaatgaaacacagggttctgagactggacaaggaaacccatagatggacatacagtggtcgatgccccctggaggacagattcttcctcctccacaaccaggtatgggatattggccgccaccaccatagggatatcctacacatccaatggggccttggggacacccccccatggccaacacagccacttccatcaccagcggattctggctctcatcaagtgactcctccccctcacgttgactttgcagacatgtctcaattcttctggtggaactatgaacaacaatccgatgtcctgatcgagagcgatggagctaatgtttgaacttgcgtgtttgaacttgtgaactatggatgtgaacttttgtgaatttgtgaacttatgtatttggacttatgtgaatttgcgaacttatatatttggacttgtgtgaatttgtg

SEQ ID NO: 123218 - DNA, 747 bp, Zea Mays
atgacacacgcgcactcgaccacatcggctccagcacgttctagaagcctgatcgcagcacagagtgtccctccggtcgcaaccaggtcgtcgatgaccagcacccgctcgccggatcgctcgatggccccgacacgcatctccaggcaatcagtcccgtactcgagaacgtacttctcggagatcacctcacctgggagcttccttggcttgcgcagaggtatgaacttagcgccaatagccagcgcgatcgccgggccgaacacgaagcccctggcctcaatccctgcgacggcgtcgatgcccatcccgcggtaccgctcgacgaacaggtcgacggcgtccttgaacaccctggggcgcagcagcagcgtggtgatgtcgttgaacatgatgcctgaccgcaagccccccaacggcgcacgcatgatgcatgcacacacacacatacacaagagcgcgcgaagcagaaaaaaaaaagaacggtcagcgttactggcaagcggcggcgtgatcaatcggagagcagcgcgtggatggagattggagaggaatgaaagaatgaacacgaggaggccaagggcaagggcatgcacgcaccttgcttggggaagtgcggcacgacgcggatggcgtcggaaatgccctgcagccgggggtcggccgcggcggcgggggctgcagccggctcgcggccgacctccttgcccaccggcttggcgttggtgccggcctccgtcaggctga

SEQ ID NO: 123219 - DNA, 869 bp, Zea Mays
caactcgcaagccaccgctactccaccaagccacacggaggcggaacccaaattccaacccgactcctccagccaacagcccaagcgaagcgagggcccttgagctcccctcctgcatgacgtccccatggtgtctctcggcaccgcccgccgccccgcccatggcggctgcgcccagcgccctcggcgtctccacgtcggcctccgccctcgcgcgcgtgccggttcccggaagtaagcggtgcaggtggaacgccctcgtggtctgcgcggcccctgatgaggagaagattacgaagcggtcgcccctggatttccccatcgaatgggagagaccaaaacctgggaggagacctgatatcttccctaagttcagcccaatgaagacaccattaccgcatccattgccagctgatgatcctctggatgatgatgaagaggaagaggaagaacaagcaccacctcaggaggagccacaagaggacgatccagacacggaagaacctgaggaagatgacccagataagccaaccgagtaattttcgattggcttaacagtgatagattaggcaatgggaaaaaatgtgctacgtctttggtgcgcgcaagagatctcagttctatttgaactgccggcttatataggctctagatgcataagtttgttatatgacctctgagcttttctaaagctatgaaagttttgttttacggattacagattatagtgcgatatctgtgatgacatgcattctcactttttctatgttttgagtaagcaacgtgtacattgcaaaacctgtatttgatgtagttgcatcattgatttgtgaaacggatactgagattttttagtaagctatgaaagt

SEQ ID NO: 123220 - DNA, 767 bp, Zea Mays
gaatgcatgatatcgattggtattcaataatggtagaagaaaccaacaacgaagaaggaagaaatgatgttactagtgaacaaggactatattttcagcttgtactagataatcaagatgatggaagggaagatgattcaagtgcttcccgttttggaaatagcattccatgtgaagatgaattgggaggagacattctgtgttctgattcagtgcttgatgaaaataggacaatatatgatatgaataatccagttatggagcctggcagcttatatgcaacaatgcaccacttcagactcgcaattagacaatacgccataaataaagaatttgagcttggaattgaggcaaccaataagactagatttagagggtattgtaaagggcctgattgcccttggagcatcatgctagaccggagaggaaaggggctccaacaattcaagtaattgtcttgaatgacaaacatacttgtacgtcgagtggtagacgtaagacgactacacctacaggagcttgggttgtggcacgtgcgcttcctttactaatgaagaagcctcatatgggtgctaaggagctacaaactacattgcaggacacttttggttatacaattgcatatgacacaatttggcatgggaaagagaaagctttgaaaaaattatttggaagttgggaagagagctttcagctactatgacgttggagagaagcagttatgcaaaagtcaccggatagtatcatcgagcttgatgtaaaaatgg

SEQ ID NO: 123221 - DNA, 6506 bp, Zea Mays
agaattttttagaatttcttgattggtacaaacaaaggaatgaagaggtgagaagagcttttgatgagttgtgtcccaaaaatgataagatgatttcggggacgattcaaaaagaacttgcaaactgttgtgcagaaacagtcacacgtgcaattaaagaagaaatggaggattgtttattctctattcttgttgatgaatcccgtgatatatcggttaaagaacaaatgactattgttgtgagatttgtcaataaacagggtgaagtaataggaagatttttgggcatcaagcatgtcaaggacacaacatcagaatcattgaagaaagcattagttgagatggtaagtgatcatggattagttgttgcaaagcttcgagggcagggatatgatggtgcttctaatatgagaggtgaatttaatggtcttcaaaaattaattcgagatgagaacccattcactttctatgttcattgctttgctcatcaattgcaattgattattgttgctgtctcaaaatgttgttcatcacttgtggatttctttgagtatgtaacatccattgtgaatagcacttgtgcttcttgcaaaagaaaggatatattacaacataagcatcgtttgaatctcttatcaaagttagagagtggagaaatttcatcagggagaggcaaacaacaagaaacatcattgtcaagacttggagatacaagatggggatctcattacaagactttgctccgtattgagtcaatgtgggaatcagtgatataagttttagaaattgtgcaccaagatgagtgtaatccatcaggtgcaggtggctttgttgggaaaatggagtgtttcagctttgtgtttatgatgaagttgatgttacagatcctccgtatcacaaatgagctttctcttctcttgcaaagaaaggatcaaaatgttgtcgaagccatgtctctggttgttgatgtgagaacacgtttgataaatttgagaaatgatgattgggagccattgttggaagaagccacaacattctgccttgcaaatgatatcccaataccaaatatgagtgatgttgtaccacgatttggtcgatcaaggaaaggtgggagaaataatattaccacagagcatttttatcgtgttgataccttctatgctattatagattctgtcaccacagagtttgatcatcactttaatgagctatctcaagagttgctcgtgtgttttcttgtcttgacccatgggagtcgttctctaagtttgatgtggataagcttgctcggctcgcggatatctattctgatgatttttcttttgatgattgcaagactataaaagatcaactaagaacttttattattcatgtacgaaaaattgaagagttcaaagcttgttgtgatcttgctagtctatcgaagagaatggttgagcttgagaggcatattgtgtttccactggtatatcgacttattgagttagcattgttgttaccggtggcgactgcaacaatggaaagggccttctcagctacgaagattattaagactgagttgcacaacaagatgtccaatggttggttaaatgacttgatggtgtgctacactgaaagagaaatttttaaaggactggaccttcagaaaataaagaaggcatttcaaaataagaaaactagacaaatgcaattgcctagatctcctaaaactagactcaactaaagattttattcgctatatggcatttggttgtaaatggattgtaatcaagatgactattaaataaggtatttttcaacatctattacttattttgtagctacaagttattttgaactgtgtcataaattttattcttcgttgcgttagcaacacctaaattttctggcatcctccgccactgcgtgtatcacacatgtgagacttattggtctagaattgtttcttatttggacagcctctgagtgaccattatagcatggtgaaagggaaatagactctaaaccatttctatattggtttcagtgtttgatgaccaatacaatattatgaactaactagtttgttaactggatggttataggttcacagaaataagaatagaagattcttattgaactaaagatcaacacccaactagaaaggacaatactcgaaaaagataaactattgatagttcaatattttggttaagtgtcctaggaatgaatttgagtatctaagaaaggctggaaagctcgagtttaacatttggaatttatggagctaagttcaagcaaaaatgagaatataagttgaagaattcaaaacggtgaagacctatggcttagactagttggacaaactctatatatgtttgtctaagtcatagaagtactctagaagatagccaaatcgaaacaaagaagaaaatctccaaaaggactatgtgtgctgctctgcggcacatctgaccagtccagtgtgcatcggaccgatcaccaaacctgttatgcagtaagcatgttttagggctttcgagggctgcgtcattggaccagtccagtgtgcaccagatgtcgcactggaccggttgcacaaatagatgttttcaggtgctgagcagtcgacaaactagatgagagctgtgtgtggtccaatgtgcaccagacctattaggacccaattgtcactttccagatccaatggtcaagatgatgtggcgctgacgtgatagagtctggtcggtgatcgaaccaatacggtgccacctaacacataacacaggagtccgaacggtcactgatcggacaatttgatagaggtccagtgcaccactagacttatattgtaggaggtctgatgcactcacagaatgtgcaaaatttgctattcaattccaatggctagttaagtggttggggctataaatacaccctaatcggctcattcaatacacaagagctaagcaaacaagtcatatgaatagagtaacacatacaattcattccaagtgatccaagcatcatatttgctaagagatagccattgcttagtaaaagagtgctagtgtactttagtgatccactttgtcgttgttatgttgagtgcttgagtcttggtgcaaggtgttgaatacatcactccaatgcatacaacgcacggatcgataacacgagcacgtgcacgatatctaaatctctaggttcattctaacctagtcaattgtgtttttgagcttatgcatggtgccattgatgttttgatgattatgaatcttgaagaggactagaaaggacggccaagatgtcaaggaagagaagctaggatgttcatgacaagagggggccaagtatgacccaacttggtctccacctcgaagtccaggactagtctgcactaaaacggacgcctaggatgcatccaaactccgattaggtcgtactttatatggatggaaagctaaggatataagatttccaaccaacctataaccaacttaaaatttgaccagagtcaacagaaatcatcgaaacaaatcaacattcagattttgttttggtgctacgacactgtgtgttgggctgtcggcccgtgtattgtgttggagcctattagggatatctccaggggctttgcacccctaacctctattttattagcagccaccacaacattagggtttgggtttttcttagattcattctatcatcgaacactattgtcgttcatcggtttgtgagaccccatctcatgatcaatacaattttgattgtgttcttcctgttcttgcttttcttcttgattgcacttacatggataatccttcgtggcgaggtcactcgtgtgtcacgagtgataaccaatggagcagtggtgtcgtgattgcgatgatccattcgctcagagccttggatcatcaatgtcgaggtctccaccaaatcaagttatcctaccttacggaagattaggccttaccatctatcaagtggtatcaagattcaggtgtcttgtgaggtataatcctacctttagatttgttttatttctccccataacttacaagaaagccaacctcaaaaaacataagtgtatcttgacctacaaccatcgtcttagcttttgcataattcaatttcagagttcatagttctaagttcgtgtcctaggttgagtttggttgctagtttagatttgttttggtttagtttgatcctctccatccactgcaatcccaaaaaaataatctccaaaacatattccatctactaaaccgatcaaatctacaaaactaatcctattttatctcatcatctcgtctttatcagatcaatatgtgtttagttcggtatttttgagcatacatcgtgtatacaaactcagaatttagtattcttgtactttctagaaagcctagaaaattatctacaactttcttgtttatgaggtttctagaaaacatcagaatcaaggagttatttgtattggaagtaaatctatttgtgatcctgtaatcagtctgtatttaaggttcaatatcctccacttcctttatttaaacaagacgtgccatatatctaaatgaaatataaaaaggagacctacaactttcatgttgtgagctttttgcatttgaggtcactaaatttatcaaacggtcttatttttgtgacacttttgtgaaaaaaagaaaatataaaatgcaagtgcgacaaaaaatccccgcacaaaacaaagaaaaaagaaaaaaaagagagaaagagtgcgcataagcaggaacaccattgatctgtccacctctgtgattgtttttccttccaacttgttcccttgttgtacctagatccttttacctcctttgtgtcttcctccaactatgctaatacattctctaggacagcagctaggacgagtactttggacacttattcagtattgctatatattactgacttgtgtgccatagatatatatttatggagccttcccaaagctccatctttctcttgagcagaatatgtacttctttgcaatcacatccatgctctaagtttgtcacaccggccaccatttgccacctaaagtgctggtaagaaccttgtaagtgcggggtaagacgcttcattactcgtgttccaccaccacacctaagagtagttgtagggtttataatttttttgtttcctttgtttctattttgtactaacaatgacaagaccaaagacccaaacgaacaaggataagggtcctaagcctaatgatggtgagtgtgtctcccatctagaattgaaggagatgatgcacacattgactaaagcttttgagagctacaccattgatgttgattcgtctctctcaggttctatatatccatatttctcttcttttaatgaaaatattgcaaatgagtatactgaatgggaagtatcaatggataagattttttcccgatgtcatatatgtgataggagaaaaataaaaattgtggctagtacattaatgaatcatgcattagtttggtggaacaatttgcataattatgacaaacaaaaaatgtgggctgatatgaaaacacgtataagagaacaatttgtttcttcccatgatgtcatgtattcaaataaatctgagttacctttgttacatgatgattgtactactaatttttgtgataacaaagagttgagtgatggttcttctattacttatatgccacaacttgagaatgaacttgatattgttgcttccaatcctattagttgtgctaagattagaattttgaatcccataactagtgtgcatgatgagctaaaattgttatcttcttcaaatagtttgggttatattgaatttgatgttctatgtaatcaagataatttagaagagaaactatcttttagtactgattttctatgaatatctaaacatacaaatcattttattggaagatataattggaaaggagaatatatggtacatcgagtatatatttgttcaaatatgaattcgcctttttcatgtaacaatatgatcaactagagggctatgttaagctaaacatatcacgttcagttccacttgtccttctttgtatgttttgcaacaacagtgtcaactttatgaaggggcaaggttggacgatgtcaagacctacaacaataccttatgtaggcaccaacaactttgagtcgaggacaactcaaaaccaagaaggggagaatgatgagtacatgaacttcaactatatggttaaggcccaatcaatcatagatttctaagctcaagaggagttgaagtctagtttatttgcgaatccggtttagactgcaggagtgggtctcacgaaaatggatgcccagaacacatacaaacttcgttggaaagctaagaagataagcttcccaacctgttacaccctgaatttgggggtataaaatttattttctgatatccatcaaattcaggtgttaccttctttttcctctttctttttggccctttattcatttcttcccaaataataggg

SEQ ID NO: 123222 - DNA, 431 bp, Zea Mays
acgaaaaattgaagagttcaaagcttgttgtgatcttgctagtctatcgaagagaatggttgagcttgagaggcatattgtgtttccactggtatatcgacttattgagttagcattgttgttaccggtggcgactgcaacaatggaaagggccttctcagctacgaagattattaagactgagttgcacaacaagatgtccaatggttggttaaatgacttgatggtgtgctacactgaaagagaaatttttaaaggactggaccttcagaaaataaagaaggcatttcaaaataagaaaactagacaaatgcaattgcctagatctcctaaaactagactcaactaaagattttattcgctatatggcatttggttgtaaatggattgtaatcaagatgactattaaataaggtatttttcaacatcta

SEQ ID NO: 123223 - DNA, 609 bp, Zea Mays
atgaggggcgcggcgggcgcgggcgagggcgaggggcacgacgaggggcacggcgggcacgggcgaagggcgaggggcacgacgaggggcacggtgggcgcgggcgaggggcacggtgaggggcacggaggcgccggcgcgggcacggcaggcgcaggcgaggggcacggtggcgggcgaggcgaggtcacggcgggtgatggtgcggcggtgggcgaggtcgaggccgtggccgagggtaggggcgcggtgggcgagggcgcagcggcgaaggcgcggtggcgtggattgcagcggcggctgtgcgtgattgagagtgagagagttgtttcccagaacgggtttgctcaggttttggagcttgttgagaagaggtatgggaccatggaagctattgttggcaagacgaaggatacgaaggaaggtcaagtttccaagagaggagctgatttggccagccaagctttggccgttgagattgagctccgtgactcgatatggtcgagtggaactgcagttcacaccatgccaatggcagaagtggatgctggtgttccaattgctcaaggctccgtgcggatcactggtgatgcccttcttgaactctag

SEQ ID NO: 123224 - DNA, 549 bp, Zea Mays
atggggtggttctcaccgaaactgcagtggttacacccggccgcggcggtccgtggtacagcggcgacaacggaagaccgacgagcaatccagagccccgccgatccaatctccacccaccgaggcctcgagcaggtccgtggtgatcccccgaagctccaaggccagccgagcggaccgcgctcgagcgccgggggcactgacggagttcccagggccgagcacgcgcctacggtggcgacattaccttccttccctgcggcgatggtggcctccgtcagggcaacatggcggagacgccgtgattctagcgacccggcgaggcaggctggaagtgcggccgcgcggcgtggtctctcactcgtctaccctcacaccggtcctgaagcacggcggccagggaggtcgacggaaggcgctagcagggacgcgtgcacggtggagtttcaacggctggcgaggggccatggggaagcaggggcgcggcagaggagctcgcaatgggatgaccggaagttctggacgagcagtcctgttagggaatattaa

SEQ ID NO: 123225 - DNA, 2858 bp, Zea Mays
atggcggtgccaattaagagcatcatgcgtaactctaagccgccgagcaaactggccatgctcatggtgttattgtttctgctttgttacggagttgagaaagtccattgctcgacggttcatgaaaacaaccaagattttcactctctgctcgatttcaagaagggcatcacccacgatccaaatggagccatgaacgattggatcaacaacacccacttctgccgatggaaaggtgtgaagtgcaccttaacaccgccatatcgcgtcacggagctcaacctctctcacaacaacttagctggccaaatctcctcctctcttggaaacctgaccaaccttaatttgctggctctaccaaataatagatttggtggaccaataccccttcttgacaggctccaaaacctaaattacctatccctggacaacaactccttaaatggtgtgattcctgaatcacttgcaaactgcttcaacttaaacaaactaggtctctctaataataacctcaccggtgttatccctcctaacataggttctcttaccaagctacaagttcttctccttcatagaaataagctttccggggtcatcccatcaagcctcagcaacatcacaaatttaattgcaatatctctttcagaaaatcaattgaacggatccattcccattgaattatggcaaatgccacagctaacgtctttgtaccttcatgataattatctattcggtgaaatcccacaaactctctctaatgtatcttctcttcatatgctatccttggcgtacaatatgttgagcaacactttgccatctaacttcggccatgccctccataatctaaaatggttgtacttggaaggcaacttgtttgaaggacatattccagattccctaggcaatgtttcaggtctattacatttggatatatcttctaatcatttcactggcaaaatccctagcatatttggaaaactttcagggctgtcttttctaaacctcgaggaaaatatgtttgaagcgagtgatagtacaggctgggaattctttgctgacctagcaacatgtagttacctgtcggagttttcattggctagcaataatctgcagggtgctataccaaattccatcgctaacatgtccaccaacctcaaaaggcttctgatgagtgataaccacctatccggaatagtcccctcaagcattggaaaatttaatggtttaattgaactcgatcttggtggaaacaattttaccggtacaattgaggattggatcccaaagttgacgagcctacaaaacttatatctcaatgacaacaactttgatggtcgcttgccagattatctaaatgacctaaagcttctcaataaaattgacctgtcttacaataatttccaaggagagataccaaaagctagtatattcgataacgctacagttgtttcactggatggcaatccaggattgtgtggaggaaccatggatttgcatatgccttcatgccctactgtttctagaagagcgacgatcataagctatttgattaagatattgatcccaatatttgggttcatgtccctcctattacttgtctactttttagtccttgagaagaagacttcaagaagagcacatcagtcacaactttcttttggtgagcattttgagaaagttacttacaatgatctagcgcaagcaacaagggacttctcagaatccaacctgattggaaaaggaagctatggcacggtgtacagtgggaaattgaaggaatcaaagacggaagtggctgtcaaggtttttgaccttgagatgcaaggtgcagagagaagcttcttggcagagtgtgaagcattgagaagtattcagcaccggaatcttcttcccatcataactgcatgctcaactgtagatacggcgggcaatgttttcaaggcattaatttatgagcttatgccaaatgggaacttggataaatggatacatcacaaaggcgacgaggcagttccaaagcgccgtctaagcttaactcaaagaattgcagttgtcgttagtgtagctgatgcattggattacttacaccacgactgcggaaggcccactgtccattgtgacttgaagaagcttaactcaaagaattgcagttgtcgttcaattagttcgatcggtattaagggcacaattggctatatccctccagaatacggaggtggtggccatgtttcgacgtccggtgatgtttatagttttggtatagtgttgttggagattttgaccggtaaaaggccgacagatcctatgttcaccgggggactagacatcatcagcttcgtggagaacagttttccggatcaaatatttcaagttattgatccgcatcttgtggaagaccgccagaagataaatcagccaaatgaagtagcaaacaatgaaatgtaccaatgcctggtggctctgctgcaagtagcactttcttgcacgcgctcattaccatctgaacggtccaatatgaagcaggtagcaagcaaactgcaagcaatcaaggcggcacaacttggaggcaaatccaagtgagattagatgtactccctcgacgagcagcgtaaaccggaatacgagatgactagaaatgtactctagtctagcatacaagtgttgtttaccttgtatatgcatctatggttcaatatggttataccgtcaagcaactacaacatgatatgtaatatctagtatttacacattgaaagcatcgaactatgtatggtttgaaatagttatttactttgtttagatttcttgaattatgtagttcattatttaattgtgagaaaatttaatgagtttatcct

SEQ ID NO: 123226 - DNA, 292 bp, Zea Mays
gattatgaggaggaattgtctttaattcatgagttgtagggagggacttatgtcaccacaaacggaaactaaagcaagtgttggatttaaagctggtgttaaggattataaattgacttactacacctcggagtacgaaaccaaggatactgatatcttggcagcattccgagtaactcctcagctcggggttccgcctaaagaagcaggagctgcaatagctatggaatcttctactggtacatggacaactgtttggacgacaaattcccaaggtttttttttcaaaaat

SEQ ID NO: 123227 - DNA, 280 bp, Zea Mays
gattatgaggaggaattgtctttaattcatgagttgtagggagggacttatgtcaccacaaacagaaactaaagcaagtgttggatttaaagctggtgttaaggattataaattgacttactacacctcggagtacgaaaccaaggatactgatatcttggcagcattccgagtaactcctcagctcggggttccgcctgaagaagcaggagctgtagtagctgcggaatcttctactggtacatagacaactgtttggatgacaaattcccaaggtttt

SEQ ID NO: 123228 - DNA, 699 bp, Zea Mays
atggccagggcgagttcgaacaccagcgcatgcagcgtcttcatcgcgtccatcgcgcgcgcgtcacggacaacagcgaaaagctcggccatgggaagggagaggaaggagccgagcgagcaggaagcctgcgcgcgtgtgggggctggggggagatggggcgagctgcagcccgcggccatgagaacggcgagcgaccgagcagaggaaggggccaagctagagcaccacggtctgctgtgcagccatggagatgagggaggatctcggcgaactcgatgccgcgcgccggcctgggagcagcaaccggccaaggaagaaggggctgggggggccgtggcgctcggagctgggcacacggcgaccattgctgggatgcgcagagagcaggggggcgtcgagcaagctgcagcagggatctcggcaagacgcggccatggaggagagagagagagagaaaagcagggggcgccgcgagctgggaaacagggaggaagctggggccagggcgcaacgcaggaggggcgagccagggagctccagccgggcgcggcagagaggaatgtagagggagaagcgcggcgtgctagggaagaagacgcgagggagagggaggaatccagggcgcgcgcgcacggagcatggctgggcgcagagaggcgcgcgctggagataaggccgctggccgtcgcgcgatga

SEQ ID NO: 123229 - DNA, 110 bp, Zea Mays
cgccacttgtggctctttgagttggatttgttggtcttgtgttggcgtgacaggccgtcatctttgtgatgtaggctgggaacactctatcccattatctaaaaaaaata

SEQ ID NO: 123230 - DNA, 525 bp, Zea Mays
atggccgtccagccctgcacagcagcgcccctgctccattttcttttccctctgctccctgtgcggcatgctctgctcgccggcgagttcatgtgctcacgacacctctcccagccttccctcggacctgtgggcactagcgcaggctccctttttttccaccatctccctcagccagtagccgtcgacctcctccccctgctgttcttgcagtccaagttctccccacgccgaccttcttctccggcaagtctagccgctgccatccctcggcaccgggctggagcacatgccgagctcctcctcacgtgctcctccaccggtctgcgtccccgctcgagcagcagcagcggcgacgccctccgctgcgtcgcgctcgccaggacgggccacccgccgtcgatctcgcagtccccgtcgcgatgtcgtcagtccgcgctagctatcggtgtcgcgccacgtgctctgcctatgcaacgaaatgctagccggtggacagcacatgcgactcaccgatccggctag

SEQ ID NO: 123231 - DNA, 246 bp, Zea Mays
atacccggattcgttacagttcctcctgaaatactccaaccaccccacgaatttgttattcctaaacgagtcatgaaggggatgacgaacataccttgtctccacattggatccagaacaggatcagagggatcaaaaaccgctaattcgtataaagccatcgaaccagcccaaccagaaactagagctgtgtgcattatatgcaccgaaagcaatcgacccggatcattcaatacgatagtatga

SEQ ID NO: 123232 - DNA, 1804 bp, Zea Mays
gaaacttggatcgaggcacgaatattattggcaaattgggctgccatcatccaacacatggctaacgtgctaggcacgtgagacacatcacgcatgtacgtataatcgtgtccggctgatcaagctatagtctagaggccctcctggtccatggcgaggatggtgctgaggttcatggggtgcatgtagtccgtgtcgccgtgcatgaactgggcgacgatgatgcggtttgccctctccgtggggtggaacgcgtcccagaacgcgaacacgtcgcggttgtcgcacacgttcgacgccgccgtgcacagcccgatcccgttgtacgggccctggccgcagcacgccacctgcacgttcgtgaaccctgcaaaaagaaaccaacaatcgtgtcaccgatcgccccgtttgggttccccatgcatgcatgcatggaaaagacgatcgcctttgggtttgggctcggcgccgcgtctgcgtctctcaccgaagtcctgcgggtttgcgaggtagtcgaagttcatgcggtaggtgttggcggtgacgaagacgtcggcgccgatggcgcggttgaggccgcgcaccatgtccaccatctgcgggttgaagaggttcacggcgcgcgtcagctccgccgcgcactcgccgttctggctgtgcagcgccagctcggccgggacgcaccccagcggccccgtccccgtcacgatcacgcgccgcgcgcccagctcgtacagcctctgcacaccaacgcgtgcagtacagctaggtcagttgcagctacacatgttgccgccgtcccaggagcgaaccatacggctcccatgtccatgtgctcgttgttattagacattcatgccaagagtcgccgactgagtttgagtgtgcggcggtgcatgcacggcatggtcctgggtagcctgtggtggtcgctcgctagagagaggatggtcgacgggaacttaatttaccgagaggatcttcctgtactcggagacgatgaagcggacgtagtccgggagtgcgtactggcgcgaccgcacggacatgggcaccaggtagtagttgttcacgaagtcgttgccgccgagcgtgatgagcacgagggcctggttcacgagctgcgtcgcctgcggctcgccgacgagggctcgcagcttccgctggtactcccggaagtactgcagctggtcgccgatcctgatgatgttcacctgctctccacgcatggcaggacgtcagagtttggagctacagtatacgtgtgtgtgtctgtgtgtgacagggcatgcagtgaaacgatgagtagctagctagcatcttcccgtacaaattgtattcctgtgtcgttgaggatcccgacgccggccgacgcgaagttggcgccgacgagcagcttctcccctcggagctcggggctcaggtacggcagcgcaggttcggccccgaggtgctcgcctgaagggaaggcaaagcatgggtcgccgactgagtttctctgaagggatgatcagtggcgttatattaatattactgatgatgtcggggatgttgagcccgttggagaagcggcccgtggcttggtgcgtggggaagtcgatgccgtaggggggcgcgtcggcgcgcgccgtggtcagcaggtagttgttgttgccgttgtcgacgagggagtcgccgaagacgaagaaggcccgcgccgcggacgccgctggggcagccgccagcaggcagaggacgagggagacgacgagcagaggcataagagcagcatccatcgtgcaagtcccgtcgtcggatgctgagc

SEQ ID NO: 123233 - DNA, 116 bp, Zea Mays
catgaatttgagatagacttatatgataactttggaaaatggtggaatgtcacattctaaaaaaataacctatttcaatagtaagattctaattcctcaaaatgaaagaaaacaaa

SEQ ID NO: 123234 - DNA, 553 bp, Zea Mays
agagcaacgctcaagttcgcgaatcgcgagttgtggcgacggtagaggaaaaataagccgtggcctctcttccgtaagccctagcccctagccgccagtgtcgtgcattcgtgctgaggctcaactgctgatccgtcttccaagctctggtatcatccctgagcactgatttaagatgtatctccagtactacatcaacgagaagggggacaaggtctacaccaccaagaaggagtcacctcttggggtgccaacgcagtctgctcacccagctcggttctcaccagatgacaagtactctcgccagcgatacctgttgaagaagagatttggacttctgccaacgcagaatccaggaccgaagtactgaagcttcaagtcaactgtccaacctgcgatgttctttttgtgtcaatgcttgttggttggaatgtactatcttcgttctcgaatatttgtggtccacttgttcaattttgaactaaaccgcgacaaataaaaaagaccactcatttgtccatttggcgtttacttagtgtaaataagttcggct

SEQ ID NO: 123235 - DNA, 586 bp, Zea Mays
agagcaacgctcaagttcgcgaatcgcgagttgtggcgacggtagaggaaaaataagccgtggcctctcttccgtaagccctagcccctagccgccagtgtcgtgcattcgtgctgaggctcaactgctgatccgtcttccaagctctggtgagtctctctcaaatattctttgtctctggtacagttgatatgagcgttgtaaggcggagacattgtaggcgtgggcttgtgaagtgggattcgatggggtttgagcatctgttccatggatcctattggggagctttgtgccgttgctttggtcttggctggcatcttgccggcgttgcaccgcggcctgctgcagctggcctcttggcggctctgatgctcgcggcggcgccgttgttgcgtattcttctgtctctgcttatattgattattgaaagcaagcaaggttcacaactggcgtccttgtttaagcaaggatgattgtgccagtggagatttcaggggctcgttaatgatcggaaaattcatgaaagtttctatgctgagattagagaaagttcatgaaagttcatggacattaagagagtagcaat

SEQ ID NO: 123236 - DNA, 2880 bp, Zea Mays
tgcaccgagccaccgaggtgaaacaaaagcgcaccccgccgcaacccagcccaacccaccgcagccaccgctctgcaatggcggctccgcttcccccacttctccttctcctctccatctcccccgcaatcttcctctcgtagtgctgctctcattcttccaccaaccgaaggttctgcggccgcgagagtgctggggggcgaacaatggaggcggcgtggaggaaggccaagagggcgctgggctccagcctctgcgtgcaccaccccgccgtcgccggcgaccgcgaggacggcgccagcgagcgccgcgcctcggatgcgctctccctcgacactaccgcggcggcgcacgcatcgacgcccaacgcgccggcgccgccggaggccggcgcgctgcggaggtccaagtccggaggcaagtccaccaatagaatgtgtgcaatatgttttgattccatgaagccaggtcgtggacaagctctattcactgctgaatgttctcatatgtttcacttccactgcatctcctctagtgtgaaacacggcaaccatgtatgcccagtttgccgggcaaaatggaaagagatccccttcaatcgctcattatcttctatagttccatgtggaagaggtggccaagcttggttaccccagcaaagtggctacatggctcttctccgccaggttccaaaccatcagcaacaaggtccagacttggttacttctgagccagcagacttcaatgatgacaaacctttgcagaagatggagtctgctaatattggatctagtagaactgtggaaattaagacatattcagagttttcagctattcaacagtcatctcaagatgactttgctgttctgatccatctgaaagccccatatgctaacccagagcaggtcacaagcagatcggtcaatgcaacctcaattgctacatcccgtgcccctgttgatcttgtttctgtgcttgatgttagtggaagtatggcaggcactaaacttgcactcttgaagcgagccatgggttttgttatacatcatcttggtccatcggatcgcctttcagtcattgctttctcttctactgcaagaaggttgttccatctccgacggatgtcacattctggccggcagcaggccctgcaggctgtcaactcacttggcgctagtggtggcacaaacattgctgatgcactaaagaaagctgccaaggttattgaggaccgaagccatcaaaatccagtatgcagcatcattctcttgtctgatggccaagatacatacaatattctctcagatattaggggtgtccggccagattatagttcactagttccaccctccattctaaatcacacatttcgcctagtgcctgtgcatggatttggttttggaatagaccatgattcagatgctttgcattcgatcgcagaggcctctggtggcacattctcctttatcgaggatgaaggtgtgatccaggatgcatttgctcagtgtataggtgggcttctcagcgtggttgttcaaaatgtgcaagtaaatgtggagtgtgtccatcctggtgtccagctccgctgcatcaaatctggtagttacctgagtaaggtgtctgcagataggcagaatggttcagttgatgttggtcatctctacgccgacgaggaaagggacttcctgctgtcggtgagcttaccgcattgctgtgaacagaccacacttttgaaagttgcttgtgcctacagagattcattgaccaatgaagagatcaaaattcaaggtgatgaggtaacaatcttgaggcctaaatcgcccgtacccgagccagtctgcatggaggttgaccgtgagaggaaccgtgtccgtgccgctgatgctatcgaggctgcaagggatgctgctgagagaggtgatctttccgatgccgtgtcaattcttgaggattgccggaggatactttcagaatctttttcaagccggagtggggaccggctctgcaatgcccttgatgcagagctgagggaaatgcaagagaggatggctaaccggcaacgctatgaggcttcggggcgggcatatctgctgtctggccttagctcacattcatggcagagagccactgcacgaggcgactccactgacagtgatacacttgtttactcctaccagacaccatccatggttcacatgctacagcgctcacagaaccagggcccatcacaggtccaacaacctaggatcttggtggagccccatccaaggtagaaggtaactcagtaatccatcgctatcttgcgaagcaagcgcacagatgttggtgaagagattcagttcgtatggctgcttagtaggtcgtagcgtagttctctagcacctttattttgctttttcttgtttgagtcatggtggtggtataccggaggcggtgaggcgggattggaagtaaatatcatctgtaggggcgtatactggggaggtaaggtggtgctttggtggtaaatacattgtggggggtatactcctgtagtgttaagaaataagtagagtagaagaggagggcctggagaaattgtgcaatagctttaacgggttggagctaaggtagtttagtgtaggtcagttcattgtagataagacataagagggtctgatcttgggacggtataccatgaaatctctgggattttttgatgtgttgggtccgggaggtgtgtttcgacctgcaacttgtattccatgtgttcgtgcttgttgcattggctgaagttggactggaatttgatatggttctgcgcgttggctgaagtaatgagtttacatgtattcttatccctccaattgattgaacgttaataaagaacagtgctagtag

SEQ ID NO: 123237 - DNA, 900 bp, Zea Mays
atggggcacaaaggtacttatattgatccctgtgcatgtgcatccacgaaccataggccacaaagaccccatcacggtatcgacataacacgattcgcgatccacgaacaacatccgttaccgaaccgggcggcagttccctcaggcgaggtcgtcgtcgtcgaaatcggcgccgtcgaagctgttgaagaacccggaaaaggggaggggcccgcgggcatcgccagcgccgccgcgggccgcgcggtgcggggcgaagaacatctcgccttccccgtcctcctcgtcgaggaacccggcccccgcagcgctgagcggcgagtcgtcgatgtccatgagcgtcgagatggcgtcgtcctccatggagtgggcggcggggaagtgactagggttctggccgtggtgcgggggcggttggtggcgagggtggagctggtgttgggcggtctggggttagctgatatttccgggaagagaaagcctcgcatgaatacaacaaaatatggggagaatgccaaggtccccaaaagccgacaaagatcggaaaatgatgctgatgctgctgtccatgttgacaaaactattttcccccaagttgaaggtgttgtccatgatggagttgtttttccccaagttgaagctgatatccatgttgaaggtggtgtttttccccaagttgaagctgatgtccatgatgcagaagctgttattccccatgttgaaggtgttgtccatgttgaaggtggtgtttgtccccaagttgaacctgctgtccatgaagtaggagttgttgttcccctcgttgaaggtgttgtccaagttcagtcacctcccaagtctagaactcctaagaagatcctatcgaagaagctcacaccaaggaagctgaagaggatgtaa

SEQ ID NO: 123238 - DNA, 900 bp, Zea Mays
atgccgtcagtgcagagccgcattacgcaccagttcagcctgcccaagacgtcgtctgaaatggcaagtattgagaaattcctccagttccaggacgacgtgccttgtaagatccgtgccaagcggggatgcgccacccatctgcgcaacatcgccgagagggtgaggagaacaaagatcagtgagcgaatccgaaagctgcaagaactcgttccgaacatggacaagcaaaccaacacatctgacatgctagatttggctgtcgactacatcaaggatctccagaggcaggttaaggtgttaaaggagacccaagctaattgcacctgcccagcaagcaagagccagcaacactcttgctgaagccctgatgcacactatacatgacctgcagaactcgaaagcatcttcacttgggatagaaaaagatgtaagacagctctcatttttttgtgggtttgaactgtagcatttgaggcttatctaccatacagtgtgtagctttatatgggcacaggggaatggaacaatggcatcatcctcaagcattcaaatgatagggagaagggtaaaattggggagatatataggagaaacaactgtatagtttcattgtagctttgatatatgtatactacactttcggtataaagtggttaatttacccctattgtcgttagacacagaaaaataagtcaaccttgttttttctggcttcaagaatactaaaacatggatatggataaagtaaggagtagactgagaagacagtgaggtgtagcatggatatggattgtgaattctgcctcttgatgaaaaagacgtcaacggacatgttctaaaataatttgtaaattctgaatcctactaactgtgctggtgctgccaaagaggaagata

SEQ ID NO: 123239 - DNA, 300 bp, Zea Mays
tcatgaaccggagtagctttttagagtaatagcgcataatcctagtcttaggccgtctgcagcgtgatatgcatatagccgtgcaaaacactgttttaaaatgtagactacacgataaacagctgaggctaaacggtaacgctattacacgataaaccctgctatttggagattgatcgaatcagggtagctcgtatggtgtcttttagcacgcaaagcattgcaataagtaggatggtccaaaagaacccgccacgagccttgaatattctcaggacaacaccagagatttacatcctc

SEQ ID NO: 123240 - DNA, 1126 bp, Zea Mays
cctatatatacaaccacccgctgcccttccccggcccctgcacccgcttcactccccattcattctccgatccccttcccagcgggcagcggccgcaccacgcctgttcgcctctcgcgggacccagccccagcgggacccacgcggccacgccccacgccttcattcctccctttctcggcctcaaccgcttcctttttccccttgtaccatttgtccattttcgtgtcccaccagtcgcggtcgggcgattccgtctctggcatagcaagcaggcgcgtccgggccgtcgaggtcgagctgtggatccacgcggagatgcaagcgccacgtggcgatggcttcctcgggaagcggaaggagcgcgactattgcccgcatccctcagtgtcgccgacggagcaggcagccccgctgcagcggcaaccgccgccgttcgctaggcccgacccgcgtggcgtcaagctggatcgcccggcggtgaggtttggcgcgaagccgccgctccctcaacagggggccaaggtcgggggcaacggcaacaagctgctggcagggtatctggcgcacgagttcctgcggtgcggcacgctcctcggcgagcggaggctcgagccaccccgcctgaaggagaaggatcccgccgccccctcccccgccccaacccccgctccggagccgagcaggcgctacgcggacgtttcgcgcctgcttatgacgggcggggcccgcatccccggcgtcgtcaacccgtcacagctcggacgctggctccggattaaggagtgaccgggtggccatgacactggtggccgcggcccgcggcatggccgcattgcctactgcttcgcctcggcggcggccgatcagaggaaccgttgcttttgaacgtagcaggctggtttgtcattcctctgtctttctttcccttcaaaattttcgtgtggtaattagcaaatgaactcctcctgtcaaaaatttagtgtagttgttggatgagaaactggagacggtacactggtactgttgctagctttcgctgaaatcctcttcatcggcaaaaacctgtgatgcatatggcgtgggtgaatgaatccaccatcgatgtaaatacatggtaatgctt

SEQ ID NO: 123241 - DNA, 2612 bp, Zea Mays
ccactgtgtgtgtccacttccctgaagctcatacgcagcccacggtttattatagaggactctccgccggcacggtcacttgaaccagtagccgagtacaacgccacacgctcgtcaccaggaggccgccaaccggcaccatgggcgcgggcaacaacaagcggggacaccctctcctgaggggtgggagcgcgaagagggagcggtacacgcacggcttctcggcgtcccagatggccgcgctcaccgccctctgcggcgcgctggtgccgtccctgccgccggcggaccgccggaacggtcaccaccacaacccgcagcctgaggaggacggcggcagcagcaaggtcgtggaggagttcctcctcgcgtcggccgccgacccgcccgtgcccggcgaggtggccgagctgatgtcgcgcaagtgcctccccgaggcgctggctctggtgcgcgcggtgctgtggctgctgggcacgcggctcggctcgctggcgctgtgcggggcgcggtgcctgtcgtggcggttcccgttcgtgcgccggttcgacgagctgcccctggagcaccgggaggccgcgctccggcggtggagccggctgaccctgctcccgccgctgcgcatgttcttcctcatcaccaaggtcttctgcctctacgttttctactcctggaccgacgagaactcaaagaatccgcactggcgcgcgatcgggtacagcccgcccccggcggacgacgagccggcgccggcggaatcagaacgtcccgagaagcgtcccctggacgacggcatcgttgagacgaacaaggagaacgacgcgtccctgcccgcgttgctagccgagaagggcctcagggtggccgatgacgcggcgcggaacgtgtgcagggtcgagtgcgacgtcgtcatcgtcgggtccggctgcggcgggggcgtggcggcagcggtgctcgcggcggcggggcacaaggtggtcgtcatcgagaaggggaactacttcacggcgcgggattacacggccatcgaggcgccgtcgatggagcacctctacgagggcggagggttcgtcagcacgctcagcgccagcgcgctgctcctggcaggctcgacggtcggcggcggcacggcggtcaactggtcggcctgcatcaagacccccgacgacgttcgcggggagtgggcgcgcgaccgggggctcccgctgttcgccaccggcgagtacgccgccgccatggacaaggtgttcgagcggctcggcgtgacggccggttgtgcggaggaggggctccagaacaaggtcctccgcaaggggtgcgagaggctcgggtacaaggtggagtcggtgtcgaggaactcgtcggaggggcactactgcggcagctgcggctacggctgccgcaccggcgacaagcgcggcacggacagcacgtggctcgtcgacgcggtgagccgcggcgcggtgatcctgacggggtgcaaggccgagaagctgctgctggagcctggcagtgccgcggacggcagggcgaagcgatgcgtcggcgtggtggcgaggagcaccaacccggcgatcacgaggacgctggaggtgaccgccagggtgacagtctcggcgtgcgggtctctcctgacgccggtgctgctgcgcgggagcgggctccgcaaccggcatatcgggaagaacctccacctccacccgacggccctggtgtggggctacttcccggacaccgtgccggacctcaggggcaggatgtacgagggcggcatcatcacgtccctgcacaaggtggaaggcggcggtccgggcgcgccggcccgcgccatcctcgaggcgccggcgatgggcctggccggcgcggggacgcagttcccctgggtgtccgggcgcgacatgaaggagcggatgctcaggtacgggcgcacggtgcacctcttctccatggtgagggaccgcgggtccggcaccgtgcacggcgagcggcgggtggcgtaccacctggacgccacggaccgggagaacatgcgcgacggcatgcggcgcgcgctgcgcgtcctggccgcggcgggcgcggcggagatcggcacccaccgcagcgacgggcagcggttcgcgtgcgggggcgccacggaggccgcgctggaggagttcctggacggcgtggacgtggtgcgcgggccccagtcgaaggccgaggcgtggaccctgtgctgcaccgcgcaccagatgggcagctgccggatgggcgccacggcccgggacggcgccgtggacgcgcgcggcgagagctgggaggccgggagcctgtacgtgtgcgacggcagcgtcctgcccggcgccgtgggcgtcaaccctatggtcaccatccagtccgtggcctactgcctcgccacgggcatcgccgagtcgctcaggcgcggcccggtttcacgaaaggattgagactctatttggatatgcacgtatatatccacatcaatttatttcaatttacgtgtgttaaagtggatttcacgaaaggaattgctgcagaataggtctgcagcggttcactgttcgtgtgctggagaataataagaaatggaagtgagacaaatctatcttttc

SEQ ID NO: 123242 - DNA, 566 bp, Zea Mays
gtcgtacggaccgtcggtggctagcatcctggatcctggttcatctgtcgtctccagggattcggcatggaggacggcgtgttctgcggcgtgttcgacgggcacggccgctgcggtcagctggtcagcaagctggcgagggaccacctccccttcatgatcctgagccagcggaacgcgctgctcctgggctccgacgacgacggcgatggcgacggggacgacccggccttcaacgacgcgtcgcccacggcgccgtcgtccacggacggcagccgcagcaggtggtcgtcgccgtcgttggcgccggcgccggcacagatgctggaggtgtggcgggaggcctacgccaacgtgtttgagaccatggacagggagctcgggtccaggccagggtggactgcaacttcagtggcaccacggccgtgtgcgccatcaagcagggggaggacctcgtcgtcgccaacctcggtgactccagggccgtgctggcgaccgtgtcggagacgggctacctgaaggtcgtgcagctcaccaccgaccagaagcccaacgtgcctcgtgag

SEQ ID NO: 123243 - DNA, 647 bp, Zea Mays
atcaaacatgaccttatgtctaatactccattgcacaaatgaaaatctacatcaaaggtaaagctagcctagcgagctatttttatttcattgtcattatataagtgttaatcatcatcattttgcacgtccctaacggggtgctaaatgcttcgctaaccgtttggaaaacgaatgtacagaactcaaatctgtgccaagattcgacgagcatcgcaatgtgaagagctcagcatcatgcacagtacataatcttttgacttgctcatcagtaagcatcatctggaaccgaatgaatattcaatgaaatcagtatactcgtcaatggtcagaccttttgcacctccaaagattcatctcctcctctctgcgctgatagtaaggcgttcaaaactcctcatagtgggatcatcctggccgattcttccaggttttgggaatgacgaggtcctgccctcaagtccagttgactggtgaagcctttgattggttgatggacggctgctgctgctggtggtcgggactaggtggctactgcgatttgggtcgctgggatctccagaacctcggctgcttgacagaagagccttccttgatgtgcttccattccgagatgatgaatgctttcttttatctgaatcaacagc

SEQ ID NO: 123244 - DNA, 1785 bp, Zea Mays
agagcagttctctgtagcgagtgccgtcccgatccaaaccccaacgctaatagggtattcgggtgagccggcagcggcgtcggctcggctccggctggggggtgcggcggcagcggcgtcggccttcgcgggagacgcggcggcggccgggcgagcttcgggcttcgggcgtggcctcacgcccgcgccttggcggcctcgccacggcagcaacgcgtcagggcgtcggcctttgcgggagacgcgggcacgcggcgggcgggcttcggccgtgggcctcgcgcccgcgcttaggtggcctcgctgcggtagcaacgcgggcatcagctttcgcggaagaggcggcagcggccggccgggcttcggcggagggcatcgcgcccgcgccaggcgtcggcattcgcgagcttcggtacaggctgtctcttctagaatgctaggagtggagaattgatgccggagaaatgcaagtttgaggacagaagacctcttcaggactagcagttcttgacatctacacggttcaacacctgtttcttctggggaagaaagcacagcaattcattatgaagagcagcgacggaaaccaaatcaagttacaaccaatgtggagaaaagttgcctatgggggaaggcagtcaggatatgatgataactacactgacgagtccttccttgaggagatggttatgaatgccaatgtcgtcaagagggaccttctgaaagtgatgatcgactctgtatccatatcacagtatctttgcatcgtcgctcttgtggtttctacatggaccctaacgctgaacttggacattgatgaatctactctcctcaaactagatgttggtcttctccttgttgggttctgggtcctcttgctcacaacttgtccgttctcgctgaagcttctgacaaagtatgtcctcaatatatcattcttcataagcggtctttatgttctcgcaccaatttatcataccctcaccaggtccatcagttcagattcaatatgggcccttgctgtatctcttctgctggttcatctatttttacacgattactctggttcaaccataaggcctccaggcgcattgaacaacccaaaattaactagcaacatctccttgaatgcatcgatagtagcctctgtccttgtggcttcgcggctgccatcaaggctgcacgtcttcgcaatcatgttgttctccttgcaagtcttcctctttgcacccctcattactttctgtgtgaagaaataccattttaggcttcatctgctattctccttcacgctaatggctgtggccctgagtgtcacataccagttgcatcgaatgttcttcactgttctattggcgctacttgtttttgtctcaatcgtttgcccttactggcttataaggattcaggaatacaagtttgagatcaatggcccctgggatgaagcaaaactctgctttgatataactgaatagcagtgctaagttttctttaggaatgatttgcattgaagattggtttggttgtatatactggcatataggctcgctgcgagccttcatggcataggtgttttcatgtgaatgtatatgctatttaatggatttattgtgttaccgagactaattcttggcatgctttgacatgcctaatgatcactaattctggtgtcactggcagtttgggatgttaaaaagctactttgtaaggaagatctacattctgtcttttgctgactgacatatttgtgaggtgaaaagctattgcatatgtgggatttgtttt

SEQ ID NO: 123245 - DNA, 1348 bp, Zea Mays
agacgcttccagagctttccacaccattcgctcacgaccacgaggcacgatcacacagcacaagcctcacccggcggaacacctcttccgagttccaactcccaaccgcagcctcagcctcagcctcacacggtcgaagcagaacccgtgaacacctcaaacctcacggctcacgccaccgtcctccagccccgttctccggcgatcctgtcattccagacgcgtctccgcccctctcggtccaccaccccgacgccgccacatgtcgacgcagtccatttcgccggcctctgcgtccgcgcagttcacctacccggcggcagcggccccgtcttacttccccgtgcccttccacctccagaacgcgcaatacaccgcatggaccgcagccgcgccggcggtgcctgtgtacaacgccatctatcccatgccccaagtccagcaggcccaacagttgttccaaaaggactcgaagataattactcctgaagctctagctactgttaaggctgctattgcaaatagtgagaaagacaagaaggttgatgcaacaaaaaaggcagtgcctcgaaaggcagctgggcaaagttgggaggaccctaccttggctgattggcctgaaaatgatttccgtttgttctgcggtgatcttggaaatgaagtgaatgatgatgttcttgcaaaggcattctcaaaatatccatccttcaatatggccagggttatacgggacaagtggactggtaaaactaaaggatatggttttgttagttttgctgatgcgtctgatcttacttctgccttgaaagatatgaatggtaaatatgtaggaaatcggccaatcaaattacggaagagcacatggaagaacaggatagacttagaagctttggagaagggaaagacccaaccacagaagaaaatcaaactgcagaaaagaagtgttcttcacaaatgaatctgaaaaattctgctcgttcatcgtctgtcagtatcgtttgggaaagctgtctgaagcattaacagttttacttaacgtcagatgtgtaggactgatggtcaccaagttcccggtgacactgtatacaatcgcagacgcgatgctatgttggtgattgaacaggtgtagccgaatagttggatccaataacttcacctgtagtgtaatggtccaattttatcatgggaactgtagttctaaatactccagtgaccagtgctattgtggtgaattattctgtgatctttattcataaatattcgtgggtgttggcctgtttgaatcataatgctaatggtagctagctaagtgacaagtgctcgtattctgtgattttgttcagaaatt

SEQ ID NO: 123246 - DNA, 1497 bp, Zea Mays
agacgcttccagagctttccacaccattcgctcacgaccacgaggcacgatcacacagcacaagcctcacccggcggaacacctcttccgagttccaactcccaaccgcagcctcagcctcagcctcacacggtcgaagcagaacccgtgaacacctcaaacctcacggctcacgccaccgtcctccagccccgttctccggcgatcctgtcattccagacgcgtctccgcccctctcggtccaccaccccgacgccgccacatgtcgacgcagtccatttcgccggcctctgcgtccgcgcagttcacctacccggcggcagcggccccgtcttacttccccgtgcccttccacctccagaacgcgcaatacaccgcatggaccgcagccgcgccggcggtgcctgtgtacaacgccatctatcccatgccccaagtccagcaggcccaacagttgttccaaaaggactcgaagataattactcctgaagctctagctactgttaaggctgctattgcaaatagtgagaaagacaagaaggttgatgcaacaaaaaaggcagtgcctcgaaaggcagctgggcaaagttgggaggaccctaccttggctgattggcctgaaaacaacaaccatgagaaaatgtcagtcttacaggcaaggtctaatgctctatctattatgctttgatctgaaacaaattgctcttttttccctttctctaaaggtgctcaaggatgtgatgagcccaacagattgccacacgtgatttagatgatttccgtttgttctgcggtgatcttggaaatgaagtgaatgatgatgttcttgcaaaggcattctcaaaatatccatccttcaatatggccagggttatacgggacaagtggactggtaaaactaaaggatatggttttgttagttttgctgatgcgtctgatcttacttctgccttgaaagatatgaatggtaaatatgtaggaaatcggccaatcaaattacggaagagcacatggaagaacaggatagacttagaagctttggagaagggaaagacccaaccacagaagaaaatcaaactgcagaaaagaagtgttcttcacaaatgaatctgaaaaattctgctcgttcatcgtctgtcagtatcgtttgggaaagctgtctgaagcattaacagttttacttaacgtcagatgtgtaggactgatggtcaccaagttcccggtgacactgtatacaatcgcagacgcgatgctatgttggtgattgaacaggtgtagccgaatagttggatccaataacttcacctgtagtgtaatggtccaattttatcatgggaactgtagttctaaatactccagtgaccagtgctattgtggtgaattattctgtgatctttattcataaatattcgtgggtgttggcctgtttgaatcataatgctaatggtagctagctaagtgacaagtgctcgtattctgtgattttgttcagaaatt

SEQ ID NO: 123247 - DNA, 1404 bp, Zea Mays
agacgcttccagagctttccacaccattcgctcacgaccacgaggcacgatcacacagcacaagcctcacccggcggaacacctcttccgagttccaactcccaaccgcagcctcagcctcagcctcacacggtcgaagcagaacccgtgaacacctcaaacctcacggctcacgccaccgtcctccagccccgttctccggcgatcctgtcattccagacgcgtctccgcccctctcggtccaccaccccgacgccgccacatgtcgacgcagtccatttcgccggcctctgcgtccgcgcagttcacctacccggcggcagcggccccgtcttacttccccgtgcccttccacctccagaacgcgcaatacaccgcatggaccgcagccgcgccggcggtgcctgtgtacaacgccatctatcccatgccccaagtccagcaggcccaacagttgttccaaaaggactcgaagataattactcctgaagctctagctactgttaaggctgctattgcaaatagtgagaaagacaagaaggttgatgcaacaaaaaaggcagtgcctcgaaaggcagctgggcaaagttgggaggaccctaccttggctgattggcctgaaactcttattgctcgttgccttgcagacaacaaccatgagaaaatgtcagtcttacagatgatttccgtttgttctgcggtgatcttggaaatgaagtgaatgatgatgttcttgcaaaggcattctcaaaatatccatccttcaatatggccagggttatacgggacaagtggactggtaaaactaaaggatatggttttgttagttttgctgatgcgtctgatcttacttctgccttgaaagatatgaatggtaaatatgtaggaaatcggccaatcaaattacggaagagcacatggaagaacaggatagacttagaagctttggagaagggaaagacccaaccacagaagaaaatcaaactgcagaaaagaagtgttcttcacaaatgaatctgaaaaattctgctcgttcatcgtctgtcagtatcgtttgggaaagctgtctgaagcattaacagttttacttaacgtcagatgtgtaggactgatggtcaccaagttcccggtgacactgtatacaatcgcagacgcgatgctatgttggtgattgaacaggtgtagccgaatagttggatccaataacttcacctgtagtgtaatggtccaattttatcatgggaactgtagttctaaatactccagtgaccagtgctattgtggtgaattattctgtgatctttattcataaatattcgtgggtgttggcctgtttgaatcataatgctaatggtagctagctaagtgacaagtgctcgtattctgtgattttgttcagaaatt

SEQ ID NO: 123248 - DNA, 1420 bp, Zea Mays
agacgcttccagagctttccacaccattcgctcacgaccacgaggcacgatcacacagcacaagcctcacccggcggaacacctcttccgagttccaactcccaaccgcagcctcagcctcagcctcacacggtcgaagcagaacccgtgaacacctcaaacctcacggctcacgccaccgtcctccagccccgttctccggcgatcctgtcattccagacgcgtctccgcccctctcggtccaccaccccgacgccgccacatgtcgacgcagtccatttcgccggcctctgcgtccgcgcagttcacctacccggcggcagcggccccgtcttacttccccgtgcccttccacctccagaacgcgcaatacaccgcatggaccgcagccgcgccggcggtgcctgtgtacaacgccatctatcccatgccccaagtccagcaggcccaacagttgttccaaaaggactcgaagataattactcctgaagctctagctactgttaaggctgctattgcaaatagtgagaaagacaagaaggttgatgcaacaaaaaaggcagtgcctcgaaaggcagctgggcaaagttgggaggaccctaccttggctgattggcctgaaagtaagatatctaattctctattatcttttttcacaatgttttgcaaatgctccaattctgtgggtatggagtccttaacatggcaacgttgtggtattttagctcttattgctcgttgccttgcagacaacaaccatgagaaaatgtcagtcttacaggcaaggtctaatgctctatctattatgctttgatctgaaacaaattgctcttttttccctttctctaaaggtgctcaaggatgtgatgagcccaacagattgccacacgtgatttaggtgggcttgcagatgattactgaacgttttcaaagtacctaattcctgtttacctgatttgtcacatgtagttgaatattgtttcatgtacctttattaatcttgggcatgcttatgctgttgtatgaaatgctatattcttcttgtgatgtttgatgcaaacgtatgtgtagggtttgaatttctttgtgcattacaggcacacaccccaactgctatgttccctccattacttagttcgccataagaatggcggcatacttgttctgtcaattgttggtttgttggctgtaggaacgttgtcttggctgctttcttcattgctcctcccctcttcaatggttgatttaagtttgaatgatgtccatccacctaccaatatttatgtaatgtccacaatttctaagatgtgccatatatgtctttttcataaaaaatcactattgttaattttgcaccgttttggtcaatgaatttctttaagtatttaatagttattctataattgttttgctagcactt

SEQ ID NO: 123249 - DNA, 280 bp, Zea Mays
ggcaagttcacggccatgttgagtgagcatggtgctcgaagtttccggtccgctcctgaaatcggtcgtaacttgtgctatgtagcatggatatcatttttgcattcacggttttccaagtttcgagtgacctgcagttcaaatctgaattttccgaagaaattcaaataaacaaactaaatgtactagctatagaaaaaactgttataattgtcctaaaatggtacatgtaggtctacatagtgtaggaacataccacaaaaattttggttggcaaaat

SEQ ID NO: 123250 - DNA, 1909 bp, Zea Mays
acgcctgcacatccccactcctaaaaatagtagccggcggcatgcaaatacgataccccacgccttcttcccgttcatgatatggagctctcctcctcagatcaataatgggcctatatatgagacgcacgagcaacgccagttagcaaccagccaccactaccaaccctccagtctcagtctccgtctcctgctgagcaacaaggcttcagcagttcagagattctgctggagcctggaggaagcttctctacccaccactccgacgcggccgccgtcgacgagatcagccgcgccgtcgccaccaaaggcaaaagaagagatcgagctcgaggctcgagctcgagcaggcagcagggagggggcacccagatatatagatcccccaaaaggtgcatgtaatcatcggctgcgtcgtcacgtcagtcgttcatgtgtttgtatctgattcgtggatgccagattaattgatggacctgtccccgaaccccgagagcccgggaagcggtggtgatggcggcggtggcggaggcggagccgggggatcgagcagcggcggggcgtctccgtcggcgggcttcggcacgccgcagacgccgagccggtacgaggcgcagaagcggcgggactggaacacgttcgggcagtacctgcggaaccaccggccgccgctgagcctggcgcagtgcagcggtgcgcacgtgctggagttcctgcgctacctggaccagttcggcaagaccaaggtgcacacgccggcgtgccccttcttcggccacccgaacccgcccgcgccgtgcccctgcccgctgcgccaggcctggggtagcctcgacgcgctggtgggccgcctccgcgctgccttcgaggagaacgggggccgcccggagtccaaccccttcgcggcgcgcgccgtccgcctctacctccgcgaggtccgcgagcaccaggcccgcgcgcgcggcgtcagctacgagaagaagaagcgcaagaaggcgcagcggccggctgatcacgccagcggcagtggaggcggccaaggacctcaccacccgccgcccgccggcgcgtcgggctgaggaacccatggtatgccggccggactgagcatattttatgtagtttcgatcgatttgcggctgcatgcatgcacacggtctacttactcctaccattttgctcgcgccatgctactgcttcttcttcttcttcttcggttagactctccgcagatcgtgtgcctacattgttattgtgcttctgctctctctgctgctactagcttcagttcctagctaccgcttatttttggtgtcaatcagtttaatttgccggtggaagcaaatcttgtcatttgatcaatgaattatatgattgctagctttttataactttttcatccagcattgctcattgtagatcgacttgcatacacttgtgtatcgattcactgtacatatacgtacgtacgtgtcctcaattcaaagtacatggcgaggacgagagagccaagtcccatcgaggacgtacaagcttgacgcaccctcatctttggctctctttctagttctgcttcctgcgccgtttcctttttctggtcagctggcgctcgatcggcgccgcgccaaacagcgaactgcaccagtgagcagtgtgacaacgggcatggccggaccgatcgatcgatcggatcgccgctcgtactggcgcggcgcactgttgcatgccatccgccgtcccattggctcggtgcatatcttgctagatcttgcaatgtctgacggttgaacaggatgccactgttgttcttctctagcgcgctcgtgccactggtcggcctgccggttggccgggttcgccatccccagctgcagactgcagtaacgcccttatagataggaggtcaaat

SEQ ID NO: 123251 - DNA, 154 bp, Zea Mays
attttggccaccaaactttttgtggtatgttcctacactatgtagacctacatgtaccattttgggacaattataacagtgttttcaatagctagtagatttagtttgtttatttgaatttcttcagaaaattcatatttaaactgcaggtcac

SEQ ID NO: 123252 - DNA, 1440 bp, Zea Mays
atggccgctgcgcccgccctgctcgcggtgacccccctccctcccccgatagtcgtcgtcgttccattttccccaaccctccatgcccttctccaagaaacagagcgacgagatcaacccagcagcaggatcgatcgttcagagatgatgatggattccgcggagcatcagaaggacgtggggcaagtgggtggccgagatccgagagcccaacaagcgcaccctgccacccgcctctggctcggctccttcgccactgccgaggaggctgcgctcgcctacgacgaggacgcgcgcaggctctacggccccgacgccttcctcaacctgccgcacctccgcgcctccgatgtctcctcctctgccacgcaccagaggcttaggtggctcgctgcctccgccaggggcgccgccgccgtcccggcctacggcctgctcaacctcaacgcgcagcacaacgtatacaatcttttggcacatgttcctttgatggattttcaaaaggaatcaacatttgatatgtggagtactgttggtctgtcttctaaaggagaaaatgactcttccatgttcaccaaagcatggctgtcttttctcatgttaccactaccacttgatgtgtacaaggaggtccttgcttcaattcatcaaaatgtcattccttcaatgtcaaacccttccatcttatgtgatttcttgactagatcatatggtattggttgtgttattagtgtgatggccttaagtggtcttttcattcttatgacacaacacagtctggagtatcgaaaattctatgaaaagctttatgcactactcactcttgttgttttcatggcaaaacaccgatcagtatttttgcaagaacatggggtggaatggaggaagatgataaacggcggcggtggccagaagaggtgcaacccaaatatcattcgctttcaacaccacattgagtccgaccccaagttcttcgacaagtcgtggcgtaagctccatgacaccattcgcgagatctacaaccacaactgcaccggcctctccttcgaggagctctacaggtgcctccatttctactacttcaaccttggtgcgagaggatctttacagatccaagcttaccttcgatgggaaagaaaaggaagaggaccttgtacaagtgcagacttatatcaggtaggatttgaggaagcaatggaagaactacatgctaaggtgtacaagggactctctattgatcagatgaggcaacaatgcaatataagaatcttacctgataggaagccataccaggttcttgcgttcctgtcatatcccactgaaacaggtttgaagagaagcgctcgacgtggcgcagaagctatcgaagaactattgcaaggcagtactgagttggagcatttgagaaatagagctaccaaaaattcatatgggcactaa

SEQ ID NO: 123253 - DNA, 95 bp, Zea Mays
gtatcatcaggtggttcaggctcctctggaactagcaacgcctagacctcatccatggcatgaagctaagcagtcgttgcacatttgttaccacg

SEQ ID NO: 123254 - DNA, 1493 bp, Zea Mays
atgaaaaatcacgatatcgcatcgcaggaaacacatgctcatccgttcccttactttaagccgacaccgatcgaaggcacacaaacgtactactagtacaaaacacaaacaaataaacagaggaataaaaaaaacgacagaaagcaacgccgaatcccgtacgcgatccaagcaaaccgataaaaaatgaacgaattcaaaccgtagcttaaactattcccatctccctgttccttgtgtcaccctcgggccgaaaacctccccttctgggaagcaccctgctttgaccacgtttggtttttgcccttttggcctttctctatccgtagatcgagccccgtccgtcgtcgtcgcggcggcatataaatagccaagctcagcccagccctcccagtccacacagcaaaaccacccgcgctccgccaatccagagagcgagccagcccgagctcacacagcagcgagctcggtcttctcgccaggacacgaacacgaccccagcaggcggcaggcaagccacgctctctcgacgggcggacgttaatcgagacatggggcgctctccgtgctgcgagaagatggggctgaagaggggtccgtggacggccgaggaggacaggattctggtggcgcacgtcgagcgccacggccacagcaactggcgcgcgctgcccaagcaggcgggcctgctccgctgcggcaagagctgccgcctccgctggatcaactacctgcgccccgacatcaagcgcggcaacttcagccgggaggaggaggacgccatcatacagctccaccaaatgctcggcaacagatggtcgacaatcgctgccaggctgccggggaggacggacaacgagatcaagaacgtctggcacacccacctcaagaagcgcctggagccaaagccagccagccagcaggcgcccaagcgcaagcccacgaagaagcagcagccgcagccggagcccgagcccgtaacgacgctcgaggggccggccggagccgtgccgccggtggcgccggagcggtcactctccacgacgacgtcgaccaccaccagcaccgcggactactcgcccgcctcgtcgctggagaacgcgggcgacagcttcacctcggaggaggactactaccagatcgacgacagcttctggtccgagacgctggccatgacgacgacggtggacagcttcgagtccggggtgcagcaggcggagggcagcttcggcaagtcggcggcggcgccgtcgtcgaccaacgacgacatggacttctggctcaagctgttcatgcaggccagcgacatgcagaatttgccccagattatttaggcgggaaacggacctagacggtttgttatctctcggctgatgatgatattcattgggcgcgcgctcacgattctttgaatcttcgttctgctccgttttcggtggatgtatatatatcccactgaaaccttgtgaagcggaaagcaattgcttcgtatc

SEQ ID NO: 123255 - DNA, 80 bp, Zea Mays
gtaatttttatgctcagtcttttcttcggtagttgtttgtgttttggactgaagtgcgcatttgcaggaatcgatcttcc

SEQ ID NO: 123256 - DNA, 852 bp, Zea Mays
atttcagtttggttatggtttaactcttcttttgctatttgtgtcgaccatttatgtcacaataacttcactcaatactctatacataactgactggtcatgatatcatatttcgataaagtatttatgacaatctaagacacacaaatggtttatggaaaacctttggatggcaagcttgtattgtatgccttccaaattttatagtagtaccattttttatttttgtttggatacctcttctaacagagatcttggtaatttgaacttatatggtcatctggtgcctgagcttggaaaattcgagcatcttcagtatttgttatgatcaccgtaggcaggttttctccacacagatgggtttgagcgaccaggacattgttccacttttttgtggtcacaccctgggaagatgccacaaggacaggtctaggtttgagggagcttagacgtccaaccctttgatccttgacaactcttcaaggagcttctgagtggagagaaggaaggccttttgcagctaccaagggacaaagccctcctctcttatccatccttttgcccacttattgacaaatatgtagcagtatatatatctttgatccttgtcatttgttcggggtcggtttatgttaacctgggtggctgtaataaatatttgtcggccttgtgttttgttgtattcttttctcttgaatggttcatttgaacatggggtgaactaaactgaacatgtagtctgtatgttttcatggttcatttttcttttttatttatctatcatatctatcggagaagctttgtcatatgaagcagagtatggaaggttggtggggcattgcagtgcagtgg

SEQ ID NO: 123257 - DNA, 82 bp, Zea Mays
ggtagagtcgtatagcgaggagaagaggcttggtgccaagaaactggcatttcgatttggggagtggctaaattcgtcgctg

SEQ ID NO: 123258 - DNA, 1360 bp, Zea Mays
aacaaaaacccctcttcaccggtcaccacttcatctcgcccacacgaactcgagacctcgcccgcccaaatacaaaagcctcagatctcagtgaccagcgccgccgcttcgttcgtgtcgaatagagaagagaggaaatggcggcgagcgagggcgtgctcctggggatgggcaaccccctcctcgacatctccgccgttgtcgatgacgccttcctggcaaagtatgacatcaagctgaacaatgccattctcgctgaggagaagcactcgcctatgtatgatgagttggctagcaacagcaatgttgaatatattgctggaggagccacccagaactctatcagggttgcccaatggatgcttcaaactcctggtgcaacaagttacatgggatgcattgggaaggacaagtttggtgaggagatgaagaaaaatgctcaagctgcaggagttactgctcattactatgaggatgagactgctcctactggcacatgtgctgtatgtgttgttggtggcgaaaggtcattgattgcaaatctgtcggcggcaaactgttacaaatctgagcatctcaagagaccagagaactgggcactagttgagaaggcaaaatacatctacattgctggatttttcctcacggtgtcacctgattctatccagttagttgctgagcatgctgcggcaaataacaaggtgttcctgatgaacctctctgctcccttcatctgtgagtttttctatgatgcccaagagaaggtcctcccgtatgctgacttcatcttcggcaatgaaaccgaggcaaaaatcttcgccaaagttcgaggatgggagactgagaatgtcgaggagattgctttgaagatctctcagcttcctttggcttcaggcaagcaaaagaggattgctgtgattactcaaggtgctgatccagtggttgttgctgaggacgggaaggtgaaaacgttccctgtgatcctattgcccaaggagaagcttgttgacaccaacggcgcaggtgacgctttcgtcggaggctttctctctcggctggtccagggcaagagcatcgaggactgcgtgacggctggttgctacgccgccaatgttgtcatccagcgcccaggctgtacctacccagagaagcctgacttcaactagtgcaatactcaggcacgttacgagcggttcggcgtgtacactccctgtatcctttccggtccggccaattttttgtacgaggcatggtttgccatcattatactgttagcttcggcgatgcttgcaatgcaacgagaatgcgttggaaccatatatgcaatgctacccgatcgattcggcagctcgatacttac

SEQ ID NO: 123259 - DNA, 534 bp, Zea Mays
cgccgcggacgctgaggctcctcctcgcgccccctccacgatcgccaatccgccggctggagagcgccgtggcggccgaggctctcctgctcacgggcgcctgctcgcacgcctgagggaaccgccgccgccgctaaaacctaatccctggcggcgtgggagtgtttttatagtgacgacgtgggactagataattgtgagcgcgtgggcaggatcgtgggcccaattcatgtaatatgcgcagactatatttgcacaaactgatacacacatcagcataactcgtattataatttagcgtaagcacatgtaggtacaataagccaaaaagggtccggtgcggtctgcacacctggtcagggcttcctgtagttaaatagagcccagggctttaaatactatatatatatagggcaggtataacgggagccctgggcttccaatagttaaaggaggcccaggccaaccacccctgcaaactggttcaaccagcgcgcccaaacaggctgtcgggtgcgccacctgccccacgtc

SEQ ID NO: 123260 - DNA, 2331 bp, Zea Mays
ctcttttgtttttcccacgtctgtcagtcaggctgcaacttggcagttcagtgacagtcacgaattctgtcgccatctatcgtatcggtccgtgctgctgtcagactgacccacatgcgccggcggctccccccttccctgcaggcatctcaacgccggaatcttcggcaccggcagcgatggccacacgctgccgtcggaggtcacccgggcggcgatgctcgtgcgcatcaacaccctcctgcagggctactctggcatccgcttcgagatcctcgaggccatcaccaagctgctcaacaccggggtcagcccgtgcctaccgcttcggggcaccatcaccgcgtcgggcgatctggtcccgctctcctacatcgctggcctcatcacgggccgccccaacgcgcaggccgtcaccgtcgacggcaggaaggtggacgccgccgaggcgttcaagatcgccggcatcgagggcggcttcttcaagctcaaccccaaggagggcctcgccatcgtcaacggcacctccgtgggctccgcgctcgcggccaccgtcatgtacgacgccaacgtcctggccgtcctctccgaggtcctgtccgccgtcttctgcgaggtcatgaacggcaagcccgagtacaccgaccacctcacccacaagctcaagcaccacccggggtccatcgaggccgcggccatcatggagcacatccttgagggcagctccttcatgaagcacgccaagaaggtcaacgagctggacccgctgctcaagcccaagcaggacaggtacgcgctccgcacgtcgccgcagtggctcggcccccagatcgaggtcatccgcgccgccaccaagtccatcgagcgcgaggtcaactccgtcaacgacaacccggtcatcgacgtccaccgcggcaaggcgctgcacggcggcaacttccagggcacccccatcggcgtgtccatggacaacgcccgcctcgccatcgccaacatcggcaagcttatgttcgcgcagttctccgagctcgtcaacgagttctacaacaacggcctcacctccaacctggccggcagccgcaaccccagcctggactacggattcaagggcaccgagatcgccatggcctcctactgctccgagctccagtacctgggcaaccccatcaccaaccacgtgcagagcgcggagcagcacaaccaggacgtcaactccctgggcctcgtctcggccaggaagaccgccgaggccatcgatatcctcaagctcatgtcgtccaccgaggacatattctggtgcacatagaagactggtgtacatggtgcacatattaaatcattaacactcattttagatctaacgtctctagttgattattcaatttacaaataacaccttccaccactacacaacaccacgttggagggtgtccttaataaaatataccaaacaactagagacattagatctaaaatgagtagtgatgatttaatatgtgcaccatgtgcaccaatgttccatgtgcaccggatatgttgtcgtcgtccacctacatcgtcgcgctgtgccaggccgtcgacctgcgccacctggaggagaacatcaagacctccgtcaagaacacggtgacccaggtggccaagaaggtgctgaccatgaacccctcgggggacctctccagcgcgcgcttcagcgagaaggagctcatctccgccatcgaccgcgaggccgtgttcacgtacgcggaggacgcggccagcgccagcctgccgctgatgcagaagctgcgcgccgtgctggtggaccacgccctcagcagcggcgacgcggagcgcgagccctccgtcttctccaggatcaccaagttcgaggaggagctccgcgcggtgctgccccaggaggtggaggccgcccgcgtcgccgtcgccgagggcaccgcccccgtggccaaccggatcgcggacagccgctcgttcccgctgtaccgcttcgtgcgcgaggagctcggctgcgtgttcctcaccggcgagaagctcaagtcccccggcgaggagtgcaacaaggtgttcctcggcatcagccagggcaagctcgtcgaccccatgctcgagtgcctcaaggagtgggacggcaagccgctgcccatcaacatcaactaaaagacgccaggcgccgccatccatgctgccgcccgcgcatggccggaggagaagaggaaaatacatgaaaaaataaaacttgtacacgtgtatgtctccagattgtgccaccgtcgttctcgtcgttgacttttggttgtattggtcgatccatatcaaaataaaaataaa

SEQ ID NO: 123261 - DNA, 3008 bp, Zea Mays
tcgaaacaaagaaaaaaaccagaaccctatcgtccaccaaccatccctcccactactacagagcagcgacctgccgtgccgggctcacctaaacccgcccacccggcgagccagcccggccccctatttaagcttggccacccccgccatttccctccaagaagagcacgcccactcctctccggctcctcttcttctccaccacaccacaggcaccggcaccagcaccgcctcctccctccctcctgccaccgcgcggcaccccagccacagcacagcaatggcgggcaacggcgccatcgtggagagcgacccgctgaactggggcgcggcggcggcggagctggcggggagccacctggacgaggtgaagcgcatggtggcgcaggcccggcagccggtggtgaagatcgagggctccacgctccgcgtcggccaggtggccgccgtcgcgtccgccagggacgcgtccggcgtcgccgtcgagctcgacgaggaggcccgcccccgcgtcaaggccagcagcgagtggatcctcgactgcatcgcccacggcggcgacatctacggcgtcaccaccggcttcggcggcacctcccaccgccgcaccaaggacgggcccgcgctgcaggtcgaactgctcaggcatctcaacgccggaatcttcggcaccggcagcgatggccacacgctgccgtcggaggtcacccgggcggcgatgctcgtgcgcatcaacaccctcctgcagggctactctggcatccgcttcgagatcctcgaggccatcaccaagctgctcaacaccggggtcagcccgtgcctaccgcttcggggcaccatcaccgcgtcgggcgatctggtcccgctctcctacatcgctggcctcatcacgggccgccccaacgcgcaggccgtcaccgtcgacggcaggaaggtggacgccgccgaggcgttcaagatcgccggcatcgagggcggcttcttcaagctcaaccccaaggagggcctcgccatcgtcaacggcacctccgtgggctccgcgctcgcggccaccgtcatgtacgacgccaacgtcctggccgtcctctccgaggtcctgtccgccgtcttctgcgaggtcatgaacggcaagcccgagtacaccgaccacctcacccacaagctcaagcaccacccggggtccatcgaggccgcggccatcatggagcacatccttgagggcagctccttcatgaagcacgccaagaaggtcaacgagctggacccgctgctcaagcccaagcaggacaggtacgcgctccgcacgtcgccgcagtggctcggcccccagatcgaggtcatccgcgccgccaccaagtccatcgagcgcgaggtcaactccgtcaacgacaacccggtcatcgacgtccaccgcggcaaggcgctgcacggcggcaacttccagggcacccccatcggcgtgtccatggacaacgcccgcctcgccatcgccaacatcggcaagcttatgttcgcgcagttctccgagctcgtcaacgagttctacaacaacggcctcacctccaacctggccggcagccgcaaccccagcctggactacggattcaagggcaccgagatcgccatggcctcctactgctccgagctccagtacctgggcaaccccatcaccaaccacgtgcagagcgcggagcagcacaaccaggacgtcaactccctgggcctcgtctcggccaggaagaccgccgaggccatcgatatcctcaagctcatgtcgtccaccgaggacatattctggtgcacatagaagactggtgtacatggtgcacatattaaatcattaacactcattttagatctaacgtctctagttgattattcaatttacaaataacaccttccaccactacacaacaccacgttggagggtgtccttaataaaatataccaaacaactagagacattagatctaaaatgagtagtgatgatttaatatgtgcaccatgtgcaccaatgttccatgtgcaccggatatgttgtcgtcgtccacctacatcgtcgcgctgtgccaggccgtcgacctgcgccacctggaggagaacatcaagacctccgtcaagaacacggtgacccaggtggccaagaaggtgctgaccatgaacccctcgggggacctctccagcgcgcgcttcagcgagaaggagctcatctccgccatcgaccgcgaggccgtgttcacgtacgcggaggacgcggccagcgccagcctgccgctgatgcagaagctgcgcgccgtgctggtggaccacgccctcagcagcggcgacgcggagcgcgagccctccgtcttctccaggatcaccaagttcgaggaggagctccgcgcggtgctgccccaggaggtggaggccgcccgcgtcgccgtcgccgagggcaccgcccccgtggccaaccggatcgcggacagccgctcgttcccgctgtaccgcttcgtgcgcgaggagctcggctgcgtgttcctcaccggcgagaagctcaagtcccccggcgaggagtgcaacaaggtgttcctcggcatcagccagggcaagctcgtcgaccccatgctcgagtgcctcaaggagtgggacggcaagccgctgcccatcaacatcaactaaaagacgccaggcgccgccatccatgctgccgcccgcgcatggccggaggagaagaggaaaatacatgaaaaaataaaacttgtacacgtgtatgtctccagattgtgccaccgtcgttctcgtcgttgacttttggttgtattggtcgatccatatgtgtgtgcgtgtgtggcgttgttctttcttctttgtgtagctgccctgccaccgcctgcgatgcgcatgccatggcaggtagcgttgtctaagatcctatactgttgtattttggggtgaactacatcttacgtgctcaatttcttcttctaagtaccctaatagaatgccctgctaggctgctactgtct

SEQ ID NO: 123262 - DNA, 2681 bp, Zea Mays
agcccgccctcccccgcaccgttctcctcaggacgaagagcctacctttccccagctcttcgtctacagcactgccacattagtagttagttaccagcagtactactcttgtgtagtagcttttaatttcccccagctagctagctagtttctacttccgtccgcgcgcgctcatctgcgcacgcacgtgtccccgtccgcaatggagtccgaggccggcctgcttgtccgctcctccctgaacggcgagggcctgtgcatgccggcgccgcgcgccgacccgctgaactggggcaaggccgcggagggcctgtccgggagccacctggacgaggtgaagcggatggtggcggagttccgcgacccgctggtgaagatccagggcgccagcctgagcgtcgcgcaggtggccgccgtggccgtgggcgccgggggcggcgaggcccgcgtggagctggacgagtccgctcgcgagcgcgtcagggccagcagcgactgggtcatgggcagcatgatgaacggcaccgacagctacggcgtcaccaccggcttcggcgctacctcccaccgccgcaccaaggaaggcggcgcgctccagagggagctcatcagattcctcaatgccggcgcgttcggcacgggcgccgacggccacgtgctgccggcggaggccacccgcgcggcgatgctcgtgcgcgtcaacaccctcctccagggctactccggcatccgcttcgagatcctcgaggccatcgccaagctgctcaacgccaacgtcacgccgtgcctgccgctccggggcaccatcaccgcgtcgggcgacctcgtcccgctctcctacatcgccggcctcatcacgggccgccagaactccgtggcggtggaccccgatggcaggaaggtgggcgccgcggaggcgttcaagatcgcgggcatcgagcatggcttcttcgagctgcagcccaaggaaggtctcgccatggtcaacggcacggccgtgggctctggccttgcgtccaccgtgctcttcgaggccaacgtgctcgccgtcctggccgaggtcatctccgcagtgttctgcgaggtcatgacgggcaagccggagttcaccgaccacctcacgcacaagctgaagcaccaccccggacagatcgaggccgccgcggtcatggagcacatcttggaaggcagctcctacatgaagctggcgaagaggctcggcgagctcgacccgctgatgaagccgaagcaggacaggtacgcgctccgcacctccccgcagtggctcggcccacagatcgaagtcatccgcttcgccaccaagtccatcgagcgcgagatcaactccgtcaacgacaacccgctcatcgacgtgtcccgtggcaaggcgctccacggcggcaacttccagggcacccccatcggtgtgtccatggacaacactcgtctcgcgctcgccgctatcggcaagctcatgttcgcgcagttctcggagctggtgaacgactactacaacaacggccttccctccaacctgtccggtgggcgtaacccgagcttggactacggtttcaagggtgccgagatcgccatggcctcctactgctccgagctccagttcctgggcaacccggtgaccaaccacgtccagagcgctgagcagcacaaccaggacgtgaactccctgggcctcatctcctccaggaagaccgccgaggccatcgacatcctgaagctgatgtcgtccacgttcctgatcgccctgtgccaggccatcgacctgcggcacctcgaggagaacgtgaaggccgcggtgaagaactgcgtgacgcaggtggccaagaagtccctgagcctgaacgccaggggcgggctccacaacgcgcgcttctgcgagaaggacctgcagacggcgatcgaccgcgaggcggtgttcgcgtacgcggacgacccgtgcagccccaactacgcgctgatgcagaagctccgcgcggtgctggtcgagcacgcgctggccaacggcgacgccgagcgcgacgtggacacgtccatcttcgccaaggtggccgagttcgagcagcaggtccgcgcggcgctgcccaaggaggtggaggccgcgcgcgcggccgtggagaacggcagccctctggtccccaacaggatcaaggagtgccggtcctacccgctgtaccggttcgtgcgcgaggaggtcggcaccaagtacctgaccggcgagaagacgaggtcgcccggcgaggagctcaacaaggtgctcgtggccatcaaccagcgcaagcacatcgacccgctgctcgagtgcctcaaggagtggaacggcgagcccctgccgctctgctgagctgcaccagcagagaaagacaatgtatacagaaggaaaacaaaagtatagcagcacaaaacagagcgtttcaaggtcgttgtgaagtgctttacgatcatactagcaggagaactctatatttaccgttgccctgtaccagtagctaaagttcatgtgaatgttgttgtgttcccgcagctgcgacgccatggcctgcgatgtgcatggtcttggctgctgcagctactgaaacttttgatggttttaacatgtaagttggggggataaagtaaactactttgctctacaatggtgaatgggaactgagaagtttcttgtc

SEQ ID NO: 123263 - DNA, 2156 bp, Zea Mays
gatccatgccattgttcaaggttatcgtaaactctgaccaaatttattgttcaacattttaccgataccactggcggctccgaattgacctcaactctgtctcgtttcgtctgacagattcctcaatgccggcgcgttcggcacgggcgccgacggccacgtgctgccggcggaggccacccgcgcggcgatgctcgtgcgcgtcaacaccctcctccagggctactccggcatccgcttcgagatcctcgaggccatcgccaagctgctcaacgccaacgtcacgccgtgcctgccgctccggggcaccatcaccgcgtcgggcgacctcgtcccgctctcctacatcgccggcctcatcacgggccgccagaactccgtggcggtggaccccgatggcaggaaggtgggcgccgcggaggcgttcaagatcgcgggcatcgagcatggcttcttcgagctgcagcccaaggaaggtctcgccatggtcaacggcacggccgtgggctctggccttgcgtccaccgtgctcttcgaggccaacgtgctcgccgtcctggccgaggtcatctccgcagtgttctgcgaggtcatgacgggcaagccggagttcaccgaccacctcacgcacaagctgaagcaccaccccggacagatcgaggccgccgcggtcatggagcacatcttggaaggcagctcctacatgaagctggcgaagaggctcggcgagctcgacccgctgatgaagccgaagcaggacaggtacgcgctccgcacctccccgcagtggctcggcccacagatcgaagtcatccgcttcgccaccaagtccatcgagcgcgagatcaactccgtcaacgacaacccgctcatcgacgtgtcccgtggcaaggcgctccacggcggcaacttccagggcacccccatcggtgtgtccatggacaacactcgtctcgcgctcgccgctatcggcaagctcatgttcgcgcagttctcggagctggtgaacgactactacaacaacggccttccctccaacctgtccggtgggcgtaacccgagcttggactacggtttcaagggtgccgagatcgccatggcctcctactgctccgagctccagttcctgggcaacccggtgaccaaccacgtccagagcgctgagcagcacaaccaggacgtgaactccctgggcctcatctcctccaggaagaccgccgaggccatcgacatcctgaagctgatgtcgtccacgttcctgatcgccctgtgccaggccatcgacctgcggcacctcgaggagaacgtgaaggccgcggtgaagaactgcgtgacgcaggtggccaagaagtccctgagcctgaacgccaggggcgggctccacaacgcgcgcttctgcgagaaggacctgcagacggcgatcgaccgcgaggcggtgttcgcgtacgcggacgacccgtgcagccccaactacgcgctgatgcagaagctccgcgcggtgctggtcgagcacgcgctggccaacggcgacgccgagcgcgacgtggacacgtccatcttcgccaaggtggccgagttcgagcagcaggtccgcgcggcgctgcccaaggaggtggaggccgcgcgcgcggccgtggagaacggcagccctctggtccccaacaggatcaaggagtgccggtcctacccgctgtaccggttcgtgcgcgaggaggtcggcaccaagtacctgaccggcgagaagacgaggtcgcccggcgaggagctcaacaaggtgctcgtggccatcaaccagcgcaagcacatcgacccgctgctcgagtgcctcaaggagtggaacggcgagcccctgccgctctgctgagctgcaccagcagagaaagacaatgtatacagaaggaaaacaaaagtatagcagcacaaaacagagcgtttcaaggtcgttgtgaagtgctttacgatcatactagcaggagaactctatatttaccgttgccctgtaccagtagctaaagttcatgtgaatgttgttgtgttcccgcagctgcgacgccatggcctgcgatgtgcatggtcttggctgctgcagctactgaaacttttgatggttttaacatgtaagttggggggataaagtaaactactttgctctacaa

SEQ ID NO: 123264 - DNA, 99 bp, Zea Mays
ctttctaggaagaaatacaattcctccttggtccaaaatgttgaatcgtggaatatttcatgcacgacacggttctctgaacttgggaacaacaatgag

SEQ ID NO: 123265 - DNA, 474 bp, Zea Mays
tggaattctacttatttgatgcttaaacacttggtcccatacaaaactgttttttctgtcttcatcaattcacattatgagtcacaattgttgcctcctaatcattggtatgttgctgagaagattttagagtttctagaactgtactatgactctactgttgttctgtctggtgtttattatccaactagtccactagttcttcaccatattctggaaattgcatcacatttgaaagcatgtgaaagagatttaaatcttagaactattgtgtttccaatgcaacttaaattccttaaatactggagtgacatacctttgctatattcatatgcattcattctggaccctagagctaagatgagaggtttttttaatgtgttgcatttacttggagagtgcactgggtgtgagtacagtacatattatgctgatgtcaaaaatgaattgtataaactgtttactaaatatgag

SEQ ID NO: 123266 - DNA, 516 bp, Zea Mays
atggtggccgcgttccctctgtgccgcgctcagcccgctctcctccctcctcctctgctgcttcccagtcgaggcccttgtctcccatggccgcggttctctgaccttcctggcaccgcgcccaatcgcgcagtccttggtcgcgcccagccgaagttttctccctgcttggcttcgactgccgttttccacgcgctcgcgttttccattattccttacctgtactccgtttcgagttcgagcgcgatccctggtagccgcgcccagtcgagctctctgcgcacgcgcatctcgctgtttctttgtttgccgcgtgcacgaaaattctctgctcgcaacagcgtgtcgagtttccgcgtcgagcttctctcttgtgtgccggtcgtcgtctccgagtcgattcttggttgtcgcagtatttttagttatccgactgcgtctgtggttgtcaagcgtgtctgttgccacgtccctgctttagtttgttgtgccgcgccatcatcgtttctgtcgtaa

SEQ ID NO: 123267 - DNA, 153 bp, Zea Mays
ttcaatccagttggtgctcatcctagtggatatcttggcgaggacccacgaggaattcccaacaatcttatgccctatgttcagcaagttgcggttggtaggaggccagctctgacagttttaggaaatgactatgcaacaagagatgggact

SEQ ID NO: 123268 - DNA, 453 bp, Zea Mays
atggcgggtgcggccgccacctcacccatggttctcgctgcgcccctcttcaagctggcaactccacctcgaagtccgttgcgcgatcctgcttctcccttggctcacgcactcgattttcctggtgccgcgccctgctccatccgcgcgtccctggccccggcatggaactcgcccagtttgcgcgccgagctcggcctctgcagctctgcttctcttgcgttgcgccagcccccggcgctgagtcaccccgtttcgatgtcggtccctacgagatgcctccgaattgtgatcgcgcggacaaaagaatccccaagagaagatgtcaaaagattggatggtggtgtgcgtgaagttcgtgtagcaccttccaaacgttcgacaaattgtttgaatcggaaaatcattactgatatcgtggattcgagtcagctattggaacgttgttcgtga

SEQ ID NO: 123269 - DNA, 1264 bp, Zea Mays
gctttcttatcttctccctgccgcgctcctcgctcgaccttgaagcttccatggccgccgccctgccctgccctccagtgccgcatccggctgcctgacttgccgcgtgcccatctccgcgagcccgccatggagcttccccgccgctcagctcggagttccctcggctcggtcccagttccctgtgcgcgcgcaccttcctcatgcttggatccggccatcgtctctgacagctggccgcgcccctcaagctcggccagggagcttccttcctccctcgcccgcggctccctcatggcgcctaggatctcctccccatctcctggatgctcggcgcccagccccagcactcgccccgccgccctccctgatccccatgcccgaactcgccctcagccatggcgggtgcggccgccacctcacccatggttctcgccgcgcccctcttcaagctggcaactccacctcgaagtccgttgcgcgatcctgcttctcccttggctcacgcactcgattttcctggtgccgcgccctgctccatccgcgcgtccctggccccggcatggaactcgcccagtttgcgcgtcgagctcggcctctgcttctcttgcgttgtgcccagcccccggcgttgagattcctccatgaccgcgcctggtctttacttgagctcagctctgccctctactccagctcgcccccttgtttgttctcgccgttgggccgggtctgcttggtcgccgcgcccgtgccgagctccctgtgcgcgtagccgtgcccctctgctcgcgtggccggttccttgtttgcgccgcggttctctcccagctccctgccgtgtgctcgcccgaccgtacgctcgctctgctcgtccatgccgcctgctgcgcgtgcgtctactccgtccggtcgccggtctacccctgcgcgcggcctcctgcacgctaggatggctcgtctccgctggccggacgtcgatctcctatttgccatggacaatgcatcgacgccccattaccgccgaccgtcgtaaaactctagtgcttgtcgttgatatccggtcgtctccaaccattattttgtcgtcgtcgttcggtcaccccgtctcgatgttggtgcctacgtgatgcctccgaattgtgatcgcgcggacaaaagaatccccaagagaagatgtccaaagattggatgttggtgtgcgtgaaatttgtgtagcatctgccaaacgctcgacaaattgtttgaattggaaaatcattaccga

SEQ ID NO: 123270 - DNA, 473 bp, Zea Mays
ccggccagaaagcagaaagaacatcgaaggcaagaacttaacgcaacggggggggcaattgcgtcaccttggagagaatgtgcgtgtccacggtggggggtggcgcagtccaagaagcactgcaggttggatggcggcatcccctcccccagccactgcccgcccatgtgccccctttcccttccctcctcctcggctctccacaaggcccttgtctctgctatcaccctcacccccacaacaatccgcggcgcaccaaatcgctcaaggcacaccgccaacaactcccaaagaaccgaaccggcagcaggagaatccaacagattcctccggcactatgcgctactctgcaagaaccggaatcgtggcgctgggaagactgaagcgtggaggaggaagactggaagaggaggagggggctttattcgagctgcggaggaaagggagccggaggaaggaggaggaaagagaag

SEQ ID NO: 123271 - DNA, 1257 bp, Zea Mays
atgcattttgtcacatatacagaaagcaaagatatatcacactttttttccccgtcaaggaaagaaagaaaacagcaccaagcggacgggactgtggtggcagatgtggacgaccacagggcgtcatatactggacggagtcgggggagcgtacgtatctacacttggatcgatcggtggcgcccacagctcccgccgccggacttattaggcgttgctccggtaggacccgagcttggtggcgctggctctcagcacgtactggtggtaggcggcggcgatggcggcgccgatcagtgggcccacccagaagatccactggtcgtcccaggccttgtccttgttgtagatgaccgcggctcccaagctcctcgccgggttgatgccggtgccggtgatggggatggtggccaggtgcaccatgaacacggcgaacccaatcggaagaggggccaacaccgggacgtgggagtcacgggcactgcgcttggggtcggtggcggagaagacggtgtagacgagcacgaaggtgccgatgatctcggcggcgaggccggtgcccttggagtagccgtcgctgagctcgttggcgccgccgccgtagcgcacgtagtaggcgctctggaagcccttgacgaggccgacgccgcagatggcgcccaggcactgcgcgatgatgtagagcagggcgcggacgagggacaccttcctcgccaggaacaggccgaaggtcacggccgggttgatgtgcccacctgcatgcatgcatacatacatacatctacgtgtcacacacacacatcacacggttggagtggacgaaggcggcatatgcatgctgcgtgcgtgcaaggccggccgcgggacctgagatgccggcggtgcagtagacgaggatgaagatcatgccgccgaaggcccacgcgatgccgaggatgcccacgccgccgcacgccgcgtcggggcccgacgccgccgcgtccgtctggtgcttgtacccgatgacggtggccacggtgatgtagaggaagagcagcgtggcgatgaactcggcgatgaccgcgcggtagagggaccacttggtgagctcatccgcgtcgatgagcggcgccggcggagggtccgtgtagtccttggccgagaactcgccggcctcgggccccgatgcttcgatgtcctgcttcgccatgtcaggagacctgcagcagctgctgctatagctagtagctcagctagatctctgtgcgcgcgcttcgc

SEQ ID NO: 123272 - DNA, 1367 bp, Zea Mays
ggtgaacctcctccctcttgggatccggtaccaactccgaaaggtattaaattctttgtacgtatatatggtttactttagtccttattacttgtacttttgaaatgatacatgatttgctttaagtttattttattatttaacttctacctgacaaaaaatatatattctttagttctacaatgagtatgtcattgcgagatcatattagaaagaggagggaagaagaagatgatgacatgatgttgtttattttccctgccttatatctgatgggttcaactagaggtgggggacaaaagaagaaacgccatacatcagatgagacaggcgaggttaaggttcgacgactcctcgagggacatgtcaagaactgtcaagttacattttggatggaaccacacatctttagagagctggcaacttatcttagaaggagaaagatcgttgttgatacaaggatcacggtcgaggagaagttagcattcttcttatacatgctaagtcgcaacgcctcatatcaggatttccaagtgtactttggtcatagtaatgacaccttccatcatcacatcaaccacttctttaagaaggtcattcctgttctctctcatcgtttcattcatcctcctgatcctaatcaagtgcatcaaaaaatacaagataatcctagattctatccattctttaagaattgtatcggtgccattgatggaactcatattcctatttctatatctcctgataaacattcaccttttcgaaatcggaagggaacacttagcataaatgtgatggtggcatgtgatttcgatctcagtatcacttttgtttctagtggatgggatggatcggctacagattctagagtgctaagatcaactatgagtaagggttttcaagtacctccaggaaaattctatctagttgatggtgggtatgcaaatactccatcttttcttgctccacaccgaggagtacggtaccacttgaaggaatttggggctggacatcgaagaccacagaacccgaaggatctcttcaaccattgccacgcacttctgaggaaccatgtggaattgggggtgcttaaaaagcgcttccccatcctcaaagttgccacgttccacacgctggaaaaccaagtaaagatacctatagctgctgccatcatccacaatctaattcgatcacttcatggtgatgaggaatggttagatcatcagccagataatattgatccatcaaactttgttgctctaccaagtggtgatcaaatgagtgacccaggcactacacaaggcaatgctttaagagataccatcgcccaagaaatgtgggctcagtaccaacaacatctaaattag

SEQ ID NO: 123273 - DNA, 1007 bp, Zea Mays
ttataatgtgatacatctaaatgcagttgggctgagaaatgtacatgatgcaaccttataattttacaagtagtatctatgagttcatttctattgctctgattaaggttgtctcttcaggataaaatggctgagccgtcatcatggggtaccaatcctcctgttcagactgagatgagatgttcctcttctatgcctgctaacgccaaacacaatgggtttctctctgcagactctcaaattgatcatggaatgctaaatatattggaagaaaatgctaagctactcaatcaaatagaagtaaatattttaacatcacaggcccataacaatattgaacttttccatcacgcaagaaggaacatcaatggtcttttacaaagcatgagccaaattcccggaataatgagcaagatgcccccattgcctatttcggtggatgaaaggctagctagctgcatactccctcgtgctcctatggctcaagttcttggcagcagtcatttgaaagaagaacgaagagtatggtaggccactgctagacagggaagcagctcaattttcagcagcagtttgaccaaaaatatctgaagagccatgtgcttgggagtctgcatggagaagcataggtgaaagaacgatctggcttttctgatggtctcaaagctacagaagcaacatgatccacttcacctcatggcttaaagaacactgtctagcttgccttgtcaggatgctctgtattagtgatcaacaaatttgagatagggagagttttccgtaatctgcagttttcctcaccttggttgcacatatcgattcttttttgggttttgtcctggtgatcgatgttaacagaagtgtagcgtagaaattgaactttgatatgaataattagcaggaaaagcctagcctttttgtcagttactacaatggtaaccaacctcctgtgtatctagtattctagttctagtatgatgcatatgcaagcctggttctctaaacgt

SEQ ID NO: 123274 - DNA, 1940 bp, Zea Mays
gcccccggcccttcctttttgggcgcatataaacgagcaacgtctcgcctttggggtcggcggggccgccgctttttagttgcgctctcccctcctctcccccgcaccctgcctgccttttccattggagcgcacaaagccggacggcaccaccatttaaagaaggccaaccaagcacacggcacggcgaagaagagaccaccacctcacactccattcacggcaggatcgatcgctatagctgctgcgcccccctgcacccttgcgtcttctgccgctgctgcgctgcggctccggcacagaactgagtacttttgtttgaagaaagatttgttcagtcaagctttgcaaattaccatcatagtttggatgacatccatggttactttgatgagtttatggagccctggttgccgagcttatctgggttctctgacaatggaactgtaatatttgcaacaaaactttcctcatcttggaagaaagtttcaagagggcttgacaacttataagtgtcctgtgaagcctgatgacgtgttcgtgagggcgaagtgggagagcaaaattacttctggcatgcagatgtcaacagatcctaatcactacggggtatttccacattcattctgcaaccaacatgtggtttcatttcagacgagttcagttactagtgtatcaggagccataccagtttgtctagacacttccagtggaatgaatggcaatatggcgatgttgaacactacaacttcaacgattgtatccactggttcaccaaacatgagtgctgagttttcttgccagaacctcaagtatactgcaccgttggctgtggagtggtcctatccggagctgcaattgttgaatgatggcctcaacaagtatgcaaatgaaccaggaatcatgaagtacataaagatagcagccacgttaccagacaagacagtaagagatgttgccatgagatgccaatggatggcagcgagaaaagaagctacaagacgacggaaacctgaagaacattatcttggaaaaaagataaaagatagaaaggataaaatggctgagccgtcatcatggggtaccaatcctcctgttcagactgagatgagatgttcctcttctatgcctgctaacgccaaacacaatgggtttctctctgcagactctcaaattgatcatggaatgctaaatatattggaagaaaatgctaagctactcaatcaaatagaagtaaatattttaacatcacaggcccataacaatattgaacttttccatcacgcaagaaggaacatcaatggtcttttacaaagcatgagccaaattcccggaataatgagcaagatgcccccattgcctatttcggtggatgaaaggctagctagctgcatactccctcgtgctcctatggctcaagttcttggcagcagtcatttgaaagaagaacgaagagtatggtaggccactgctagacagggaagcagctcaattttcagcagcagtttgaccaaaaatatctgaagagccatgtgcttgggagtctgcatggagaagcataggtgaaagaacgatctggcttttctgatggtctcaaagctacagaagcaacatgatccacttcacctcatggcttaaagaacactgtctagcttgccttgtcaggatgctctgtattagtgatcaacaaatttgagatagggagagttttccgtaatctgcagttttcctcaccttggttgcacatatcgattcttttttgggttttgtcctggtgatcgatgttaacagaagtgtagcgtagaaattgaactttgatatgaataattagcaggaaaagcctagcctttttgtcagttactacaatggtaaccaacctcctgtgtatctagtattctagttctagtatgatgcatatgcaagcctggttctctaaacgt

SEQ ID NO: 123275 - DNA, 678 bp, Zea Mays
atggagtgcgacacggctctggataactgcaatataagagataactgcaacaacgatatgggatgcgccggagcagggggcagtactcctaccggcgggggcctgaagaatatggcagccgcctccacctccacgcgacaagcgacgacggaggcgtgcagtagccacgtccaccacgcgcacctcgcggctctcctcaacgcttctgtgcgcttgcctccgctccctctcagccgcctccacctcccgctcttgctccccacggcctcccgcctcgtcgcgtccttccctccactcccgctcctcgtctgcttcctccgcacgctccacctcctcccctcctcgccgtcgcgcccctttgactcgctcatcaagtcatatgcggaggctgtgagatccggtaggcgtatgagcttctcgaggaagggggtgaatacctcgacgaggcgctggtcggacttcagtggggatggcggcggcgcagcatccgcggaggctgtgagatccggtagccacggccgtgatgcactaggtggatccggatctgggcggggtggttgtctggatcggggagtggggctcggaggcgacggcggcgtgagtggaggtacaactgccgccaccgaaaccctattttttcttgcacacagccgctgtcgggaaggttggatagagtga

SEQ ID NO: 123276 - DNA, 202 bp, Zea Mays
gtttgaaaatgcataaatcaggatggtctcataggacacttgttttgttcacagtatatcaaaatataaagtacaacgatattttgccaatattgttgcaatcatacacaatttatttgacatgacaaaaaacgaggagctagccctgtcttcggtacttcagatatttcaaaccattagcctttagctaggtcgtggtccg

SEQ ID NO: 123277 - DNA, 1964 bp, Zea Mays
gttttcagttatccagctgctactctggtgataaactatttgacattcaagttatatgtttattttttattttgatttaggttttagaagagataagggttggattggagttgaatgactatgggatgcaacaaaggaggcttgcccacatgcggttccttggagagctatacagctacaagcatatagattcatcagttgtttttgatacactgtaccttatcattgtgtttggtcatggaactccggaacaagatgtgctggatccaccagaagattgtttcagaatcaggttgatcattacacttctacagacctgtggtcactatttcagtaaggggtcttcaaaaaggaagctcgacaaattcttgctacactttcaaagatacattattagtaaagggcccttaccactcgacatagagtttgacattcaggatttatttggtgagctacgaccaaccatgtctaggtattcgtcaattgaggaacttgttgccgcgttagttgagtttgaagaaaatgaacgttcagccccagtagaaaaggttgaaaatgaaagacactccgacaatgaatctcagaaaagacactcgcgagatgctggtccatctgtgaatggtgaaagcgctgcaaatggaaccgaggaaaatggcaaggctcatgaagtagcagatagtgagagctattcagatactggcagcattgatggacgggaagaagaggaggatatattatctgaggataaatcaaatgatggctcagataacgaaggcgacgatgaagatgatggcattcctgttgtttctgatgaagatgaaaatgttgaggttagacagaaagtcatgaatgttgatcctaaggagcaagaagacttcgatcgagagctcaaagcccttcttcaggagagcttggagtctcgtaaatcagaggcccgttcaaggctccctttgaatatgatggtgccgatgaacgtcctcgagggttcaaaagactcaagggccacagaatctgagagtggagaagaaacagtagacgaagagggtgggaatgctgggggtagcagcaaggtgcgtgtgaaggtgctaatgaagaaaggacacaagcaacagacaagacaaatgttaattccggccgatagttcaattgtgcaaagcacgaagcagcaggaagctgctgagcttgaggagaagcagagcatcaagcggaggatccttgagtacaatgagagggaggaagaattgaatggagcatcccaaatggggaactggggccaaggagctaccagtaccagcagtatcagatcaggtggccggggcagctgggatggttcagcacggggaggtggtcgacaacggcaccacataacgggttctggtggtttctaccacagttatggcaggagaagataagttcgcctgtgtgagctatttcgccctgagccttttggcaggtagaaagcatcctagtctgacaaattgcctctagcaaatgagattagcgtttaacacagcttgatggacaattgcctctagcaccctagtctgaaaataagacaattctaccactggtcatgggagatagcaatgccttgagaaggagctgcaaatctgatggtcctaatggcttgagttgctacggtgtttggtaaagctggttgtgatggctgtacccggatacatgcgcatactgtttcgacgccatgtagggggtatctggtcaaagttcgctgtctgatgcctgttctaatttagtggagtattactggcaatgtggtacaagcatcttgtcttgaaaatcgaaaactgcacggtatgtgtgcgccattttttgtctgatgaggtgtgttccatgcgtgtatttcatatgtagctacaccaatcgcgtgtccaccgaacgatgctaacttgctatgccgatggagcatgctttctacccgcatcgcaacccgcaaatccttgtcc

SEQ ID NO: 123278 - DNA, 3641 bp, Zea Mays
atggatgagttaaaaagtgtgaatttgagtaaatttgtcagcgaagcagtttcttacatttgtgaggccaaacttcgctccgctgatatacaagctgctgttcaggtttgctcgctccttcatcaaagatacaaggacttctctccttgtcttatagaaggtctactgaagatcttctttcctggaaaatctggagatgatttggatgcagataaaaattcgagagccatgaagaagagaagcacattgaaacttttgattgaactatattttgttggaattgtcgaagatgctagcatatttgtaaatattataaaagatcttacatcagcagaacatttgaaggaccgtgaaggaactcaaacaaacctatctcttctatctacctttgctcgtcaagggaagttttttgtagggctacaacctcatggtcaagaagcttatgacgagttctttaaggacctaaatgttactgctgagcagaagaagttctttaagaaagccttgaactcttactatgatgctgtagctgaactactacaatcagaacatgcgtctcttcgtctaatggaggcggagaatgcaaaagttttaagtgccaaaggtgaactaagtgatgagaacacatcctcatatgagaaactcaggaagtcttttgatcagttactacgtggtgtttcctcgttggctgaatctcttgacatgcaacctccagtgatgccagatgatggaaatacaacaagagttactacaggaaccgatgcgttgccttcttctggaaaagaatcatctgcattggaacctatctgggatgatgaagataccaaagctttttatgaatctttacctgatctcagagcatttgtgccagctgtattactgggagaggttgaaccaaaatcaaatgagcaacatgttaagggccgtgagctatctggtgagtccacttcagaacaagagactgaactacatgacaatgttccaacttctgccactgaacgtcaactagaagttaaagtagatgatctagtgaaagagagtgaagacagagataaagagaaggggaaggatggagaaaaggaaaaatccaaggagaaggatctggataagaaaaatgaaagagagaaggagaaaggaagagtcttggatggcgcaagtctggataacctcctgcagaggctgccaggatgtgtcagtcgtgatctcattgatcaattgacggttgagttttgctacctaaattctaaagcaaatcgaaagaaacttgtgcgtgccttattcaatgttaataggacttcactggaactgttgccatactattctcgtttggttgcaacactctcaacctgtatgaaagatgttccaagtatgcttctgtctatgcttgaagaggagttcaactttttaataaataagaaggaccagatcaacatagaaacaaaaataaaaaatatacggtttatcggggagttgtgcaagttcaaaatggctcctccagctcttgtttttagctgtttgaaggcctgccttgatgatttcagtcatcataatattgatgtggcttgcaaccttcttgagacttgtggtcgttttttgtatcgctcacctgaaactaccattcgcatggctaacatgctggagatactgatgagattgaaaaatgtcaagaatttggattcacgccacagtacacttgtagaaaacgcctactacctttgtaaaccgcccgaaagatctgcgcggatatcgaaagttcggccaccgttgcatcaatacataagaaagttgcttttctcagatcttgacaaatcaagtgttgaacatgttttgcgccaactacgcaaattaccttgggcagagtgtcaacaataccttctgaagtgctttctaaaggttcacaaaggaaagtacagccaagttcatctgattgctcttctcactgctagtctcagccgctatcacgatgactttgctgtctcagtggtagatgaggttttagaagagataagggttggattggagttgaatgactatgggatgcaacaaaggaggcttgcccacatgcggttccttggagagctatacagctacaagcatatagattcatcagttgtttttgatacactgtaccttatcattgtgtttggtcatggaactccggaacaagatgtgctggatccaccagaagattgtttcagaatcaggttgatcattacacttctacagacctgtggtcactatttcagtaaggggtcttcaaaaaggaagctcgacaaattcttgctacactttcaaagatacattattagtaaagggcccttaccactcgacatagagtttgacattcaggatttatttggtgagctacgaccaaccatgtctaggtattcgtcaattgaggaacttgttgccgcgttagttgagtttgaagaaaatgaacgttcagccccagtagaaaaggttgaaaatgaaagacactccgacaatgaatctcagaaaagacactcgcgagatgctggtccatctgtgaatggtgaaagcgctgcaaatggaaccgaggaaaatggcaaggctcatgaagtagcagatagtgagagctattcagatactggcagcattgatggacgggaagaagaggaggatatattatctgaggataaatcaaatgatggctcagataacgaaggcgacgatgaagatgatggcattcctgttgtttctgatgaagatgaaaatgttgaggttagacagaaagtcatgaatgttgatcctaaggagcaagaagacttcgatcgagagctcaaagcccttcttcaggagagcttggagtctcgtaaatcagaggcccgttcaaggctccctttgaatatgatggtgccgatgaacgtcctcgagggttcaaaagactcaagggccacagaatctgagagtggagaagaaacagtagacgaagagggtgggaatgctgggggtagcagcaaggtgcgtgtgaaggtgctaatgaagaaaggacacaagcaacagacaagacaaatgttaattccggccgatagttcaattgtgcaaagcacgaagcagcaggaagctgctgagcttgaggagaagcagagcatcaagcggaggatccttgagtacaatgagagggaggaagaattgaatggagcatcccaaatggggaactggggccaaggagctaccagtaccagcagtatcagatcaggtggccggggcagctgggatggttcagcacggggaggtggtcgacaacggcaccacataacgggttctggtggtttctaccacagttatggcaggagaagataagttcgcctgtgtgagctatttcgccctgagccttttggcaggtagaaagcatcctagtctgacaaattgcctctagcaaatgagattagcgtttaacacagcttgatggacaattgcctctagcaccctagtctgaaaataagacaattctaccactggtcatgggagatagcaatgccttgagaaggagctgcaaatctgatggtcctaatggcttgagttgctacggtgtttggtaaagctggttgtgatggctgtacccggatacatgcgcatactgtttcgacgccatgtagggggtatctggtcaaagttcg

SEQ ID NO: 123279 - DNA, 2709 bp, Zea Mays
ataacatgccagttaccatttcattttttctgtatgttttttggttggtttaacatgctcttttgcaggttggctgaatctcttgacatgcaacctccagtgatgccagatgatggaaatacaacaagagttactacaggaaccgatgcgttgccttcttctggaaaagaatcatctgcattggaacctatctgggatgatgaagataccaaagctttttatgaatctttacctgatctcagagcatttgtgccagctgtattactgggagaggttgaaccaaaatcaaatgagcaacatgttaagggccgtgagctatctggtgagtccacttcagaacaagagactgaactacatgacaatgttccaacttctgccactgaacgtcaactagaagttaaagtagatgatctagtgaaagagagtgaagacagagataaagagaaggggaaggatggagaaaaggaaaaatccaaggagaaggatctggataagaaaaatgaaagagagaaggagaaaggaagagtcttggatggcgcaagtctggataacctcctgcagaggctgccaggatgtgtcagtcgtgatctcattgatcaattgacggttgagttttgctacctaaattctaaagcaaatcgaaagaaacttgtgcgtgccttattcaatgttaataggacttcactggaactgttgccatactattctcgtttggttgcaacactctcaacctgtatgaaagatgttccaagtatgcttctgtctatgcttgaagaggagttcaactttttaataaataagaaggaccagatcaacatagaaacaaaaataaaaaatatacggtttatcggggagttgtgcaagttcaaaatggctcctccagctcttgtttttagctgtttgaaggcctgccttgatgatttcagtcatcataatattgatgtggcttgcaaccttcttgagacttgtggtcgttttttgtatcgctcacctgaaactaccattcgcatggctaacatgctggagatactgatgagattgaaaaatgtcaagaatttggattcacgccacagtacacttgtagaaaacgcctactacctttgtaaaccgcccgaaagatctgcgcggatatcgaaagttcggccaccgttgcatcaatacataagaaagttgcttttctcagatcttgacaaatcaagtgttgaacatgttttgcgccaactacgcaaattaccttgggcagagtgtcaacaataccttctgaagtgctttctaaaggttcacaaaggaaagtacagccaagttcatctgattgctcttctcactgctagtctcagccgctatcacgatgactttgctgtctcagtggtagatgaggttttagaagagataagggttggattggagttgaatgactatgggatgcaacaaaggaggcttgcccacatgcggttccttggagagctatacagctacaagcatatagattcatcagttgtttttgatacactgtaccttatcattgtgtttggtcatggaactccggaacaagatgtgctggatccaccagaagattgtttcagaatcaggttgatcattacacttctacagacctgtggtcactatttcagtaaggggtcttcaaaaaggaagctcgacaaattcttgctacactttcaaagatacattattagtaaagggcccttaccactcgacatagagtttgacattcaggatttatttggtgagctacgaccaaccatgtctaggtattcgtcaattgaggaacttgttgccgcgttagttgagtttgaagaaaatgaacgttcagccccagtagaaaaggttgaaaatgaaagacactccgacaatgaatctcagaaaagacactcgcgagatgctggtccatctgtgaatggtgaaagcgctgcaaatggaaccgaggaaaatggcaaggctcatgaagtagcagatagtgagagctattcagatactggcagcattgatggacgggaagaagaggaggatatattatctgaggataaatcaaatgatggctcagataacgaaggcgacgatgaagatgatggcattcctgttgtttctgatgaagatgaaaatgttgaggttagacagaaagtcatgaatgttgatcctaaggagcaagaagacttcgatcgagagctcaaagcccttcttcaggagagcttggagtctcgtaaatcagaggcccgttcaaggctccctttgaatatgatggtgccgatgaacgtcctcgagggttcaaaagactcaagggccacagaatctgagagtggagaagaaacagtagacgaagagggtgggaatgctgggggtagcagcaaggtgcgtgtgaaggtgctaatgaagaaaggacacaagcaacagacaagacaaatgttaattccggccgatagttcaattgtgcaaagcacgaagcagcaggaagctgctgagcttgaggagaagcagagcatcaagcggaggatccttgagtacaatgagagggaggaagaattgaatggagcatcccaaatggggaactggggccaaggagctaccagtaccagcagtatcagatcaggtggccggggcagctgggatggttcagcacggggaggtggtcgacaacggcaccacataacgggttctggtggtttctaccacagttatggcaggagaagataa

SEQ ID NO: 123280 - DNA, 241 bp, Zea Mays
atctcagccgtccattctaccgttctacaatcttagccgtccaatcccgcacaccagttttccgcgcacaaaaaaaaaaccaaaccatggctacctagggatcgaaccttggatctattgagcagaatgcctagccttctaccctctagccaacatgactcatgttgaattgtgtacaacttcaactaaaacgtcttttgtgtttaacccaccgtccactctgtatgctcactgagtctag

SEQ ID NO: 123281 - DNA, 429 bp, Zea Mays
cttggaggcttcttgcagtaataggaaccttgctctgcatagtgttgatatctggccttttcttcattccggaatctccaagatggctggcaaagatgaatataatggatgattgcgagacttctctacaagttctgagaggattcgatgctgacatcacttcagaattgaatgatataaaggttagcacttccctttgttctacagcatggactccttccagaccgccaacaacctcgtccgcacccaggcatcagcaagacaacacaacagttggatggaatctatgcactctttgcagtattgaggcttgctgttgttgatacaaaagcagatggtgccattctgaaggagaaactgtggacattgattgctcaaaatgaaccctcgttaatctctttatagttggtaattctgttgttctgaatt

SEQ ID NO: 123282 - DNA, 1191 bp, Zea Mays
acaccataacaacggatctagccataattaccaagcgcacacctcgcatcactggtatttctaacttaatcgtatacgcatacgaagcgtcttattttacgatcataaaaccgatagtaaaaatagcgaatcggctcaccacatcacaattcgatttggtagttgcctgaacaacgacggccttcagctgaagtccttgatcgaacatctggcgagcgtgaccgacgagctaagtctgaggcgaagctcgacgacgagatcgaacaggggatgatgagcgtgagggtttcacaacgaggatgagtgacatcgtggaatcttggtccaacatttaatcgaacacaacggaagcgaggcacagcaggaatggcagtattaagcatgggcacgataagggacgcgctgctgcacgacgcgatgatgaacgacgacaacctatgacggccaaaacggaagacttggtcgaggcggggtccaagcatccagagtttttttttgccgaggctgaacagagaaggatgcacaaatcctaggcacgatggtggccatagccaagcagtgggacgcgactgcgcgcagagaactcggcatggcgagggacgacggaacgctgcgtgcgcgtccagggagcaaggcgcggtcgagaacggacagagggagccgggagaaagaactgcggcgctgcgagcagagcgcaggggagttcgtggctgcgcgcagatgggcgagctggagcgccgcgacgagcgcaggggcgcggcacaagcgagggcgagctgccgcagggagaaagaagctggggaaagggccgcagcgctgggggctcgacgtgccgtgaccagcagagagatgcggcgctgcgcagaggagggagaggaaggagagagagcagccatgggaaagggaggagaactgggcgcgacgcaggcagccaagggagcttcaaggccgagcgccaggaagaatgagcagggcgccgcgacactgggacagggcaccggcgagcagcaagcagagagagaaggcgcggcggtcaggacgaacgtcagggagcttcggctggccatggaaccgagcagtgatgcgccatgggggagaaaccagcgcgcagcagagaagctcggcgaggaagatggggcaggaactcggcgccggcgaggggagcagggtgatgaacgccgaggaagctga

SEQ ID NO: 123283 - DNA, 375 bp, Zea Mays
gccaatgttgtgcatgagcagaagaaatattattcccttcaatattagtagaggtagagatatttacttttatcagtatttgtgttgtgatagctatttttagcctaatgtttcaggtcaaagggccatacttcatagctttttgctcctcattgttttaagtgaaagggcgccaactattcaaaatttactctaggtagataattttcattgtcgagttttattttggtatatgtaactttttgtaattgggcctaagcgtattggagcactctaagttaacaggtgcttgaagctgatgatgaaattatacagcttggatgaataaacctttgttgtagtgacataaggagtttcgaaattacaaggaatttt

SEQ ID NO: 123284 - DNA, 503 bp, Zea Mays
tgctattgcagcagttgcagctccacccaaggaaagcaatagtgtcagcagcaacgatcctggtagctcgtcctctgtgatttttccgtctggtccagctgatcaagtccctgttcctgctacctctccagaaattgagccccgttttgcaaaccaaatccctgctgcttcttcggaggttaaggcaccatgcatggcaggtctgttgtttgtaagcgacaggaacgagaggaactttaggttgcctagcccttctgataattgtccatggaacttattcgaatctagccgtagcgcagtcagctttctacaggagtatatgctttccggaatcgtgccactgaagttattcagcatgagatctatggttcttagactgggcatattgctgaataactatagttggtagatggtctcgctacagtagacaggaaaggcaccatgcctggcactggcaggtctgcagcgaacaccgttgtatgtgtatgtatagtatgcacgtg

SEQ ID NO: 123285 - DNA, 822 bp, Zea Mays
atggcgtcgctggttgtagtggccgcagcgctgctggtggcggcgctggtggcattctgcggcacggacccgctctggacggggttcgagtcccacctcgtcgaccttcccggggttcgagtcccacctcgtcgacctccccgatcccgccgagatgtcgacgcacgcggacgaacgggagtggctccgcggagccgaggtgcaacccctccaaaccggcgttcaaggacggcgccgctcaccagttgtatctgccttgagcgatccaggagagggcttggcgatgggtctgttgggatgctccagtctctcactgtctactactacttgtaccaaatatctactggactctggatgggcatcgaattttatgctataaacaccgattcccaagcccttattaattcacaagcgcaatatcctctgcaaattggagagcagttgacccacgacttaggtaccggtggaaatccaaatttgggagagcaggctgctgaggaatcaagagaaaccatagccactgccctgagggattcagatcttgttttcataacagctgggatgggagggggtgctgctccaattgttgcccagatatcaaaggaagctggttatcttactgttggtgttgtcacctatccattcaatttcgagggccgtcagctctttgctcttttcacatctatatcaattgcttgccccacaaatgatcagccagggtcaggtaaaccatattgtgtaaccatcactataacactgcaatcattttctaaatagtacttttataaatcacaaatcgaaggtataaatacaaaagtgtag

SEQ ID NO: 123286 - DNA, 204 bp, Zea Mays
atgggggagaaaccagcgcagccgagaagctcggcgaggaagatggggcaggaactcggcgccggcgaggggagtagggatatgaacgccgaggaagctgacatagggggaatcgccatggcgagcgcaggggcgagccaggagctgcgcgacaggggcatgcgcgtggcactggggaagaaaagagcgactgcgcgcggctga

SEQ ID NO: 123287 - DNA, 627 bp, Zea Mays
gtccaattaatatgtgatgattctaacatattcaagtggactgctcttatcaagggcccttctgaaacaccttatgaaggtggtgtgtttcaacttgcattcgcaattccagagcagtatcctctgctgcctcctcaagttcgatttttgaccaaaactttccacccaaatgtgcatttcaagacaggtgagatttgtctggatatattgaagaatgcatggagccctgcatggacccttcagtctgtttgtagagcgataattgctctgatggcccaccctgaaccagacaacccacttaattgtgattcaggcaatctcctgcggtccggtgatattagaggctatcaatcaatggcccgcatgtatacaaggctggcggccatgccaaagaaaggttagctgtagaacatgtgccaagccaagagcctattgtccatgcatggctacatgttgtcaggtctgccttgtgctgtctgtatgaactttgtggttcttgattcatgaaatcctaaccgttcgtgtgttgcgtgtgtgtctggggtaatgagaggacactcgggttcttgatggtgttggtctgtgatgtatttagtaataagaaaataaaaaatgatttctcgataa

SEQ ID NO: 123288 - DNA, 109 bp, Zea Mays
ttttctcttttttgtatctcttatcatatgatgaatttgaagtatatctatcatttgatattttttgtgacttttgttagttataatttaatatctttttgtgattttt

SEQ ID NO: 123289 - DNA, 1296 bp, Zea Mays
gtttttttggtatttggctggcatcctgagtccgctgctgcccgccgaacgatggtcgatctgatgattgggcaggcaaatacccagatcggtggcaccggcgtttaagttgaagaggagctgggatgagtttgtacgatactggctctacagttaggagaacacatttaatctaccttcactagcattcagtaatgcctttgcctaaatcagacctggggtcataactctttagtagagaaccaagaagatgcaggcatctagggcaaggcttttcaaggagtacaaggaggtacagcgagagaagtcagctgaccctgatatccaattaatatgtgatgattctaacatattcaagtggactgctcttatcaagggcccttctgaaacaccttatgaaggtggtgtgtttcaacttgcattcgcaattccagagcagtatcctctgctgcctcctcaagttcgatttttgaccaaaactttccacccaaatgtgcatttcaagacaggtgagatttgtctggatatattgaagaatgcatggagccctatatggacccttcagtctgtttgtagagccataattgctctgatggcccaccctgaaccagacagcccacttaactgtgattcaggcaatctcctgcggtccggtgatatcagaggctatcaatcaatggcccgcatgtatacaaggctggcggccatgccaaagaaaggttagccgtagaacatgtgccaggccaagagcctattgtccatgcatggctacatgttgtcaggtctgccttgtgctgtctgtatgaactttgtggttcttgattcatgaaatactaaccgttcgtgtgttgcgtgtgtgtctggggtaatgagaggacactcgggttctcgatggtgttggtctgtgatgtatttagtaataagaaaataaaaaatgatttctcgataagcgaggttgtgactgagcattgaggtcagcactatgacttttatttctgaacttttttccaatcgaattacacttgcaactttggtagaagcgagaagggggaaaagaaacatatcagccggctttgccgggcaagaggaggcaccttttttttaattcttttgaaactaggggaacgccgttgtgggcgtcttggtgcctgtcaggaagttgctgaagagcgtcagcgcctgccgcggcgcgtgcagaggcacctcgtgcccggctccgcggatggtgacgaacgtcaggccctcgtagacgaccgtccatccaccaacctgatttccggcggagaacggaagacg

SEQ ID NO: 123290 - DNA, 1855 bp, Zea Mays
ctttgatccctagggaggtctgcccggatccgacagccgtgagcgcgtgctctatctgcacaagctttcccgacgggctgcagagaaatcaaccaaaaaaattcacatcaaaccaccgtaacgacgcaaaaatcccaccgatctcgatgggggagacgagtaagcgagcgatgtagcgaggggagcacgaacctgaaagtggtaagcgagaaggagtattggctgtcacccatgaccgaggcgcggagtcacctcgttgcctcttccgggttggagtgtcggcgattcgtggcaaggtttttgctctagcgagggagagaggtggctgaggaaaaaaaggggaagacaacgacgagacggagcagggaaagagatggagaatcgcaggaggaaagagagagcggagtgtttctcaagaagaaacgttttgggctggagtccaagttgtacttgggctggctatctgagttggtgaccaaatataggttgcacctgggctgggcctgacccaccgccgcctcttccgccttgcacggttcccccaactcccttctccgacggccactgcccaccgtcacagcagaagctcctccggtcctcccttctctccgtagaaacatttcccgacgggtgtttcccacgccggaatggaccagccggcaccataagcccaagattcgtttgatgagtttgtacgatactggctctacagttaggagaacacatttaatctaccttcactagcattcagtaatgcctttgcctaaatcagacctggggtcataactctttagtagagaaccaagaagatgcaggcatctagggcaaggcttttcaaggagtacaaggaggtacagcgagagaagtcagctgaccctgatatccaattaatatgtgatgattctaacatattcaagtggactgctcttatcaagggcccttctgaaacaccttatgaaggtggtgtgtttcaacttgcattcgcaattccagagcagtatcctctgctgcctcctcaagttcgatttttgaccaaaactttccacccaaatgtgcatttcaagacaggtgagatttgtctggatatattgaagaatgcatggagccctatatggacccttcagtctgtttgtagagccataattgctctgatggcccaccctgaaccagacagcccacttaactgtgattcaggcaatctcctgcggtccggtgatatcagaggctatcaatcaatggcccgcatgtatacaaggctggcggccatgccaaagaaaggttagccgtagaacatgtgccaggccaagagcctattgtccatgcatggctacatgttgtcaggtctgccttgtgctgtctgtatgaactttgtggttcttgattcatgaaatactaaccgttcgtgtgttgcgtgtgtgtctggggtaatgagaggacactcgggttctcgatggtgttggtctgtgatgtatttagtaataagaaaataaaaaatgatttctcgataagcgaggttgtgactgagcattgaggtcagcactatgacttttatttctgaacttttttccaatcgaattacacttgcaactttggtagaagcgagaagggggaaaagaaacatatcagccggctttgccgggcaagaggaggcaccttttttttaattcttttgaaactaggggaacgccgttgtgggcgtcttggtgcctgtcaggaagttgctgaagagcgtcagcgcctgccgcggcgcgtgcagaggcacctcgtgcccggctccgcggatggtgacgaacgtcaggccctcgtagacgaccgtccatccaccaacctgatttccggcggagaacggaagacg

SEQ ID NO: 123291 - DNA, 1795 bp, Zea Mays
ctttgatccctagggaggtctgcccggatccgacagccgtgagcgcgtgctctatctgcacaagctttcccgacgggctgcagagaaatcaaccaaaaaaattcacatcaaaccaccgtaacgacgcaaaaatcccaccgatctcgatgggggagacgagtaagcgagcgatgtagcgaggggagcacgaacctgaaagtggtaagcgagaaggagtattggctgtcacccatgaccgaggcgcggagtcacctcgttgcctcttccgggttggagtgtcggcgattcgtggcaaggtttttgctctagcgagggagagaggtggctgaggaaaaaaaggggaagacaacgacgagacggagcagggaaagagatggagaatcgcaggaggaaagagagagcggagtgtttctcaagaagaaacgttttgggctggagtccaagttgtacttgggctggctatctgagttggtgaccaaatataggttgcacctgggctgggcctgacccaccgccgcctcttccgccttgcacggttcccccaactcccttctccgacggccactgcccaccgtcacagcagaagctcctccggtcctcccttctctccgtagaaacatttcccgacgggtgtttcccacgccggaatggaccagccggcaccataagcccaagattcgtttgcattcagtaatgcctttgcctaaatcagacctggggtcataactctttagtagagaaccaagaagatgcaggcatctagggcaaggcttttcaaggagtacaaggaggtacagcgagagaagtcagctgaccctgatatccaattaatatgtgatgattctaacatattcaagtggactgctcttatcaagggcccttctgaaacaccttatgaaggtggtgtgtttcaacttgcattcgcaattccagagcagtatcctctgctgcctcctcaagttcgatttttgaccaaaactttccacccaaatgtgcatttcaagacaggtgagatttgtctggatatattgaagaatgcatggagccctatatggacccttcagtctgtttgtagagccataattgctctgatggcccaccctgaaccagacagcccacttaactgtgattcaggcaatctcctgcggtccggtgatatcagaggctatcaatcaatggcccgcatgtatacaaggctggcggccatgccaaagaaaggttagccgtagaacatgtgccaggccaagagcctattgtccatgcatggctacatgttgtcaggtctgccttgtgctgtctgtatgaactttgtggttcttgattcatgaaatactaaccgttcgtgtgttgcgtgtgtgtctggggtaatgagaggacactcgggttctcgatggtgttggtctgtgatgtatttagtaataagaaaataaaaaatgatttctcgataagcgaggttgtgactgagcattgaggtcagcactatgacttttatttctgaacttttttccaatcgaattacacttgcaactttggtagaagcgagaagggggaaaagaaacatatcagccggctttgccgggcaagaggaggcaccttttttttaattcttttgaaactaggggaacgccgttgtgggcgtcttggtgcctgtcaggaagttgctgaagagcgtcagcgcctgccgcggcgcgtgcagaggcacctcgtgcccggctccgcggatggtgacgaacgtcaggccctcgtagacgaccgtccatccaccaacctgatttccggcggagaacggaagacg

SEQ ID NO: 123292 - DNA, 837 bp, Zea Mays
atggggatttgcgtcacggcatccatggagaggagccacagctcggccagggagggagttgggcgttcctggcgcgcatgcacaggaaaacagaggggaggagaagctgttgtcgccatgcttgaagggggaacgctggagactactcctgcggcaagggacacaggaagaaggtcggcgttgagctcctggacatgggggccgctggagcattggcttcattccctgagtagggcgtcggccattggggaagaacatcctctacgcaaggaacggagaggagggggggctgctcgagctcggacccagagaaatgctctgcgcgctaggagcctgggggagggggatgccgtgcagggcactggcgccagggatgccagagagaggggaactcgaggggtcgagctgctgggatgtgggagcggctgcttgcttgaggaagaagaaggggaggggatggagaggggcgctgcacttggagccgagcacgcaagcgagcaagatcccggcgaggagtggcgccatggatccaaggagaaatttctcctattcctgcggagaagaagggcgcggcgtcctgcactggtgatgaagtggtggcaggacactgcgtgggggaggagtcgccggacctggggcaactccagagagcagcaccatggggaaacagccttccctgctgctggcgaggtacgccagagaggcagccatgggaggccttgctcctgcgctgagaagggggaaacgctagaagaggcttctgcgctaaggaacagaggagagaatggagtatcggctgaaggtgaggggcgccagctgctagctttatcggtgtga

SEQ ID NO: 123293 - DNA, 1837 bp, Zea Mays
atatcctccactgtccactgtgctgtacctgtaccaccgtgacagttctattaacttgacgagacaaaaggggggaaagttctcctcctacaatcctacctccagtgatgtcagtaccaccgccggccggcggcggcgccatcatcaacgaggtcctcaccgacgacgagctccgcgcagtgctcaggcggctggggcccgaggcggagcgggacgcgttcgggctcgtgtgccgccgctggctccggatccagagctccgagcggcggcgcctgcgcgcgcgcgccggcccggacatgctgcgccgcctcgctgcacgcttccctggtgtcctggatctcgacctctctcagtcgccctcccgctccttctaccctggggtcatcgacgacgacctcaacgttatcgccagcagcttccgcaacctgcgtgtcctcgcgctgcagaactgcaaaggtatctctgatgtcggagttgccaaattgggagatggactgccatctctacagtcccttgatgtttctcgctgcataaagctgagtgacaaaggtttgaaggcggttgcactagggtgcaaaaaattgagtcagctgcaaatcatgggatgcaaattagtaacagataatttattgactgctctatcaaagagctgcctgcaattggtagaacttggagctgcgggatgtaacagcataacagatgctggtatatctgctctggctgatggctgtcatcacataaaatcactagacataagcaaatgcaacaaagttagtgatcctggagtctgtaagatcgctgaggtttcttcatcatgcttggtgtcaataaagctattggactgcagcaaggtgggagataagtccatctattcgttagctaagttttgcagtaacctagagactcttgtcattggtggatgtcggaacattagcgatggctccatacaagcacttgctcttgcctgctccagtagcttaaggagcctgagaatggactggtgcttgaaaataacagacacatcattgcaaagcctgctgtctaactgtaaacttcttgtagccattgatgtcggatgttgtgaccagataaccgacaatgcattcatggacggggaaggatacgggtttcagtctgaactgagagttttgaagatcagcagctgtgttcggctcacagttgcaggggtcggcagagtgattgaatccttcaaggctcttgagtacttggatgttcggtcatgccctcaggttacaagggacagctgcgagcaagctggagtgcagtttcctgctggctgtaaggtgaatttcgatggcagtttgctggaatctgatccatctgctgagatgttcttctaaaatgtgatctcggttgaaatcagatttagtgtgaactgcaaaactaagatttgaagagctcggtcatggaggcgagtgcttgacattgctgctgatctttcactgtcaaaatctatgcaagaacctgagaccacaacggatgcaagccatgatcatattcagtacccaattcaatatgcatgtgatttaatctgtagaaagtagcgcaaaagaccatgaaataagttgtctgaccaaagaacgtatttgcattatgtattgtgccagtgcagcgggtgtattaaaaaaatgtgcattttaatagactggtttcagtggattgtacgcagttctgttttttatctgcatcgcttgtatagatctttgttttggcgttatgccaaacagggaaacagtgttcggtctgttgtcttatgctcaaacactgctcccacctacaagaattggtggtatgtaagccgcatattttacgatac

SEQ ID NO: 123294 - DNA, 1121 bp, Zea Mays
gattctgccggccggccgcggtttataaaaccgcctgccctgccgtcgtcccgagccaccgaacctcggcgcaatcgcacgctcgctcgctcgctctctctctctcccatcccccgcacgacacttgggtagcgcgagagaaggagagatagagacatgacgaagtcgagcggcagccatgtgatgggcgtccccgtcacctccacggcgtacgccatcgaggacgcgacgagggaccggccgccggcggcggctaagaaggatggagaagatcgccttgccgtctcgctgacgcacccgagcccgtacacttccttcggctacaagcagggtcacgtgatccactggatgaacaagctgggaagacgagctcagagcttcagggaccacgtgacactgggtcccaagctgtcggagacggtgcgggggaagctcagcctgggcgcgaggatcctgcaggccggcggcgtggagcgcgcgttccggcgcgccttctcggccgagaaaggcgagcggctggtcaaggccctccagtgctacctctacaccaccggcgggcccatcgccgggatgctcttcgtctccacccgcaggatcgccttccgcagcgaccgctcgctcgccgtcacctccccggcgggcgacgtcctcgcgcgggtgccgtacaaggcggcggtccccctgaggcggatcaagcgggtgcgccccagcgagagcgccgagacgccggagcacaagtacgtgcaggtggccaccgtcgacggcttcgagttctggttcatgggcttcgtcagctaccagcggtgctgcaagtacatgcagcaggtcgtctccgacctgcagtagtagctgctcatggctcccatcgtcggcgtcgccgagcgtgcgtcccatctgtgtacgtacgtctggcagtccaagtcaagtttgtgggctactctacgccaatgtcttgttgcaacgtttgtagccaccaactgctccaccatttttccatataccatttggattaattggttgacaattgtgtatggtcttccaagtttgttaattatattagtaggattgatggaccaaggaacttggttttgctaaatgaaaatactccaattgttctcatc

SEQ ID NO: 123295 - DNA, 1086 bp, Zea Mays
gagtaacccgcaaccaccgcacattaggtaccgagagggcaggcaagaaccgagcaaatcagggcagcaggtgcctgctgccaagtcttggtcttggtcttggtgcgctgtgtaaagacgactcagcgatggaggggtcgacggcgaccgagggtcatgtggtcgggatcccggtgagcacaagggcttatggcatcgaggaacccgacttctcggtagaagagacgacgcccgaccgtggagagttcccgagctccttccagtactacagccatgatgctgccagttcgacgacgaccgccgccgatcggccgacgagcaatcaacaagccactaggaagggagacaagatcgtccggggcatcaaagaacatgtgaccctgggaccgaagctctccgacacggtgaaggggaagctctcgctgggcgcgaagatcctccgggccggcggcagcgtggagaagctgttccggcagtggttctcggcggacaaggacgagaagctgctgcgggcgtcgcagtgccacctgtggacgacggcggggcccatcgccggcgtgctgttcgtgtcgacggcgcgggtggccttccgcagcgaccggtcgctgtcgctggcggtgtccaccccgcgcggcgactgcagcttccgcgcgccgtacaaggtggccgtcccgctgcggaaggtcggggcggtgcggcccagcgagaacaggcaccggccggagcagaggtacgtgcggctcgccaccaccgacggcttcgagttctggttcatgggcttcgtcagctacaacaagtcgctgcagcacctggagcgggccgttgcgtgcgcgcggcaggcgcggtgacggtgtgctagttctgggccggctctgtatgtgtaggctgcagctgcaacatgtcgttgtacatctgggcgatcggttgccctggtaagcaggttggtcatagactcacaggcgaccggtcaggcatgtggtcttttggggttgggcaagaaattcaccatgaatttgaaatagagagtgctggtgtagtggtgtgacaatggcgaaaccgccatcaatatccattcttttctcaagc

SEQ ID NO: 123296 - DNA, 1598 bp, Zea Mays
ctgaattcttttctactagagctagagccaggcagccagccaacgccaagcggggtaggttgactcttctgtctacagcacctacctcttcacaccaactgccgcccctgctccgagaaccagaatggccgccgccgatgcatcttcgttgcctccgtccgccatcacctgccgagcggcggtggcgtggggaccgggccagccactggtgatggaggaggtggaggtcgccccgccggggcccatggagatccgtgtcaaggtcgtctccacctccgtctgccgcagcgacgtcactgcctggcaatccaaggcgcaacttgatctgttccccagagtcttcggccacgaggcatccggagtagtagagagtgtcggtgaaggtgtgaccgagttccaagtcggtgaccacgttctcactgtcttcattggggaatgcaagagctgcaagcactgcgtctcagggaagagcaacatgtgccagaagctcggtctggagaggaagggtgtcatgcacagcgatcagaagacacgcttctctgtcaaggggaaacctgtgtaccattactgtgcagtgtcaagcttcagcgagtacacggttgtccattccggatgtgcggtgaaggttggcctgaccgtgccaatggacagggtgtgcctgctgagctgcggtgtgtcttcagtctggaatgtagctaatgtatcaaagggctcaagtgtagctatatttggtcttgggaccgtaggactttctgtcgctcaaggtgctaagcttcgaggggcgtccaagattataggagttgatactaatcctgagaagcaagaaaaggggaaatcatttggtgtcacggactttattaacccagatgaattgagtgaacctgttcaacaggtaatcaaaaggattactgatggaggggtggattactcatttgaatgtgtgggtgattctggagtagtctccactgcacttcaatcatgttctgatggttggggagtaactgtaactcttggcttaccaaaaggaaaactagaagtgtctactcattatgcatttcttctatccggaagaacactgaagggatctatgtttggaggatggaaacctaaatctgatctaccttcattggtggataaatatgcagcaaaggaaatccaagttgatggcctagtcacgcatgatataccattcaatgaaatcaacaaagcgcttgagttgatgctagaaaacaagtgcttgagatgtgtgattcacatgccacggtaacagggtcgaacagctgcacataataatatgatatctaccatatgttgcatatctgctctttctaccttgatcatctttgtggctcaaccgttcaagtactcatcagtcatcaccacgccggagcttgagtttttgtccttttctagtcccctggtaaagttgttgtaaatccagctatccatcaagaattatcaggagaactacactgatttgcttttgtatcttcatactttttcttctagaattgtcttcttatattgaatctttaatgtctgttctgttattttaatgctccatgtacaaaccatcaagcaaatattgttcttccagc

SEQ ID NO: 123297 - DNA, 1610 bp, Zea Mays
ctgaattcttttctactagagctagagccaggcagccagccaacgccaagcggggtaggttgactcttctgtctacagcacctacctcttcacaccaactgccgcccctgctccgagaaccagaatggccgccgccgatgcatcttcgttgcctccgtccgccatcacctgccgagcggcggtggcgtggggaccgggccagccactggtgatggaggaggtggaggtcgccccgccggggcccatggagatccgtgtcaaggtcgtctccacctccgtctgccgcagcgacgtcactgcctggcaatccaaggcgcaacttgatctgttccccagagtcttcggccacgaggcatccggagtagtagagagtgtcggtgaaggtgtgaccgagttccaagtcggtgaccacgttctcactgtcttcattggggaatgcaagagctgcaagcactgcgtctcagggaagagcaacatgtgccagaagctcggtctggagaggaagggtgtcatgcacagcgatcagaagacacgcttctctgtcaaggggaaacctgtgtaccattactgtgcagtgtcaagcttcagcgagtacacggttgtccattccggatgtgcggtgaaggttggcctgaccgtgccaatggacagggtgtgcctgctgagctgcggtgtgtcttcaggactcggtgcagtctggaatgtagctaatgtatcaaagggctcaagtgtagctatatttggtcttgggaccgtaggactttctgtcgctcaaggtgctaagcttcgaggggcgtccaagattataggagttgatactaatcctgagaagcaagaaaaggggaaatcatttggtgtcacggactttattaacccagatgaattgagtgaacctgttcaacaggtaatcaaaaggattactgatggaggggtggattactcatttgaatgtgtgggtgattctggagtagtctccactgcacttcaatcatgttctgatggttggggagtaactgtaactcttggcttaccaaaaggaaaactagaagtgtctactcattatgcatttcttctatccggaagaacactgaagggatctatgtttggaggatggaaacctaaatctgatctaccttcattggtggataaatatgcagcaaaggaaatccaagttgatggcctagtcacgcatgatataccattcaatgaaatcaacaaagcgcttgagttgatgctagaaaacaagtgcttgagatgtgtgattcacatgccacggtaacagggtcgaacagctgcacataataatatgatatctaccatatgttgcatatctgctctttctaccttgatcatctttgtggctcaaccgttcaagtactcatcagtcatcaccacgccggagcttgagtttttgtccttttctagtcccctggtaaagttgttgtaaatccagctatccatcaagaattatcaggagaactacactgatttgcttttgtatcttcatactttttcttctagaattgtcttcttatattgaatctttaatgtctgttctgttattttaatgctccatgtacaaaccatcaagcaaatattgttcttccagc

SEQ ID NO: 123298 - DNA, 1681 bp, Zea Mays
ctgaattcttttctactagagctagagccaggcagccagccaacgccaagcggggtaggttgactcttctgtctacagcacctacctcttcacaccaactgccgcccctgctccgagaaccagaatggccgccgccgatgcatcttcgttgcctccgtccgccatcacctgccgaggtattagcccgccccgccttgcttcttgcgtagggtttagtggcgagtaaaattggatggcctgcgcgcagcggcggtggcgtggggaccgggccagccactggtgatggaggaggtggaggtcgccccgccggggcccatggagatccgtgtcaaggtcgtctccacctccgtctgccgcagcgacgtcactgcctggcaatccaaggcgcaacttgatctgttccccagagtcttcggccacgaggcatccggagtagtagagagtgtcggtgaaggtgtgaccgagttccaagtcggtgaccacgttctcactgtcttcattggggaatgcaagagctgcaagcactgcgtctcagggaagagcaacatgtgccagaagctcggtctggagaggaagggtgtcatgcacagcgatcagaagacacgcttctctgtcaaggggaaacctgtgtaccattactgtgcagtgtcaagcttcagcgagtacacggttgtccattccggatgtgcggtgaaggttggcctgaccgtgccaatggacagggtgtgcctgctgagctgcggtgtgtcttcaggactcggtgcagtctggaatgtagctaatgtatcaaagggctcaagtgtagctatatttggtcttgggaccgtaggactttctgtcgctcaaggtgctaagcttcgaggggcgtccaagattataggagttgatactaatcctgagaagcaagaaaaggggaaatcatttggtgtcacggactttattaacccagatgaattgagtgaacctgttcaacaggtaatcaaaaggattactgatggaggggtggattactcatttgaatgtgtgggtgattctggagtagtctccactgcacttcaatcatgttctgatggttggggagtaactgtaactcttggcttaccaaaaggaaaactagaagtgtctactcattatgcatttcttctatccggaagaacactgaagggatctatgtttggaggatggaaacctaaatctgatctaccttcattggtggataaatatgcagcaaaggaaatccaagttgatggcctagtcacgcatgatataccattcaatgaaatcaacaaagcgcttgagttgatgctagaaaacaagtgcttgagatgtgtgattcacatgccacggtaacagggtcgaacagctgcacataataatatgatatctaccatatgttgcatatctgctctttctaccttgatcatctttgtggctcaaccgttcaagtactcatcagtcatcaccacgccggagcttgagtttttgtccttttctagtcccctggtaaagttgttgtaaatccagctatccatcaagaattatcaggagaactacactgatttgcttttgtatcttcatactttttcttctagaattgtcttcttatattgaatctttaatgtctgttctgttattttaatgctccatgtacaaaccatcaagcaaatattgttcttccagc

SEQ ID NO: 123299 - DNA, 1686 bp, Zea Mays
ctgaattcttttctactagagctagagccaggcagccagccaacgccaagcggggtaggttgactcttctgtctacagcacctacctcttcacaccaactgccgcccctgctccgagaaccagaatggccgccgccgatgcatcttcgttgcctccgtccgccatcacctgccgagcggcggtggcgtggggaccgggccagccactggtgatggaggaggtggaggtcgccccgccggggcccatggagatccgtgtcaaggtcgtctccacctccgtctgccgcagcgacgtcactgcctggcaatccaaggcgcaacttgatctgttccccagagtcttcggccacgaggcatccggagtagtagagagtgtcggtgaaggtgtgaccgagttccaagtcggtgaccacgttctcactgtcttcattggggaatgcaagagctgcaagcactgcgtctcagggaagagcaacatgtgccagaagctcggtctggagaggaagggtgtcatgcacagcgatcagaagacacgcttctctgtcaaggggaaacctgtgtaccattactgtgcagtgtcaagcttcagcgagtacacggttgtccattccggatgtgcggtgaaggttggcctgaccgtgccaatggacagggtgtgcctgctgagctgcggtgtgtcttcagtctggaatgtagctaatgtatcaaagggctcaagtgtagctatatttggtcttgggaccgtaggactttctgtcgctcaaggtgctaagcttcgaggggcgtccaagattataggagttgatactaatcctgagaagcaagaaaaggggaaatcatttggtgtcacggactttattaacccagatgaattgagtgaacctgttcaacaggtaatcaaaaggattactgatggaggggtggattactcatttgaatgtgtgggtgattctggagtagtctccactgcacttcaatcatgttctgatgtaatttcttgtcatgccttttgtttccatacatgcatacttcacatatcctattcccttctattcatttgcatttccaacttgctagggttggggagtaactgtaactcttggcttaccaaaaggaaaactagaagtgtctactcattatgcatttcttctatccggaagaacactgaagggatctatgtttggaggatggaaacctaaatctgatctaccttcattggtggataaatatgcagcaaaggaaatccaagttgatggcctagtcacgcatgatataccattcaatgaaatcaacaaagcgcttgagttgatgctagaaaacaagtgcttgagatgtgtgattcacatgccacggtaacagggtcgaacagctgcacataataatatgatatctaccatatgttgcatatctgctctttctaccttgatcatctttgtggctcaaccgttcaagtactcatcagtcatcaccacgccggagcttgagtttttgtccttttctagtcccctggtaaagttgttgtaaatccagctatccatcaagaattatcaggagaactacactgatttgcttttgtatcttcatactttttcttctagaattgtcttcttatattgaatctttaatgtctgttctgttattttaatgctccatgtacaaaccatcaagcaaatattgttcttccagc

SEQ ID NO: 123300 - DNA, 3155 bp, Zea Mays
gtttcgtcgacaagccagcagcccagcacgcaaagggcactgtgccgttacggcgcggcggagccggaaactcccgagtcgcgtgacagtaaacgaaggcacgaacgcgactcttccatccaactgtcgaagcaaccgaatcggggacaaccgagggcgagggcggccggcatggggatcgtggaggcgtggatgcgggagaagcccatccgcacattcctagcccgcctcgcccagcgccgggcggcggctgccgccgccttcctcgcttccccctctgccaccacggtcatcgatggcgagggcggcagcgacgggagcatcccgcagctttcctccgttgccaactccgtcgtgtcccgctgctcaaggattcttgctctttcaattgagaacttacagcgaagctttgagactgattttccacacagttgtaatgaggctaatacatatgcaagagaccttttagagtattgctgccataaagctcttcatgaagttacaacacgtccagattatttggccgataagaatcttcgccgcttgatgtttgatatgatgcttgcatgggaaactccaggtgctcaggatgtgtcagtagataatggttctattgtgcgtgattcccttgagattgaagatgaggatgaggggtcaattttttatgcaaattccacaagattggctgctcaagttgatgacaagaagacagtcgggttaagtgcttttgcacgaatagcaccttcatgcccaataatagctgacctggttactgtacgcaatctgtttgacgcacttacaagttcatctggaggccgattgcattttcttgtttatgacaagtatctcaagagtttagacagggaattgaggtctgtgaaaggtatcatgcaatcatcacttgcctcaagttttcatcttgatgctggagaatgcatattagctattgatggagacaagcccattcaaccggtactgcaacatattggaatatcagcatggccaggaagattggtcctcacaacacatgctctttattttcagagtattagagtgggatatggtgataagattgttaaatacgacctatcaacagattcaaatcaagtgattaagcgtgatttgactggaccactgggtgtccgcctctttgataaagctgtgatgtacaaatcaagcactttgacagaaccaatttatttcgatttctttgaattaggaggcccttcacgaagagactattggttagcaatcacccgtgaagtattgcaggtgaacagatttattaggaagttcaatcttggagatgttcagaaagcagaagcactctcaaaagctatcctaggcattttgagatactctgctgtcaaagaagcttttcatattgctccttctcactttaagacaacacttacttttagcttagcagaaaagcttccgaaaggagatatggtcttagaagcactgtataacaattatttccaactcttggactcttcattgagacatttggcaattgattctgcagtcgatagaatgtcggagaaccattctataccattttctttgtatgctctctctagaatgggttttcttctgctgaagacaaacgataaatctgaaaaggaaatgagcttttgtgctgtttgctttggtgtaacaaaatctttggaggctgccctagaagagtcaatttgttactctgagagaatagagtcagcacgtgctacagttgatcaagtaaaggtagaaggcgttgatgcaaatcttgccctcatgcaggagttactcttccctttaattcaagcaggcaagattgtttactctctcagccaatgggaagatcctttgaaatcacttctattcttagcttttatgttgtatgctattcaaaggggtctcatcagttacatcgcaccctttgttttcttaacttttgctattatcatgctttggcataagtatattggagacggaaaattgttggaagtgcttgaagtgaaacctcctccaagtaaaaatgccgttgagcagattttgacattgcaggaggctatatccaagttagaaaattttctacagtctgcaaatattactcttctgaagttcagatctgtcttgtttgcctgtgttcctaaggccactgaagtagttgcagctgtacttattgtcgcagctgcatttcttgtcttcctaccttccaggcctctgatacagatgttagtcctggaaatgtacacaagggagatgcccctaaggaaacagaacactgaaaaattccgcaggcgaattagagagtggtgggctcgcattccagctgcacctgtgcagatgatcagacctaatgaaagcaagaaaaagagatgatcatgggcttttagggttgatttggtgacaaggggatcccgagaggattggaggggattaaggggaaagtaaattaatttccccctcaatcccctccgatcctcccatgatcccgggtcaccaaatcaacccttaggcttttggcagacctagtgccggaggcacccacaccgagaagggacaaactgaggaattctttccttcacaaatgcggagacactgctttgaacccgtgacctagcacctgccactgcactaggccagaatttaagatctcaaagagagaaaaaatagcccacatattctgttccctagtttgaacctaatcagctaacttaggcttcttcggttcgctctcaatccatgtggattaagtgtgattaggtgtgattaaattccaagcaagtcaaacttcttatttttttccagtcatatccaattcatatgtaatgggaataaccgaacaaggccttatgtagattttgacctactaagaaaaactagccccggtaaccagtgtatagcatcatgtcgctatgagtgtaaaatgatgactgcagaagaattattcatttttcttgcaagccatttcttagaagtttctagagctctgatgtgttctagaagaatttatcagatgtttgaactgatggttggaatgtaaggtggtttcatatggattctttgaacttatttgctctagtaaaattgatgtatccccacagcacattggagaagcagctgaaagtgtgtcgtgtagtccagtttagcactttatcttcaaaatt

SEQ ID NO: 123301 - DNA, 303 bp, Zea Mays
atggccccatccagctatcgcgcgaggcatgaccgtctccagcggcggtggccacacgaggtgcgggtggctccggcagcatcggcggtccgcacgatggttcagacaaggtatattagcagccctaggcttccaatagttagaggaagcccaggccgaccacccctgcaacctggttcaacccgccgcgccgactcaagcaggctgtcgggtgcaccaccaccccacgtctgtgcgcataaaaagaatgcatgcgatcgctgcaacagtcatgcagctaggctcgtcgggaccaatttatga

SEQ ID NO: 123302 - DNA, 1617 bp, Zea Mays
cacggcctcaacacccagccgccgccgcccggcagttccgtctcccttcttcgccttctcagtcaagctaaaacctcgctcgcctcgtccagtcagacatggcatgaaaccctagggcgcccgcctcccctccgcaatttgccattgcgctccgcgatgcaggcatccgcgcgcctctcctactccgtggcctccaggaaagtgatcgcgggtgtctctatcgcgcccccacggtcgtgctatcggacctcccgagggaaggcgcatgcggcgccgctgcctgcgcaggagccgccaccgaaggggctgaagaggattacaaagcaggagcggagggttcgaatagtggaatttgttgagaattatagggcttcaaacgaaggcaagtttcctactgtaaaaaatatctgtcagcaaattggaggtggttactatgcagtgcgtgagttacttcaagaaatgaaatataatcatgcaaaattaccactgggtaatgctaaggcagctccacttcaaacaacagttgaagtcactgaacaccccatgcctaaggatgaagctagagtggttgaaagtcaaggaatactagaagtttctgagcactccatggccaaggatgatgctgaagtggctcaacctcaaggaacagctgaagtttttgagcacttcttatctaaagatgaaggtaaggtggctcagtgtcaaggaacgtttcactttcctgagcactcaagacctaaggatgacagtggaaagactgctcgacatgatatggacacttcagaaacctgtaagactgcagatgccccagctttatctgatctaacagagaatgagggaattttatctgaccaaacagagagtgaggacaaaccagatcctggaaatcagcaaagagaaatagaagctaacaaatttgatttgaagaatttcgaaaaaaatctgaatgcaaatgattcaaacgcatcagatcaaagtggaagtgatacggtgaatgaggcaaagacacatgccaggggagacaacccaaagcttgaggaatccgcgaacacgggtcttttgggcagcctgagatcttttgcttatggcatcagaaacttctggaaaaatatgtaaatctgttgtttttttgccgtgagtcacctaaaattgaaaaggctacagaatcgagaacttgcctctttgtcacgggcttttggttgcataggatcggagaggagagggcttttggttggagaggattgatggtttgtttgggagcaaggggagagcctctccaattcacttgctcccaaacaaaacaagccatgagacaatcccttgctattactagtaagagattatgtctctaaattcccttcaatccttatgcaataaaagccccaagcgtttgtgatactggatcaatttgtaaagttctttttgtgtcacaccaaatggtcatgttccgctatgacgtttcgataaagctagataggagtattattagtactgcccctgttgtggcccaagttcacatggtatttaagtgttggtggtatctaactgtgtttgtcaattgttgtgcacacattgaaggccctatttagaagtaaaatattttttatagtttttagg

SEQ ID NO: 123303 - DNA, 1475 bp, Zea Mays
cacggcctcaacacccagccgccgccgcccggcagttccgtctcccttcttcgccttctcagtcaagctaaaacctcgctcgcctcgtccagtcagacatggcatgaaaccctagggcgcccgcctcccctccgcaatttgccattgcgctccgcgatgcaggcatccgcgcgcctctcctactccgtggcctccaggaaagtgatcgcgggtgtctctatcgcgcccccacggtcgtgctatcggacctcccgagggaaggcgcatgcggcgccgctgcctgcgcaggagccgccaccgaaggggctgaagaggattacaaagcaggagcggagggttcgaatagtggaatttgttgagaattatagggcttcaaacgaagttgaagtcactgaacaccccatgcctaaggatgaagctagagtggttgaaagtcaaggaatactagaagtttctgagcactccatggccaaggatgatgctgaagtggctcaacctcaaggaacagctgaagtttttgagcacttcttatctaaagatgaaggtaaggtggctcagtgtcaaggaacgtttcactttcctgagcactcaagacctaaggatgacagtggaaagactgctcgacatgatatggacacttcagaaacctgtaagactgcagatgccccagctttatctgatctaacagagaatgagggaattttatctgaccaaacagagagtgaggacaaaccagatcctggaaatcagcaaagagaaatagaagctaacaaatttgatttgaagaatttcgaaaaaaatctgaatgcaaatgattcaaacgcatcagatcaaagtggaagtgatacggtgaatgaggcaaagacacatgccaggggagacaacccaaagcttgaggaatccgcgaacacgggtcttttgggcagcctgagatcttttgcttatggcatcagaaacttctggaaaaatatgtaaatctgttgtttttttgccgtgagtcacctaaaattgaaaaggctacagaatcgagaacttgcctctttgtcacgggcttttggttgcataggatcggagaggagagggcttttggttggagaggattgatggtttgtttgggagcaaggggagagcctctccaattcacttgctcccaaacaaaacaagccatgagacaatcccttgctattactagtaagagattatgtctctaaattcccttcaatccttatgcaataaaagccccaagcgtttgtgatactggatcaatttgtaaagttctttttgtgtcacaccaaatggtcatgttccgctatgacgtttcgataaagctagataggagtattattagtactgcccctgttgtggcccaagttcacatggtatttaagtgttggtggtatctaactgtgtttgtcaattgttgtgcacacattgaaggccctatttagaagtaaaatattttttatagtttttag

SEQ ID NO: 123304 - DNA, 591 bp, Zea Mays
cacggcctcaacacccagccgccgccgcccggcagttccgtctcccttcttcgccttctcagtcaagctaaaacctcgctcgcctcgtccagtcagacatggcatgaaaccctagggcgcccgcctcccctccgcaatttgccattgcgctccgcgatgcaggcatccgcgcgcctctcctactccgtggcctccaggaaagtgatcgcgggtgtctctatcgcgcccccacggtcgtgctatcggacctcccgagggaaggcgcatgcggcgccgctgcctgcgcaggagccgccaccgaaggggctgaagaggattacaaagcaggagcggagggttcgaatagtggaatttgttgagaagtaggttacttttttttcactgtattttctggttgtagagtttatctttttgggtcataggtagcaattgtgtagctttcggcttattagcacttctgtttggctctcgagcttagtaatagacacttagtgtgcgtttggttgggctgtgaactatgaaaacatagctgtgagttgtctgctgtgaaaaaactgttgtgagcaaataaagctgaaactcgtttggttc

SEQ ID NO: 123305 - DNA, 1850 bp, Zea Mays
cggactctttccttcactccactccactcccagtcgcagagtcgcagtccgtaccgtagctcctcctgccaccagaacccaccatgggcctctgcttcagcaagaagaagccaccggccaagccgggaaaggtcgccgccgcggtctccgacgacaaggccaagaagagtccggcgcagcagcccaagagagcggcggcggcggcggcgaacaaggctgcggtgtccgccaaggacgccgcggtgcccggggaggagaagaggaggcggtcgggatcgcaagggccggcggccgagaagcagctgccggtagtgctggtgccgtcggcgccggtgcgcacgtccagctgcaccaaggaggaggtggacgcgatcctcatccagtgcggccggctcagccggagctcgtccggggccggaagggcggcgtcgaccggcgacacggcagcgtgcggcggcgggcaccgcaggaggtcgagctctcccgcgaggatggcagcggggacggggaacgagaatgctggagcttgcggaccggcggcggggccggcgccggtgctcagccggagctcgtccaggaagaacgagcagtccccgtacaggcgctgccccatggccgagctcgacgacaacgctctccgtaacagcagcaaccacggtgccaggccgcacaaggtaaaaaaatcagccagacaaaactcgaattgaattttgctccggttagtgcaagttctaccgtaccactcgcgaggctcaaacttctgctccgacttcagaaatctgctgagactgccgtcgccgcgacgcccaggaaggctacggggcgtgggaaggagccgacggcggtgaaagaaaagctggagatcacagaagcgtcagagacgagagcgcactcgtccaagacgtcgtcgaagacgaccacgacgcccacgctgagcgtcgtggccgagagcctgacccaaatgcccggtgcggcgcagccaggctgccgatcgcggcgggcttcgcgcgacttcgaccaaaaccccggctcgtacgccacacagctgctcgaagacatccacaactaccatcagcagtccacctccgccacgccggcgacgccgtccatctcgctcccggcgtgcgtcgccaaggcctgctccatcgtcgaggccgtggcggacctcaactcctcgtcgtcggagaaccgcgcctacgagcacgagcctggccactccgccgatgacaaaggctccgtcaacgcgccggtaggcagcggcagcgacggcttcgtcgagccgagcgccgccgcgcggaagcacctgctgccggcgcgggacgcccacgcggaaaccgagccccaggagtcggccgggagcaacagcgtctccggccacccgtggacgccctcctgggagcccacctcggccgagtccacggaccggacgtggagcaccggcgacgaggttgtcgagcagtccggcagtcacggcggccgctgcagcccgatgaacaggcaccaactgagcaagcagaggcagtgccagcccgagctcagtggccggtcccgcgccggctctggaaatgctaacggccagtaccgtgggcgcagcagcgctcatcgtgccagcggcagcgtggcgagcggacggtctggtgtccgagtcgtctcggcgaactcgtagtgtgggtagtagaaattgtagccagaggcaagatggattgctgctctgctccgtgtatgtgtttgtgtttctttgttagccatactttgttcggatgtgattcatggtgtgacattttgcgcgccatttcatgcatgcgttggttcgcttgtagccagaacttcacagcgttactgtttccttc

SEQ ID NO: 123306 - DNA, 2227 bp, Zea Mays
ctcatcacaggcgcgcggtacgggttacggagcactaactaacacagagcacgacgcacgctgacacaaaaattatttcgcctaagcgcacctccccacgcgtgcttatataccacccaagtcaccagcgcaccaagtcacagtccaacggactctttccttcactccactccactcccagtcgcagagtcgcagtccgtaccgtagctcctcctgccaccagaacccaccatgggcctctgcttcagcaagaagaagccaccggccaagccgggaaaggtcgccgccgcggtctccgacgacaaggccaagaagagtccggcgcagcagcccaagagagcggcggcggcggcggcgaacaaggctgcggtgtccgccaaggacgccgcggtgcccggggaggagaagaggaggcggtcgggatcgcaagggccggcggccgagaagcagctgccggtagtgctggtgccgtcggcgccggtgcgcacgtccagctgcaccaaggaggaggtggacgcgatcctcatccagtgcggccggctcagccggagctcgtccggggccggaagggcggcgtcgaccggcgacacggcagcgtgcggcggcgggcaccgcaggaggcgctcggggtccaagcgcagctacgacttcgaccaggacggcggcgcggacgaggagtgcgactgggagaggcaggggcgcgcggcgcccgtgtccagcagcaggccgtcgccgcaccgaggctcgccgcagcgcaagcggtcgggaagccgggagaggagcggcgccggcgccgggagccggagggccagccggtcgcccgggagacgcgctgatggcgctgctacctctgcgggatccggcggcggggaccgcgccaggcagcagccggggaagatggtgtccgtgcccgccagggagaaggggcgcgcgccgtcgcccgtggccgcgtctgggaagcggtgcgcgtctccgaggtcgagctctcccgcgaggatggcagcggggacggggaacgagaatgctggagcttgcggaccggcggcggggccggcgccggtgctcagccggagctcgtccaggaagaacgagcagtccccgtacaggcgctgccccatggccgagctcgacgacaacgctctccgtaacagcagcaaccacggtgccaggccgcacaagaaatctgctgagactgccgtcgccgcgacgcccaggaaggctacggggcgtgggaaggagccgacggcggtgaaagaaaagctggagatcacagaagcgtcagagacgagagcgcactcgtccaagacgtcgtcgaagacgaccacgacgcccacgctgagcgtcgtggccgagagcctgacccaaatgcccggtgcggcgcagccaggctgccgatcgcggcgggcttcgcgcgacttcgaccaaaaccccggctcgtacgccacacagctgctcgaagacatccacaactaccatcagcagtccacctccgccacgccggcgacgccgtccatctcgctcccggcgtgcgtcgccaaggcctgctccatcgtcgaggccgtggcggacctcaactcctcgtcgtcggagaaccgcgcctacgagcacgagcctggccactccgccgatgacaaaggctccgtcaacgcgccggtaggcagcggcagcgacggcttcgtcgagccgagcgccgccgcgcggaagcacctgctgccggcgcgggacgcccacgcggaaaccgagccccaggagtcggccgggagcaacagcgtctccggccacccgtggacgccctcctgggagcccacctcggccgagtccacggaccggacgtggagcaccggcgacgaggttgtcgagcagtccggcagtcacggcggccgctgcagcccgatgaacaggcaccaactgagcaagcagaggcagtgccagcccgagctcagtggccggtcccgcgccggctctggaaatgctaacggccagtaccgtgggcgcagcagcgctcatcgtgccagcggcagcgtggcgagcggacggtctggtgtccgagtcgtctcggcgaactcgtagtgtgggtagtagaaattgtagccagaggcaagatggattgctgctctgctccgtgtatgtgtttgtgtttctttgttagccatactttgttcggatgtgattcatggtgtgacattttgcgcgccatttcatgcatgcgttggttcgcttgtagcca

SEQ ID NO: 123307 - DNA, 809 bp, Zea Mays
aactcgcagtcgcagcgaccgtccgctcgctcccgcctttcgtttgccccgccgcctctatcctttcctcgactcctccgcatccaccacctgttcgacccagcaccggagagtccccacccacccaatggcgaccgccaccgcggccgtagcgccgccgtccacctccacctcctcggtcctcctgcgccgccggctcccttccccggcgcccgcgtccgcgtccgccgccttcccccggctccccggcccgcccccgcccccgccgcgccgcgcgcgcctgctcctcctccaggtcgcgctcaccagcgaggtggcctcggacgacgtggcggccgaggaggccgcggccgcgcccaagatcggcaggcgggtgcgcgtcacggcgccgctccgcgtccaccacgtcatcaaggcgcccgacctggacgtccagggcatggagggcgtcgtcaagcagtacgtcggcgtgtggaagggcaagcgcgtcaccgccaacctgcccttcaaggtcgaggtccagctcgccgtcgagggccagcccaagcccgtccggttcttcgtccacctccgtgaggacgagttcgagttcgtcgatggggagtgatgtgacgggcgtcagtcagagcgcgtccgagttaaccgttcttatagattatagaataatcatggccgcggcggtcgcttgtgtcttgtgtatattgttccggcggggtagtaagcttgggagtggcaaatgtttcagctgttgggaattgttcggagttataatagtgatcattttgccgctgtttgtcgactatgctccg

SEQ ID NO: 123308 - DNA, 133 bp, Zea Mays
gtggggactcaaggttatctccatgtgagaactgaaggttatcttttttatagactatttattagtattggtaacttctttgcaattttccatcgacgctataatatttttatgaatttaattgtattttgat

SEQ ID NO: 123309 - DNA, 1432 bp, Zea Mays
atggccgccgccgccccagccatctccctggtggccgacctcgcccctgccccagccacagctcccccttcggccctgctgctgcaagcactcagcctctcccatggcacacggagaaatcccatgatttgggggaagacgaagtccaagcacaacccccgccaatcgctcgatgaaaaatctaaaccaaaaccctcagcgttttcatgggttccggagggattttatgttggtaaggatgatatggcctctcgcccaaagctgtctggtattcagaagcaggttttggcactgtacaggggattccttcggacagcacgccttaaggcccctgaagaacgccgcaggatcgagtctgttatcttggcagagttccgtgacaacgcaaggagtgttgaccgcttgtactggggttgtgacttgtatattgtcaaggatcacttggatgtggtaaatgctatactggacactgatgatagctgcataaggattgtgcggaaaaacgggaagacatccctacatactgctgcaaggattggataccatcgtattgtcaaggcactcatagagagggatccaggaattgttccgatcaaggataggaagggacaaactgcacttcacatggctgtgaaaggcaagaacacagatgtagtggaagagttactgatggctgatgtttccattctcaatgtgcgagacaagaagggaaatactgctttgcacatagctacacggaaatggaggccccaggtatggttcttttcaggtgtcttttacaagtagtttgctatttcagttttagctgactataacctgcattgagagctataacgctgttatatctgtaaggcgtggtttcaatgtgtagccaattttttatttatttgcccttattttagagttacatctgcgtggacatattgttttcttacagctgtctgaagtttagtagctgtctgaagtttagtagctgtctatcttgtttttcagggatctggaataacaggagcctgatggttgcatcagtagagttgaccacttctcagtattgcgagatgcatcttacatggttgatcagttttgcctagtcccagtaccatacaaagatgttcagctggatataaacatttctccacgtctctcttctgaatacataagttatctggaaaatcctgttgagttgctcaatgaagcggcaaaagctgcagagaaagatctatggaaaatcctgttgagttgctcaatgaaggcttttgcgaatcacttgaagtgttagtacttttgtgaatgattttgtaaagtgtttgtaaatatgtgcaaaacataataacatgtgtaggttttgtgaatgattttgttgtggtgcttgttgatggtttatgtgatgtggatctatcattgtgcaatactaattaaatttgtatatcta

SEQ ID NO: 123310 - DNA, 1443 bp, Zea Mays
ctgcgagagagagagagggttggggaaggtcaggttcagagggaagaggaagatctcagtcaaaagtcaagaccctcgtttccacctcctgcggcgtgattcgggcaatcgggctctgccgctcgtctctcctttcagcatccatcgccgctgcttgagctctgcctccacttatctactacagtctacaggctcttggctggaactaggaagtcatgttgagtggccacgccgtgacactgagcgagaggagcgcctccggtacgcgcttgatcgaggatgtagcgtgcgaggcaggcgatgaggaggaggcggacgccgccgcgagagttgtgtaccgggcctcgttccaagagctgatgcccaactaccttcagtacgacaccatcatctgggcactcatatccctgctgcttgtcctggcgtgggggatcgggctgctcctgcttctctacctgccgtacaagagatacgtgctgaagaaggatatcctatcccgccaactctttgtcaccgagagtaagatagtgtacaaggtattggcgactaggccttcgtacatgccattcatggggatagttaagaaagagattaaagtacctctccatttgattgttgatgttataattgagcaaggctgtctacaatctgcttacagcttatacacatttagaatagaaagcatagcccatgggaaacctgcttcagtggatgaactgcaatttcatggtgtccataatccagattttctaagaaaggttataaccagagaagcctccaggagcatcagagaagtccaaagttggaaaaatagattgtactccgaggaaggtccttctcatgttcaaagtagtggattacactcacctagtgcaaaggtcagagcttccccaatctgtgctgcctttgattctaagggtaaaatttctgacaatatattgctccataagattgaagaacttaatcgatcagtgaagaatcttgagtctctactcgtaagatcacatagaagagaatgatctgatattatatcatctttgaaaattagctcaaattaaacatggaaagaacaggaggaacaagtggagtatatgaactctgtttttctatttagtccttcagatcagataccatgggaaattgcaaagctgctcatgccgtgaaggagcttctagtttgattcaagtttcacaagttatctgttgtacataggtcttgctgattcttccaagtttcacaatttgatgtacaaagaatcacagaatcagtggacagtggtctagggtcacaaagtagatcaacgtacatgtaagcttgtttactgtataaattctaaaatggtaatctgtgccaatacgtgtactgtaatgggcttaggctcagcccatatatgtttatagctatcaatacaacattctaatcctagttagggttttctattcc

SEQ ID NO: 123311 - DNA, 1736 bp, Zea Mays
cgagaggattatttctgcgagagagagagagggttggggaaggtcaggttcagagggaagaggaagatctcagtcaaaagtcaagaccctcgtttccacctcctgcggcgtgattcgggcaatcgggctctgccgctcgtctctcctttcagcatccatcgccgctgcttgagctctgcctccacttatctactacagtctacaggtgaggctcttggctggaactaggaagtcatgttgagtggccacgccgtgacactgagcgagaggagcgcctccggtacgcgcttgatcgaggatgtagcgtgcgaggcaggcgatgaggaggaggcggacgccgccgcgagagttgtgtaccgggcctcgttccaagagctgatgcccaactaccttcagtacgacaccatcatctgggcactcatatccctgctgcttgtcctggcgtgggggatcgggctgctcctgcttctctacctgccgtacaagagatacgtgctgaagaaggatatcctatcccgccaactctttgtcaccgagagtaagatagtgtacaaggcgactaggccttcgtacatgccattcatggggatagttaagaaagagattaaagtacctctccatttgattgttgatgttataattgagcaaggagagctgtgcatacctatataccccacttgatggattcatttgtgtgaagctataattcagctatgtacttcagccaggcattggttctttgtaaaaattcactgaatgttcaaggaaaaaatcactgatggacgtattaatgcattttactcatctaaatgttacaggaatatatgccttatcttgtactagttcgtatctcatgcataaacttgaacagaaaattgtgaaattgccttctttaaaagttaggactgtatgtgtgtatgtttctgaaaaaaaggatctattatgcaggctgtctacaatctgcttacagcttatacacatttagaatagaaagcatagcccatgggaaacctgcttcagtggatgaactgcaatttcatggtgtccataatccagattttctaagaaaggttataaccagagaagcctccaggagcatcagagaagtccaaagttggaaaaatagattgtactccgaggaaggtccttctcatgttcaaagtagtggattacactcacctagtgcaaaggtcagagcttccccaatctgtgctgcctttgattctaagggtaaaatttctgacaatatattgctccataagattgaagaacttaatcgatcagtgaagaatcttgagtctctactcgtaagatcacatagaagagaatgatctgatattatatcatctttgaaaattagctcaaattaaacatggaaagaacaggaggaacaagtggagtatatgaactctgtttttctatttagtccttcagatcagataccatgggaaattgcaaagctgctcatgccgtgaaggagcttctagtttgattcaagtttcacaagttatctgttgtacataggtcttgctgattcttccaagtttcacaatttgatgtacaaagaatcacagaatcagtggacagtggtctagggtcacaaagtagatcaacgtacatgtaagcttgtttactgtataaattctaaaatggtaatctgtgccaatacgtgtactgtaatgggcttaggctcagcccatatatgtttatagctatcaatacaacattctaatcct

SEQ ID NO: 123312 - DNA, 1387 bp, Zea Mays
cgagaacgagacgagaggattatttctgcgagagagagagagggttggggaaggtcaggttcagagggaagaggaagatctcagtcaaaagtcaagaccctcgtttccacctcctgcggcgtgattcgggcaatcgggctctgccgctcgtctctcctttcagcatccatcgccgctgcttgagctctgcctccacttatctactacagtctacaggctcttggctggaactaggaagtcatgttgagtggccacgccgtgacactgagcgagaggagcgcctccggtacgcgcttgatcgaggatgtagcgtgcgaggcaggcgatgaggaggaggcggacgccgccgcgagagttgtgtaccgggcctcgttccaagagctgatgcccaactaccttcagtacgacaccatcatctgggcactcatatccctgctgcttgtcctggcgtgggggatcgggctgctcctgcttctctacctgccgtacaagagatacgtgctgaagaaggatatcctatcccgccaactctttgtcaccgagagtaagatagtgtacaaggcgactaggccttcgtacatgccattcatggggatagttaagaaagagattaaagtacctctccatttgattgttgatgttataattgagcaaggctgtctacaatctgcttacagcttatacacatttagaatagaaagcatagcccatgggaaacctgcttcagtggatgaactgcaatttcatggtgtccataatccagattttctaagaaaggttataaccagagaagcctccaggagcatcagagaagtccaaagttggaaaaatagattgtactccgaggaaggtccttctcatgttcaaagtagtggattacactcacctagtgcaaaggtcagagcttccccaatctgtgctgcctttgattctaagggtaaaatttctgacaatatattgctccataagattgaagaacttaatcgatcagtgaagaatcttgagtctctactcgtaagatcacatagaagagaatgatctgatattatatcatctttgaaaattagctcaaattaaacatggaaagaacaggaggaacaagtggagtatatgaactctgtttttctatttagtccttcagatcagataccatgggaaattgcaaagctgctcatgccgtgaaggagcttctagtttgattcaagtttcacaagttatctgttgtacataggtcttgctgattcttccaagtttcacaatttgatgtacaaagaatcacagaatcagtggacagtggtctagggtcacaaagtagatcaacgtacatgtaagcttgtttactgtataaattctaaaatggtaatctgtgccaatacgtgtactgtaa

SEQ ID NO: 123313 - DNA, 1466 bp, Zea Mays
ccagcttccggtcacaactcacaaccggcaggcaggcggtggcgccgcggcgacaccgttccacggttccactccacgtctccacccctgacgcgcggaactggcggtggcgagcgaagctaatggccatccatgccccgctccgcctctgcctccgcctccatgcgaggaaggtagccagacgcgtataaagggcagccagaaattcggatccacctgtatgcgtctccgttcgttcacgccacaggcaaggcacaggggcttgtgagggagagcgaggagcggaggaggacatggtgcacgggacgctggaagtgctgctcgttggggccaagggcctcgagaacaccgattacctctgtaacatggatccgtatgcaattctcaagtgccgttcacaggagcagaagagcagtattgcaactggaaaaggaactacccctgagtggaatgaaaactttatcttcactgtgtctgaccggacaacagacttggtaatcaagcttatggacagtgatacaggcacagcagatgactttgttggtgaagcaacgattccattggaagcagtgtatactgaaaggagcattccaccaacactctataatgttgtgaaaggtgaaaaatactgcggggaaatcaaagttggtctcacattcactcctgaggatactcgccagcggggtctcccagaggacttcggtggatggaagcaatcatcttagagctagatgctttaagggtgcaccagagcacagcgacaattcatgcgcttggagccttcagccgtcgagtacttcatgctaatgcagaattcattcgatttggcttcttttgattgtttcagaagaagtgttattagtgagtttcaacaaaaaatagctccatattgctctatatcccgtattggaaattctaaggccgtttgtgattactgcttacaacaagaagttttgcttctagttcccactacgcttttttttgaagttttgagtggaacatctttgtgttcaacgtttggggaggtgtaggccagtaatactgcaagaaaggaataatttcccttgcagcaacattgttttttgtgatccttgaacaaaattgttcccttgacatgtcccagatgatgagatgagtgtagccatagtttatctctaacttcctgctaagaaactgacagaaagtactttttttttccttctttcgatcttcgtaagggattgaagctgcactgctgcaggacagcagaaggcttctggtgcaaaatgtgcaacctcctcgcctgttcgcctcgctttaatctgtttctacaatgtttttgttttcttgtattgtagccgtaacagtctaaatagccgcgatggcaatcgtgggaagcaattgaacgaattggtgttgttactgtcgtttcggacactgaaagaccatctttctttgcttgctttgccccgaaaggaggaattttg

SEQ ID NO: 123314 - DNA, 973 bp, Zea Mays
ccagcttccggtcacaactcacaaccggcaggcaggcggtggcgccgcggcgacaccgttccacggttccactccacgtctccacccctgacgcgcggaactggcggtggcgagcgaagctaatggccatccatgccccgctccgcctctgcctccgcctccatgcgaggaaggtagccagacgcgtataaagggcagccagaaattcggatccacctgtatgcgtctccgttcgttcacgccacaggcaaggcacaggggcttgtgagggagagcgaggagcggaggaggacatggtgcacgggacgctggaagtgctgctcgttggggccaagggcctcgagaacaccgattacctctgtaacatggatccgtatgcaattctcaagtgccgttcacaggagcagaagagcagtattgcaactggaaaaggaactacccctgagtggaatgaaaactttatcttcactgtgtctgaccggacaacagacttggtaatcaagcttatggacagtgatacaggcacagcagatgactttgttggtgaagcaacgattccattggaagcagtgtatactgaaaggagcattccaccaacactctataatgttgtgaaaggtgaaaaatactgcggggaaatcaaagttggtctcacattcactcctgaggtagtttctagaaatctgcctctatgtttatatttatatatgaatgttgaaatttttaatctaattttaactttaaatccttttgtgatatactgtctacatcctttctcttttggttgccattttggaaactagtagtctccaatatttgaaaattgaccttacttttatatgggtaattaacaagacataagttttatgtaagcattcttaatgaaaaatacaagtactttcctttttttactcaatatatgcccatgctgccgtgcatatagaagcgttggttgctacctactattatgaat

SEQ ID NO: 123315 - DNA, 1089 bp, Zea Mays
caagttctcaaccaccttctccttcggtccttccacaccaccccgatttacccacggcccacgtcttctccctctcatctccccgctcactcccgtccccatcccacgcgatggcctcccgccgacgtggcgcgcagttcgcgccctcccgcgttcccgtggcgccgtcgtggtgtgccaggcccagggcggccaggacactgcaatccaagttcctgatgtgagcaaatccacatggcaatcacttgtggtggagagcgagcttcccgtccttgttgagttctgggcttcatggtgcggaccgtgtaagatgatagaccccatcgttggcaagctctcaaaggagtacgaaggaaagctgaaatgttacaagctaaacaccgacgagaaccctgacatcgcaacccaattcggcatccggagcatccccaccatgatgatattcaagaacggtgagaagaaggactcggtgattggagccgtgccagaaagcaccctcgtcacctgcattgacaagtatgttggtgggaggtgaaatatcaatctgaggcaactagcatgggtgggtatgggtataccgttcttattgaactgctgttgagtagctgtatgtagataataatatgattttcactccaataaatgcgatttaaggatggcaagtcatccggatgaaaggttgcttctggtctagctttaggccccatgtttcattcatctgctaagtcgtatgttgctagtggtccttatctgaatctccatctgattttgatgagttcatggattaggagctgtggctaaaggtaatgtgtaatgttgtgttggtgatagtatgtgtaactgtgtattgtcggtgatttttgtggctattggttagtgctgcttagggtgcatgcgacccactagtagtgagcccatgtgtcaatggaaaatccattgcccttttttcacacatttatatttcgtccttccttctgtcttttttctccacactcatttatttctcacacttctatcactcatcttcctgtactggctaacgttatccctctccgcatgttctactgttgttgcatcttactcgttttt

SEQ ID NO: 123316 - DNA, 1233 bp, Zea Mays
aatagcaacagcaactccctccagcccgctccacagcaactccctcccaagttctcaaccaccttctccttcggtccttccacaccaccccgatttacccacggcccacgtcttctccctctcatctccccgctcactcccgtccccatcccacgcgatggccttccgcctcgccgtcgccgtctccgtcgcagcgcctgcgtcgtggccttccccggtcgccaccgtcgccccgccccgcctcgccctccgccgaggcctcccgccgacgtggcgcgcagttcgcgccctcccgcgttcccgtggcgccgtcgtggtgtgccaggcccagggcggccaggacactgcaatccaagttcctgatgtgagcaaatccacatggcaatcacttgtggtggagagcgagcttcccgtccttgttgagttctgggcttcatggtgcggaccgtgtaagatgatagaccccatcgttggcaagctctcaaaggagtacgaaggaaagctgaaatgttacaagctaaacaccgacgagaaccctgacatcgcaacccaattcggcatccggagcatccccaccatgatgatattcaagaacggtgagaagaaggactcggtgattggagccgtgccagaaagcaccctcgtcacctgcattgacaagtatgttggtgggaggtgaaatatcaatctgaggcaactagcatgggtgggtatgggtataccgttcttattgaactgctgttgagtagctgtatgtagataataatatgattttcactccaataaatgcgatttaaggatggcaagtcatccggatgaaaggttgcttctggtctagctttaggccccatgtttcattcatctgctaagtcgtatgttgctagtggtccttatctgaatctccatctgattttgatgagttcatggattaggagctgtggctaaaggtaatgtgtaatgttgtgttggtgatagtatgtgtaactgtgtattgtcggtgatttttgtggctattggttagtgctgcttagggtgcatgcgacccactagtagtgagcccatgtgtcaatggaaaatccattgcccttttttcacacatttatatttcgtccttccttctgtcttttttctccacactcatttatttctcacacttctatcactcatcttcctgtactggctaacgttatccctctccgcatgttctactgttgttgcatcttactcgttttt

SEQ ID NO: 123317 - DNA, 2372 bp, Zea Mays
aatagcaacagcaactccctccagcccgctccacagcaactccctcccaagttctcaaccaccttctccttcggtccttccacaccaccccgatttacccacggcccacgtcttctccctctcatctccccgctcactcccgtccccatcccacgcgatggccttccgcctcgccgtcgccgtctccgtcgcagcgcctgcgtcgtggccttccccggtcgccaccgtcgccccgccccgcctcgccctccgccgaggcctcccgccgacgtggcgcgcagttcgcgccctcccgcgttcccgtggcgccgtcgtggtgtgccaggcccagggcggccaggacactgcaatccaaggtatatttatgcccgcctaggttactcttctgctgccgggctttgattcgcgtttcgatctgacatgaatggctcgagtcgaccgctgatctgggttactatattctggagatgcgaatagaccgttgagacgattgggttttctgtgtttgaatgtgtagacgaataggaggtaggaaaatcatggcatagcagttctaatgatgatatgttgaagcaaaccgcagtgaataagcgaaggcatgacagcttatttttgtatatgtattcctgcgtgcatttgtatatatcatgttccatcacatgcctcttgttaacatgatgcatctaatgccgcttgctacccatgttgcatctcatgccacttgttacccatgttccatcacatgcctcttgttacccatgttgcatcacatgccgcttgttagttgttacacagtgcagactgtgatccaaatttttgctcagtagatttttttgctgggttgttttgttgttgcgccatgtgcgaggataactgggtgaaatttctgtccaattgcataggtttgccaaatacaaagtttgaaatgtgtcagtataaagtttggaaacttggagtgcaaagtgttgattaaaacgtttacaatatagatgtgcaaagtcttatagtgtacagataaatgttttcaatatccttgcataaagtttctgattttagaatgcaaagtttgaaattatcaagtcctgactctgaaagtaagaagtttttaaaatggtagtaggaaaaaaaaataaattatgttaatattttttaaaagttcagctattagttgatggtcatcgtgtaagtaaatgggcatgcaacctggcccacctggattgctgctagctgggtctgggtacatgcatgaaaatgtgatccacttctcccgcgtactggttacatgtgcatctacatggtatctgtactcgtcgctagtggatggcaacgtgcgcccgctgattaagggcgtcgtccagtatgtgtgatgcaccaatgcatctatgtgactagtatgtgcccaacaaacttaaaaggagatgtacacaaagcacctggagattatttgctgtcatgccttttgtgtactggaaatgtggatgcatcagtaggaactttcctgatgtgagcaaatccacatggcaatcacttgtggtggagagcgagcttcccgtccttgttgagttctgggcttcatggtgcggaccgtgtaagatgatagaccccatcgttggcaagctctcaaaggagtacgaaggaaagctgaaatgttacaagctaaacaccgacgagaaccctgacatcgcaacccaattcggcatccggagcatccccaccatgatgatattcaagaacggtgagaagaaggactcggtgattggagccgtgccagaaagcaccctcgtcacctgcattgacaagtatgttggtgggaggtgaaatatcaatctgaggcaactagcatgggtgggtatgggtataccgttcttattgaactgctgttgagtagctgtatgtagataataatatgattttcactccaataaatgcgatttaaggatggcaagtcatccggatgaaaggttgcttctggtctagctttaggccccatgtttcattcatctgctaagtcgtatgttgctagtggtccttatctgaatctccatctgattttgatgagttcatggattaggagctgtggctaaaggtaatgtgtaatgttgtgttggtgatagtatgtgtaactgtgtattgtcggtgatttttgtggctattggttagtgctgcttagggtgcatgcgacccactagtagtgagcccatgtgtcaatggaaaatccattgcccttttttcacacatttatatttcgtccttccttctgtcttttttctccacactcatttatttctcacacttctatcactcatcttcctgtactggctaacgttatccctctccgcatgttctactgttgttgcatcttactcgttttt

SEQ ID NO: 123318 - DNA, 537 bp, Zea Mays
atggttcttgtgtgcacttacatcaataaggatgtttcagtttcattttccttatatcatgtaagttcactttcaggtgctgggttcctagcaaaagatcttggtttgttggttgaaaatgatacagaggaacaacttggcacagcaaggaaagtcacgatacatcaaactacaacaaccctcatagtagatgcagccagtaaagatgagatccaggcgaggattgcacaactgaagaaggagcttgctgagactgattcagtttatgatactgagaaattggctaagagaattgctaagcttgccggtggtgttgctattatcaaggttggagctgcaactgagactgagcttgaggaccgccaactaagaattgaggatgcaaaaaatgccacttttgctgctatagaggagggcattattccaggaggtggtgcggcatatgtgcacctatctacggttgtccctaagatcaaagaagcaattgaggaccctgatgagcgtcttggcgttgatattattcaaaagtgcctatga

SEQ ID NO: 123319 - DNA, 612 bp, Zea Mays
atgggagacaggggaactcgtggctgggaagaggagcggcgcggccatggcagagctgggcgcagaagcttgaaaccgagcagaggggagcacgcggcgcgcgcacagagcacagaagctgggcgcggccatggacaaacgtcagggagcttcggcggctgggcgcgtggcgaagagaaggaacgctcggctgggagcttctgccggcgagcaggaagagtagaggatggacgcgacgtagggtttgggcgtcgagcggccgagctgagcaacagcggccatgggagaccagagaagaaaggcctcggctggggagggaaatctgagctggggcgcggctcaatccgtgctaggcgagcagggatcctaggacgcgcgtggggagcaggggcgcttggaaaggggcctagacgagctggagcttggagcttcgggacggcctgggcgcatggaagaagctccagggagaggggcgcgccaccatgggcgagctggagcgccgatagaggacagcaggagggagatgaagccgaggaaactgcgcagcggccaggcgagttgggcgaccgcggcattggggctggacgcgggaagacgtgcgcggccaggtga

SEQ ID NO: 123320 - DNA, 837 bp, Zea Mays
atgcgagcacgtgtgaagcccgatgacaacgaggatagagctcgtgacacaaacaatgacggcgtgactcggcaaactgaaacagggagccgagcgccaacgacaaagggagcgacatggacagacctaggtgttctaggaattgaatggagaaggcgtgagcgcaagggatatgctcggccactagggagccggacgagacggtggatccgagcagagaggaaggacgtggtccgagctggaggaacacgcggcaggggagagcgcgcgcagggaggagggagaagacctggcagccggcgcgcatccgtggcgagcagaaggccaagcgccggccatgggagacaggggaactcgcggctgggaagaggagcagcgcggccatggcagagctgggcgcagaagcttgaaaccgagcagagaggagcacgcagcgcgcgcacagagcacagaagctgggcgcggccatggacgaacgtcagggagcttcggcggctgggcgcgcggcgaatagaaggaacgctcggctgggagcttctgccggcgagcaggaagagcagaggatggatgcgacgcaggggttgggcgtcgagcggccatgggagaccagagaagaaaggcctcggctggggagggaaatctgagctggggcgcggctcaatccgtgctaggcgagcagggaaccagggacgcgcatggggagcaggggcgcttggaaaggggcctggacgagctggagcttcgggacggcctggcgcatggaagaagctccagggagaggggcgcgccaccatgggcgagctggagcgccggcagaggacagcaggagggagatga

SEQ ID NO: 123321 - DNA, 1558 bp, Zea Mays
atgggcgctgccacgacgagcgggggggggggggggggctccgcagggcccaggagccgtcgctcgctgcccgagaccggatcgacaggtgcggttttctgccacgattttctgcaggtggaggagacaagggagctacggacggttgttgaggctgcaaagcagctccatttgaaggaacatgtggtattggatggttctggcaatcctgtaaaattagctgctacagtcgaatgcaagggtattgttgggagtgatgacagactggagagaagagggctggagcacccggatggttgccctctctgcgaccatgaacaggaaaccactcaacatcttctagcttcttgcatttctggcacatcattctttcaccttttgggttgggacacctctctcctggggaacatgtgtcgtcttttgcttattggtggaaagaggtcccgcttcctaccagttaaggcgacatcagatttgcagctagtacagtctgatctatataccttggttgatggcttcgttacacgtaattcagctagaacaaatccatcaaatccctcaattgaacttggtcctgagttcaagaaggttgggagcttccttggtcgcttcaagtccatacctagtattgttgagcttgacaacttgaaggtttccggtgatgtttggttcggttctggaattgtactgaaggagaaagtgaccatcactgcaaaacctggcgtcaagctagaaatcccagacggagcagtgatggagccaaacactaataattcagaaggatccctggctggtgctgctgtctgggatgtattccgcaggcaggatcttccaaagcttaatgactatctagctgttcatcgggaagaatgtgcagctagatgtcaagcagtgtcttctgttaaatatcctatttatgatcaaacagtgtaccttaacgattatcataagaagatgttgaaggatcaatatgagggactgaagacaatcgagcagattacaatggactcagcttcggtcgagaccaatatgttcaagctctgcaaggtgaggtctgttcagtttggccaaaaaggcatcccctacctgaacacctacaatggccgcaccatccgctaccctgactcgctcatcaaggccaacgacaccatcaagatcgatctggagatcaacaagatcatggacttcatcaagtttgacgtcgacaacgtggtcatggtgactggcgggaggaacaccgggcgtgtaggagtcatcaagaacagggagaagcacaagggcaactttgagaccatccatgtgctgcttggagctttttgctatgtctagttttctcctatttgttgtacaggaaaacatagaatataattcaaatttggtggtcgcaaaagtgtggagactttaattcatataaagttaggcttaacattagtgcaaacagttgtattttagtttagatttagagtacacttatgtatgcgttgtttgacaatgcttatttatgatatattgaatggtacttatttatattatattaattataatgttgttcaatata

SEQ ID NO: 123322 - DNA, 931 bp, Zea Mays
cttccttccggccgaattgcgagcgagcgttcctctccgtccgcttccgccgtttgcccgtcgatcagttgttggctgccggccgggtactaccgcctgcacgagcagcggctagccacagcccacagacagacgacgtcaggtcttggcaggtgtgcaagcagacagagctcgctcggtcgccatgtctttcaccggcacgcaggacaagtgcaaagcctgcgacaagacggtccacttcatcgacctgctcaccgccgacggcgtctcgtaccacaagacctgcttcaaatgcagccactgcaagggcgtcctctcgattagcagctactcttccatggacggcgttctgtactgcaagacgcactttgaacagctcttcaaggagacggggaacttctccaagaaattccaaggtggaggtggagcatcttcaaacaagaacgacccggcaaaggctccgagcaagctgtcatctgcattctctggaactcaagacaaatgcgcagcctgccagaagaccgtgtatccattggagaagatgacgctggaaggcgagtcgtaccacaagggctgcttcaagtgctcgcacggcggctgcatcctgaccacctcctcctacgccgcgctcaacgggatcctctactgcaagatccatttctcgcagctgttcaaggagaagggcagctacaaccacctcatcgagacggcgcagaccaagaagaacgaggccgcggaggccgcagaggagccatcggtggacgcatgcgccgcggctgaggcggaagcgtccgcggaatcggcgtagaacgaagagtagccgtgtgtgtatctcctaattatacgaactctgcattcagtaagtagttttcacaaatctatatatgttgttgttatgctgcagcttggttttggtcagtctgggattgta

SEQ ID NO: 123323 - DNA, 991 bp, Zea Mays
cttccttccggccgaattgcgagcgagcgttcctctccgtccgcttccgccgtttgcccgtcgatcagttgttggctgccggccgggtactaccgcctgcacgagcagcggctagccacagcccacagacagacgacgtcaggtcttggcaggtgtgcaagcagacagagctcgctcggtcgccatgtctttcaccggcacgcaggacaagtgcaaagcctgcgacaagacggtccacttcatcgacctgctcaccgccgacggcgtctcgtaccacaagacctgcttcaaatgcagccactgcaagggcgtcctctcgattagcagctactcttccatggacggcgttctgtactgcaagacgcactttgaacagctcttcaaggagacggggaacttctccaagaaattccaaggtggaggtggagcatcttcaaacaagaacgacccggtactacggttcctcagatcctctaaacaaattattcaaatctgacaagttataaaaactttattggtcatgtcatcatatgtaatgtactacgtggttgactccttgtacacacgacgccaattcgaaaatctctgcaggcaaaggctccgagcaagctgtcatctgcattctctggaactcaagacaaatgcgcagcctgccagaagaccgtgtatccattggagaagatgacgctggaaggcgagtcgtaccacaagggctgcttcaagtgctcgcacggcggctgcatcctgaccacctcctcctacgccgcgctcaacgggatcctctactgcaagatccatttctcgcagctgttcaaggagaagggcagctacaaccacctcatcgagacggcgcagaccaagaagaacgaggccgcggaggccgcagaggagccatcggtggacgcatgcgccgcggctgaggcggaagcgtccgcggaatcggcgtagaacgaagagtagccgtgtgtgtatctcctaattatacgaactc

SEQ ID NO: 123324 - DNA, 903 bp, Zea Mays
atggcaatcgggtacacaatgtttgctaacgtcatcgactcgagccaagtgagggttcaacgtggagattcgtcgaggtctgctgctcgtagctctcgtcgctccactcaagatccagcagaagtggagcaactgcgagaagaacttaagcgacatcaggattacttgaggcaacaagctacgcaacatgaatactatgctacacagattcaacaacagcaaacactcatacaaggtgtcggtcgagggggggttcctcttgagagtgacattacgttgctcaagcaaaccagttgtggtggcccaattcttacaaaccaacctactgcaggtgtcccatatgtgtctgtagaaactaccaagagctccatgacatctaaacgtctccagtctcatcttcagagtttgagtcctcctgaacacctgtcatcctcaaatatgattcagctaccaggacagccatcatttgcaacatcagaattccctcaaatgcagttccaccataaagttgttgcaccaacaaatgaattcttgcagaaccagatgagaagctaccctccacaagatgtgtctcatccaagaccattcgatttccatcatcatactctcccaccagcagttccttctaaccagcagccttctaccattcctgttgagaatgctccagtacctcatcctaacagatggtctatcctattcatctcatcgacctccatatgctggtggcaattcttctataattcgtgggatgtgttcgctgagatcctggagaaggccaatgtggtcactactcctggcactggatttggactgggtggtgaaggctttgtgagggtcagcgcgttcgggcacagagagaacatcattgaagccacaaggaggctaaagcagctgtataagtga

SEQ ID NO: 123325 - DNA, 324 bp, Zea Mays
tattggatgatcttgacaaggagctcatcacttatgccattagagttcgctaatggtatggctggcactttccaaagctcatcaaaatagttttagataatatttagtatgccaaagttgtgaaggtgatgggcaacagagctaatgcaatcaaccttgacttttttcagatattgtctgatgaagagctagaaacatatctaaaggtgattgcagtaatatccatgggaacagaagttattgaacgtgacttgttaaatatcagagagctatatgatcatgtgttggccctactatatgactatttaagaagcaagatgaaca

SEQ ID NO: 123326 - DNA, 840 bp, Zea Mays
cgcccacgtagtctattcacgtggggccaccggacctttgttttccccgggtgggcatgcataattgcgaggcccgcccggccccagtggagaatcttctcgtcatcagccaactagctgctgctacgtgccagttgggatttgtcaaagcagctgttcgtcccattaactcgcgcaggccaacgactcggactggtccaagcggaagcggtcgacgacggcatgctttgctaccagtattcccttccctgtgtgatattcatattgctgctaatccgattccctgtactccaacgccctccaaaaacgatactctaactccactgtacaccgattcaagcgtgcaacaagtgagggcctgttcgtttcttcgggaatgaacctggattcattccagctcataaaaatttatataaattagagaagtaatccggctaagaactatttcagggctccaatccgtgaaaaccgaacaggatctgaagaagaaagagacgaaaaaaagagggtttcctgccggacgcaactctactccactgtatggcatctagcgtttcaatgttctcattatttggccggcccaactcgccactaaagaggcccaccgcccaccacatcgtctccaccaataataataatcccgttctaatcatcgcaacgtgcactcggagcggggagcgggggcagaaaaatctcctccgaaattcgaatgcgcagcgtcgtggagcgtgcacgtcagcatcgaaaaagggtctcggcggccatcgtcaccggtggtttccctttccatagtccataccccgcgcgcgttgttttcggtcgtctctgcgtgttccagaa

SEQ ID NO: 123327 - DNA, 562 bp, Zea Mays
ttcaggtcatctcacctcgaattgacgccgtcggcggccgtggatggcgccagggccttcggctcgctggtcacggctgcgcccgcggcctcgcgggcaatctgattccgccgcagccactgctgctgttgctgctgctgctggtgactctggtgctgctgctgttgctgctggtggttgtggctgtggcggtgctgttgctgctgcctctgcgcgtactgctggtggtgatgcgcccccgatgtctgcttctgctgctgctgctgctggtggtgctgatgcggctgttgcggcgatgggccgcggccgtagtagttaggggtcccaccgcggccgttgcccacgcccgaaggatacctggcgcgtggatccatggtcgcgaaggaggacttgcagttcggatccggaaaaggatttgggagaactagaagattggctcttggatcaggggaccgatttcgagccccttttgcccttccggcaggggtcgtgggtggggaggagcgacggaagggtagcgtggccggatcgtcgaaaccttggcaacggtgtgttaggatta

SEQ ID NO: 123328 - DNA, 589 bp, Zea Mays
taaatggcgaccatgccaagaagcaaagggacatggttgcaagggtaaaagacagcacagcacggtgcagcttaccactgattattggcaaacttaaaatcacttcactaccgttcagactccagacctcaagtgtgatggccgacttgtcacacccattaaccaatctgaggcgcacatccccaagttccacttgggctaaaatgtcttttacccttgtgcgcggcacccacaggccacacgcccagaaccagcaacagggttaaaatgtcctgtgtgaaactgcttaacgacacggcgtacggaaaacaagggaaatacaaacgaactcaaagcaggacagggtctaggaataggcacctagtaatatacactactttgtgcctagtgtggcaggacattttccctcatatagccataatagtgtcagcatgacaaggtgatcaggaaaagtcgggtgcctcgtctcacgtaatccaccaacttagaattgtctccgatgcaccaaatgagatcaacaccataaaacctgatgagctggtatttacaaaagttgtctccttattaatcacggagaaatgaacaaaga

SEQ ID NO: 123329 - DNA, 1167 bp, Zea Mays
ctaaaaacaacaacaaatcgacgaaataaactgtcatctataggagacggtacggggacaccacacgctccccgcactctctctctctccctccctccaactcattggcagcagcagcagcagccgcagccgcgagggccaagcagtggggggacaaggaaaagggccgacgaagaggaaaaaggaagaacgcgtcgcggagccatggggcttggccttggcgtgcgggcggcgcccttcacgtacgcggcgcacgcactggccgtcgcggcggcggccatggttctcgtctggtccatccagttccgcggtgggctcgccatcgagtccaccaacaagaacctcatcttcaacgttcaccctgttcttatgcttatcggttatgttattatcggcggtgaagctataatggtgtacagggtacttccaacatcgaatcatgacacaactaagctgatccatctaattctccacgggattgcactcgtccttggtgcggttggaatatactttgctttcaaaaatcacaatgagagtgggattgccaatctttacagcctgcactcttggattgggataggaacaattactttgtatggtattcagtggataattggattcgtcacgttcttcttccctggtgctgcgccaaacgtgaagaagggtgttcttccttggcacgtactctttgggctctttgtctacatcttagcactggctaatgcagaactcggctttcttgagaagctcactttcctcgagagctcaggtctcgacaaatatggcacagaggcattcttagtgaacttcacagcattggttgtcgtgttatttggtgcctctgttgtggtggctgctatagctccagttcgccttgaagaaccacagggttatgatccaattccagaaaactagcgcaaatgaaatgtacagcgtatgcagttgccaagattggctgttaccacatggagataagatattcatgtctctttattgacgaagaaggtgatggaattatcacaataaagatgtagacataaatgtgtgtatatacattctgtgacacttcaaagtttcagtatatgcaaaactgaatatgctgcttcataaatgtgtgtatttgctttcatgaatatcctgcttcataatgtgctatctctattctct

SEQ ID NO: 123330 - DNA, 1379 bp, Zea Mays
ctgtcatctataggagacggtacggggacaccacacgctccccgcactctctctctctccctccctccaactcattggcagcagcagcagcagccgcagccgcgagggccaagcagtggggggacaaggaaaagggccgacgaagaggaaaaaggaagaacgcgtcgcggagccatggggcttggccttggcgtgcgggcggcgcccttcacgtacgcggcgcacgcactggccgtcgcggcggcggccatggttctcgtctggtccatccagttccgcggtgggctcgccatcgagtccaccaacaagaacctcatcttcaacgttcaccctgttcttatgcttatcggttatgttattatcggcggtgaagctataatggtgtacagggtacttccaacatcgaatcatgacacaactaagctgatccatctaattctccacgggattgcactcgtccttggtgcggttggaatatactttgctttcaaaaatcacaatgagagtgggattgccaatctttacagcctgcactcttggattgggataggaacaattactttgtatggtattcaggtaaggccatgcatgtgatggcaaagttaggtgtcttctttgactatgattttgacacactaacaacactactgcatttattttgaatgatttgtttttttattgaacaaaccagagatatactgtgttttttttccttcaaaatataaactttgcatatgttgccggtagctggtgagctttatacttgctcttcttagacagtttctgaaatgagaaactgcattctagtgtgaagtgaacactcgtatagttatgcagtgatagaatgaccttatatttgccttattgatcacagtggataattggattcgtcacgttcttcttccctggtgctgcgccaaacgtgaagaagggtgttcttccttggcacgtactctttgggctctttgtctacatcttagcactggctaatgcagaactcggctttcttgagaagctcactttcctcgagagctcaggtctcgacaaatatggcacagaggcattcttagtgaacttcacagcattggttgtcgtgttatttggtgcctctgttgtggtggctgctatagctccagttcgccttgaagaaccacagggttatgatccaattccagaaaactagcgcaaatgaaatgtacagcgtatgcagttgccaagattggctgttaccacatggagataagatattcatgtctctttattgacgaagaaggtgatggaattatcacaataaagatgtagacataaatgtgtgtatatacattctgtgacacttcaaagtttcagtatatgcaaaactgaatatgctgcttcataaa

SEQ ID NO: 123331 - DNA, 223 bp, Zea Mays
tctttttctccctgtcttcttccacacggcgtgcagcagggagctcagctccacctccctgcgtgctatctgcctcccatgcccgacggcctccacagcgcagcagccatggcgcggcaccctcctgctgtccccttggtcggagttctgctcggccagcagccatggacgagcttcttttctcccctgctgttcccctgcgtgcagggagcaccaaggccag

SEQ ID NO: 123332 - DNA, 423 bp, Zea Mays
atggaagggacgtcatcgccactagatccggaagagagcaaccatggggaggatgacccaaagtggcgacattgtatccgtggagacgaggacgacactgcctccaagtctcttccaccggcttccatcgacggtgcaagtttccctagagggtggaacatcgtgggatgcaggccccaaggaacaacagatattttgagctgtaaattagaacttatatgtgcatatacatgtagtcatgtatcaaatccgccgttcagtcatttagtgctctgttcaagtgtggatcctgtttcccaccaagtcaaggtttgtgaattcgggagtgctagaatcttgatcttccacaagagaatgcctccagaagcaatggatacgcttctagaaaaagataaagtgccaaatccatgctatagagtatag

SEQ ID NO: 123333 - DNA, 1242 bp, Zea Mays
caagtgaagtcctacgtgatgcggacgctgcaaccaaccggctccctgcgtcctgctctgcagctgctgaccccttctcccgcctccgaaggaaaacgggcgggcaaccttctcgtcccttccaaaatcccgagtttccccccgatttcgaccctccgttttccccccgcttccttctctgctccaccgcctcaggaatatagatagtcggagaaaaaaaaaactgagagagaaagagagaggaggaggaggcaggggagtggaggggaggggaagcatcgcaattccgaacccccacctcgccgctcccaccaccgcggccgggttgcgtccgtttcgattgcccaggatgagcaccgagtccggggagctgctcgggatcgaccccgtcgagctccggttcccattcgaattaaataagcagatctcctgcacgctgcagctgacgaacaagacagacaagcaggtcgcgttcaaggtgaagacgacaagcccgaaaaagtactgcgttcgcccaaacaacggcatggtggcgccccggtccaaggctgacgttgttgttacgatgcaagcgcagcgggacgtgccaccggacatgcaatgcaaggacaagttccttgtgcagagcgccactgtcgccaaggaggtcgtgccaaaggaggtcactggagacatgtttaccaaagattcaggcaatgtagtggaagaagtgaagttgaaggtagtttatgtagcaccatcgtcctctcaaagcgaaagatttgaggatggtaatctcggcagtttgagttatcaagaggaaacaaaggaacctaaagaatcagaaaaaataatcactgagccatttgctttgatttcgaaactgatggaggagaagaattctgctattgaactgaacaacaaggttcgacaagaattggattttctaaggcgagacatcagcaggcggcatggtggtttctcattagttttagtactggtggttgctattctgggaatactgctagggttcctcatgaagagatgagtgtatgtaatgatttatcttgtttggccttttctgaactaaacaaaattgtatgtgctctgtgtgcttgctgttgtacaactcagtgatctgttaatcatagtatctgaggcctattgtaattttctgattcatattataaactttagtcaatctgtcatagttactaacaccagctgttatcagcttgcaagcgacttgaggtctggaggtgt

SEQ ID NO: 123334 - DNA, 82 bp, Zea Mays
tacaactcatttataataatctcaaggtgattcaatgtgtatcaaagtcagttaatacaaacaaacattgttgtccagactt

SEQ ID NO: 123335 - DNA, 381 bp, Zea Mays
gagaatgggaatgagatttgcggggaggggggaatgagaaagacagtagtagacaggaatgagaatgagctttgcggggagaaaggaatgggaatgacagaacacggaatgacaaccgagaatgagaatgggctttgcggggaggggggaatgggaatggcagaacacggaatgacagcctacctcttaccgtcttaataagtagtagagatagcgcatgtcgtttggttagagtacattccagtgtgtgggtagaaacggagaatcaagttgaaaccaagtcgccgaccagcaatagagacgaaaacgaaccgaaacgaacgaaaaaacctttctcggcctctgtatccgtattttattattgaaataatcgggaacgag

SEQ ID NO: 123336 - DNA, 2481 bp, Zea Mays
ttctctcgcgtcgttctcccgtagtcccgtgccctcgcgtgcgctctatctgtttctggtggcgacgacttggcggtccccgctgccgccgtgcccaggcctctacttcgggaccttcaccggcgacgagcacccatcgggttgcttcgcaaaacttccaacatccaggatacaattaattacgattccttcaactttatctcgatttataggaggttgcacagagcccatccaacagggtgtctcagacatactgatggatggggtgcccaatatccttgagaaatcatcacatgaatgcatgtactcttggtacttcaccagggaagaactagagaaattttctccatcaaggaaagatggtattactgaaaacaaggaatcagaaattcggcatttatattgttcatttatccgggatgttggcatcaggctgaagctacctcagatgacactagcaacagcagtcatgctttgccatcgcttctatttacaccagtcccttgccaaaaatggatggcagacagttgcaacagtatgtgtatttctggcgtcgaaagttgaagatactccttgtcccctggaccatgtagttagagtggcctatgaaacaatgtataggcgggacactgctgcggctcaaaggatccgtcagaaggatgtttttgagaagcagaaagcgctcattttgatcggagagagattgcttcttacaactattcgatttgatttcaacattcagcatccttatagaccacttcttgatgccatgcaaaatcttggcatcaatcaaaaagaagtgaaacaagtagcatggaactttgtgaatgactggcttaaaacaacattgtgtctacagtataaaccccagtacatagctgctggttccctttatctggctgcaaagcttcacaatatcaagcttcccttgcatggagcgcatgtttggtggcaccaatttgatgttgcaccaaagcctctggaagccgtcattcatcaaatgatggagcttgcggctttgaaaaagttgatgcctgctcgacccaatccggttaagctgaaggaaactttatgtgaagctaaactgagcttatctaatagcccagactctgtgttgaatcaatcaaacttgttaataagcagctcaagtcctgatattggcgagcccagtgacaaagtgcaggtggattcctgccaatacttgataagcagtcacatgggtgattgtagggtctcaggtcctgacagcagttcgttgaatacttgtgctaatagaaatgtctcttgtaaagcacatgatgaagagagcttggatcaggccttaataatcaaacatgacagtgggatgatgccttctagtaatcagacatcattatatgctactgtaggcactgagggcagtgctgaactgaagcaggatgtaagccattgtaatgacttcaatatcagagtcaatgacgaaagcttgaaccaggtgttaagaaatcagcatggtgatgctatcccattacctgacgtggtatcgctggatgccaaggtggacaaggaaaggagttggtgtgtggaaccattaattgcaaactctgattgctgtactgacagtgttaatgtggatagcttgtgcactgatcagagattggctgatgctccttcaggccccacagctgatgcaccatccatgctggccgaggaggaatcttatccttttagtgcaaagcttgaaaatattgatgttgccaggatcaaaggtttattgatgaagaggaagagccggagagagatccaagaccgagccattgcttcagatggtctaagtgaagaagactggatcgagagggagcttgaatctgggattgttacaaaccaagaagccaattgtgctgccatctcagacgagctaagtgacgaagcctggattgagagagaactcgagtcagggattgtggtcggaccaagaaatgagcaagcgatcacttttgatggtttgagtgaagatgattggatcgagagagagctggagtctgggatcatcgttgagccagcacctgctaccaagaagcggaagctggagtcaagctgttagctctgcattcgaaggccagattccaagcaggtgaataataacagatggttgcgagtaggaccacatcgaagccaagagatacatgtcgcacagatgggaggatcaatattatcctttttttatttctttataaccaaacaccttggagtactttgacacaaggggtgtgttcacagtgggatctccccagtttcttgaatgcagaaccgtatccgttgtatttgttccttcttgtcgtgagtgtaaatctagcgtgtccgaagttcggttttagattgtaggtgtaactgtagcagggattatctggtgttaagcccaacgagaaaatgattcagtgtaactgttactgtaaggaaagaagttattcagtgtagatttatggttaacacaagaagagg

SEQ ID NO: 123337 - DNA, 236 bp, Zea Mays
gactttgtttgtgttttatacaatttttaaacaactggatgggaagttcacggtcatgtttagtgagcatggtgctcgaaaattccgttctgctccttaaataggccgtaacttatgctaaataacatggatatcatttttgcattcacggttttacatttttcaagtgactcgcatttcaaatctgaattatccgaggaaattcaattaaacaaacaaaatctaatagttatagc

SEQ ID NO: 123338 - DNA, 175 bp, Zea Mays
ggagccaaggcaatgtcagcaagctgatttttcagattggaatctatggttctttttaaagatcgaatatgttctagcatcttaaaaagatttgtcagaatgtaaacatttgttctgagatcatttaggcctcaaacagaatttcttggacttatttcgttggagggaatgggac

SEQ ID NO: 123339 - DNA, 175 bp, Zea Mays
gccttgttcatctctgatctctcaaaatacaactatgcctcctcgcatctcatgcacatggtcaatcgaccgtcgacacaaggaaacggagcaagggggcaaaaaaaaaaaaaaagagagtcaaactaatgagaaagaaaaagaagaaggatcgttccccatgggaatcgggatc

SEQ ID NO: 123340 - DNA, 131 bp, Zea Mays
tttttggaagcttaaggaaaaaattaataagtttaaaagatttgatttgggtttctcttatcctagtatatctctagagttattatcggatatttttgaagtttgaagattttttttgtgttttaaatgca

SEQ ID NO: 123341 - DNA, 2188 bp, Zea Mays
aaatcattcgaaacgccaaaataaataaattcgtgcttcagtgacggcaccaacagcgacccgttcgatacccggattcaaaaccggagaggaatccatccccaattcccttcctccccccaccccgtcgcccaacagatctggttctccttcccaaacagttcgaattcgatcgcgccacggtccgtcacccgcgccggccagatttatgcagccatgcagagcggcggggcccggtgcagtttgactactgccgctgccgctgctacggggctgaggagggaccactttcgggatccgcaatggcgagcctgtcggactcggcgggcgcaggcggcggccgcgccggcgcggagctgatggtgccacagttcctactcaaggcgctgcacgccatcctcgccgtgcggtcgccgcgcccgcacgcgccgccggccccggcggcgtcggcgtcggcgttccggaggcgtgaccggtggttccacctgccgatccacgcgccgccgccgccgcccgcggcggagcacctgccggacccgtcccccggggagccgctcgtggtggacgtgtacctggccccatcgggcggcgggccagaggaggtgctcgagaggtggaccgtggcgtgcgagccctggccgtcgcccgccgcggccgccgccgtcggggaggggctggcggtcaacagggcgtacaagcgatgcatcacgctgctcaggtcgctctacgccgcgctccgcttcctcccggcgtaccgcgccttccgcaggctctgcgcgtctggccaggtgtacaactactgcatgggccaccgcgtcggctccttcgccgcgcccttctcccgcgccgaggaggcggccatgcgcaccaaacgcctcgcccccgtcgagacccagctcggccgcctcgtcgtctccgtccagtacctccccagcctcgccgccttcaacttcgaggtcacttccctcgcgtccgccgcgatcatcacggattacgtcggcagccccgcggccgagcctatgcgtgccttcccaccttcgctcacggaggccaccggctcgccctttccgcagccctcgcggcgccccaacagctgggcgtcgccagcgccctggccgcacacgctcgggcaaccggctaaattctcgcctccgccggcccattacgcgtcgcccacgccctcgccaccgacgtttggctatctgcactcgcggtttagcggtgagactgcaccaatgaccataccgcaggccggcggtggcaggggcactgtgcaccatcggaacatgtcggaacccagtagagccttcatgtttcctccaccttcgccaaagaatgtgcgaggggaggcagggatgcaggagtcaccgacagagatcaatcggtccttcaagagggcggatggcatccgcatgggagatctctattcaaacttgccgtctggttctaagattaaggacactaaggatgaatctggcaggttctctggtgtcttctcttctagtggttcaccaagacatggtttctcaagaagttcaagcagattgtccatgcaggatgatactgatgatgcagattttccttttgctgtggatgatgtttatccagattcacggccagggagtagtagtggaaaggacacaggggatcaggctggttcgtcatcccataaatcccaagatgctgctgttgggtatctcgtccacctgctgaaatctgcacgtccactgagagattctacctactcatctcatacatcaaggggtgaatctaccgaagcaggaagcaccagctctttcttgtcccgcaggacatccgacgcactggaggagtttgaatctttcaaggaaacaagggagaacctgctagcacgtagtagatctcggctgcaagattcattggataagccctagtgttgatgcagtctgtggttcgattcctcaaaaggtgaagggtccaaactgtagagtaaagatcatatggcgagcctgggtaaactctttatttcagactagtccgtgtgtaaatagctaattaactggcgcttgattccgaaagagaatacacaggtcgccgttgattctattgttggaaacttgtcattcttaaactcaaagcaggaatatcgtgtgcctttgttcatagtgtttgtttacaagtgaaatcaacatgataatccatctttatc

SEQ ID NO: 123342 - DNA, 3361 bp, Zea Mays
agaagaccctccccaagtcaccgaacaagatcgtcgtgggcagcactcgccactcgctctcgcaggcggtgaggcggcgctatcagagcggacttcgccctccccccacccccacccccacgtccccctacaggtagccctgcaaccatggccgcggcggccgggctcagccgccggtgcaccgtccgctgacaagtcgacctttctcctacgacagcaaccgtcttcgtccggtcctggctgtttaaaaggagaggaaaggcaggaggaggggaggagttagtgttaagccaatgggggctattggaggcaatgagtcggtgcagtgggataaagtggctggagctgatgctgttaatggcggcggaacaagtgtgggcaggatggacaggatacaggtgctggtcaggctgaggccactgagcgagaaggaggttgcgaggggagagcctgcagaatgggagtgcatcaatgacaccactgtcatgttccggagcacgttccctgatcgacccaccgctccgacggcatacacatttgatcgggtttttcattctgactgtagtactaaagaagtctacgaggaaggggttagggaagttgccctctctgtagttagtggcattaactcaagtgtttttgcatatggacaaacgagtagtggaaagacttataccatgaatggagtaacagaatatacagtagcagacatatatgattacattaataagcatgaagagagagcatttgttctgaaattctcagcaattgaaatatacaatgaagctgtaagggatcttctgagtgcagaaaacactcctcttagactctgggacgatgcagagaagggcacctatgtggagaaccttacagaggttgtgttaagggactggaaccacctcaaggggcttatttctgtatgtgaagctcaaagaaggacaggggagaccttcttgaatgaaaaaagctccagatctcatcagatactgagattgacaattgaaagttctgcacgggagttcctagggaaggacaagtcaactacacttgtcgctagtgctaactttgttgatctagcaggaagtgagcgtgcatctcaggcgttgtctgctggcacgaggctaaaagaaggctgccatattaacagaagtttgcttgcccttggcactgtcattaggaaactaagcatggggagtaatgcacacataccatacagagattcaaagctcacacgcatattacaaccatctttaggaggtaatgcaagaacggctattatctgtacactgagccctgccactagccatattgagcattcaagaaatactttattatttggaagttgtgcaaaggaagtagttacaaatgctcaggtaaatgtggtcatgtctgataaagcactagtaaagcatttgcaaaaggaagttgctaggttggagagtgagttgcggcaaccagcttcaaattccagtcttgaagcattagtaaaggaaaaggataaccaaattagaaagatggagaaagaaattaaagaactcaagtcacagcgtgatttggctcagtctagattgcagaatttgctggagactgttggggaccaagtgaagcactcgggctcagggaagcgttcagcccgcagtcctccatcaattggaatatccccaggcatcagcagggatgatagttctcagatctctcacgatgattcagatcttttcaaggacgtgcgatgcattgggaccagtggaacaggaggaaatgaacagttggacctgtcagctggtgaaagcagtagccttcaaggtttaaacatgaattctagtttgcatggaagcggttcaaatgcatcagtgaattctaggcgctcaaggctccttagtgaatctcctatcacattggagcagcatttggagaatatcaaaaggccttttgttagtcttggcagagatctaggatcgtcgacacataactcatcaggctccagaatacttggtagaagcaggagctgtagatcacttatgggttctaccatgtttgatggcatggagatggatgatggcacccctctgcatagaagtttggttggtttccctggaaggcctgaagggaatcatagaaggggatcaacaccgaaccatgacgcagaaagtgaaactctttcaagagcaggatccgtagtttcaaccaagacaaatgctgcatgcgatgcagagtttactggtataggtgaatttgttgctgaactgaaagagatggctcaggttcattaccagaaacagttaggcaatcagattacaaatggagaatttgtagacataaagaacattggtttggacccgattgctgatgcttcgcaatcaccttctcgctggccattagaattcgagaagaaacagcaagagatcatcgggctttggcacgcgtgctgtatttccttagtccacaggacctactttttcttgctattcaagggagaacaagctgattcaatctacatggaagtggagctccggaggctatcattcctcagagatacctactctcggggaaacacccctagcaatgcggtggtaggcagcttgaactcttcccccgctgcgagcgccaagaagctgcagcgtgaacgggagatgcttgcgaggcagatgcagaagcggctcacggcagaggaaagggagcgcctgtacaccaaatggggcatttcgctggactccaagaagaggaagctccaggtcgctcgccggctctggaccgaggccgaggacctagaacatgtcagggagagtgcctcccttgtcgccaagctgatcgggctccaggagccagggcaagtcctcagggagatgttcgggctcagctttgcgccgcagcagcagccgccccctcgccggcgatcctccaatggctggagatacgggatcccttcgttcggctgatcggatcggatgaacggtgcgagcgactgacctaagagatgtaactaccctcccccccactttttttttattatcttggtgtggtgtacggtaccttctgatttctgtagttttttagtaggatacctaccgggccatcatttgtttgtgcggctggcttcgtgcatgcttttctgcctagccgccgccgatcaggcctcaattgctgacgacatcgtcctatcctacgaccgtaattgtaattcctgactcttctgtgttatcgtgttgacgtgcgctgcaacagcgcaatagtaacgtgatgttccattccatcaggaaaaaaaatcactgggactggtccctatagctaatcatggtcatctaccgtgaactcatgatatttgtctgtctgcatattgaattactgcataaatttagaagta

SEQ ID NO: 123343 - DNA, 606 bp, Zea Mays
aagtggaccctcccaagtcttcttctccccacgacttctctctgtctgcacgaagcgcatccgccgccggccggccggatcttcatcttctcgcgcacccagggtggagcagccccaccatgcctggtcctcccctcctctcctccactaatgctgccccatcactgctcctcttctcccgctagccgtcagtttctcctccacttacgactcgcaaacgtctgtagtaaagccgccgccattaatgaccaataaaactccacctgcgtccgttagtctctcagcctcgctcctagcctataaatcgaacaccgcggatctacgtgcttgttactagcctctcttttcttctctcacgctgtcctatgtgctgctcacggagccgagccaccgccgtcatcatccttcgccgtcgtgccgtttcagagcctatccgccgccggtgaagacttcctcgtgaccttggacgcccgctcttccactttcctgtgctcggcaacgccccggttcgcctcgacgccgccagccgtggtcccatccacctctgcgcaggtaacagcaagaagctgattgtgtggtagaggatccgaattcgtgtgaggacga

SEQ ID NO: 123344 - DNA, 602 bp, Zea Mays
gagcaccatagggattggttccatcggcctgtagcgtcacgccgctgccgccatcgcgcttagaatcgctgtcgcctccatggatggtatgcatgctgccatgcatgatgattgatgcattaacgttgcagtggagatcaaggaacggatccaccttgcagccatggccaatgctcacacggacgcacacaatgttgccatagattttgctactcctgttgatgtcatctctcctatcgttgtcgtcgacaatgcacatggcaacaacattttgtccactgtcaagacaagtgcagagctgggaagccctaaaaatacaacatctactgggctcatcatttgttcctcgtgttgaaggaaatttgaagcccttgttagggatgacattcgacagtctagtggatgtggagaatttttacaaagattatgcacatgatgttgggttctcagttcgtatcggtcaacataagaagagcaacgaggagatagtagtgaagagattctattgtttaagggaaggttatagaaagaaggtcacttttacggttgataagcctggaaaaaagagtacacacaatgtgatgaaacgaatctctagttct

SEQ ID NO: 123345 - DNA, 1421 bp, Zea Mays
gcacggccaaaaagttgctcgcccagcagccagcgccttcaccagatcgagcaaaacagctcagctcagctcgacctaccactacctcccgcttggcgcctgggactggcaaccggcgtgcgcagaatgctgcccaccgggtgcaggtgcagcctcctctcctgcctccgccgcgacaagggcgaggcgggccgaaccgacccccgcgtcgcggacgagcccaccgcgtcgtcgctcggcaagggcagcgccgcggctcggcggttcgcgtgggccgagatcgagtccgtcacggcggggttctcgtccagggtcatcggccagggcggcttcagcaccgtgtacctggcctgcctctcctcctcccgcctcggcgccgtcaaggtgcagcgcagcagcgagcgcctccaccgcgccttccgccaggagcgcgacgtgctcctcgcgctccgacacccgcacatcgtccgcctgctcggatactgcgacgaacgagaggaaggcgtgttggtgttcgagtacgccccgaacggcgacctccacgggaggctccacggcagcggcggcaaggcgacgctgccgtgggcgcgccgcctggcggtcgcgttccaggtggccatggcactggagtacctgcacgagagccgcgacccggcggtggtccacggcgacgtcaaggcctccaacgtgctgctcgacgccagcctcgacgccaagctctgcgacttcggctccgcgcacgtcggtttctcggccgcgctgcagccgccggaggccgcggcggcgtccagggcgtcgtcggcacgcgcacgccccgaccccgtcgtgggctccccgggctacgtcgacccactcttcctccgctccggcgtcgccaccaggaagagcgacgtgtacagcttcggcgtgctgctgctcgagctcctcacggggcgggaggccatatgcgccgacacggggtgccgcctcgccgccgcggtgggtcctacgctcagcgaaggagaagtggccgacgtggtggaccggaggctcggagacgagtacgatgcccatgaggccgcgaccgtggcggcgcttgcgctgcggtgcgtcagcgagggctccgggatgcgcccctccatgacggaggtggttcgcgtgctccaggagaagacgaccgcgctgatctcagccgcggggtgcaggccagccggcaagatggattcttgagctgtattgttacttgttagacgaagactgtaaatactagctttgtttagagagagtataaggtgaagataatggctcttttcttttttactcaaagtggattagtagttgttgaattggattacgttgaaaaattgatgtcagagttcgttgtagatggtctgtagtgtctcgttaatccaatcgccaagttaatctttaccaatccgttg

SEQ ID NO: 123346 - DNA, 817 bp, Zea Mays
gcacggccaaaaagttgctcgcccagcagccagcgccttcaccagatcgagcaaaacagctcagctcagctcgacctaccactacctcccgcttggcgcctgggactggcaaccggcgtgcgcagaatgctgcccaccgggtgcaggtgcagcctcctctcctgcctccgccgcgacaagggcgaggcgggccgaaccgacccccgcgtcgcggacgagcccaccgcgtcgtcgctcggcaagggcagcgccgcggctcggcggttcgcgtgggccgagatcgagtccgtcacggcggggttctcgtccagggtcatcggccagggcggcttcagcaccgtgtacctggcctgcctctcctcctcccgcctcggcgccgtcaaggtgcagcgcagcagcgagcgcctccaccgcgccttccgccaggagcgcgacgtgctcctcgcgctccgacacccgcacatcgtccgcctgctcggatactgcgacgaacgaggtaacaacacacatccatcgtcatcaactgatcatctagctccacactggagctagctacgagaggacgggagcttcaaatccatagactgaggagctagctaacacaagcgagtttcttttctcttcctcttcctctcgatctccctgcgtgcgtacgtgcagaggaaggcgtgttggtgttcgagtacgccccgaacggcgacctccacgggaggctccacggcagcggcggcaaggcgacgctgccgtgggcgcgccgcctggcggtcgcgttccaggtggccatggcactggagtacctgcacgagagccgcgaccc

SEQ ID NO: 123347 - DNA, 714 bp, Zea Mays
atgagggccagcttgcaccgtggtcatgcccgagggcgggggcggcagaggcggcgccgaggcgtgcagcgcctcgagctgcgagaagaagcggtagctcttgccgtcctggcgcccggcgcgggcgtccttggtgcgcctgtagtacttgtccacgttctcgaacttctccttgcacttcttggcgctccggtggtaacccagccctgcaagcttccttgcgacgttctcccagagcggcgctttgagcggggagctccggaagtcggcgtccatctccgtccggatcctgatgagcgccagcgtctcctcgcgcggccaccggttgccggacgctcccgcgccgctggcgcccaagtcggcctgcatgtcttcgtcctggagtctgaccgccacaccggcgccggagccgcccgctgccaattcctcgaaattagcgctcgaccccgccggctgcaactgcatcgtcggcagggctgggatggcggcggtgacagacacggcgagccccgtcggcgtcggcgagaacggggccgtgcccgtgcccgtgccagccgtctccggggccatgtacggggacccggcgccaccgtggtggtgcagcatggccgccgccacctttggttccggcccctctggacgacgggttatgacggaaactggcagcgagggggctgtgcagctagggggaggaggaagaaggggcagtggtga

SEQ ID NO: 123348 - DNA, 1905 bp, Zea Mays
tcatctccctgtcgcactcgcccccgctgaggccctcctcccccgcaccagagtcgtcgtcgtcgtcgtccgagtcgtactctgagtcggactcggacatcgacgagaagctgaggtccggcaggccggcgacggcggcagggcccagcaccgtagggcccgccgtccatgccatttccatcggctgatgagggccagcttgcaccgtggtcatgcccgagggcgggggcggcagaggcggcgccgaggcgtgcagcgcctcgagctgcgagaagaagcggtagctcttgccgtcctggcgcccggcgcgggcgtccttggtgcgcctgtagtacttgtccacgttctcgaacttctccttgcacttcttggcgctccggtggtaacccagccctgcaagcttcctgcagaaagaatgtgccccagcacggccgcgcctgttagctctttctcgcgttcacgtctcaacgagcaggagtcatgaagaggtgatgacttggttgtgtgcgcggaggagtatctttcattcttcctctttccctgaaagggactggacggacgctgaaggaattggaatttttagaagcggatcggagacagacatgtaaagcgacgatggcggaagcatcagccaccagcagttttaggaatcagcacagagatgtggtgatgatgtcaagttgatggcatcgtgtccgaggaacaaagataaactaattcaagtgacgatgacagcgaaaacttggtgcatccatccaagtccaagtgtgttttaaaaggaagagagggaatagaagaaaaaaaagcattgcagctatatagcctgcaacaggcggcagctgctgccatagtctgtgcggccggcctgcgcctgtacgcagcacaatcacggcgcggcatacggctgcccgggcgccgagatccttatcgtgatgcctgcggctgcgctggctgcacctaccacttcactacgctccaatctcacatacaccggggaggagcattacgccaaaagcgtcgggggaaaaaaaagcagtgggcaaaagatagatggcaggatagctcgccatcatttcaccggcgacgccggacggagcagaggtgaaattccgtgaaaccgttagccgcattccgcagcaaaagagaggaaaagcttacggcttgctaatgctttctcaccttgcgacgttctcccagagcggcgctttgagcggggagctccggaagtcggcgtccatctccgtccggatcctgatgagcgccagcgtctcctcgcgcggccaccggttgccggacgctcccgcgccgctggcgcccaagtcggcctgcatgtcttcgtcctggagtctgaccgccacaccggcgccggagccgcccgctgccaattcctcgaaattagcgctcgaccccgccggctgcaactgcatcgtcggcagggctgggatggcggcggtgacagacacggcgagccccgtcggcgtcggcgagaacggggccgtgcccgtgcccgtgccagccgtctccggggccatgtacggggacccggcgccaccgtggtggtgcagcatggccgccgccacctttggttccctgcacaaaacaagaaattccgttgatccaccagctcgcaagacctagggaatagaaaattgcagcatcacttcaccggtactgcgactaagctagcacacagtccctctcctggctgtggactgtgtgtggtctacaactacgtactaccaactaacaattgtccaggaaaacaacccagggacagaattggggagaattcttgcttctacacccggccatctctctcagtccccttttccctcccgtctctcttctaggaacagagtgagtgagtgccacaagcaagattagagagacttacggcccctctgg

SEQ ID NO: 123349 - DNA, 2235 bp, Zea Mays
ctagaagaccttcgacgccgaagcatagacccaacaggtttcattaggcctagcaggtctccatgggcttccccagtattgtttgttgagaagaaggataaaagcaagcggctgtgtgtggattatcgcgctttgaatcaagtgacaatcaagaataaatattcgcttccccgtattgaggtcctctttgaacagttgaggggtgcccaggtgttctccaaaatttatttgaactctggttatcatcaattgaggattcgtgaggaggatattgagaagaccgccttttgcaccaggtatgggcattatgagttcatagtcatgtcttttggcttaactaatgcccctgctgcctttatggaagcaatgaataggatgttgcatgaattcctggacgactttgtggtcgtgttcctggatgatattctgatttattcaaagaccgaggccgagcatgagcagcatctccgtctcgttctgggtgctctaaggaagaatcagttctatggcaagttgaagaagtgtgccttttggctatccgaagtggctttcctggggcatgttattaatcaacagggcattgcggttgatcccaagaatgttgcggctgtggtggagtggaagagaccctctagtgtctctgaaatccgaagtttcttggggctcgctggatattatcggcgcttcgtaccaaatttttctagtattgctaagcctttgactagtctcttggagaagggtgtactcttcgtctggtccgacgattgtgaggtcagttatcagacatcgaagagcaagttggtggacgcccctatcctagctttgcctgagagcagtaagcatttcacagtttatacggatgcttcgcgtattggtcttggctatgtgttgatgcaggaaggcagagtgattgcttatggctcaaggcagttgaggaagcatgatgggaattacccaactcatgatcttgaattggctgcagtggtttttgctctaaagtcgtggaggcattacctttatggcgaggcttgtgacatttacaccgatcataaaagtctcaagtatatttttactcagaaggagctgaatttgaggcagcgtcggtggctggaattgattaaagattatgatttgtccattcattatcactcggggaaggctaatgtagtggctgatgcccttagcaggtccgaggttccaaaggtggccttgccgttgatcgctgatctagaccgtttgggaatcactttgtgttatgtcggcaccgctagcgaggagactcggatgcttattcaatcctctctcatggagagagtgcgtgcggctcagcagcaggatcgtctattgcaggaagctcgaaagagggttggtgatggtaaaccacgggagttcaccattgatgagaatgatttgtttcgttttaggggccgcctctgtgtgcctcagaaattagaggtgaagatggatatcttgagagaagctcataaaacgccttacaccgtccaccctggcgaaaccaaaatgtaccgagatttgaagcaaaacttctggtggaagcggatgaaggttgacgtttctaagtatgtggccgcctgtgaagtatgtcagcgcgtgaaggccgagcataagcggcctacaggttttctgaagccattagaaattccatagtggaaatgggagcatatcaccatggattttgtggtgggtctacctcgttcccctcgtggcagggatgttatatgggtggtagtggatcgcttgtctaagtctgcgcattttattcccatgaagaccacaaattcaacttcagatttggttcccttgtatatgaaggaagtagtcaggcttcacggggtacctaagtctattgtttctgatcgagactccaaatttgtatccaaattctgggagagtcttcatagtgcattgggcaccaagctttcgcttagtgtcgcttttcaccctcagactgatggtcagtcagagcgaacaatccaaaccttggaagatatgttgcgttcttgtgttctgtcatggaagggtagctgggaggatcatcttgcactggtagagtttgcttataacaacagctaccaggctagcatcaagatggcaccatttgaggctttgtatggcaggcggtgtatctctcctctgtgctgggagactttgggagagagatccctggttggtcctgattgggttcagcagacttctgaaaaggttcaggaaatt
